United States Patent Application Publication US 2007/0105122 A1 - sequence listing, part 6

SEQ ID NO: 12177 - DNA, 4170 bp, Homo sapiens
  CDS (93)..(3560)
ctcttcccttaggtgtttaagttccgcgcgcaggccaggctgcaacctgacggccagatccctcgctgtcctagtcgctgctccttggagtcatgttcccagccgccccttctccgcggaccccgggtaccgggtcccgaaggggcccgctggccggactcgggcccggctccacgccccggacggctagcaggaagggtctgcccctggggtctgcagtcagctccccagtgctcttctcgccggtcggccggcgtagctcgctaagctcggggggaacaccaacacgaatgttcccacaccactccataactgagtctgtgaactatgatgtgaaaacgtttggatcttctcttcctgttaaagtcatggaagccctaacattggctgaagtcgatgaccagctgaccattaacatagatgaaggtggatgggcttgtctggtgtgcaaagagaagctcattatttggaagattgctctgtcacctattactaagttatccgtttgcaaagaacttcagctgccatctagtgatttccactggagtgccgacttagtggctctttcttactcttctccctcaggtgaagcacattctactcaggctgttgctgtcatggttgccaccagagaaggatctatccgctattggccaagccttgctggtgaagatacctacacagaggcttttgtagattcgggaggtgataagacttacagtttcctaacagcagtgcagggaggaagttttattttgtcttcatcaggaagccaactaattcggttgatacctgagagctcaggaaagattcatcagcatatcctgcctcaggggcaaggcatgctttcaggaattggtcgaaaagtttcttctctttttggaattttatctcctagtagtgatctcacactttcaagtgttctctgggatagagagagatcaagcttttatagcctgacgagttcaaacatcagtaaatgggaattagatgattcttcagaaaagcatgcatacagttgggatataaatagagccctgaaggaaaacattaccgatgctatttggggatctgaaagtaactatgaagctattaaagaaggagtcaacattcgatatttggacttgaagcaaaactgtgatgggctggtgattttggcagcagcatggcactcagcagacaatccatgtctcatctattactctctgataacaatagaagataatggttgccaaatgtcagatgcagttactgtagaagtcactcaatataatccaccttttcagtctgaagacctgattttgtgtcagttgacggtcccaaacttttcaaaccagactgcctatctgtataacgaaagtgctgtctatgtgtgctccacaggaactgggaaattttctcttccccaggagaaaattgtctttaatgcacaaggagatagtgttttaggtgctggtgcctgtggtggtgttcctatcattttttctagaaacagtggactggtgtctattacttcaagggaaaatgtgtctatattggcagaagacttggaagggtctttagcatcttcagttgctggaccaaacagtgagagtatgatttttgagaccactacaaagaatgaaactatagcccaggaagataaaatcaagttgctgaaagctgcctttctgcaatactgcagaaaagatttaggtcatgctcaaatggtggttgatgagctcttttcctctcactctgatttggattctgattctgaactagacagggcagttacccaaatcagtgtagacctgatggatgactacccagcatctgacccacggtgggctgagtctgtccctgaggaagcacctgggttcagcaatacgtcactgattatccttcaccagctagaagacaagatgaaagctcactcttttcttatggactttattcatcaagttggcttatttggacgtctaggcaattttccagttagagggacaccgatggccactcgactgttgctctgtgagcatgccgaaaagctgtcagccgccatagttctcaagaaccaccactcccggctttctgaccttgtcaacacagccatattgattgctttgaacaagagggagtatgaaatcccatccaacctgactcctgcagatgtctttttcagggaggtatcccaagtagataccatctgtgagtgcttactggagcatgaggagcaagtcttgagggatgcacctatggattccattgaatgggctgaagtggtgatcaatgtgaacaatattctcaaggatatgctgcaggctgctagtcattatcgccaaaatagaaactctttgtatagaagagaagaatcactagaaaaagaacctgaatatgttccatggacggcaacaagtggtcctggtggcatccgaacggtaataatacgccagcatgagattgtcctgaaggtggcttatccacaggcagacagcaacctccgaaacatcgtgaccgagcagctggtagccctgatcgattgcttcctggatggttatgtttctcagcttaagtctgtggataaatccagtaatcgggaaagatatgacaatctggagatggaatacctacagaaaagatcagatctcttatctcctcttctttcactaggccagtacctgtgggctgcttctctagcagagaaatactgtgactttgatatattggtacaaatgtgtgagcagactgacaaccagagccgactccagcgctacatgacccagtttgctgatcagaatttttcagactttctcttccgttggtatctggagaaaggaaagcgaggcaaattattatctcagcccatttctcagcatggacagttggcaaattttttgcaagctcatgaacatctcagctggttacatgaaattaatagccaagaattagaaaaggctcatgcaacacttctgggtttggcaaatatggaaactcgttactttgcaaagaagaaaacccttcttggcttgagtaaattggctgcattagcttcagacttttcagaggatatgctacaagaaaaaattgaagaaatggctgagcaggagcgctttctactgcatcaggagaccctacctgaacagctgctggcggagaaacagctaaatctcagtgcgatgccagtattgactgcaccacaactcattggtctatatatctgtgaagaaaatagaagagctaatgaatatgatttcaagaaagctttggacttgttggaatatattgatgaggaagaagatataaatataaatgatctaaaactggaaatcctttgcaaagctcttcagagagataactggtccagttctgatggcaaagatgatccaattgaagtatctaaagacagtatatttgtgaagatcttacagaaacttttaaaagatggcattcagctcagtgagtacttaccggaggtgaaagacctgctacaagcggatcagcttggaagcttaaagtccaatccttacttcgagtttgttttgaaagcaaattatgaatattatgttcagggacaaatataactttttctaaaaatggccattgtttatgaaatctgtataagtgtgtccttatacaaattttaggctataaacaagtgtaagtttgtacaatttcataacatgtatagctgagtttttatactttatatgtaggaagctaatataaaatagttatgtaactgtgattttggttttcagttatgtgacttgttttttccacctgaaatgtgtcagttgttgttcctgtactcggtgccctttctttttactctcacgtggtcccaggttctggagttcttgtcctggttctagctgctcacatgtacaaatcacttctaggcctcagttttctgcgactatgaaaattactagattgcactagcttgtctctaaaattgctgtgactccagatactttgcactgaagagaatctagggtgtttgatatctgtttcagttagggctaatgggaaatgtctagtaagataaatgtcaacttttgctgacttattatgagatgaaaaaccaaaggagagtgggcctaactcatgtgagcttgataactgatgaactcattgggagcattttaaacttttctacataaataataaatgagcactaatgaaagt

SEQ ID NO: 12178 - protein, 1156 aa, Homo sapiens [sequence omitted]

SEQ ID NO: 12179 - DNA, 2773 bp, Homo sapiens
  CDS (394)..(1779)
atgtgatgcatgctcacgtgtctccgcagccggctcgggaaagaatcccccaagctccatttcatgagtaagcgtgagagccgctcagtttcctccagctctgctgaagccagcacagaagtagcccaaactcttccctctgctgacagcaaattttaggcaaagtcttgagaaagaagaaattgggtccagaaagggaagtgaggagaatcagatcccagacctttggggagaaggagcaaccgcctctggcacagcccatcagggagaaagagcaggttgagaagagtcctaagctaacagccccaaacaggtgggtgttgctcagctccctgaggcatgtggttgtaaggcagaacccacagaccttgcaggaagaaggctctcggggccatggcccaggtcagcatcaacaatgactacagcgagtgggacttgagcacggatgccggggagcgggctcggctgctgcagagtccctgtgtggacacagcccccaagagtgagtgggaagcctctcctgggggtctggacagaggcaccacttccacacttggggccatcttcatcgtcgtcaacgcgtgcctgggtgcagggttactcaacttcccagcagccttcagcactgcggggggcgtggcagcaggcatcgcactgcagatgggtatgctggttttcatcatcagtggccttgtcatcctggcctactgctcccaggccagcaatgagaggacctaccaggaggtggtatgggctgtgtgtggcaagctgacaggtgtgctatgtgaggtggccatcgctgtctacacctttggcacctgcattgccttcctaatcatcattggcgaccagcaggacaagattatagctgtgatggcgaaagagccggagggggccagcggcccttggtacacagaccgcaagttcaccatcagcctcactgccttcctcttcatcctgcccctctccatccccagggagattggtttccagaaatatgccagcttcctgagcgtcgtgggtacctggtacgtcacagccatcgttatcatcaagtacatctggccagataaagagatgaccccagggaacatcctgaccaggccggcttcctggatggctgtgttcaatgccatgcccaccatctgcttcggatttcagtgccacgtcagcagtgtgcccgtcttcaacagcatgcagcagcctgaagtgaagacctggggtggagtggtgacagctgccatggtcatagccctcgctgtctacatggggacaggcatctgtggcttcctgacctttggagctgctgtggatcctgacgtgctcctgtcctatccctcggaggacatggccgtggccgttgcccgagccttcatcatcctgagcgtgctcacctcctaccctatcctgcacttctgtgggcgggcggtggtggaaggcctgtggctgcgctaccagggggtgccagtggaggaggacgtggggcgggagcggcggcggcgagtgctgcagacgctggtctggttcctgctcaccctgctgctggcgctcttcatccctgacatcggcaaggtgatctcagtcattggaggcctggccgcctgcttcatcttcgtcttcccagggctgtgcctcattcaagccaaactctctgagatggaagaggtcaaaccagccagctggtgggtgctggtcagctacggagtcctcttggtcaccctgggagccttcatcttcggccagaccacagccaacgccatctttgtggatctcttggcataaccactgcctcccagggaacacaaggcctttgccattggtcgcaggaacccatctcttagagctatggggccattcttagtccacgatcattccaactggtgggatgacatccggacatcctcttccagggactggggcaaactcaggccccacacctctggacagctcaaatccagtccccttcctgctccccagtcctggcagtgccgtggatggcggcaggaagtctcacatcatagaggacccctcctcctctcccagttctcaacttctccatgcctggaatccacgggtgaagagagtcggtagatctcataagaaagaatccagtctgacttccctctggagaatgactatggacagaaggccaccatcctccacagagcaccctgtcctgagtaggggttgtgctcattaccccaggccagtggtagcttcctcaggagcctggccacttccaaaggtagcactgaagtcgtgcaaatacatagtcaggtagattcagaccttgtccacaccttcctgggcaacccccaccatgaacctgtcagcctctttcccatagctaatagacatttcccaggccttgaggggccccaccctgtctctttcatcaaacctgatggtccaggctgggcatccctctcctcctccatccccagacatcaccaggtctaatgtttacaaacggtgccagcccggctctgaagccaagggccgtcccgtgccacggtgctgtgagtattcctccgttagctttccccataaggttgggagtatctgcttttgtgtctgagatgggcccctcttttcagaggccgcagggtgggtgatggagaaggctgagaacctttcagaccctctgtgtgggctgggctggtcagaatcagggtgtacctccccgacaccttctttttcagtgatgttttctcttctccctgcctttcctctgcctcctcccctgccagccctagcgtgactacccagagac

SEQ ID NO: 12180 - protein, 462 aa, Homo sapiens
MAQVSINNDYSEWDLSTDAGERARLLQSPCVDTAPKSEWEASPGGLDRGTTSTLGAIFIVVNACLGAGLLNFPAAFSTAGGVAAGIALQMGMLVFIISGLVILAYCSQASNERTYQEVVWAVCGKLTGVLCEVAIAVYTFGTCIAFLIIIGDQQDKIIAVMAKEPEGASGPWYTDRKFTISLTAFLFILPLSIPREIGFQKYASFLSVVGTWYVTAIVIIKYIWPDKEMTPGNILTRPASWMAVFNAMPTICFGFQCHVSSVPVFNSMQQPEVKTWGGVVTAAMVIALAVYMGTGICGFLTFGAAVDPDVLLSYPSEDMAVAVARAFIILSVLTSYPILHFCGRAVVEGLWLRYQGVPVEEDVGRERRRRVLQTLVWFLLTLLLALFIPDIGKVISVIGGLAACFIFVFPGLCLIQAKLSEMEEVKPASWWVLVSYGVLLVTLGAFIFGQTTANAIFVDLLA

SEQ ID NO: 12181 - DNA, 4684 bp, Homo sapiens
  CDS (53)..(1060)
actggcgtccggcgtgtaccgagagactggcgtccggtgtgcaggtggccacatggatcctggcagccggtggcggaacctgcccagcgggcctagcctaaagcacttgactgacccctcttatggaatcccgcgggaacagcaaaaggcagcgttgcaggagctgacgcgggcgcacgtggagtccttcaactacgctgtgcacgagggtctcggcctcgcggtgcaggctatacctccctttgaatttgctttcaaagatgagcgtatctcttttactattctggatgctgttatcagtccacctacagttccaaaagggaccatctgcaaagaggccaatgtttatccagcagaatgccggggccgaaggagtacctaccgtgggaagttgacagctgatatcaactgggcagtgaatggaatctcaaaaggaatcattaagcagtttcttggctatgttcccatcatggtgaaatccaagctttgcaacttacgtaaccttcccccacaagccctcattgagcaccatgaggaggcagaggaaatggggggctattttataatcaatggcattgaaaaagtcatccgaatgttgattatgcctcggagaaattttcccattgcaatgataagaccaaaatggaaaaccagagggcctggttatactcagtatggagtttcaatgcactgtgtgagggaagaacattccgctgtcaatatgaacctccactacttggaaaatggcacagttatgttgaactttatttaccgaaaagaactgttctttcttcctttgggatttgcacttaaggcacttgtcagcttttctgattatcagatctttcaggagctcatcaaaggaaaagaggatgattctttccttaggaactctgtttctcagatgttaaggattgtaatggaagagggttggttgacacaaaaacaggtccttaactacctaggtgaatgcttcagagtaaaactcaatgttcctgactggtacccaaatgagcaagctgcggagttcctgtttaaccagtgcatctgtatccacttgtaatccaatactgaaaagttttatatgctttgtctcatgacgcgaaagctctttgctttagccaaaggagagtgcatggaggacaatcctgatagtttggtgaaccaggaagtcctcacaccgggtcagctcttccttatgttcctgaaggaaaaactggaaggttggttagtgtctattaaaatagcttttgataagaaggctcagaagaccagtgtttccatgaacactgacaatttgatgaggatttttacaatgggcatagaccttacaaaaccatttgaatacctttttgctactgggaatctgcgttctaaaacaggtcttggcctcctacaagattctggactttgtgttgtggctgacaagctgaacttcatacgctacctctcccatttccgctgcgtgcacagaggggctgattttgccaagatgaggaccaccacagtacgcaggctgctgccagagtcctggggcttcctttgtcccgtgcataccccagacggggagccctgtggcctgatgaaccacctaactgccgtatgtgaggtcgtcacacagtttgtgtatacggcatctattccagctttactgtgcaacttgggggtcactcccattgatggagctccccaccgatcatacagtgagtgctaccctgtcctgctggacggcgtcatggttggctgggtggataaggatcttgctccaggcatcgcagattctcttcgtcattttaaggtgttgagagagaaaagaattcctccctggatggaagtggtccttatacccatgacaggaaaaccaagtctgtacccaggattgttcctttttaccactccttgtagactggtacggcctgtgcagaacttagcattgggcaaagaagagctaattggaactatggaacagatcttcatgaatgtcgctatctttgaggatgaagtttttgctggagttaccacacaccaggaactctttccacacagcctgctgagtgtgattgccaacttcatccctttctctgatcacaaccagagtccacggaacatgtaccaatgccagatgggtaagcaaactatgggctttccacttctcacttatcaagaccgatcggataacaaactgtatcgtcttcagactcctcagagtcccttggtgagaccctccatgtatgattattatgacatggataactatccaattgggaccaatgccatcgttgctgtgatttcttacactggctatgatatggaagatgccatgattgtgaataaggcctcttgggaacgaggctttgcccatggaagtgtctacaagtctgagttcatagacctctctgaaaaaattaaacaaggagatagtagcctggtgtttggcatcaaacctggtgacccacgcgttctgcagaagttagatgacgatggattgccgtttataggagcaaaactgcagtacggagatccgtattacagctacctcaacctcaacaccggggaaagttttgtaactggatgttgtttaacttgatgttgaccttttggattaagaggactatcagattaaagcaaaatgtaattttaattcaatgaagatatcattaccaggttactcttgagatttttcaacggtgttagaactctcaaccaagacctgaaaaccaagtatgcaaggtttctgaatctctctggtagattaactattgacaatgattttctgttatctttgttcaaaaagttcatgtcttctcaaaatatgaaatattgataaatggaagagcatacggtgacaagtctcctttccaaccccaggttccctacaccctgctctcagcaggcagtgagtgtcacacacctgttaatccatcttgagcaggacagtactatacaaatagaatgcaagctgtaatgtaattttatattttcttatagccacgttgaagtaaaaacaaacaggtacagtgttttttaccagctttatagaagtacagttgttacatatttaatgaatacaatttgatgggtctgactatatgcacacacctttgataccatcaccacaatcagggtaataaacatacctgtcatctccacaagtttcctcctgcccctttgttttttgctttttggttgctgttgagtttttgttttgtcttctgtggtaagaacacctaactcaagacctaccctcttaacaaatctttaagtgcacgatatagtattgttaattccaggcaccatgttgtacaacagatctttagaccttacttgtcttgcataactgaagctttatacctgttgaacaactctccatttccctggcccctagcaaccacccttctaccctgtttctatgagtttgactattacagatatctcatatagtgggatcatgcaatatttgtcctgtgactggcttatttcacttagcatagtgaaataagattcatccattttggaagccaggcatggtgctgtgcatctatagtccctgctatttgagaggctgaggtgggaggatcatttgagtgcaggagttcaaggacagcctgggtaatataggaagaccctgtcttaaagaccctgacctcaagtgatccacccacctcggcctccgaaagtgctaggattacaggtgtgagccactgtgcctggcctccggtgagtattttatatttagtctacacttccatacttggcttttttctgcttttatattgatctgctttcatagcagtgtgtagagtgccacttatgttttctttcttgtgtacagtattttattgtatggatttaccatcccctgtgtatttaagttgttccattctttggccattataacttttttctgcaaatattctggtgacttatctttggccattataaactgttgataatagatcatcttgtatatacttctgcaattataagatgttttttgatgatgagagctttcctaaggtaattctttcctgagtttggttcagatggtctgtcactaattataaggcagataggaacagacagaaaaatctatcatttcaagataggcttagcaggatgggcgcagtggctcacgccactaatcccaacattttaggaggcctaggcaggagcaatcacttgtgcctgggagttctagactagcctgggcgagacttcatctctacaaaaaaagcaacaacgacaaaaaaaattagccaagcatagtggcacacccctgtagtcccagctacttgggaggctgaggtgggaggattgcttgaacccaagaggtcgaggctgcagtgagccaagattgtgccactgcactccagcctgggtgacagagcaggaccctgtctctattttataaattaaaaaaggctgggtgtggtggctcacacccataatcccaacactttggctcagcagattgcttgaacccaggaattcaagtccaatctgggcaacatggggaaaccccagctctacaaaaaaaattagcctggtgtggtggcacatgcctgtagttccagctactcaggaggctgaggtgggagaatctcctgagcctggaaggtccaggcagtgagccaagattgtgccaccacactccagcctgggcgacagaatgagaccctgtctc

SEQ ID NO: 12182 - protein, 336 aa, Homo sapiens [sequence omitted]

SEQ ID NO: 12183 - DNA, 3569 bp, Homo sapiens
  CDS (1182)..(3227)
atacggtgcaacgggtccgcgggactcttggatgcgcggaggtcccgagaccaggtgcgtgtgctaagctcaggtctgagcacggtggatcccatgggtgtggctctgaggaaattgacgcagtggactgctgccggacatggaactggaatcctcgaaatcacccctctaaatgaagcgatattgaaagaaattattgtgtttgtggagagttttatctataaacatcctcaagaggcaaaatttgtttttgtggaaccacttgaatggaacacaagtttggcgccctcagcatttgaatcaggttatgttgtcagtgaaacaacagtcaaatcagaagaagttgataaaaatggacagcctttgctatttctctctgtaccacaaattaaaattaggagctttgggcagctgtcacgcttgttacttattgccaaaactgggaagttgaaggaagcccaagcatgtgttgaagctaacagagaccccatagtaaaaatcctgggctctgattataatacaatgaaagaaaactcaattgcattaaatattcttggcaaaattaccagagatgatgatcctgaaagtgaaattaagatgaagattgctatgctgcttaagcaattggatctgcacctcctcaatcattctctaaaacatatttcattagaaataagtttaagtcccatgacggtgaagaaggatatagaactgctcaaacgtttctcaggaaaaggaaaccaaacagtcttggaatctattgaatatacctcagattatgaattttcaaatggatgtcgagccccaccgtggagacaaattcgtggggaaatttgttatgtgctggtgaaacctcacgatggtgagactctgtgcattacttgcagtgcaggaggagtatttttaaatggtggcaaaacagatgatgaaggggacgttaattatgagagaaaaggttcaatttataaaaaccttgtcacatttttaagagaaaaatcaccaaaattttcagaaaatatgtctaaattgggaattagcttcagtgaagaccagcaaaaggaaaaggatcagcttggcaaagcccccaagaaggaagaagcagctgccctccgcaaagacatttctggttcagacaaaaggtcacggtggagaagaaccaaattaatttttggaggaatcaaatgaccaagagatgggaaccaagcttaaactggaagaccactgttaattacaaaggcaaaggctcagcaaaagaaatccaagaggacaaacacacaggaaaacttgaaaaaccaagaccatctgtttcacacggaagagcacaattacttcggaagagtgctgaaaagattgaggaaactgttagcgatagctcctcagaaagtgaggaagatgaagaaccacctgaccatcgtcaggaagcaagtgcagatttgccatcagaatattggcaaattcagaagctggtgaaatatttaaagggaggaaatcaaacagctacagtgattgcgttgtgttcaatgagggatttcagcttagctcaagaaacctgccagttggccatcagagatgttggaggcctggaagtgctgataaatttgcttgaaaccgatgaagtcaaatgtaagattggttcattaaaaatactgaaggaaatcagtcataatcctcaaatcagacagaatattgttgaccttgggggcttaccaattatggtgaatatacttgattctccacacaagagtctaaaatgtttggcagccgagactatcgcgaatgttgccaagtttaaaagagcacggcgggtggtgaggcagcacgggggtatcaccaaactggttgctctactagactgtgcacatgattccacaaaacctgcccaatcgagtctgtatgaggccagagacgtggaagtggctcgctgtggggcactggccctgtggagctgcagtaagagtcatacgaataaagaagccatccgcaaagctgggggcattcctctgttggctcggctgctgaagacttctcatgaaaacatgctaattccagtggtggggacattgcaagagtgtgcatcagaggaaaactaccgggctgcaatcaaagcagaaaggatcattgaaaaccttgtcaagaacctaaatagtgagaacgagcagctgcaggagcactgcgccatggccatttaccagtgtgctgaagataaggaaacccgggacctcgttaggctgcacggaggacttaagcccttggccagtctactcaataacactgacaataaagagcggttagctgctgtcacaggggctatatggaaatgttccatcagcaaagagaatgttaccaagtttcgggaatacaaagccattgaaaccttggtgggacttctaacagatcagcctgaagaagtacttgtgaatgtggttggggccttgggagaatgctgccaagaacgtgaaaaccgagtcattgtccggaaatgtggtggcattcaaccacttgtgaacctccttgttggaataaaccaagctcttcttgtgaatgttacaaaagcagttggtgcttgtgcagtagaacctgaaagtatgatgataattgatcgcttagatggagttcgtttgttgtggtccctgctgaaaaatcctcacccagacgtgaaggccagcgcagcatgggcactctgtccatgcatcaaaaatgcaaaggatgctggggaaatggttcgttcctttgttggtggtttggaacttattgtcaatttactgaaatcagataacaaagaagttctggcaagtgtatgtgctgccattaccaacatagcaaaagatcaagaaaatttagctgttatcacagatcatggagttgttcctttattgtccaaactggcaaatacaaataacaataaattgagacatcatctagcagaagctatttcacgttgctgtgtgtggggcaggaatagagtggccttcggtgagcacaaagcagtggctccactagtgcgttatctgaaatcaaatgacaccaacgtgcatcgggcgacagctcaggccttgtaccaactctcagaagacgccgataactgcatcaccatgcatgagaatggtgcagtaaagcttctactggatatggttgggtcccctgaccaggatctccaggaagctgcagctggttgtatatccaatatccgcaggctggctcttgctacagagaaggcaagatacacttgaaatttaaatggacattacaagctatcaaattctacatgacacaggacatgtcactcccatggccagaaagcctaaattgggaaacagttgttagcaaaccctttcaaccatctaaacgaaaacacacaagttgaaaatgcacagaatgtttttcatctgaaaattgcatggagacttttgtttctatttaatgttttcgagatatgacatgtgataagatggaaagccaataaacctgtgataagtttctaagaatatgagaatatacgtatatgatgtatttttagttcagtgatgcttttgtatttgtggcgattttaataaaggatatggccttcc

SEQ ID NO: 12184 - protein, 682 aa, Homo sapiens
MTKRWEPSLNWKTTVNYKGKGSAKEIQEDKHTGKLEKPRPSVSHGRAQLLRKSAEKIEETVSDSSSESEEDEEPPDHRQEASADLPSEYWQIQKLVKYLKGGNQTATVIALCSMRDFSLAQETCQLAIRDVGGLEVLINLLETDEVKCKIGSLKILKEISHNPQIRQNIVDLGGLPIMVNILDSPHKSLKCLAAETIANVAKFKRARRVVRQHGGITKLVALLDCAHDSTKPAQSSLYEARDVEVARCGALALWSCSKSHTNKEAIRKAGGIPLLARLLKTSHENMLIPVVGTLQECASEENYRAAIKAERIIENLVKNLNSENEQLQEHCAMAIYQCAEDKETRDLVRLHGGLKPLASLLNNTDNKERLAAVTGAIWKCSISKENVTKFREYKAIETLVGLLTDQPEEVLVNVVGALGECCQERENRVIVRKCGGIQPLVNLLVGINQALLVNVTKAVGACAVEPESMMIIDRLDGVRLLWSLLKNPHPDVKASAAWALCPCIKNAKDAGEMVRSFVGGLELIVNLLKSDNKEVLASVCAAITNIAKDQENLAVITDHGVVPLLSKLANTNNNKLRHHLAEAISRCCVWGRNRVAFGEHKAVAPLVRYLKSNDTNVHRATAQALYQLSEDADNCITMHENGAVKLLLDMVGSPDQDLQEAAAGCISNIRRLALATEKARYT

SEQ ID NO: 12185 - DNA, 2650 bp, Homo sapiens
  CDS (113)..(1633)
gacctgaccgcaagaggccaatggagtgtgggagctgaaagggtcttcgctggcggccggacagtactgcttttaaagagacagtgttagggatcttggaagcacagccaacatgtgtgacattgaagaagccactaaccaactcctagatgtgaaccttcatgagaaccagaagtctgtacaagtgacagaaagtgacctcggaagtgaatctgagcttctagtcactattggagccactgtacctactggctttgagcaaacagctgcagatgaagtcagagagaaacttgggtcatcatgcaaaatcagcagagaccgtggcaagatatattttgtcatttcagtggaaagtctggcacaggttcattgtctgagatcagttgataacttatttgtggtggttcaggagtttcaagattaccagttcaaacaaacaaaggaagaagttctaaaggattttgaagacttggctggaaaactcccatggtcaaaccccttaaaagtgtggaaaattaatgccagttttaaaaagaaaaaagcaaagcgcaaaaagataaatcagaattcaagtaaagagaagattaataatggacaagaagtcaaaatcgatcagagaaatgttaaaaaagagttcactagccatgctttagattctcatatcttagattattatgaaaatccagccatcaaagaggatgtatcaacattaataggtgatgatttggcatcttgcaaagatgagactgatgaaagctcaaaagaagaaactgagcctcaagtgctgaagtttagagtcacatgcaacagggcaggagagaaacattgctttacctcaaatgaggctgcaagagattttgggggtgctgttcaagattattttaagtggaaggccgacatgaccaactttgatgtggaggttcttttgaacatccatgataatgaagtcattgtgggcattgcattgactgaagagagtctccaccgaagaaatataacacattttggacctacaactcttagatcaactcttgcctatgggatgctcaggctctgtgatcctctaccttatgatataatagtcgatccaatgtgtggaactggggcaataccaatagagggggccactgaatggtctgactgtttccatattgctggtgataataatccactggctgtgaatagagcagcaaataacattgcatctttattgaccaagagccaaattaaagaaggcaaaccctcctggggcttgcccatagatgctgttcagtgggatatctgcaatctgccattgagaactggctctgtggatattattgtaacagatttgccatttggaaaaaggatgggatccaagaagagaaactggaacctttatccagcttgcctacgcgagatgagccgtgtctgcacacctaccacaggccgagctgtactacttactcaagacacaaaatgctttaccaaggcgttatctggaatgcaacacgtatggcgaaaggtggatacagtctgggtgaacgttggtggtcttcgtgctgcagtttacgttctgatacgtacacctcaagcttttgttcatccttcagaacaagacggagaaagtggaactctttggcaatgcaaagaatgaagatgactaatagtacttgtacttcccaccactggaaatgttagcataaaagaacttggagaggaaaaaagtattaacaaaactgcagtctgcactctttaaacctgtttaaggctcttcatcctggttagcaaaaggtgtgaatgtaatgtgatggaatttaaaagttttatgagaccaggcacagtggctcacgactgtaattccagcagtttaggaagccgaagtgtgcagatcacctgaggtccggagaccagcctggccaacatggtgaaaccctgtctctactagaaatacaaaaattagccaggtgtggtggcgggcgcctgtaatcccaactactcaggaggctgaggctagagaatcacttgaacccagcaggcggaggttgcggtgagtcgagatcacgccattgcactccagcctgtgcgacaagagcgaaactctgtctcaaaaagattttataagaaagcagagcttttccttgaagctcttttgaagtggtagcttaattagtattttgttgaaaatactttaaagatgcctagtgaaaagcctactaaagtgctgtgagattggggtttagaacattttattttcaggctttatggcctattttccattgtgtcaagtgcaaaactaccctggcccaaaggaagggcagagaacataattacatcttaggccacatttcattctttgcagctttgctaatccagttgctcaagttctttacctcaacctgaaggaatgaagcattattacattttgtgaatggtgttcagcctataagacgaagtctcacaagacctataggaaagtttaccatctgccttaaatattaaaatatccatctgttattcacattaatacacagaatgaaaatagaggtctaggaattatcaaaggtactgcaaaaatactgtatagaacttatttgtaaatagcacatacattgatagatggggtgtgggaccaacaaaccaaattaaaagaaattgtttttctttcagt

SEQ ID NO: 12186 - protein, 507 aa, Homo sapiens [sequence omitted]

SEQ ID NO: 12187 - DNA, 2978 bp, Homo sapiens
  CDS (517)..(1371)
gtacaaaaccggagcctcgggccgggctgcgtgagggaggagggttcatcatgcctagtggcgtataagaagaccccgccaccggtccctccacgcaccacttcaaagccgttcatctcagtcacagtccagagcagtactgagtctgcccaggacacctacctggacagccaggaccacaagagcgaggtgactagccggtcgggcctgagcaactcgtcggacagcctggacagcagtacccgaccgcccagcgtgacacggggtggagtcgccccagcccctgaggccccagagccacccccaaaacatgcagctctgaaaagtgaacaagggacgctgaccagctctgagtcccaccccgaggccgcccccaaaaggaaactgtcatcgataggaatacaagttgactgcattcagccagtgccaaaagaggagcccagtcccgctaccaaattccagtccatcggggttcaggtagaggacgactggcgaagcagcgtcccctctcacagtatgtcctcccgacgggacacagactcggatacccaggatgccaatgactcaagctgcaagtcatctgagaggagcctcccggactgtacccctcaccccaactccatcagcatcgatgccggtccccggcaggcccccaagattgcccagatcaagcgcaacctctcctatggagacaacagcgaccctgccctagaggcgtcctcgctgcccccacccgacccctggctcgagacctcctccagctccccagcagagccggcacagccaggggcctgccgccgagacggctactggttcctaaagctactgcaggcagaaacagagcggctggaaggctggtgctgccagatggacaaggagaccaaagagaacaacctctctgaagaagtcttaggaaaagtcctcagtgctgtgggcagtgcccagctactgatgtcccagaaattccagcagttccggggcctctgtgagcaaaacttgaaccctgatgccaacccacgccccacagcccaggacctggcagggttctgggacctgctacagctgtccatcgaggatatcagcatgaagttcgatgaactctaccacctcaaggccaacagctggcagctggtggagacccccgagaagaggaaggaagagaagaaaccaccccctccggtcccaaagaagccagccaaatccaagccggcagtgagccgcgacaaggcctcagacgccagcgacaagcagcgccaggaggcccgcaagagactcctggcggccaagcgggcagcttctgtgcggcagaactcagccaccgagagcgcagacagcatcgagatttatgtcccggaggcccagaccaggctctgagaccatgcaggaggaaagaaacgattttaaatcattaaaaacacaaaaactaagtgcgaacggaacagagttttctcaacctttgctatggttattctgtctagagaccctgagccaactttcaaattgacgcatacaagggctcacaatttggcttttttgggtccctcccagctttaggttatgaagattttactcacaaaaaaaatcaacaaaaatcacgaaactagaaaactttttttttcctcttgctggccgtggtggactagatagatggacgtcggcaactcccggcccagcctccatactgcggtctttttactcgttctatctgatgagaactcacactagcttgtttacaagatgacgacagtccaagggcagccttgggcacctgccatgtccctcctttccccagctatccccgctctgaccttgattttcattcttatgtttttctcttttcccttcagagctcacacagtggtcaccattgtggcaagcggctttctgggtctcagccctctctgcggttgagggcccagaggacagagagatggacatgcgtcccctccctccccccgccaagtgctcacacacaacctcacgcgcacacacacacacgcagatggaggcgcctcactgggaggtgccccgccagccctgggcagtgtcaggcaggactcactcaccgctgagcagatgagagaagttttagtcttggcgggtggaaatgagacgaagccacagttatcacactccagactcctgcccttttattttctccagccccttcttccttcagcaaaatctaggactcccgagtggcttccagggggccgtcagtcctcagccgcgcctgtgtccggtgcccgaggggcgggcggcggtgtctgtatgtatgtgtacatatgcacatagaccttagagtgtatagttaacaaacgcccatctgctcacccatgcccacccagcgccgccgccgctggctctcggggcacctggcaggaggcgggtgtgtgaatagcatatatttttacatgtactatatctaggtgtgtgtacaagtgtgtgtaaaaatatataccttgtgtgtaagcagcccttttttttttcggtctccacccccctccccccgccccgcactcctaagggcccatctgcccagcctctgagttttctgttctattttttttttaaccccaattatccttctctctctcctgcccccgcatcccactcccagggtgtcacgagccctgagctgcaatggcccgggcctgcagggcggggtaggggagggcaggggctcagccccgaagccagctcagtacctgaggggctgctctatgctgtgtatgcgcctctctggcatccgagacatcctcttggctggcgcttgctgcaggggggaccccccccccgtccccaggtgaaccaagggtctgctccggggcccatttccagcttggccgccgtctgtgaccttgggcaagtcacttgacctctgtgtgcctcaacttcctcctctgtaaaacggggacagtccctgcccctccctacctcacaggcatgttgtgagaataaatgaggtaacgtgtacc

SEQ ID NO: 12188 - protein, 285 aa, Homo sapiens
MSSRRDTDSDTQDANDSSCKSSERSLPDCTPHPNSISIDAGPRQAPKIAQIKRNLSYGDNSDPALEASSLPPPDPWLETSSSSPAEPAQPGACRRDGYWFLKLLQAETERLEGWCCQMDKETKENNLSEEVLGKVLSAVGSAQLLMSQKFQQFRGLCEQNLNPDANPRPTAQDLAGFWDLLQLSIEDISMKFDELYHLKANSWQLVETPEKRKEEKKPPPPVPKKPAKSKPAVSRDKASDASDKQRQEARKRLLAAKRAASVRQNSATESADSIEIYVPEAQTRL

SEQ ID NO: 12189 - DNA, 1526 bp, Homo sapiens
  CDS (15)..(740)
tttcagcagatggaatgcgtttggctctggctgatgctggtgacactgtagaagatgccaactttgtggaagccatggcagatgcaggtattctccgtctgtacacctgggtagagtgggtgaaagaaatggttgccaactgggacagcctaagaagtggtcctgccagcactttcaatgatagagtttttgccagtgaattgaatgcaggaattataaaaacagatcaaaactatgaaaagatgatgtttaaagaagctttgaaaacagggttttttgagtttcaggccgcaaaagataagtaccgtgaattggctgtggaagggatgcacagagaacttgtgttccggtttattgaagttcagacacttctcctcgctccattctgtccacatttgtgtgagcacatctggacactcctgggaaagcctgactcaattatgaatgcttcatggcctgtggcaggtcctgttaatgaagttttaatacactcctcacagtatcttatggaagtaacacatgaccttagactacgactcaagaactatatgatgccagctaaagggaagaagactgacaaacaacccctgcagaagccctcacattgcaccatctatgtggcaaagaactatccaccttggcaacataccaccctgtctgttctacgtaaacactttgaggccaataacggaaaactgcctgacaacaaagtcattgctagtgaactaggcagtatgccataactgaagaaatacatgaagaaagtcatgccatttgttgccatgattaaggaaaatctggagaagatggggcctcgtattctggatttgcaattagaatttgatgaaaaggctgtgcttatggagaatatagtctatctgactaattcgcttgagctagaacacatagaagtcaagtttgcctccgaagcagaagataaaatcagggaagactgctgtcctgggaaaccacttaatgtttttagaatagaacctggtgtgtccgtttctctggtgaatccccagccatccaatggccacttctcaaccaaaattgaaatcaggcaaggagataactgtgattccataatcaggcgtttaatgaaaatgaatcgaggaattaaagacctttccaaagtgaaactgatgagatttgatgatccactgttggggcctcgacgagtccctgtcctgggaaaggagtacaccgagaagacccccatttctgagcatgctgttttcaatgtggacctcatgagcaagaaaattcatctgactgagaatgggataagggtggatattggcgatacaataatctatctggttcattaaactcatgcacattggagatttatcctggtttcttaggaatactactactctgattgtgtctactgattggctatcagaaccttaggctggacctaaatagattgatttcatttctaaccatccaattctgcatgtattcataattctatcaagtcatctttgattcctggacctaataaattttttttccctttc

SEQ ID NO: 12190 - protein, 242 aa, Homo sapiens
MRLALADAGDTVEDANFVEAMADAGILRLYTWVEWVKEMVANWDSLRSGPASTFNDRVFASELNAGIIKTDQNYEKMMFKEALKTGFFEFQAAKDKYRELAVEGMHRELVFRFIEVQTLLLAPFCPHLCEHIWTLLGKPDSIMNASWPVAGPVNEVLIHSSQYLMEVTHDLRLRLKNYMMPAKGKKTDKQPLQKPSHCTIYVAKNYPPWQHTTLSVLRKHFEANNGKLPDNKVIASELGSMP

SEQ ID NO: 12191 - DNA, 2667 bp, Homo sapiens
  CDS (222)..(2435)
tacttttcctgttggaacttctgacctgtcagaaagattttaccaattattttggacacctggaaggctgtggtgctgatctacacaaagaaattcgagacacttactatcaacttgttctgtttttggtcaaagcagttaaaggatttagtagcctaaatgacaggtccttgctccctgccttatcctgtgttcagacagccctgcttcatcttttggatatgggctgggaacccaatgatctcgccttctttgttgatattcagttaccagatctcctcatgaaaatgtcacaggagaatataagtgtccatgacagtgtgatcagccaatggagtgaagaagatgagcttgctgatgccaagcagaattcagaatggatggatgagtgtcaggatggcatgtttgaggcctggtatgaaaaaatagcccaggaagatccagagaagcagaggaaaatgcacatgttcattgctcgctactgtgacctgttaaatgtggacatctcttgtgatgggtgtgatgagattgccccctggcatcgataccgctgtctgcagtgcagcgacatggatctctgcaaaacttgcttcctaggtggggtgaagcctgagggccacggagacgaccatgaaatggtcaacatggagtttacctgtgaccactgccagggtttgatcataggccggaggatgaactgcaatgtttgcgatgactttgatctttgctacggatgctatgcagcgaagaaatactcctacggccatttgcctacccacagcatcacggcccacccaatggtaaccattcggatcagtgaccggcagaggctcatccagccatatatccataactactcctggctgctctttgctgccctggctctctatagcgcccacctggccagtgcagaggatgtggatggggagaagctggacccccagacgcacagcagtgccaccaccctgcggagccagtgcatgcagctcgtcggggactgtctgatgaaggctcatcagggaaaaggccttaaagctctagctttgctgggtgtattgccagatggggactcgagcctagaagatcaggccctaccagtcactgtgcccaccggagcgtcagaggagcagctagagaagaaagctgtccagggtgctgagctgtcagaagcaggcaatggaaagagagctgttcatgaggaaatcagacctgtagatttcaagcagagaaataaggcagataaaggtgtatcattatcgaaggatccttcatgccagacccaaatttcagattcacctgcagatgctagcccacctacaggacttccagatgctgaagattcagaagtgtcatctcagaagcccatagaggaaaaagcagttactccaagccctgagcaagtgtttgctgagtgttcccagaagaggattttgggattactagcagccatgttacctcccttaaagtcgggccccacggttcccctgatagacctggagcacgtccttccactcatgtttcaggttgtcatctcaaacgcaggccacctgaatgaaacctaccatctcaccctgggtcttctcggccagttaattatccgtcttttgccagcagaggtagacgccgcagtgatcaaagtcctctcagccaaacacaacctgtttgctgcaggggacagttccattgtgccagatggctggaaaaccacccacctgctctttagcctgggagctgtgtgtctggacagccgggtgggcttggactgggcgtgctccatggcagagatcctgcggtcactcaacagtgccccactgtggcgtgatgtcattgccaccttcacagaccactgcatcaagcagctgccattccagctgaagcacaccaacatcttcaccctgctcgtgctggttggcttcccccaggtcctctgtgtgggaacccgctgcgtttatatggataatgccaatgaaccccataatgtgatcatcttgaagcactttactgagaagaacagggctgtgattgttgatgtcaaaactcggaagaggaaaacagtgaaggactaccagctggtccagaagggaggaggacaagagtgtggtgactctcgggcccagctgagccagtactcccagcactttgcctttatcgccagtcaccttctgcaaagcagcatggacagccattgtcccgaggcagtagaagcaacttgggtcctgtccctggccctgaaaggattgtataaaacactaaaggctcacggttttgaggagatccgtgctactttccttcagaccgatttgctgaagttgctggtgaaaaagtgcagcaaagggactggctttagtaaaacgtggctcctccgggacctggaagtaagagacgagagggactcctgctcctctttcctggtgcagatgtgctggcctaggagttagaagcatcaccgagttccagctgcttctgccctgtgcacactcctttagtacagtgttgaaaactcccttgcttctgtattccctgttggaaatagggattatgacacctgtctacccctgtcagggaaaatgaatttaatgtttgttcaaagaacagtggaagagaagcattttatggaaacacatgattaaccattatatcatggtaataaagtatacccttgaattc

SEQ ID NO: 12192 - protein, 738 aa, Homo sapiens
MGWEPNDLAFFVDIQLPDLLMKMSQENISVHDSVISQWSEEDELADAKQNSEWMDECQDGMFEAWYEKIAQEDPEKQRKMHMFIARYCDLLNVDISCDGCDEIAPWHRYRCLQCSDMDLCKTCFLGGVKPEGHGDDHEMVNMEFTCDHCQGLIIGRRMNCNVCDDFDLCYGCYAAKKYSYGHLPTHSITAHPMVTIRISDRQRLIQPYIHNYSWLLFAALALYSAHLASAEDVDGEKLDPQTHSSATTLRSQCMQLVGDCLMKAHQGKGLKALALLGVLPDGDSSLEDQALPVTVPTGASEEQLEKKAVQGAELSEAGNGKRAVHEEIRPVDFKQRNKADKGVSLSKDPSCQTQISDSPADASPPTGLPDAEDSEVSSQKPIEEKAVTPSPEQVFAECSQKRILGLLAAMLPPLKSGPTVPLIDLEHVLPLMFQVVISNAGHLNETYHLTLGLLGQLIIRLLPAEVDAAVIKVLSAKHNLFAAGDSSIVPDGWKTTHLLFSLGAVCLDSRVGLDWACSMAEILRSLNSAPLWRDVIATFTDHCIKQLPFQLKHTNIFTLLVLVGFPQVLCVGTRCVYMDNANEPHNVIILKHFTEKNRAVIVDVKTRKRKTVKDYQLVQKGGGQECGDSRAQLSQYSQHFAFIASHLLQSSMDSHCPEAVEATWVLSLALKGLYKTLKAHGFEEIRATFLQTDLLKLLVKKCSKGTGFSKTWLLRDLEVRDERDSCSSFLVQMCWPRS

SEQ ID NO: 12193 - DNA, 2585 bp, Homo sapiens
  CDS (53)..(2260)
actccggccttggtggcgggtggctggcggttccgttaggtctgagggagcgatggcggtacgcgcgttgaagctgctgaccacactgctggctgtcgtggccgctgcctcccaagccgaggtcgagtccgaggcaggatggggcatggtgacgcctgatctgctcttcgccgaggggaccgcagcctacgcgcgcggggactggcccggggtggtcctgagcatggaacgggcgctgcgctcccgggcagccctccgcgcccttcgcctgcgctgccgcacccagtgtgccgccgacttcccgtgggagctggaccccgactggtcccccagcccggcccaggcctcgggcgccgccgccctgcgcgacctgagcttcttcgggggccttctgcgtcgcgctgcctgcctgcgccgctgcctcgggccgccggccgcccactcgctcagcgaagagatggagctggagttccgcaagcggagcccctacaactacctgcaggtcgcctacttcaagatcaacaagttggagaaagctgttgctgcagcacacaccttcttcgtgggcaatcctgagcacatggaaatgcagcagaacctagactattaccaaaccatgtctggagtgaaggaggccgacttcaaggatcttgagactcaaccccatatgcaagaatttcgactgggagtgcgactctactcagaggaacagccacaggaagctgtgccccacctagaggcggcgctgcaagaatactttgtggcctatgaggagtgccgtgccctctgcgaagggccctatgactacgatggctacaactaccttgagtacaacgctgacctcttccaggccatcacagatcattacatccaggtcctcaactgtaagcagaactgtgtcacggagcttgcttcccacccaagtcgagagaagccctttgaagacttcctcccatcgcattataattatctgcagtttgcctactataacattgggaattatacacaggctgttgaatgtgccaagacctatcttctcttcttccccaatgacgaggtgatgaaccaaaatttggcctattatgcagctatgcttggagaagaacacaccagatccatcggcccccgtgagagtgccaaggagtaccgacagcgaagcctactggaaaaagaactgcttttcttcgcttatgatgtttttggaattccctttgtggatccggattcatggactccagaagaagtgattcccaagagattgcaagagaaacagaagtcagaacgggaaacagccgtacgcatctcccaggagattgggaaccttatgaaggaaatcgagacccttgtggaagagaagaccaaggagtcactggatgtgagcagactgacccgggaaggtggccccctgctgtatgaaggcatcagtctcaccatgaactccaaactcctgaatggttcccagcgggtggtgatggacggcgtaatctctgaccacgagtgtcaggagctgcagagactgaccaatgtggcagcaacctcaggagatggctaccggggtcagacctccccacatactcccaatgaaaagttctatggtgtcactgtcttcaaagccctcaagctggggcaagaaggcaaagttcctctgcagagtgcccacctgtactacaacgtgacggagaaggtgcggcgcatcatggagtcctacttccgcctggatacgcccctctacttttcctactctcatctggtgtgccgcactgccatcgaagaggtccaggcagagaggaaggatgatagtcatccagtccacgtggacaactgcatcctgaatgccgagaccctcgtgtgtgtcaaagagcccccagcctacaccttccgcgactacagcgccatcctttacctaaatggggacttcgatggcggaaacttttatttcactgaactggatgccaagaccgtgacggcagaggtgcagcctcagtgtggaagagccgtgggattctcttcaggcactgaaaacccacatggagtgaaggctgtcaccagggggcagcgctgtgccatcgccctgtggttcaccctggaccctcgacacagcgagcgggacagggtgcaggcagatgacctggtgaagatgctcttcagcccagaagagatggacctctcccaggagcagcccctggatgcccagcagggcccccccgaacctgcacaagagtctctctcaggcagtgaatcgaagcccaaggatgagctatgacagcgtccaggtcagacggatgggtgactagacccatggagaggaactcttctgcactctgagctggccagcccctcggggctgcagagcagtgagcctacatctgccactcagccgaggggaccctgctcacagccttctacatggtgctactgctcttggagtggacatgaccagacaccgcaccccctggatctggctgagggctcaggacacaggcccagccacccccaggggcctccacaggccgctgcataacagcgatacagtacttaagtgtctgtgtagacaaccaaagaataaatgattcatggtttttttt

SEQ ID NO: 12194 - protein, 736 aa, Homo sapiens
MAVRALKLLTTLLAVVAAASQAEVESEAGWGMVTPDLLFAEGTAAYARGDWPGVVLSMERALRSRAALRALRLRCRTQCAADFPWELDPDWSPSPAQASGAAALRDLSFFGGLLRRAACLRRCLGPPAAHSLSEEMELEFRKRSPYNYLQVAYFKINKLEKAVAAAHTFFVGNPEHMEMQQNLDYYQTMSGVKEADFKDLETQPHMQEFRLGVRLYSEEQPQEAVPHLEAALQEYFVAYEECRALCEGPYDYDGYNYLEYNADLFQAITDHYIQVLNCKQNCVTELASHPSREKPFEDFLPSHYNYLQFAYYNIGNYTQAVECAKTYLLFFPNDEVMNQNLAYYAAMLGEEHTRSIGPRESAKEYRQRSLLEKELLFFAYDVFGIPFVDPDSWTPEEVIPKRLQEKQKSERETAVRISQEIGNLMKEIETLVEEKTKESLDVSRLTREGGPLLYEGISLTMNSKLLNGSQRVVMDGVISDHECQELQRLTNVAATSGDGYRGQTSPHTPNEKFYGVTVFKALKLGQEGKVPLQSAHLYYNVTEKVRRIMESYFRLDTPLYFSYSHLVCRTAIEEVQAERKDDSHPVHVDNCILNAETLVCVKEPPAYTFRDYSAILYLNGDFDGGNFYFTELDAKTVTAEVQPQCGRAVGFSSGTENPHGVKAVTRGQRCAIALWFTLDPRHSERDRVQADDLVKMLFSPEEMDLSQEQPLDAQQGPPEPAQESLSGSESKPKDEL

SEQ ID NO: 12195 - DNA, 2341 bp, Homo sapiens
  CDS (8)..(1687)
gaatgaaatgactgttactcacatatttacttcagatggtctgcatgctgaggttactggagttggctataatcaatttggggaagtgattgttgatggtgatgttgttcatggattctataacccagctgttagcagaattgttgaggcgggctgtgtgtgcaatgatgctgtaattagaaacaatactctaatggggaagccaacagaaggggccttaattgctcttgcaatgaagatgggtcttgatggacttcaacaagactacatcagaaaagctgaatacccttttagctctgagcaaaagtggatggctgttaagtgtgtacaccgaacacagcaggacagaccagagatttgttttatgaaaggtgcttacgaacaagtaattaagtactgtactacataccagagcaaagggcagaccttgacacttactcagcagcagagagatgtgtaccaacaagagaaggcacgcatgggctcagcgggactcagagttcttgctttggcttctggtcctgaactgggacagctgacatttcttggcttggtgggaatcattgatccacctagaactggtgtgaaagaagctgttacaacactcattgcctcaggagtatcaataaaaatgattactggagattcacaggagactgcagttgcaatcgccagtcgtctgggattgtattccaaaacttcccagtcagtctcaggagaagaaatagatgcaatggatgttcagcagctttcacaaatagtaccaaaggttgcagtattttacagagctagcccaaggcacaagatgaaaattattaagtcgctacagaagaacggttcagttgtagccatgacaggagatggagtaaatgatgcagttgctctgaaggctgcagacattggagttgcgatgggccagactggtacagatgtttgcaaagaggcagcagacatgatcctagtggatgatgattttcaaaccataatgtctgcaatcgaagagggtaaagggatttataataacattaaaaatttcgttagattccagctgagcacgagtatagcagcattaactttaatctcattggctacattaatgaactttcctaatcctctcaatgccatgcagattttgtggatcaatattattatggatggacccccagctcagagccttggagtagaaccagtggataaagatgtcattcgtaaacctcctcgcaactggaaagacagcattttgactaaaaacttgatacttaaaatacttgtttcatcaataatcattgtttgtgggactttgtttgtcttctggcgtgagctacgagacaatgtgattacacctcgagacacaacaatgaccttcacatgctttgtgttttttgacatgttcaatgcactaagttccagatcccagaccaagtctgtgtttgagattggactctgcagtaatagaatgttttgctatgcagttcttggatccatcatgggacaattactagttatttactttcctccgcttcagaaggtttttcagactgagagcctaagcatactggatctgttgtttcttttgggtctcacctcatcagtgtgcatagtggcagaaattataaagaaggttgaaaggagcagggaaaagatccagaagcatgttagttcgacatcatcatcttttcttgaagtatgatgcatattgcattattttatttgcaaactaggaattgcagtctgaggatcacttagaagggcaagttcaagaggatatgaagatttgagaactttttaactattcattgactaaaaatgaacattaatgttaaagacttaagactttaacctgctggcagtcccaaatgaaattatgcaactttgatatcatattccttgatttaaattggcttttgtgattgagtgaaactttataaagcatatggtcagttatttaattaaaaaggcaaaacctgaaccaccttctgcacttaaagaagtctaacagtacaaatacactatctatcttagatagatgtatttttttttatttttaaatattgtactatttatggtggtggggctttcttactaatacacaaataaatttaatcatttcaaaggcattctatttggtttagaagttgattcccaggagtgccatatttcagctactgtatttcctttttcttgtaatgtaagcagctcagataccatgtgctatcatttttgtatcaagttttttgcacaggatgtgaccactgtcagatcactgttcttttctttctttttgtgattgaaaagcctatactacaatttgaagtaaatttttgtttttcttagtaagtgt

SEQ ID NO: 12196 - protein, 560 aa, Homo sapiens
MTVTHIFTSDGLHAEVTGVGYNQFGEVIVDGDVVHGFYNPAVSRIVEAGCVCNDAVIRNNTLMGKPTEGALIALAMKMGLDGLQQDYIRKAEYPFSSEQKWMAVKCVHRTQQDRPEICFMKGAYEQVIKYCTTYQSKGQTLTLTQQQRDVYQQEKARMGSAGLRVLALASGPELGQLTFLGLVGIIDPPRTGVKEAVTTLIASGVSIKMITGDSQETAVAIASRLGLYSKTSQSVSGEEIDAMDVQQLSQIVPKVAVFYRASPRHKMKIIKSLQKNGSVVAMTGDGVNDAVALKAADIGVAMGQTGTDVCKEAADMILVDDDFQTIMSAIEEGKGIYNNIKNFVRFQLSTSIAALTLISLATLMNFPNPLNAMQILWINIIMDGPPAQSLGVEPVDKDVIRKPPRNWKDSILTKNLILKILVSSIIIVCGTLFVFWRELRDNVITPRDTTMTFTCFVFFDMFNALSSRSQTKSVFEIGLCSNRMFCYAVLGSIMGQLLVIYFPPLQKVFQTESLSILDLLFLLGLTSSVCIVAEIIKKVERSREKIQKHVSSTSSSFLEV

SEQ ID NO: 12197 - DNA, 2766 bp, Homo sapiens
  CDS (198)..(1568)
ctggaaaaagctcgcttgtccccggaaccgccctgctgccgccgcctgcttcctctgctcgcggttagcccgtcagtccctgctctgtgcgcgcctccatctgggccatggatggcggggatctgatgagcttctttcttctggcatcattaacggaccttttaccatgaatagttctactccttctacaggtgtgtatggctttcttagaaatggcttctgaggaagctgccgttactatggtgaattattacactcctattactcctcaccttcgaagccagcctgtttatattcagtattccaatcacagagaacttaagactgacaatctacctaatcaagctcgagcccaagctgcactgcaggctgtcagtgccgtccaatcaggaagcctggccctttctggaggtccttccaatgaaggcacagtcctacctgggcagagccctgtgcttcgaataattattgaaaacctcttttaccctgttaccctggaagttcttcatcagatattttctaaatttggcacagtcttgaagattatcacctttacaaagaataatcagtttcaagccttgcttcagtatgctgacccagtaaatgcacattatgccaaaatggctctggatggccagaatatctataatgcatgctgcactctgcgcattgacttctccaagctcatcagccttaatgtgaaatataataatgacaaaagcagagacttcactcgcttagaccttcctactggtgatggccagccatcccttgaaccccctatggctgctgcttttggtgcaccgggtataatttcttcaccatatgcaggggctgctggatttgccccagccattggatttcctcaagctacaggtctatcagttccagctgttcctggagctcttggtcctctcacaatcacctcttctgctgtcactggaaggatggccattcctggggctagtggtataccaggaaattctgttctactcgtcacaaatctcaatcctgatcttatcacaccacatgggctttttatcctatttggagtctatggtgatgtacatcgagtgaagattatgtttaataagaaagaaaatgccttggttcagatggcggatgcaaatcaagctcagctagcaatgaaccatctaagtggtcagagactttatgggaaagtgcttcgtgctacactgtccaaacatcaagcagtacagcttcctcgagagggacaagaagaccagggtctgactaaggatttcagcaatagtcctttgcatcgctttaaaaagccgggctctaaaaacttccagaatatctttccaccatcagccactctgcatctttccaacattcccccttctgttacagtggatgatctgaagaaccttttcatagaagctggatgttcagtgaaggcttttaaattctttcagaaagatcgcaaaatggcgctcattcaattgggatctgtggaagaagcaattcaggccctcattgagcttcataaccatgaccttggagaaaatcaccacctcagagtttccttctcaaaatctacaatctgacttttctgtgaatttttctcctaaaactggaccataatttcagtaaaaccttcagacatagactgaagcagctcaagaccaattttgcctctttcacaaaaataactctttctgagtttgatattcaagtatattttaaaaatcaagggttttttttttttttgtattccccctgcccccgccagtcaaaggtttcttttccctttttaccatggtttctacaaaaataaccttcaggaaaaagaaaatcaggaaaaaaattttttttcaataatcttattccctatattaaattagattcgaagaggattaacgttgttttagtttgggtccagatcagccttatacaacatttctaaactcatttgtacttttaaaaaatttaaacacagacttctaaaattacttgatgtaagtaatttaaatcacttatgaccaagttattaaccttatgaatcagaagtctgacccttgtaggaaattatattcacatataaagtacatcagatctttgccatatattgatggttattatgcataaacacattgagttgtgttggaagcagatttataaacctgcatgttttctttgaatgatttctttttttcactgtaagacactcctttaaataatgcctgtctttaactttttaagactatttggaaaaatgcagtgtctcagctgtccccagggaaattaagtggaattcaactaagatctgttaataagatgtcagaataactaataattttattaggaaaaaatcatgttttaaatttcaaaatgacacttatttgtcaagtaatatgatcttggaaaattttaaagaaaaataatcctacttataaactacttttttataattgttttcagaaaaaaagtttacagtcttaaggaaaatattcaggtctatcatatggtttgacagattttttaaaagttatttttggtaaggtcttcttttagaaaaaaattaatctcaagggttttttgtaccactataatctctaatacttactcagaattactgtgtatttacttaatttcttattatgtgccttattatgtgcttaagatacaataggttagagtttaatctaaatatcttgaaagctatattgtgggcttggtaagcattttgttttttctttctctgttttggtaaggatttaaaatttttttcattgcaatttt

SEQ ID NO: 12198 - protein, 457 aa, Homo sapiens [sequence omitted]

SEQ ID NO: 12199 - DNA, 3288 bp, Homo sapiens
  CDS (521)..(3286)
atttggctggggctaggcttccggggctctgcagtcctcggcgtgtgctggcagcttcggagcccaccgagccgggcggctaggatgatgaaccggacgacccccgaccaggagctggcgccagcgtcggagcccgtgtgggagcggccgtggtcgatggaggagatccgcaggagcagccagagctggtcgctggcggccgacgcgggcctactacagtttctacaggaattctcacagcaaactatctctaggacccatgaaatcaagaaacaagtggacggactaattcgggaaaccaaagccacagattgtcgcctgcataatgtcttcaatgacttccttatgctctctaatacccagttcattgagaatcgtgtatatgatgaagaaggctctgtaggcagtgatcgtggcagtattgtggacactgaggaagagaaagaagaggaggagtcagatgaagattttgcccatcatagtgacaatgaacaaaaccggcacaccacacaaatgagtgatgaggaagaggatgatgatggctgtgaccttttcgctgactctgagaaggaggaggaagatattgaggacattgaagaaaatactagacctaaaagaagcagacctacatcgtttgcagatgagctggctgcccgcatcaagggggatgccgtgggtcgagtggacgaggagccgacaaccttaccctcaggagaagcaaaacctcggaagacactcaaagagaagaaggaaaggagaactccttcagacgatgaagaggataacttattcgcacccccccaagctgaccgacgaggacttctcgccatttggctctggaggtggcctgttcagtgggggcaaggggctctttgatgatgaggacgaggagagtgacctcttcacggaagccccccaggatcggcaagctggagcctctgttaaggaggagtcttcatcatccaaacctggaaagaaaatcccagcaggagctgtttctgtatttttaggagacacggatgtgtttggtgctgcctccgttccatcaatgaaggagccacagaagcctgagcagcccactccaaggaaaagcccctatggtccccctcccactggcctctttgatgatgatgatggtgatgatgatgacgactttttctcggcaccccacagcaaaccttctaaaacaggcaaagtccaatccactgccgatatctttggtgacgaagaaggagatctgttcaaagaaaaagccgtagcatcgccagaagccactgtgagtcagacagatgaaaataaagcaagagcagaaaaaaaggttaccttatcttacagcaaaaatctcaagccctcatcagaaacaaagactcaaaaaggcttattttcagatgaggaggactctgaggatttgttttcttctcaaagtgcgagtaagttaaaaggtgcgtctctgctgcctggcaagctccccacgttggtttccctgtttgatgatgaagatgaagaggataatctttttgggggtacagctgctaagaagcagacattgtgtctacaagctcagagagaagagaaagcaaaagcctccgagctctccaaaaagaaagcatctgccctgttgttcagcagtgatgaggaggaccagtggaatattcctgcttcacagacccacttagcatctgacagcaggtctaaaggagaacccagggattctgggaccctccagagccaggaggccaaggctgtgaaaaagaccagtctctttgaggaagacgaagaagatgatctttttgccattgccaaggacagccaaaagaagacccagagagtgtcactcctctttgaagacgatgttgatagcggaggctctctgtttggctctcctcccacatctgttcctcctgcaacaaagaaaaaagagactgtctctgaggcaccacctttgctgttcagcgatgaagaagagaaggaggcacaacttggagtgaagtctgtggataagaaggttgagagtgccaaggagtcattaaaatttgggagaactgatgtggctgagtcagaaaaggaaggacttttgactagatctgctcaggaaacagtcaagcattctgatttattttcttcatcatccccatgggacaaaggaaccaagcctagaaccaaaactgttcttagcttgtttgatgaggaagaggataaaatggaagatcaaaacattatccaggctccacagaaagaagtaggaaagggccgcgatcctgatgcccaccccaagagcacaggtgtcttccaggatgaagagctgcttttcagccacaagctccaaaaggacaatgacccagatgttgacctttttgctggcaccaaaaaaaccaagctgttagagccaagtgttgggagcctgtttggggatgatgaagatgatgatcttttcagctctgccaagtcccagcctttggtacaagagaaaaagagagtagtgaaaaaagaccactctgttgactctttcaaaaaccagaaacatcctgaatccattcaaggtagtaaagaaaaaggcatatggaagccggaaacacctcaggactcatcaggtctcgctccatttaaaaccaaagaaccatccactcggatcgggaagatacaagcaaatttagcgatcaacccagcggccttgctgcccacagcggcttcccagatctctgaagtaaagcctgttttgccagaattggcttttccttcatctgaacacagaaggagccacggtctggaaagtgtgcctgtccttcccgggagtggggaggccggtgtgagttttgatcttccagctcaggcagacaccttacacagtgcaaacaagagccgtgtcaagatgagagggaagcgtagaccgcagacccgtgcagctaggcggctggctgctcaggagtccagcgagactgaggacatgagcgtccccagaggacccattgcacagtgggctgatggcgccatttccccaaatggccatcggccacagctcagagcagccagtggagaagacagcactgaggaggccctggcagctgccgctgcaccttgggaaggtggtcctgtgcctggagtggacagaagcccctttgcaaagtctctgggtcattccagaggggaggctgacctttttgattctggggacatcttttccacgggcactggatctcagtctgtggagagaacaaaacccaaggcaaagtttggcaaactgtggcccccccactgtcatattttgttaataaaattttattggaacac

SEQ ID NO: 12200 - protein, 922 aa, Homo sapiens
MRKRMMMAVTFSLTLRRRRKILRTLKKILDLKEADLHRLQMSWLPASRGMPWVEWTRSRQPYPQEKQNLGRHSKRRRKGELLQTMKRITYSHPPKLTDEDFSPFGSGGGLFSGGKGLFDDEDEESDLFTEAPQDRQAGASVKEESSSSKPGKKIPAGAVSVFLGDTDVFGAASVPSMKEPQKPEQPTPRKSPYGPPPTGLFDDDDGDDDDDFFSAPHSKPSKTGKVQSTADIFGDEEGDLFKEKAVASPEATVSQTDENKARAEKKVTLSYSKNLKPSSETKTQKGLFSDEEDSEDLFSSQSASKLKGASLLPGKLPTLVSLFDDEDEEDNLFGGTAAKKQTLCLQAQREEKAKASELSKKKASALLFSSDEEDQWNIPASQTHLASDSRSKGEPRDSGTLQSQEAKAVKKTSLFEEDEEDDLFAIAKDSQKKTQRVSLLFEDDVDSGGSLFGSPPTSVPPATKKKETVSEAPPLLFSDEEEKEAQLGVKSVDKKVESAKESLKFGRTDVAESEKEGLLTRSAQETVKHSDLFSSSSPWDKGTKPRTKTVLSLFDEEEDKMEDQNIIQAPQKEVGKGRDPDAHPKSTGVFQDEELLFSHKLQKDNDPDVDLFAGTKKTKLLEPSVGSLFGDDEDDDLFSSAKSQPLVQEKKRVVKKDHSVDSFKNQKHPESIQGSKEKGIWKPETPQDSSGLAPFKTKEPSTRIGKIQANLAINPAALLPTAASQISEVKPVLPELAFPSSEHRRSHGLESVPVLPGSGEAGVSFDLPAQADTLHSANKSRVKMRGKRRPQTRAARRLAAQESSETEDMSVPRGPIAQWADGAISPNGHRPQLRAASGEDSTEEALAAAAAPWEGGPVPGVDRSPFAKSLGHSRGEADLFDSGDIFSTGTGSQSVERTKPKAKFGKLWPPHCHILLIKFYWN

SEQ ID NO: 12201 - DNA, 2785 bp, Homo sapiens
  CDS (608)..(1666)
ctaggcgcgtttcctgaaggtcgatggccaggtggtcttcataaactatactgccttgtgatgcctccctagaaatgagaggtctcaataccagctcagaccatgtggaccgcggatgagattgctcagctatgctatgaacactatgggatcaggctgcccaagaaggggaagcctgagccaaaccatgagtggacattattggcagcggtggtgaagatacaatctccagctgacaaggcctgcgacacccctgataagccggtgcaagtgacaaaggaagttgtgtcaatgggaacaggaacaaaatgcataggacagtccaaaatgaggaagaacggaaccagaccctctccagcttccatatgtcttcacctggtgtcctatctttgccgcaggagacatcctcaatgatagccatgctgaggtcatagccagaaggagtttccaaaggtaccttctccaccaactccagttggcagccaccctgaaagaggatagcatctttgtcccaggaactcaaaaaggagtgtggaaacttagacgagacctcatttttgtgtttttctccagccatacaccctgtggggatgcctccatcattccgatgcttgagcttgaagatcagccttgctgtcctgtcttcagaaattgggcccacaactcatcagtagaagccagtagtaacctggaagctcctggaaatgaaagaaaatgtgaagaccctgacagtcctgtaaccaaaaagatgaggcttgagcctgggactgcagccagggaggtcaccaacggagcagctcaccatcagagttttggcaagcagaaaagtggcccaatctcaccaggcatccacagctgtgatctcactgtagagggactggctactgtcaccagaatagcccctggtagtgccaaagtgatagacgtttatagaactggagccaagtgtgtacctggagaagctggagactccggaaagccgggtgctgcgtttcaccaggtggggctgctccgagtgaagccaggccgtggagacagaacacgctccatgtcctgtagtgacaagatggcccgatggaacgtcctcggatgccaaggggcactgttgatgcacttgctggaagagcccatctacctgtcagctgtggtcattgggaagtgcccatacagccaggaagccatgcagagagcactgattggaaggtgtcagaatgtgtctgctttaccaaaaggcttcggagttcaagaattaaaaatactgcagtcagatttactatttgaacagagccgcagtgcggtgcaggcaaaaagggctgatagcccaggtcgacttgttccttgtggggcagccatcagctggagtgcagttcctgagcagcctttggatgttactgccaatggctttccacagggaacaacaaagaaaacaattggaagccttcaggcaagatcccaaatcagcaaagtggaactcttcagatcattccagaagctgctaagcagaattgcaagggacaagtggccacactccctcagggtgcagaagctggatacctaccaggagtacaaggaggctgcgtcctcttaccaggaagcctggagcacactccggaagcaggtgtttggatcctggatcagaaacccaccggattatcaccagttcaagtgagaaggaaatgtttgctctggtagcaggacccttcatcctgaactgccttcctccacgcaggacaagtcttagcttttttggtagttaaatcagggaacattctttctgagctttgcatctctgttgtgtaatacagatggaatctggaacttagagcaagctatacttgattgaagtagctctctgctaaaatggcatctcactaatgacctcactatctgacttccattgtgttttattgcttctctaaaatatgaaatcagagtttggaacatgatgctttgaaagtactctgcagcagctctgttttatgggttcctacattgattcagcaaatatttattgagctgaaatgatgtttgacgctctgcaagttttacagctttgcctagcatagcgaatatatattttgtattcccagcctttctttcttcagggagccattcttttcccattcttcagtggtcctgctctgtgcctcagacttggctgaagctaaccttactccctggctctaggaatagcctgtgagccagccctggactgccctggacttgttctcagaggtatcaggaaaggctttctgttttgatctggagctgtaagggtcacataatcatgggactgccggtggccatcttttcctactacctagagaaagccagcaaagaatgaaggcaacaaaggaaacagccaagagaatcaaagatctagtaacactgtttagatgtctcaattatgtgagacagattcctgttgttattttgattaagcctgtttgtgttggttttctgacttacaattgaaagagttctgtccaaaaagccaaaaggtggccaggcttggtggctcaggcctgtaatcccagcactttgggaagcccaggcaggcagatcacttgaggtcaggagttcaagaccagcctggccaacctggtgaaaccctgtctctactaaaaatgcaaaaactagccgggcatggtggcgcacacctgtaatcctagctactcgggaggctgaggcaggagaattgcttgaacccaggaggcggaggtagtggtgagcaaagatcgtaccgctgcactccagcctgggtgatagagcaagaccctatctc

SEQ ID NO: 12202 - protein, 353 aa, Homo sapiens [sequence omitted]

SEQ ID NO: 12203 - DNA, 2419 bp, Homo sapiens
  CDS (283)..(1488)
cacgataaaggggacatgccgggagttgcagtaccctcaggaagaagtcattgtcatggacatggacccttttcttcactgtgtgatcccaaacttcatccaaagccaagacttcttagaagggcttcagaaggaactgatgaacttggacttccatgagaatctgatgatttgaagaagagaagagagcctcacatctccactttaaggaaaattctgtttgaagatttccggtcctggctttctgatatttctaaaattgacctggaatcaaccattgacatgtcctgtgctaaatatgaattcactgatgccctgctgtgccatgatgatgagctggaagggcgccggattgccttcatcctgtacctggttccttcctgggacaggagcatgggtggtaccctggacctgtacagcatagatgaacactttcagccgaagcagattgtcaagtctcttatcccttcgtggaacaaactggttttctttgaagtatctcctgtgtcctttcaccaggtgtctgaagtgctgtctgaagaaaagtcacgtttgtctataagtggctggtttcatggtccatcattgactcggcctcccaactactttgaaccccccatacctcggagccctcacatcccacaagatcatgagattttgtatgattggatcaaccctacttatctggacatggattaccaagttcaaattcaagaagagtttgaagaaagttctgaaattctcctgaaggagtttcttaagcctgagaaattcacgaaagtctgtgaggccttggagcatggacatgtggaatggagcagccgaggtccccctaacaaaaggttttatgagaaagctgaggagagtaagcttcctgagatattgaaggagtgcatgaagttatttcgctctgaggcactattcttgctgctctccaacttcacaggcctgaagcttcatttcttggccccttcggaagaagatgagatgaatgataaaaaagaggcagaaaccactgatatcactgaagaagggactagccatagtcctcctgagccagagaataatcagatggccatcagcaacaacagccaacagagcaatgagcagacagacccagagccagaggaaaatgaaacaaagaaagaatcaagtgttcccatgtgccaaggggaactgaggcattggaagaccggtcactacactttaattcatgaccatagcaaggctgaatttgccctagacttaattctgtactgtggctgtgaaggctgggagccagaatatggcggttttacttcttacattgccaaaggtgaagatgaagagctgctaacagtgaatccagaaagcaattctttggcattggtctacagagacagagagactctgaaatttgtcaagcatattaaccaccgaagcctggaacaaaagaaaaccttcccaaacagaacaggtttctgggacttttcattcatctattatgaatgacagcactgggcaaagctgaacaaaaatgtgacccttcgtaattactgggaagtctgaaagagctaagcatggagtcaaggagaactacatggtagcttgcctgacagtgttcttaaaactggttgtcttttactaggactcataatgattgtcctcaaccgagaccttgagcttgcagctacgtacttatctcttgattaaaaaaaaaaaaaagttggctttttttttttttaacatttagtcctttttccatattggcttcttcagtgaatttttaagttcaatttgtttttattgaggtaaaatatttataacataaaactgaccagcttacccatttttaaatatgcaattcagtggattaagtacattctcattgttgtccagccatcaccatcatccatctccagaagttttccatcttcccaaattctgtgcccattgaacaataactccccacctccccttcccctagcaacagccatactttttgtctctatcatcaacttcactactcatatttctcatgtaagtggaatcatacagtatttgtccttttgtgactggtttcacttagcataaagtctttaagatgcatccatgtttccagtgtttcggtttttttagaaaaactcatacgtgattgcagccgggcatggtggctcacgcctgtaatcccagcacttgggaggccaaggcaggcggatcacctgaggtcaggagttaaacaccagcctgacaaacatggagaaaccccatctctactaaaaatacaaaattagctgggcgtggtggcacatgcctgtaatcccagctactcaggaggctggggcaggagaattggttgaacccaggaggcggaggttgcagtgagccgagattgtgccactgcactccagcctgggcaacaagagtgaaactctgtctc

SEQ ID NO: 12204 - protein, 402 aa, Homo sapiens
MSCAKYEFTDALLCHDDELEGRRIAFILYLVPSWDRSMGGTLDLYSIDEHFQPKQIVKSLIPSWNKLVFFEVSPVSFHQVSEVLSEEKSRLSISGWFHGPSLTRPPNYFEPPIPRSPHIPQDHEILYDWINPTYLDMDYQVQIQEEFEESSEILLKEFLKPEKFTKVCEALEHGHVEWSSRGPPNKRFYEKAEESKLPEILKECMKLFRSEALFLLLSNFTGLKLHFLAPSEEDEMNDKKEAETTDITEEGTSHSPPEPENNQMAISNNSQQSNEQTDPEPEENETKKESSVPMCQGELRHWKTGHYTLIHDHSKAEFALDLILYCGCEGWEPEYGGFTSYIAKGEDEELLTVNPESNSLALVYRDRETLKFVKHINHRSLEQKKTFPNRTGFWDFSFIYYE

SEQ ID NO: 12205 - DNA, 2690 bp, Homo sapiens
  CDS (163)..(672)
gcagtggtcatctatttccagggcttccgagtggacctgccaatcaagtcggcccgctaccgtggccagtacaacacctatcccatcaagctcttctatacgtccaacatccccatcatcctgcagtctgccctggtgtccaacctttatgtcatctcccaaatgctctcagctcgcttcagtggcaacttgctggtcagcctgctgggcacctggtcggacacgtcttctgggggcccagcacgtgcttatccagttggtggcctttgctattacctgtcccctccagaatcttttggctccgtgttagaagacccggtccatgcagttgtatacatagtgttcatgctgggctcctgtgcattcttctccaaaacgtggattgaggtctcaggttcctctgccaaagatgttgcaaagcagctgaaggagcagcagatggtgatgagaggccaccgagagacctccatggtccatgaactcaaccggtacatccccacagccgcggcctttggtgggctgtgcatcggggccctctcggtcctggctgacttcctaggcgccattgggtctggaaccgggatcctgctcgcagtcacaatcatctaccagtactttgagatcttcgttaaggagcaaagcgaggttggcagcatgggggccctgctcttctgagcccgtctcccggacaggttgaggaagctgctccagaagcgcctcggaaggggagctctcatcatggcgcgtgctgctgcggcatatggacttttaataatgtttttgaatttcgtattctttcattccactgtgtaaagtgctagacattttccaatttaaaattttgctttttatcctggcactggcaaaaagaactgtgaaagtgaaattttattcagccgactgccagagaagtgggaatggtataggattgtccccaagtgtccatgtaacttttgttttaacctttgcaccttctcagtgctgtatgcggctgcagccgtctcacctgtttccccacaaagggaatttctcactctggttggaagcacaaacactgaaatgtctacgtttcattttggcagtagggtgtgaagctgggagcagatcatgtatttcccggagacgtgggaccttgctggcatgtctccttcacaatcaggcgtgggaatatctggcttaggactgtttctctctaagacaccattgttttcccttattttaaaagtgatttttttaaggacagaacttcttccaaaagagagggatggctttcccagaagacactcctggccatctgtggatttgtctgtgcacctattggctcttctagctgactcttctggttgggcttagagtctgcctgtttctgctagctccgtgtttagtccacttgggtcatcagctctgccaagctgagcctggccaagctaggtggacagacccttgcagtgatgtccgtttgtccagattctgccagtcatcactggacacgtctcctcgcagctgccctagcaaggggagacattgtggtagctatcagacatggacagaaactgacttagtgctcacaagcccctacaccttctgggctgaagatcacccagctgtgttcagaattttcttactgtgcttaggactgcacgcaagtgagcggacaccaccgacttcctttctgcgtcaccagtgtcgtcagcagagagaggacagcacaggctcaaggttggtagtgaagtcaggttcggggtgcatgggctgtggtggtgttgatcagttgctccagtgtttgaaataagaagactcatgtttatgtctggaataagttctgtttgtgctgacaggtggcctaggtcctggagatgagcaccctctctctggcctttagggagtcccctcttaggacaggcactgcccagcagcaagggcagcagagttgggtgctaagatcctgaggagctcgaggtttcgagctggctttagacattggtgggaccaaggatgttttgcaggatgccctgatcctaagaagggggcctgggggtgcgtgcagcctgtcggggagaccccactctgacagtgggcacacggcagcctgcaaagcacagggccaccgccacagcccggcagaggggcacactctggagaccttgctggcagtgctagccaggaaacagagtgaccaagggacaagaagggacttgcctaaagccacccagcaactcagcagcagaaccaagatgggccccaggctcctccatatggcccagggcttaccaccctatcacacgtggccttgtctagacccagtcctgagcaggggagaggctcttgagacctgatgccctcctacccacatggttctcccactgccctgtctgctctgctgctacagaggggcagggcctcccccagcccacgcttgggaatgcttggcctctggcaggcaggcagctgtacccaagctggtgggcagggggctggaaggcaccaggcctcaggaggagccccatagtcccgcctgcagcctgtaaccatcggctgggccctgcaaggcccacactcacgccctgtgggtgatggtcacggtgggtgggtgggggctgaccccagcttccaggggactgtcactgtggacgccaaaatggcataactgagataaggtgaataagtgacaaataaagccagttttttac

SEQ ID NO: 12206 - protein, 170 aa, Homo sapiens
MLSARFSGNLLVSLLGTWSDTSSGGPARAYPVGGLCYYLSPPESFGSVLEDPVHAVVYIVFMLGSCAFFSKTWIEVSGSSAKDVAKQLKEQQMVMRGHRETSMVHELNRYIPTAAAFGGLCIGALSVLADFLGAIGSGTGILLAVTIIYQYFEIFVKEQSEVGSMGALLF

SEQ ID NO: 12207 - DNA, 3189 bp, Homo sapiens
  CDS (1432)..(1866)
gattgccggcattcccgcttctgctggttgcttcatgctgcaggctgcggccgtcagccctcgctcgcattggtggcgctgaggtgccggggcagcaagtgacatgtcgtcgggcctccgcgccgctgacttcccccgctggaagcgccacatctcggagcaactgaggcgccgggaccggctgcagagacaggcgttcgaggagatcatcctgcagtataacaaattgctggaaaagtcagatcttcattcagtgttggcccagaaactacaggctgaaaagcatgacgtaccaaacaggcacgagataagtcccggacatgatggcacatggaatgacaatcagctacaagaaatggcccaactgaggattaagcaccaagaggaactgactgaattacacaagaaacgtggggagttagctcaactggtgattgacctgaataaccaaatgcagcggaaggacagggagatgcagatgaatgaagcaaaaattgcagaatgtttgcagactatctctgacctggagacggagtgcctagacctgcgcactaagctttgtgaccttgaaagagccaaccagaccctgaaggatgaatatgatgccctgcagatcacttttactgccttggagggaaaactgaggaaaactacggaagagaaccaggagctggtcaccagatggatggctgagaaagcccaggaagccaatcggcttaatgcagagaatgaaaaagactccaggaggcggcaagcccggctgcagaaagagcttgcagaagcagcaaaggaacctctaccagtcgaacaggatgatgacattgaggtcattgtggatgaaacttctgatcacacagaagagacctctcctgtgcgagccatcagcagagcagccacgagacgctctgtctcttccttcccagtcccccaggacaatgtggatactcatcctggttctggtaaagaagtgagggtaccagctactgccttgtgtgtcttcgatgcacatgatggggaagtcaacgctgtgcagttcagtccaggttcccggttactggccactggaggcatggaccgcagggttaagctttgggaagtatttggagaaaatgtgagttcaagggttccctatctggcagtaatgcaggaattacaagcattgaatttgatagtgctggatcttacctcttagcagcttcaaatgattttgcaagccgaatctggactgtggatgattatcgattacggcacacactcacgggacacagtgggaaagtgctgtctgctaagttcctgctggacaatgcgcggattgtctcaggaagtcacgaccggactctcaaactctgggatctacgcagcaaagtctgcataaagacagtgtttgcaggatccagttgcaatgatattgtctgcacagagcaatgtgtaatgagtggacattttgacaagaaaattcgtttctgggacattcgatcagagagcatagttcgagagatggagctgttgggaaagattaccgccctggacttaaacccagaaaggactgagctcctgagctgctcccgtgatgacttgctaaaagttattgatctccgaacaaatgctatcaagcagacattcagtgcacctgggttcaagtgcggctctgactggaccagagttgtcttcagccctgatggcagttacgtggcggcaggctctgctgagggctctctgtatatctggagtgtgctcacagggaaagtggaaaaggttctttcaaagcagcacagctcatccatcaatgcggtggcgtggtcgccctctggctcgcacgttgtcagtgtggacaaaggatgcaaagctgtgctgtgggcacagtactgacggggctctcagggctgggaggaccccagtgccctcctcagaagaagcacatgggctcctgcagccctgtcctggcaggtgatgtgctgggtatagcatggacctcccagagaagctcaagctatgtggcactgtagctttgccgtgaatgggatttctgaagatttgactgaggtctctcttggcctggaagaataacactgaaaaaacctgacgctgcggtcacttagcagaggctcaggttcttgccttgggaaacactactagctctgaccttccatacctcacttgggggagcacagggccccgctgggcctcctcaccaacggcagtgccaaaatcagcccccacatcaaggtggtgttctctgtgctttctctcgtccttccaaagtcggttctggcctaacgcatgtcccaacaccttgggttcatttgcccggtgaactcactttaagcattggattaacggaaactcccgaactacagacccctccctggtgggttgcatgaatgtgtctcattactgctgaaatgtcctcacatctctttcactgttcttcagagctttctggctctctttcccccacaaaattcgacatatttaaaaatctccgtgtggctttaaaaaatggttttttgtttttttgtttttttgaggtgggagaggatgtgtgaaaatcttttccagggaaatgggttcgctgcagaggtaaggatgtgttcctgtatcgatctgcagacacccagaaggtgggtgcacactgcatgcttgggggtgccaagggattcgagacctccaacatacttgtctgaaggtggtgattctggccatggcccctctgccaagcctgtgtgcgatgcccttggtgctttagtgcaagaagcctaggctcagaagcacagcagcgccatctttccgtttcaggggttgtgatgaaggccaaggaaaaacatttatctttactattttacctacgtataaagttttagttcattgggtgtgcgaaacaccctttttatcacttttaaatttgcactttattttttttcttccatgcttgttctctggacatttggggatgtgagtgttagagctggtgagagaggagtcaggtggccttcccaccgatggtcctggcctccacctgccctctcttccctgcctgatcaccgctttccaatttgcccttcagagaacttaagtcaaggagagttgaaattcacaggccagggcacatcttttatttatttcattatgttggccaacagaacttgattgtaaataataataaagaaatctgttatatacttttcaaac

SEQ ID NO: 12208 - protein, 145 aa, Homo sapiens [sequence omitted]

SEQ ID NO: 12209 - DNA, 2617 bp, Homo sapiens
  CDS (234)..(1667)
caagaagttctggagataaaaaaaatacgagtgatagaagtagcaagacacaagcctctgtcaaaaaagaagagaaaagatcgtctgagaaatctgaaaaaaaagaaagcaaggatactaagaaaatagaaggtaaagatgagaagaatgataatggagcaagtggccaaacatcagaatcgattaaaaaaagtgaagaaaagaagcgaataagttccaagagtccaggacatatggtaatactagaccaaactaaaggagatcattgtagaccatcaagaagaggaagatatgagaaaattcatggaagaagtaaggaaaaggagagagctagtctagataaaaaaagagataaagactacagaaggaaagagatcttgccttttgaaaagatgaaggaacaaaggttgagagaacatttagttcgttttgaaaggctgcgacgagcaatggaacttcgaagacgaagagagattgcagagagagagcgtcgagagcgagaacgcattagaataattcgtgaacgggaagaacgggaacgcttacagagagagagagagcgcctagaaattgaaaggcaaaaactagagagagagagaatggaacgcgaacgcttggaaagggaacgcattcgtattgaacaggaacgtcgtaaggaagctgaacggattgctcgagaaagagaggaactcagaaggcaacaacagcagcttcgttatgaacaagaaaaaaggaattccttgaaacgcccacgtgatgtagatcataggcgagatgatccttactggagcgagaataaaaagttgtctctagatacagatgcacgatttggccatggatccgactactctcgccaacagaacagatttaatgactttgatcaccgagagaggggcaggtttcctgagagttcagcagtacagtcttcatcttttgaaaggcgggatcgctttgttggtcaaagtgaggggaaaaaagcacgacctactgcacgaagggaagatccaagcttcgaaagatatcccaaaaatttcagtgactccagaagaaatgagcctccaccaccaagaaatgaacttagagaatcagacaggcgagaagtacgaggggagcgagacgaaaggagaacggtgattattcatgacaggcctgatatcactcatcctagacatcctcgagaggcagggcccaatccttccagacccaccagctggaaaagtgaaggaagcatgtccactgacaaacgggaaacaagagttgaaaggccagaacgatctgggagagaagtatcagggcacagtgtgagaggcgctccccctgggaatcgtagcagcgcttcggggtacgggagcagagagggagacagaggagtcatcacagaccgaggaggtggatcacagcactatcctgaggagcgacatgtggttgaacgccatggacgggacacaagcggaccaaggaaagagtggcatggtccaccctctcaagggcctagctatcatgatacgaggcgaatgggtgacggccgggcaggagcaggcatgataacccaacattcaagtaacgcatccccaattaatagaattgtacaaatcagtggcaattccatgccaagaggaagtggctccggatttaagccatttaagggtggacctccgcgacgattctgaaaatgagctctctgccaaggttttaagataatttattgaaatctcctgtaaactttacttgactacttatgaagaggacctctgacttgcttgagagttctgtcagacttttctttttaaaaatttaacatgattgcttttctcaattttggagaagatgtttaaatagttctgttgtaacttttaatagttttgtgtatcattcaactttttttcttgcagcaccgaggcacatttgaaaagatggaattgaagtcgttttgtttaacgctgtgtgaatataaagagtagtttgcagctgtgtggtagtggtttaatttgcagccttagctctgtggtgtctggctctagagttacttctttttaccaagcattttcagcctccattttgaaggctgtctacacttaagaagtcttagctgtctaatttttagagaataagattgttcattgcatttctgagtattatgtaacctatttttgcagaaggtactgttacattaagtgcatctgtgtatcctggtttaaaaaaatgtaatcttttttgaaataaaccttcatattctgtatagttgctaaagtgttgagaacctttttaattgtaaaatgagaaccgattttcagtttagtgtagcagcacacttgttcaggtttgcatggtatgaaaccaaatagattcatgaaaccttggccatgaggtttgtttcacaaggttcttagaccgagttgtgcaggtaagtgcacttttaggtaatctgcactgtttgtttgatggataaattccatctctgggaattgtgtgggtattaatgtttccatgttcccaactatgttgagaagtggaaaaaaacccaggttctagatgggtgaatcagttgggttttgtaaatacttgtatgtggggaagacattgttgtctttttgtgaaaataaaaatccacacctgg

SEQ ID NO: 12210 - protein, 478 aa, Homo sapiens
MVILDQTKGDHCRPSRRGRYEKIHGRSKEKERASLDKKRDKDYRRKEILPFEKMKEQRLREHLVRFERLRRAMELRRRREIAERERRERERIRIIREREERERLQRERERLEIERQKLERERMERERLERERIRIEQERRKEAERIAREREELRRQQQQLRYEQEKRNSLKRPRDVDHRRDDPYWSENKKLSLDTDARFGHGSDYSRQQNRFNDFDHRERGRFPESSAVQSSSFERRDRFVGQSEGKKARPTARREDPSFERYPKNFSDSRRNEPPPPRNELRESDRREVRGERDERRTVIIHDRPDITHPRHPREAGPNPSRPTSWKSEGSMSTDKRETRVERPERSGREVSGHSVRGAPPGNRSSASGYGSREGDRGVITDRGGGSQHYPEERHVVERHGRDTSGPRKEWHGPPSQGPSYHDTRRMGDGRAGAGMITQHSSNASPINRIVQISGNSMPRGSGSGFKPFKGGPPRRF

SEQ ID NO: 12211 - DNA, 3912 bp, Homo sapiens
  CDS (135)..(1598)
accgccttcgccgcggaccttcagctgccgcggtcgctccgagcggcgggccgcagaggttcaagcgattctcctgcttcagcctccggagtagctgggattacaggcacgtgccaacacacccagccaccaaaatgccagaagagatggacaagccactgatcagcctccacctggtggacagcgatagtagccttgccaaggtccccgatgaggcccccaaagtgggcatcctgggtagcggggactttgcccgctccctggccacacgcctggtgggctctggcttcaaagtggtggtggggagccgcaaccccaaacgcacagccaggctgtatccctcagcggcccaagtgactttccaagaggaggcagtgagctccccggaggtcatctttgtggctgtgttccgggagcactactcttcactgtgcagtctcagtgaccagctggcgggcaagatcctggtggatgtgagcaaccctacagagcaagagcaccttcagcatcgtgagtccaatgctgagtacctggcctccctcttccccacttgcacagtggtcaaggccttcaatgtcatctctgcctggaccctgcaggctggcccaagggatggtaacaggcaggtgcccatctgcggtgaccagccagaagccaagcgtgctgtctcggagatggcgctcgccatgggcttcatgcccgtggacatgggatccctggcgtcagcctgggaggtggaggccatgcccctgcgcctcctcccggcctggaaggtgcccaccctgctggccctggggctcttcgtctgcttctatgcctacaacttcgtccgggacgttctgcagccctatgtgcaggaaagccagaacaagttcttcaagctgcccgtgtccgtggtcaacaccacactgccgtgcgtggcctacgtgctgctgtcactcgtgtacttgcccggcgtgctggcggctgccctgcagctgcggcgcggcaccaagtaccagcgcttccccgactggctggaccactggctacagcaccgcaagcagatcgggctgctcagcttcttctgcgccgccctgcacgccctctacagcttctgcttgccgctgcgccgcgcccaccgctacgacctggtcaacctggcagtcaagcaggtcttggccaacaagagccacctctgggtggaggaggaggtctggcggatggagatctacctctccctgggagtgctggccctcggcacgttgtccctgctggccgtgacctcactgccgtccattgcaaactcgctcaactggagggagttcagcttcgttcagtcctcactgggctttgtggccctcgtgctgagcacactgcacacgctcacctacggctggacccgcgccttcgaggagagccgctacaagttctacctgcctcccaccttcacgctcacgctgctggtgccctgcgtcgtcatcctggccaaagccctgtttctcctgccctgcatcagccgcagactcgccaggatccggagaggctgggagagggagagcaccatcaagttcacgctgcccacagaccacgccctggccgagaagacgagccacgtatgaggtgcctgccctgggctctggaccccgggcacacgagggacggtgccctgagcccgttaggttttcttttcttggtggtgcaaagtggtataactgtgtgcaaataggaggtttgaggtccaaattcctgggactcaaatgtatgcagtactattcagaatgatatacacacatatgtgtatatgtatttacatatattccacatatataacaggatttgcaattatacatagctagctaaaaagttgggtctctgagatttcaacttgtagatttaaaaacaagtgccgtacgttaagagaagagcagatcatgctattgtgacatttgcagagatatacacacactttttgtacagaagaggcttgtgctgtggtgggttcgatttatccctgcccaccccatccccacaacttcccttttgctacttccccaaggctcttgcagagctagggctctgaaggggagggaaggcaacggctctgcccagagccatccctggagcatgtgagcagcggctggtctcttccctccacctggggcagcagcaggaggcctgggggggaggaaaatcaggcagtcggcctggagtctgtgcctggtcctttgcccggtggtgggaggatggagggattgggctgaagctgctccacctcatccttgctgagtgggggagacattttccctgaaagtcagaagtcaccatagagcctgcaaatggatcctcctgtgagagtgacgtcacctcctttccagagccattagtgagcctggcttgggaacaagtgtaatttccttccctcctttaacctggcgatgagcgtcctttaaaccactgtgccttctcaccctttccatcttcagtttgaacgactcccaggaaggcctagagcagaccctttagaaatcagcccaagggggagagcaagagaaaacactctagggagtaaagctccccgggcgtcagagttgagccctgcctgggctgaaggactgtcttcacgaagtcagtcctgaggaaaaatattggggactccaaatgtcctctggcagaggacccagaaaaccacactggctccaacttcctcctcatggggcattacacttcaaaacagtggggagcaacttttccaccaaagctacaaacctaaaatgctgctgccccaaagcacaagagggaagagcaccgccggggccacaggacgtctgtcctccagtcacaggccatccttgctgctccctactgactctagcttacttcccctgtgaagaaacaggtgttctcggctgagcccccaaccctctgcagaaccaggttgatctgccacagaaaaagcatctttgaagacaaagagggtgaggtcttcatgagtctcctgggcccaaagccatcttctgatggaaggaagagagtagggccagtgaaggctgcccagagagaatgtcacagatgaggctgcccctgccccctccccgccagggaggtttcatgagctcatgtctatgcagcacataagggttcttcagtgaaaagcaggagaagagcccactgcaaggatagctcattaggcacatgaccgatgcagggaaggccatgccggggaagctcttcctgcaggtattttccatctgctgtgccaaggctgagcggcagaaacttgtctcataaattggcactgatggagcatcagctgtggcccacagagagccttgctgagaagggggcaggtaaagcagagattttagcattgccttggcataacaagggcccatcgattccctactaatgagaggcagggagagcatgggcaatggagacccaccaatgatccccaaccccggtgggtactggctgcctgccctgggccagggaatggctccttataccaaagatgctggcacatagcagaacccagtgcacgtcctccccttcccacccacctctggctgaaggtgctcaagagggaagcaattataaggtgggtggcaggagggaacaggtgccacctgctggacaatcacacgaaaggcaggcgggctgtgtactgggccctgactgtgcgtccactgctgtcttccctacctcaccaggctactggcagcagcatcccgagagcacatcatctccacagcctggtaaattccatgtgcctctgggtacaaaagtgcctcaacgacatgctctggaaatcccaaatgccacagtctgaggttgatatctaaaatctatgccttcaaaagagtctctgttttttttttttaacctggtagacggtataaaagcagtgcaaataaacacctaaccttctgc

SEQ ID NO: 12212 - protein, 488 aa, Homo sapiens
MPEEMDKPLISLHLVDSDSSLAKVPDEAPKVGILGSGDFARSLATRLVGSGFKVVVGSRNPKRTARLYPSAAQVTFQEEAVSSPEVIFVAVFREHYSSLCSLSDQLAGKILVDVSNPTEQEHLQHRESNAEYLASLFPTCTVVKAFNVISAWTLQAGPRDGNRQVPICGDQPEAKRAVSEMALAMGFMPVDMGSLASAWEVEAMPLRLLPAWKVPTLLALGLFVCFYAYNFVRDVLQPYVQESQNKFFKLPVSVVNTTLPCVAYVLLSLVYLPGVLAAALQLRRGTKYQRFPDWLDHWLQHRKQIGLLSFFCAALHALYSFCLPLRRAHRYDLVNLAVKQVLANKSHLWVEEEVWRMEIYLSLGVLALGTLSLLAVTSLPSIANSLNWREFSFVQSSLGFVALVLSTLHTLTYGWTRAFEESRYKFYLPPTFTLTLLVPCVVILAKALFLLPCISRRLARIRRGWERESTIKFTLPTDHALAEKTSHV

SEQ ID NO: 12213 - DNA, 2643 bp, Homo sapiens
  CDS (163)..(1587)
acgtggtacggaaccggcgccgcgcttgctgctggtaacagggccttgcctagtgggccttccttcccaggtcgcccctcagtctccactagagacaggactgaccagttgctcttccttccaagaaccttcgagatctgcggtctggggtctggttgaaagatggcggccctcactaccctgtttaagtacatagatgaaaatcaggatcgctacattaagaaactcgcaaaatgggtggctatccagagtgtgtctgcgtggccggagaagagaggcgaaatcaggaggatgatggaagttgctgctgcagatgttaagcagttggggggctctgtggaactggtggatatcggaaaacaaaagctccctgatggctcggagatcccgctccctcctattctgctcggcaggctgggctccgacccacagaagaagaccgtgtgcatttacgggcacctggatgtgcagcctgcagccctggaggacggctgggacagcgagcccttcaccctggtggagcgagacggcaagctgtatgggggaggttcgactgatgataagggcccggtggccggctggataaacgccctggaagcgtatcagaaaacaggccaggagattcctgtcaacgtccgattctgcctcgaaggcatggaggagtcaggctctgagggcctagacgagctgatttttgcccggaaagacacattctttaaggatgtggactatgtctgcatttctgacaattactggctgggaaagaagaagccctgcatcacctacggcctcaggggcatttgctactttttcatcgaggtggagtgcagcaacaaagacctccattctggggtgtacgggggctcggtgcatgaggccatgactgatctcattttgctgatgggctctttggtggacaagagggggaacatcctgatccccggcattaacgaggccgtggccgccgtcacggaagaggagcacaagctgtacgacgacatcgactttgacatagaggagtttgccaaggatgtgggggcgcagatcctcctgcacagccacaagaaagacatcctcatgcaccgatggcggtacccgtctctgtccctccatggcatcgaaggcgccttctctgggtctggggccaagaccgtgattcccaggaaggtggttggcaagttctccatcaggctcgtgccgaacatgactcctgaagtcgtcggcgagcaggtcacaagctacctaactaagaagtttgctgaactacgcagccccaatgagttcaaggtgtacatgggccacggtgggaagccctgggtctccgacttcagtcaccctcattacctggctgggagaagagccatgaagacagtttttggtgttgagccagacttgaccagggaaggcggcagtattcccgtgaccttgacctttcaggaggccacgggcaagaacgtcatgctgctgcctgtggggtcagcggatgacggagcccactcccagaatgaaaagctcaacaggtataactacatagagggaaccaagatgctggccgcgtacctgtatgaggtctcccagctgaaggactaggccaagccctctgtgtgccatctccaatgagaaggaatcctgccctcacctcacccttttccaacttgcccagggaagtggaggtttcctctttcctttccctcttgtcaggtcatccatgactttagagaacagacacaagtgtatccagctgtccacgggtggagctacccgttgggcttatgagtgacctggagtgacagctgagtcaccctgggtaagttctcagagtggtcaggatggcttgacctgcagaagatacccaaggtccaaaagcacaaggtctgcggaaagttctggttgtcggctgggcaccacggctcacacctataatcgagcactttgggaggccaagacaggaggatcacttgaggccaggagtctgagacaagcctaggcaacaaaacaagactctgtctctacaaaaagtttaagaaatgagccagacatggtggtgtatgcctgtagtcccagccactcagaaggctgaggcaggaggatcgcttgagaccaagagtttgagcctgcggtgagctgtgaatgcaccacggcactcaagcctgggcaatgtagcaagatcctgtctctacaagaaattttttaaaaatgagccaagtgtggtggtgcatgcctgtagttccagctactcaggacactgacgtaggagggttgcttgagactgagagttggaggctgcgatgagccatgaatgccccactgcactccagcctgggcgacagaacgagaccccatctcaaaaaaaataagttctggttgtcattgaattgggataaacagagagcttgatgctttctgccttctgtctcaggtgatgcattgcacatttgggatatttggaaaggaaatgaggaaagaaattagggcctcctctgatctctcgctatctgcgggtcctgtccttttctcaagaccttcaccattactggtgttttcctgtcttctctttagtatgatccctcaaaacctcactaactggaaggatgattttgtctcagtttgtactcctaaataaaaagtaaacatgacacctct

SEQ ID NO: 12214 - protein, 475 aa, Homo sapiens
MAALTTLFKYIDENQDRYIKKLAKWVAIQSVSAWPEKRGEIRRMMEVAAADVKQLGGSVELVDIGKQKLPDGSEIPLPPILLGRLGSDPQKKTVCIYGHLDVQPAALEDGWDSEPFTLVERDGKLYGGGSTDDKGPVAGWINALEAYQKTGQEIPVNVRFCLEGMEESGSEGLDELIFARKDTFFKDVDYVCISDNYWLGKKKPCITYGLRGICYFFIEVECSNKDLHSGVYGGSVHEAMTDLILLMGSLVDKRGNILIPGINEAVAAVTEEEHKLYDDIDFDIEEFAKDVGAQILLHSHKKDILMHRWRYPSLSLHGIEGAFSGSGAKTVIPRKVVGKFSIRLVPNMTPEVVGEQVTSYLTKKFAELRSPNEFKVYMGHGGKPWVSDFSHPHYLAGRRAMKTVFGVEPDLTREGGSIPVTLTFQEATGKNVMLLPVGSADDGAHSQNEKLNRYNYIEGTKMLAAYLYEVSQLKD

SEQ ID NO: 12215 - DNA, 5294 bp, Homo sapiens
acacctcgtggagtccggccggaagagcaaccgagatgaaggtgaagatgctgagccggaatccggacaattatgtccgcgaaaccaagttggacttacagagagttccaagaaactatgatcctgctttacatccttttgaggtcccacgagaatatataagagctttaaatgctaccaaactggaacgagtatttgcaaaaccattccttgcttcgctggatggtcaccgtgatggagtcaattgcttggcaaagcatccagagaagctggctactgtcctttctggggcgtgtgatggagaggttagaatttggaatctaactcagcggaattgtatccgtacaatacaagcacatgaaggctttgtacgaggaatatgtactcgcttttgtgggacttcttttttcactgttggtgatgacaaaactgtgaagcagtggaaaatggatgggccaggctatggagacgaggaagagccattacatacaatattaggaaagacagtgtatactgggattgatcatcactggaaagaagctgtttttgccacatgtggacagcaagtagacatttgggatgaacaaagaactaatcctatatgttcaatgacctggggatttgacagtataagtagtgttaaatttaacccaattgaggtaatgtttttttttaagtatgttttacttattatggcttaataatttcagttctgtttagaaaacttttgaatgtatgatagaaacttctgaattttaatggtgttttggcattttgtcagttttcccgattgtaaatgagttctgatacctttgctcaaatcccaacatgtttcccagcagtttagtcccagatactagagttaagcattgttagaggagtggtgtgtgcatttgcccattggggtaaaatccaagtaaatatagtcttgttttaactttagttttactcatgccttcaacttcatgttccatagattatgtcattgtacatttaggaaaatgttaatttttctacctgccttggaggtcagaagaaggagcattggacatcattttgtctatttgtaattggtaaggtaccaatgcttcataaaaacatttgtgattattgttgaactgcatggtaattagttatagttatatttttctttgctcagaagtctgaattgtgattcccagttcctccaggcctaagggaagagttggagattggccactacatgtcgtctgtttaggtctgaatttaggaatggaggctgtcctgaaggctaagctagcccttggactccagatctttctctgaactttttcttaatgcataacaatagatgaactgattgtccagaagactcagtagggatatgtttttcctgttgaaagaaaaggcaatcatagcatatataagccaattttagcagttattgcgaggctaccattttaggtagtatgagagaaaaatcctaatatgcaagtgttatgctcttaaagacccaacctgataaaagataggaagtaaggttgagtcaaaatagtaaggtataaaaatagtttgtatgatatactggaaaatgagatgctgcagtgcgatgtgagcttggccttgaggaattactgagaagtcagaggacactcttcctgcaactaccacatgctcacacacacactttctagagacgctacaggtctagaataggttggcaaactagtctgtgagccacatgtggcccactgcctgtttttgtaaatagagctctgctagaagacagccatgttctcttgcgtacatattgtctgtagctgctttcgtgctatgatggcagagttaagtaattgccacagagaccatatggcccacaaaacctaaaatacttactctctggccctttacagaaaaagttttctgattcctggtctggagtgtctgtctctattatatctttctcactccatcctccatcttccttccttatgtttcccttggttgtagaagagagaagtggcatggaaaggcagctacctttgcagagcaggaccaagtgtaaaagttgataacatatgtgaacattttttaaaagtgctatccaaattcaagatggtgacggtattacgtactaaaaaaaaaacacaaaaaaacctaaacagacactggttcttactatttagaggaacaaaaaaatcttttgcttctctgctttggtgaacatctgtgtcagaagagctgatcaccaattctaaaatcgtaattattagggatgacctagtgaccatgtttttcaaacttgcctgtatagcagctgtatttgttcagctgttttttttttttaattgctattaaccttatgaacttagtggtaaaagtaaatggtgtgtgtgtctcttatcctgttttaaacttaatggaaagggcatgttgctgtgaacaaatggagtgtatttgtatttgtctcctctaatcattaataattaattttctcttaaaatattgaagcctagaattctggtaaagccaaaagtttatgctgatcattgggacgttttacagtgtgaaaggtggcatttggtctaggtagattgttttgctttgttcagatcaaagtctttctttttagaaatggaacctggtcagaccctgaggcgacataatgagaagccaagaaaggttgagggacctcactagggaagtctcagaaaagcagccattaagatagcaggctttcagaaagaactgagaggaaatcatgatcataacattagctttatgatgtgttatttgaattgcgtacagacagtaggaggagttagctggccatgcaactatttagtaaatagctcttcttgctgcccacatacttgcaataggaagtaattgtaggcagaagccaatagttgtgagtgtcaggaaccatgagtgaggaggaatgatgctacagagagagggtttcagggatccactggatgatagagggcttatttttacttaatgccaaggggttatgtgagtaccatgcacatttataattgacttacaaataaaataattagaaaaatcttcaaacagttggacaaaagacaggcctaatttatagagagttaacacgaagaaacatttactaataaaacaataaatttatatagctaggaaatactgtcatacagatattttaaatgacacttttaaatgacactacccagtgctgcccagttgcattaaaatggacatatcccacattgtagtgtatactggtacagctctttggaaaaataattagccctaaatatcaaaagccataaaattgttcataccttttgattcagtaatgtcatttgtgaaattttatcctaaggaaataattcaaaagaagaactacgtgggggggaaatgtttattgaagtattacttataatagtaaaaaacaggaaacaagtcttaagttgaagagtaggtaagtaaaatatgttttattacaaattagaacacagtaatatctgtacattaaaatacatgcatgggggccaggtgcggtggctcatgcctgtaatcccagcactttgggaggctgaggcaggtggctcacctgaggtcaggagtttgataccagcctgggcaacatggtgaaaccctgtctcttctaaaaatacaaaatattagcccggtgtggtggcgcacccctgtaatcccagctcctccacaggctgaggcatgagaattgcttgaacctgggaggtagaggttgcagtgagccaagattgcaccactgcactccagcctgggtgacagagcaagactctgtctctaaataaataaataaataaaatacaagcatgaggattttacagtgaaaatacttggtttaagttgctgagattatggatgatttattgtaccctcttaaaatggactttgttttttaacataaatattaagggcaattaaatcatttgtttactgaatggatgtggtttgctgccaggtctggctttgaactggtgattgttatacttgtttttagacatttctcttgggaagttgtgcatctgacaggaatatagtactgtacgatatgaggcaagctactcctttgaaaaaggttatcttagatatgagaacaaatacaatctgttggaaccctatggaagctttcatttttacagcagcaaatgaagattataacttatatacttttgatatgcgtgcactggacactcctgtaatggtccatatggatcatgtatctgcagtgcttgatgtggattactctcccactgggaaggagtttgtgtctgctagtttcgataaatctattcgaatctttcctgtagacaaaagtcgaagcagggaggtatatcatacaaagagaatgcaacatgttatctgtgtaaaatggacttctgacagcaagtatattatgtgtggatctgatgaaatgaacattcgcctgtggaaagctaatgcttctgaaaaattgggtgtgcttacatcacgagaaaaagcagccaaggattataaccagaaattgaaggagaaatttcagcattatcctcatataaaacgtatagctcgtcatcgacatctaccaaaatctatctatagccagattcaggaacagcgcatcatgaaagaagctcgtcgacgaaaggaagtgaatcgtattaaacacagcaagcctggatctgtgccacttgtgtcagagaagaagaaacacgtagtggcagttgtaaaataattggtattcctaacaatcctgatgtataattatttgttacttttgatttgagaactctacaaataaaagtgctgggactagattaattgcaaacattttagttatatgtgtagagctttattgttactccttttagctaccctgaaaaatgatccttaaaggtggcctagttggtaagactgttttatccttaatctgcattcttctttcattgtagaatacagtatttgcaactcattttttcttgtttttattacagatatacttactttctctttgatctattattgtagacactatacattcaaattgacatttaagaccaaacatctcttatgttatctttaatattactttgaataatgattgcaatgatgtttcttcctgtgattccacataacatttagaataatgatgtcaattttttacaactgaatttatttctagtgctttacttatatttggctttttgactcttttaaaacaatcagcctgcatttatataacttttataaataataatataatttgggtcaagttaagatattaaaagttcctttcagcattg

SEQ ID NO: 12216 - DNA, 921 bp, Homo sapiens
  CDS (37)..(627)
tacaagctcaagtctgtggcccaccttccctggcgcatgctcacctacaaggccctcaacacattcatcgacgacctgttcgcctttgtcatcaagatgcccgttatgtaccggatcggctgcctgcgggacggcccacctggctgtggacgggccagcccgacctcacactgcctcccacccctctccagatgtggttttcttcatctacctctaccaacggtggatctaccgcgtcgaccccacccgagtcaacgagtttggcatgagtggagaagaccccacagctgccgcccccgtggccgaggttcccacagcagcaggggccctcacgcccacacctgcacccaccacgaccaccgccaccagggaggaggcctccacgtccctgcccaccaagcccacccagggggccagctctgccagcgagccccaggaagcccctccaaagccagcagaggacaagaaaaaggattagtcgagactggtcctcacctgctccggctcctggcgaccactacccctgcgtcccggccccctcgcctcccctccctgtcgccctttccctggacagatcaggccggggcggtgggaggcccgcctcaggtcagggcccagcgtgtgacgtaggggccggggcaggccagggtttgtttgtggaggcgctgtctgtccctctgtccctctgtgtttccagccatctcgccctgccagcccagcaccactgggaatcatggtgaagctgatgcagcgttgccgagggggtgggttgggcgggggtggggccgggcccccctacgggatgcccacggccgttcatcatcttgtccctcgtccccctaccacactccccctcctagaccgccgccctttaacacagtctggatttaataaattcatatgggtgtttaacttaaactc

SEQ ID NO: 12217 - protein, 197 aa, Homo sapiens
MLTYKALNTFIDDLFAFVIKMPVMYRIGCLRDGPPGCGRASPTSHCLPPLSRCGFLHLPLPTVDLPRRPHPSQRVWHEWRRPHSCRPRGRGSHSSRGPHAHTCTHHDHRHQGGGLHVPAHQAHPGGQLCQRAPGSPSKASRGQEKGLVETGPHLLRLLATTTPASRPPRLPSLSPFPWTDQAGAVGGPPQVRAQRVT

SEQ ID NO: 12218 - DNA, 2537 bp, Homo sapiens
  CDS (182)..(1903)
aatccgatggcagccgccagcagaggacaagatcaatggcatcctcctgggcttccggatccgataccgggagctgctctatgaaggactgaggggcttcacgcttcgaggcatcaacaacccaggggccacatgggctgagcttacctacctgaacaagcacaggcggtacgagatacggatgagcgtgtacaacgctgtgggtgaggggccctccagccccccgcaggaggtctttgttggggaggcagtgcccacagcagcacctcgtaacgtggtcgtccacggcgccacggccacacagctggacgtgacttgggagccacctccgctggacagccagaatggagacatccaggggtacaagatttatttctgggaagcccagcgggggaacctcacagagcgagtgaagacgcttttcccggctgagaacagcgtgaagctcaagaacttgactggctacacggcctacatggtcagcgtggccgccttcaacgccgctggggatgggcctcggagcacccccacccaaggccagacccagcaagcagcccccagcgctcccagctcggtcaagttcagtgagctgaccacaacctcagtgaatgtgtcctgggaagccccgcagttccccaatggcatcctggagggctacaggctggtgtacgagccctgcagccccgtggatggagtcagcaagatcgtgaccgtggacgtgaaggggaacagccccctgtggctgaaggtgaaggacctggcggagggggtgacctacaggttccgcatcagagccaagaccttcacctacgggccggagatcgaagccaacgtcaccacgggccccggagaaggtgccccaggaccgcctggcgtgcccatcatcgtgcggtacagctctgccatcgccattcactggtccagcggagacccgggcaaagggcccatcacccgctacgtcatcgaggccagaccttcagacgagggactatgggacatcctcatcaaagacatccccaaggaggtgagctcctacacgttcagcatggacatcctgaagccgggcgtgagctatgacttccgggtcatcgcggtcaacgactatggtttcggcacccccagcagcccctcccagtctgtgccagcccagaaagccaaccccttctatgaggagtggtggttcttggtggtcattgccctggtcggcctcatcttcatcctgcttctggtcttcgtgctcatcatccggggccagagcaagaagtacgccaagaagacagactcggggaacagtgccaagtctggagccctaggccacagcgagatgatgagcttggatgaaagcagcttccctgccctggaactcaacaacaggcggctctccgtcaagaactctttctgccgaaagaacggcctgtacaccaggtctccccccaggcccagcccaggcagcctgcactactcggatgaggatgtcaccaaatacaacgacctcatccctgcagagagcagcagcctgacggagaagccctcagaaatctccgactctcagggaagtgacagcgagtacgaggtcgactcaaaccaccagaaggcccactcctttgtcaaccactacatcagtgaccccacatactacaactcgtggcggcgacagcagaggggcatctcgagggcacaggcctacagctacacggagagcgactcgggtgagccagaccacaccaccgtcaccaacagcaccagcacccagcagggcagcctctttcggcccaaggccagtcggactccaacgccccagaacccccctaaccccccaagtcagcagagcaccctctaccgtccccccagcagcctggccccaggctcccgggctcccatagcaggattttcatcatttgtttgacatcagaagaggaaaaagcagaaagagaaatggcaccaaactcctccttcacccctcctctcactgcctgccagaaaacaaaaacaccaagaaaccaagtcaacttttcacctcctgagtttatttttccagagattccagggccagcaaagccggcgttcagaaggagggagaaaaccgtgagaggatgtgtgtggccagcagctcttcagctttgagatggtggggttcactgctcccttgggaattacacggagctggggaagtggctgtgtcactgctatggacacggagtggggcgggcatctggagagagagagggagcggaggctaaggactggaggccgccaggcaggcgtggccgagggaagaaaaagcttctggatgtccagccagctgcccccttccagcccctccaggacccctggacccactgccgctgctctctgcaaaaagaatgggcatcccggaggccacgcctatcttctctctctgctcctccttccctccatgcaccatcactgtggctggcaggcatcggacagcctcatccagaccccctgccctgtcttggcaacctctactgcccatctcccctgctcaacttctccaccaagcatttggtttattt

SEQ ID NO: 12219 - protein, 574 aa, Homo sapiens
MSVYNAVGEGPSSPPQEVFVGEAVPTAAPRNVVVHGATATQLDVTWEPPPLDSQNGDIQGYKIYFWEAQRGNLTERVKTLFPAENSVKLKNLTGYTAYMVSVAAFNAAGDGPRSTPTQGQTQQAAPSAPSSVKFSELTTTSVNVSWEAPQFPNGILEGYRLVYEPCSPVDGVSKIVTVDVKGNSPLWLKVKDLAEGVTYRFRIRAKTFTYGPEIEANVTTGPGEGAPGPPGVPIIVRYSSAIAIHWSSGDPGKGPITRYVIEARPSDEGLWDILIKDIPKEVSSYTFSMDILKPGVSYDFRVIAVNDYGFGTPSSPSQSVPAQKANPFYEEWWFLVVIALVGLIFILLLVFVLIIRGQSKKYAKKTDSGNSAKSGALGHSEMMSLDESSFPALELNNRRLSVKNSFCRKNGLYTRSPPRPSPGSLHYSDEDVTKYNDLIPAESSSLTEKPSEISDSQGSDSEYEVDSNHQKAHSFVNHYISDPTYYNSWRRQQRGISRAQAYSYTESDSGEPDHTTVTNSTSTQQGSLFRPKASRTPTPQNPPNPPSQQSTLYRPPSSLAPGSRAPIAGFSSFV

SEQ ID NO: 12220 - DNA, 2949 bp, Homo sapiens
  CDS (245)..(1042)
gtgccacatcctggctctgtgcgctgggctcccgccgctgctgcgcgcctggcgcgtgccccccgcgccgcccgtctcgggccccggacccagtccgcatccgtcgtccggcccgctgctgccgccgcgcttctacccgcgctacgtgctaccgctcgccttcggcaagtacttcgcgtccgtgtcagcgcacgtcagcatctggaaggtgcccgtgtcctatgcacacaccgtcaaggccaccatgcccatctgggtggtcctcctgtcccggatcattatgaaggagaagcagagcaccaaggtatacttgtcactcatccccatcatcagcggtgtcctgctggccaccgtcaccgagttgtcttttgacatgtggggactcgtcagcgccctcgccgccacgctgtgcttctcgcttcagaacattttctccaaaaaggtcttgcgagattcacggatccaccatctccggctgctcaacatcctgggctgccacgccgtcttctttatgatccccacctgggttctggtggacctctcggctttcctggtcagcagcgacttgacctacgtctaccagtggccctggacgctcctgctcctggctgtcagcggcttctgtaactttgcccagaatgttatcgccttcagcatcctcaacctcgttagccccctgagctactcggtcgccaatgccaccaaaagaatcatggtcatcacggtgtccctgatcatgctgcgcaacccagtcaccagcaccaacgtcctgggcatgatgaccgccatcctgggggtcttcctctataacaagaccaagtacgatgcaaaccagcaagccaggaagcacctcctccccgtcaccacagcagacctgagcagcaaggagcgtcaccggagcccactggagaagccccacaacggcctcctcttcccccagcacggggactatcagtacggccgcaacaacatcttaacagaccacttccaatacagccggcagagctacccaaactcgtacagtttgaaccgctatgatgtgtagagtccaaaggacaggaccagactgttggtgactccttccccggcccccacagcagtatcagaaacttctgacaatcagtgaatgtacaacccagccgaggggacggtgcataactctccatcagaagccctggggttcctggccccccgtgagccgcaggaggatgcgttgcctgcagtgcagacggccgtgagctctgggcaaacctaaacagagaccagtgtctcatgctctttcttcctggagtctgtcatctgagggccgtgtccctgcggagatcttggccacgttgtacctttccatgtggaattattccccaagcagtgtagctcagagcacttgtgtctgcattccagataacattcaggacctgtgtgaaaagctggggtcactgtggctgtagaccatgaactggcagtgggggtgtccagggcggtgcttgagaacgtcagactggctagtttaattccctggcgcagatacgcataggaccaacagggtcaccaagcagacagggagcccgcgagaatcattcaaaacatccccagccacagagatggatccagtttcctggtcatccccttagcagttcacaagttcctggcaaatgttccaaagcaaaaagcgattgcaattagcatccagttcctgcagcctggtgctctgccctgcacgtcagggttggcatccacccagatccagatggaagggaaacttctctcttctcctttgcctcctcttccctcaccagagcagggcgcttctcttggggtggtgagaaggatcttcgagaaatcgtgttcagtatttcaagctctatttctgtggcacatgtcttttgagaggcatcttcacctcttctgtgatgacttggtatgttgtttggtagagagatcttgattttcggaggatcttgcatttttctagggaatattttgtagttgtgtgtgtgtgtttttgccttggtccccattatgggatgcattaggactggcctatgcatcgaaaatctttttgtttgtaaacgtttaaaaacaaagttccccggccaggcacagtggctcacacctgtaatcccagcactttgggaggccaagatgggcggatcacgaggtcaggagttcgagaccagcctggccaacatagtgaaaccccatctctactaaaaatacagaaattagccgggcatggtgtcgcgtgcctgtagtcccagctcctcaggctgctgaggcaggcgaattgcttgaacctgggaggcagaagttgtggtgagccgagattgtgcactccagcctgggtaacagagcgagactccatctcaaaaaaaaacaaaacaaaaccaagttcccactggtgatgcctgtctgacacgttttggtatttagtaggaaatgaagtgtttcgaagcttcgagagaagcttcaaaattgtcacaattgctgaaaacagaatgaatcgtgaacattatctcaatattttgtataatagacaagaccacagtgttttggttccctgacctgtttttgtgtttatgttaggatctgaatcatgttctgggtaaggggacgaggagcgaacactgcactaagatttggtttgccaaatcagattctttggtcaagagtcagtttggggccaggcgtggtggctcatgcctgtaatctcagcactttgggaggctgaggtgggtggatcactggagtttgagaccaccctggccaacatggtgaaaccccatctctactaaaacaaaaattagccaggcatggtggcacctgcctgtaatcccagctacttgggaggctgaggcaggagaatcacttgagcccaggaggtggaggtttcagcgagctgagatcacaccactgcactccagccttggtgacagagtgagactctgtctc

SEQ ID NO: 12221 - protein, 266 aa, Homo sapiens
MPIWVVLLSRIIMKEKQSTKVYLSLIPIISGVLLATVTELSFDMWGLVSALAATLCFSLQNIFSKKVLRDSRIHHLRLLNILGCHAVFFMIPTWVLVDLSAFLVSSDLTYVYQWPWTLLLLAVSGFCNFAQNVIAFSILNLVSPLSYSVANATKRIMVITVSLIMLRNPVTSTNVLGMMTAILGVFLYNKTKYDANQQARKHLLPVTTADLSSKERHRSPLEKPHNGLLFPQHGDYQYGRNNILTDHFQYSRQSYPNSYSLNRYDV

SEQ ID NO: 12222 - DNA, 2484 bp, Homo sapiens
  CDS (139)..(2484)
aagatggcggcggggaggtaggcagagcaggacgccgctgctgccgccgccaccgccgcctccgctccagtcgcctctggtccttcaaactcacacctcccgggaggagctgtcctggcgccgggtcccgcggggaaaatggtggagccagggcaagatttactgcttgctgctttgagggagagtggaattagtccgaatgacctctttgatattgatggtggagatgcagggcttgcaactccaatgcctaccccgtcagttcagcagtcagtgccacttagtgcattagaactaggtttggagaccgaagcagcagttcctgttaaacaagaaccagagactgtacctactccagcactattaaatgtgaggcagcctccatctactacaacatttgtgctgaatcaaataaatcatcttccacccttgggatctacaattgtaatgactaaaacaccacctgtaacaaccaacaggcaaaccatcactttaactaagtttatccagactactgcaagcacacgcccgtcagtctcagcaccaacagtacgaaatgccatgacctctgcaccttcaaaagaccaagttcagcttaaagatctactgaaaaataatagtcttaatgaactgatgaaactaaagccacctgctaatattgctcagccagtagcaacagcagctactgatgtaagcaatggtacagtaaagaaagagtcttctaataaagaaggagctagaatgtggataaacgacatgaagatgaggagtttttccccaaccatgaaggttcctgttgtaaaagaagatgatgaaccagaggaagaagatgaagaagaaatgggtcatgcagaaacctatgcagaatacatgccaataaaattaaaaattggcctacgtcatccagatgctgtagtggaaaccagctctttatccagtgttactcctcctgatgtttggtacaaaacatccatttctgaggaaaccattgataatggctggttatcagcattgcagcttgaggcaattacatatgcagcccagcaacatgaaactttcctacctaatggagatcgtgctggcttcttaataggtgatggtgccggtgtaggaaaaggaaggacgatagcaggaatcatctatgaaaattatttgttgagtagaaaacgagcattgtggtttagtgtttcaaatgacttaaagtatgatgctgaaagagatttaagggatattggagcaaaaaacattttggttcattcgttaaataagtttaaatacggaaaaatttcttccaaacataatgggagtgtgaaaaagggtgttatttttgctacttactcttcacttattggtgaaagccagtctggcggcaagtataaaactaggttaaaacaacttctgcattggtgcggtgatgacttcgatggagtgatagtgtttgatgagtgtcataaagccaaaaacttatgtcctgttggttcttcaaagccaaccaagacaggcttagcagttttagagcttcagaacaaattgccaaaagccagagttgtttatgctagtgcaactggtgcttctgaaccacgcaacatggcctatatgaaccgtcttggcatatggggtgagggtactccatttagagaattcagtgattttattcaagcagtagaacggagaggagttggtgccatggaaatagttgctatggatatgaagcttagaggaatgtacattgctcgacaactgagctttactggagtgaccttcaaaattgaggaagttcttctttctcagagctacgttaaaatgtataacaaagctgtcaagctgtgggtcattgccagagagcggtttcagcaagctgcagatctgattgatgctgagcaacgaatgaagaagtccatgtggggtcagttctggtctgctcaccagaggttcttcaaatacttatgcatagcatccaaagttaaaagggttgtgcaactagctcgagaggaaatcaagaatggaaaatgtgttgtaattggtctgcagtctacaggagaagctagaacattagaagctttggaagagggcgggggagaattgaatgattttgtttcaactgccaaaggtgtgttgcagtcactcattgaaaaacattttcctgctccagacaggaaaaaactttatagtttactaggaatcgatttgacagctccaagtaacaacagttcgccaagagatagtccttgtaaagaaaataaaataaagaagcggaaaggtgaagaaataactcgagaagccaaaaaagcacgaaaagtaggtggccttactggtagcagttctgacgacagtggaagtgaatctgatgcctctgataatgaagaaagtgactatgagagctctaaaaacatgagttctggagatgatgacgatttcaacccatttttagatgagtctaatgaggatgatgaaaatgatccctggttaattagaaaagaccac

SEQ ID NO: 12223 - protein, 782 aa, Homo sapiens
MVEPGQDLLLAALRESGISPNDLFDIDGGDAGLATPMPTPSVQQSVPLSALELGLETEAAVPVKQEPETVPTPALLNVRQPPSTTTFVLNQINHLPPLGSTIVMTKTPPVTTNRQTITLTKFIQTTASTRPSVSAPTVRNAMTSAPSKDQVQLKDLLKNNSLNELMKLKPPANIAQPVATAATDVSNGTVKKESSNKEGARMWINDMKMRSFSPTMKVPVVKEDDEPEEEDEEEMGHAETYAEYMPIKLKIGLRHPDAVVETSSLSSVTPPDVWYKTSISEETIDNGWLSALQLEAITYAAQQHETFLPNGDRAGFLIGDGAGVGKGRTIAGIIYENYLLSRKRALWFSVSNDLKYDAERDLRDIGAKNILVHSLNKFKYGKISSKHNGSVKKGVIFATYSSLIGESQSGGKYKTRLKQLLHWCGDDFDGVIVFDECHKAKNLCPVGSSKPTKTGLAVLELQNKLPKARVVYASATGASEPRNMAYMNRLGIWGEGTPFREFSDFIQAVERRGVGAMEIVAMDMKLRGMYIARQLSFTGVTFKIEEVLLSQSYVKMYNKAVKLWVIARERFQQAADLIDAEQRMKKSMWGQFWSAHQRFFKYLCIASKVKRVVQLAREEIKNGKCVVIGLQSTGEARTLEALEEGGGELNDFVSTAKGVLQSLIEKHFPAPDRKKLYSLLGIDLTAPSNNSSPRDSPCKENKIKKRKGEEITREAKKARKVGGLTGSSSDDSGSESDASDNEESDYESSKNMSSGDDDDFNPFLDESNEDDENDPWLIRKDH

SEQ ID NO: 12224 - DNA, 4358 bp, Homo sapiens
  CDS (173)..(3097)
gtttttggagctgcgacgccaaacatggcgtgttcctagaagccgctttcggcatcagtaggcggcggcgtggggtctggcagcgtggggagagggaccaaccgacgccacttcgtgttgggaagtgggagcgggagggccgggcaattcccgaccgaaccaaacggtttccatggatctcaatagtgccagcactgttgttcttcaggtgttaacacaggccaccagtcaggatactgctgtgttaaaaccagctgaggagcagttgaagcagtgggagacacagccaggtttctattcagtgttgctgaatattttcaccaaccacactttggatataaatgtaaggtggcttgctgtactgtattttaaacatggaattgatcgctactggagacgtgtagcacctcatgctctctcagaggaggagaaaactactctgcgtgcagggctcatcaccaacttcaatgaaccaataaaccagattgcaactcagattgcagtgctcattgcaaaagttgctagattggattgtcccagacagtggcctgaactaattcccactcttatagagtctgttaaagtccaggatgatcttcgacagcacagagcattacttaccttctatcatgttaccaagacactggcatctaaacgacttgctgctgatagaaaactattttatgatttagcttctggaatttataattttgcctgctctctgtggaatcaccacacagacacattcctgcaagaagtttcttctggcaatgaagctgcaactttgagttcactagaacgaacactgctatcattgaaagtgctgcgtaagttaactgttaatggatttgtggaacctcataagaatatggaggtgatgggttttttacatggaatatttgaacgtctaaaacagtttctggaatgcagtagaagtataggtacagataatgtttgtagagatagactggaaaagaccatcattctttttactaaagtgcttttggacttcttggatcagcatcctttttcatttactcctctaattcagagatcactggaattttctgtaagctatgtttttacagaagttggtgaaggcgttacatttgaacgattcattgtccaatgtatgaatcttattaagatgattgtcaaaaattatgcttataagccatccaaaaattttgaagatagcagccctgaaactcttgaagcccataagattaagatggcattcttcacatatcctactttgacagagatatgtagaagattagtctctcattatttcctattaactgaagaagaactgacaatgtgggaagaagacccagaaggctttacagtggaagaaacaggaggagattcttggaaatatagtttgaggccatgcactgaagtattatttatagatatattccatgaatacaatcagactcttactcctgtacttctagaaatgatgcaaacacttcaaggacccacaaatgtggaagatatgaatgcactgttaatcaaagatgctgtgtataatgctgttggattagctgcttatgagctctttgacagtgttgattttgatcagtggtttaaaaaccagcttcttccagaattacaagtcattcacaataggtataagccattgcgacgcagggtgatttggctcatcggtcagtgggtttctgtgaaattcaagtctgacttaagacccatgctttatgaagcaatctgtaacttgcttcaagatcaagatttagtggtccgtattgaaacagctacaactttgaagttaactgttgatgattttgaatttagaacagatcagtttctaccgtatttggaaaccatgttcacactactttttcagttactgcagcaagctacagaatgtgacacaaagatgcatgttttgcatgtcctttcttgtgtgatcgaaagagtcaacatgcagatacgaccatatgtgggatgtttggtacaatatttgcccctcctttggaagcagagtgaagaacacaatatgttgagatgtgctattttgacaacacttattcatcttgttcagggattaggagcagacagcaagaacctgtaccctttcctgctcccagttattcaactgagtacagatgtttcacagcctccacatgtttatcttctggaagatggtttagaattatggttagtaactttggaaaacagtccatgtattacaccagagttgcttcgtatatttcagaatatgtcaccacttcttgaactaagttcagaaaatcttagaacttgctttaagatcatcaatggttatatctttttatcatcaacagaatttttacagacatacgcagtaggtctatgccagtccttttgtgaacttttaaaggaaattactacagaaggtcaagttcaggtgctcaaggttgtggaaaatgcccttaaagtgaacccaatactaggtccacaaatgtttcaaccgattttaccctatgttttcaagggtattatagaaggggagaggtatcctgtagtgatgtccacgtatcttggagttatgggtcgagttctactacaaaacactagttttttttcttcactacttaatgagatggcccataaatttaatcaggagatggaccagcttttgggaaatatgattgaaatgtgggttgatcgaatggacaacattacccagcctgaaagaagaaaactttcagctttggctttgctctctcttctgccatctgataatagtgttatccaagataaattctgtgggattataaacatttcagtagaaggcctgcatgatgtcatgacggaagatcctgaaacaggaacttataaagactgtatgttgatgtctcatcttgaggaaccaaaagtaacagaagatgaagaaccacccacagaacaagataagaggaaaaagatgctggccctgaaggaccctgttcatacagtgtcactgcagcagttcatctacgagaagctcaaggcacagcaggagatgctaggagaacaaggtttccagtccctcatggaaacagtggatacggagattgtcacccagctacaggagtttttgcaaggattctaagagcacatgacatgtggctgcctcccctttcagaaacaagctgagtaacccagcctgccgtttgtatgtgagagcctgctgagatgaagaaatcacttcatgaaaataagcaaagaccacacattttttactacaaaatgtaaaggataaatgtaaatcctgcataactaaaatcacaaacctattcctcaaaagaatttaattttatatttatgagggggcccttcactaaaaagtacatgtaaaagtacatttgatgacaatagctgcttagtttcctgttaagagaagaaactttatcttttaattatgtgctcttaatatttgaagatgagagttaatacctgagatgtttttctgcaaccaaaattcattaaatttggctgccttatcctttttttaagctaatgaaactacaggtttgaaaaatgacaaagctgttcagatgatgctattaaagaaatgtgtgtactaagcaaaaatatataaatagtgacaaatacacattaccaagcttatcttgcaagggagttattttcatctaacatagaaagtgtgttttatcagacaaatgcttttattttcattctaataatttgatacagaaattagtaaaggcatttttttctttttttttccagtaaatacattgggtctataaatgtgcatttgtaagggccacaaaagtgaacgtgtggtactgtagtaccacgtgggagacctctggttatggtttagtcctagttcctttgttactcctgtgagcaccgagaagaactgggcgactcccagtcccacctgtgctgtgacagtcccacgtggctatgacagactgtttagtacttacccttctcaggttcctcagtgcaggggtgcatcagggcctcaataataggggtatacctgggaggatccagcagtaatccccagggtactaggattactagtactctgatggaactagtcttccttccttattcctcgaacatgcagtacataaaaaggggaaaaggagaaaaaaaaagccttactttgttttacttgccatttattgtaaggaaactttaaagcattttttaggaaatactcaaaagcaaggttggaaaatgttttatctttctatagaaagttgggtacagtatgtaactgcgggaaacccactgcccctttgtaagctgtggaacccaaactgtatggggatatttgatgttttcagaaagaggaagaaaatatggtccaaattaaattttccaaagat

SEQ ID NO: 12225 - protein, 975 aa, Homo sapiens
MDLNSASTVVLQVLTQATSQDTAVLKPAEEQLKQWETQPGFYSVLLNIFTNHTLDINVRWLAVLYFKHGIDRYWRRVAPHALSEEEKTTLRAGLITNFNEPINQIATQIAVLIAKVARLDCPRQWPELIPTLIESVKVQDDLRQHRALLTFYHVTKTLASKRLAADRKLFYDLASGIYNFACSLWNHHTDTFLQEVSSGNEAATLSSLERTLLSLKVLRKLTVNGFVEPHKNMEVMGFLHGIFERLKQFLECSRSIGTDNVCRDRLEKTIILFTKVLLDFLDQHPFSFTPLIQRSLEFSVSYVFTEVGEGVTFERFIVQCMNLIKMIVKNYAYKPSKNFEDSSPETLEAHKIKMAFFTYPTLTEICRRLVSHYFLLTEEELTMWEEDPEGFTVEETGGDSWKYSLRPCTEVLFIDIFHEYNQTLTPVLLEMMQTLQGPTNVEDMNALLIKDAVYNAVGLAAYELFDSVDFDQWFKNQLLPELQVIHNRYKPLRRRVIWLIGQWVSVKFKSDLRPMLYEAICNLLQDQDLVVRIETATTLKLTVDDFEFRTDQFLPYLETMFTLLFQLLQQATECDTKMHVLHVLSCVIERVNMQIRPYVGCLVQYLPLLWKQSEEHNMLRCAILTTLIHLVQGLGADSKNLYPFLLPVIQLSTDVSQPPHVYLLEDGLELWLVTLENSPCITPELLRIFQNMSPLLELSSENLRTCFKIINGYIFLSSTEFLQTYAVGLCQSFCELLKEITTEGQVQVLKVVENALKVNPILGPQMFQPILPYVFKGIIEGERYPVVMSTYLGVMGRVLLQNTSFFSSLLNEMAHKFNQEMDQLLGNMIEMWVDRMDNITQPERRKLSALALLSLLPSDNSVIQDKFCGIINISVEGLHDVMTEDPETGTYKDCMLMSHLEEPKVTEDEEPPTEQDKRKKMLALKDPVHTVSLQQFIYEKLKAQQEMLGEQGFQSLMETVDTEIVTQLQEFLQGF

SEQ ID NO: 12226 - DNA, 2940 bp, Homo sapiens
  CDS (12)..(743)
acacaaaggaaatgcaggcagatgatgaactgcttcatccattaggtccagatgataaaaatattgaaacaaaagagggatctgaattctcattttcagatggagaagtggcagaaaaagcagaggtttacaggtcagaaaatgaaagtgaacggaactgtctagaagaatcagagggctgctattgcagatcatctggagaccctgaacaaataaaggaagacagtttatcagaagagagtgctgatgcacggagttttgaaatgactgaattcaatcaagctttagaagaaataaaagggcaggttgttgaaaacaactctgtaactgaattttctgaggagaaaaacagaactgaaaattacaacaggcaagatggtcagagagttcaaggaggagtccctgctggctctgacgagtatgaagatgaatgccctcatctaattgccttgtcgtcattaaatagagaattcaggcctttcagagatgaagaaaatgtgggagctatgaatcagtatagaacaagaactctgagtatcacttcttcaggcagtgctgtaagctgttcaacaattcctccagaactggtgaaacagaaggtgaaacgtcagttgacaaaacagcaaaaatcagctgtcagacgtcgattgcagaaaggagaagcaaatatatttaccaagcaacgtagggaaaacatgcaaaatatcaaatcaagtttggaagcagctagcttttggggagaataatatatttaggatcttggatatgtttaatatattttttaaagttactgtaattcctttttgagccctcatttgtcttttttgagccaaggctatcatatattaataaataaaccctctttcatctataaatttggtcattcagtatgtgtcttgcaaagaataattacctgccaaagcagtccatttttttcaaagtaatttgggtaactacagttacgtaactttattagagacatttgcatatttttaaaaatctaaataacatttttgttgttttctgtttgttgaggatgatatgctacaatgcacataaagcaattagaacaatgtttagcacattcttaagcattcaataaaacatggctattagaatcataatgattctgaaattctgctgacaatttggttgcattttatttggcaactggaggacttcactgtcttatttttctttagaagtaaagataagcctttggaagtaaagataagccagtgatgcacaatttgcttaattaattgattaataatctgttttgtgccacttacattggtaatgtggtcatgagaatggaaacttacttgagatagtctaccacaatttttacagttggcagcttgtaagcaggcctgagtagcagaagagttaggggttggggaaggtggagtagaatgaggaatgaaatgttctttctcatatgcttattatataagtgggtccggaacatgttctcacctcaaggttaacaaatacctaatgcaggaaagaaaatacatagccatggtcccttcctcaaggactttataattcagtgagatgtaaagatgagtgcttaagtgtatgcacctgattattgtctcttcattgccgcataagtcggaaaaggggatcacttgcagcgaaaaatggccactagatggcaatatcaccccatagtcaccaaacaggattacttgcatccctaattatgttctaccagagggaatatagtacagacttttccaagattgataaagacagcagattccctttcacctttgccaaattaactctactagctatttgcaagacctgtaattatctaataaattggcttaaatatatagaagctagaaaatgccaattcctgttccctcaaaagttacctgacattcaaatatttaaatacccttgctttgcattttagatatatctttgaattcaggtattcattttgtataatctctcaacttttaagcatttttataatgtaaagttgaaaacagcttaatagaaccacagaatgtttattttggagtcattttcttatattcagagctatgaaagcaaattgggaataaagccttatcctgctcagctttacctagttgactcagttgacttttgagtatctactacataaaaagcccattactattaagaaactcaagacaaacatgatttgtacctttaatagcctaagatttcttgtgggccaaggaattaattattccaatcagaaatggaggccttacctcatttgggcaaagattagtgctagttattgaagatttactaataaatgatctgttaaggaatttagttttttttggatatgttgttttggttgttgaaaactaaggtataattataatagttatttttgaagatatgtttggctagccatcaattagaagttagagagtttgtcctaacagataagctataaccctcacattttaaaacatgcatagtgaacaatgaacaaaaacaaattcaaaattttactaatgtaaagctgtatattgtgattgttaaaacacttttttttgcctaggagttccagatttaaatcctggttctacacttcccaaacctcaggtaccttctgtggcctctctaacctcaatttttttacttgtaaaatggggacatttaatagtatctacctcagtgtcgtgaagactaaatgaagtaccacttgtaaagagtttattacagtgcctgacatatactgtatggttagtactgctaaaatgacttcttaaggttaccaaaaggaaaattccacaagctgaccacctttcctattgtgatggtcactggtatttcagctatgatcctttgttgtgtatttatccagactgaaagatgtttttctagtaaccatcttgcatcgtcttagtctccccattaaataaacttttcctacaaact

SEQ ID NO: 12227 - protein, 244 aa, Homo sapiens
MQADDELLHPLGPDDKNIETKEGSEFSFSDGEVAEKAEVYRSENESERNCLEESEGCYCRSSGDPEQIKEDSLSEESADARSFEMTEFNQALEEIKGQVVENNSVTEFSEEKNRTENYNRQDGQRVQGGVPAGSDEYEDECPHLIALSSLNREFRPFRDEENVGAMNQYRTRTLSITSSGSAVSCSTIPPELVKQKVKRQLTKQQKSAVRRRLQKGEANIFTKQRRENMQNIKSSLEAASFWGE

SEQ ID NO: 12228 - DNA, 2761 bp, Homo sapiens
  CDS (339)..(2174)
tttaaaaataaagagcatatgaagtactcaaagatgaagatctacggaaaaagtatgacaaatatggagaaaagggacttgaggataatcaaggtggccagtatgaaagctggaactattatcgttatgattttggtatttatgatgatgatcctgaaatcataacattggaaagaagagaatttgatgctgctgttaattctggagaactgtggtttgtaaatttttactccccaggctgttcacactgccatgatttagctcccacatggagagactttgctaaagaagtggatgggttacttcgaattggagctgttaactgtggtgatgatagaatgctttgccgaatgaaaggagtcaacagctatcccagtctcttcatttttcggtctggaatggccccagtgaaatatcatggagacagatcaaaggagagtttagtgagttttgcaatgcagcatgttagaagtacagtgacagaactttggacaggaaattttgtcaactccatacaaactgcttttgctgctggtattggctggctgatcactttttgttcaaaaggaggagattgtttgacttcacagacacgactcaggcttggtggcatgttggatggtcttgttaatgtaggatggatggactgtgccacccaggataacctttgtaaaagcttagatattacaacaagtactactgcttattttcctcctggagccactttaaataacaaagagaaaaacagtattttgtttctcaactcattggatgctaaagaaatatatttggaagtaatacataatcttccagattttgaactactttcggcaaacacactagaggatcgtttggctcatcatcggtggctgttattttttcattttggaaaaaatgaaaattcaaatgatcctgagctgaaaaaactaaaaactctacttaaaaatgatcatattcaagttggcaggtttgactgttcctctgcaccagacatctgtagtaatctgtatgtttttcagccgtctctagcagtatttaaaggacaaggaaccaaagaatatgaaattcatcatggaaagaagattctatatgatatacttgcctttgccaaagaaagtgtgaattctcatgttaccacgcttggacctcaaaattttcctgccaatgacaaagaaccatggcttgttgatttctttgccccctggtgtccaccatgtcgagctttactaccagagttacgaagagcatcaaatcttctttatggtcagcttaagtttggtacactagattgtacagttcatgagggactctgtaacatgtataacattcaggcttatccaacaacagtggtattcaaccagtccaacattcatgagtatgaaggacatcactctgctgaacaaatcttggagttcatagaggatcttatgaatccttcagtggtctcccttacacccaccaccttcaacgaactagttacacaaagaaaacacaacgaagtctggatggttgatttctattctccgtggtgtcatccttgccaagtcttaatgccagaatggaaaagaatggcccggacattaactggactgatcaacgtgggcagtatagattgccaacagtatcattctttttgtgcccaggaaaacgttcaaagataccctgagataagattttttcccccaaaatcaaataaagcttatcagtatcacagttacaatggttggaatagggatgcttattccctgagaatctggggtctaggatttttacctcaagtatccacagatctaacacctcagactttcagtgaaaaagttctacaagggaaaaatcattgggtgattgatttctatgctccttggtgtggaccttgccagaattttgctccagaatttgagctcttggctaggatgattaaaggaaaagtgaaagctggaaaagtagactgtcaggcttatgctcagacatgccagaaagctgggatcagggcctatccaactgttaagttttatttctacgaaagagcaaagagaaattttcaagaagagcagataaataccagagatgcaaaagcaatcgctgccttaataagtgaaaaattggaaactctccgaaatcaggcaagaggaataaggatgaactttgataatgttgaagatgaagaaaaagtttaaaagaaattctgacagatgacatcagaagacacctatttagaatgttacatttatgatgggaatgaatgaacattatcttagacttgcagttgtactgccagaattatctacagcactggtgtaaaagaagggtctgcaaactttttctgtaaagggccggtttataaatattttagactttgcaggctataatatatggttcacacatgagaacaagaatagagtcatcatgtattctttgttatttgcttttaacaacctttaaaaaatattaaaacgattcttagctcagagccatacaaaagtaggctggattcagtccatggaccatagattgctgtccccctcgacggacttataatgtttcaggtggctggcttgaacatgagtctgctgtgctatctacataaatgtctaagttgtataaagtccactttcccttcacgttttttggctgacctgaaaagaggtaacttagtttttggtcacttgttctcctaaaaatgctatccctaaccatatatttatatttcgttttaaaaacacccatgatgtggcacagtaaacaaaccctgttatgctgt

SEQ ID NO: 12229 - protein, 612 aa, Homo sapiens
MLCRMKGVNSYPSLFIFRSGMAPVKYHGDRSKESLVSFAMQHVRSTVTELWTGNFVNSIQTAFAAGIGWLITFCSKGGDCLTSQTRLRLGGMLDGLVNVGWMDCATQDNLCKSLDITTSTTAYFPPGATLNNKEKNSILFLNSLDAKEIYLEVIHNLPDFELLSANTLEDRLAHHRWLLFFHFGKNENSNDPELKKLKTLLKNDHIQVGRFDCSSAPDICSNLYVFQPSLAVFKGQGTKEYEIHHGKKILYDILAFAKESVNSHVTTLGPQNFPANDKEPWLVDFFAPWCPPCRALLPELRRASNLLYGQLKFGTLDCTVHEGLCNMYNIQAYPTTVVFNQSNIHEYEGHHSAEQILEFIEDLMNPSVVSLTPTTFNELVTQRKHNEVWMVDFYSPWCHPCQVLMPEWKRMARTLTGLINVGSIDCQQYHSFCAQENVQRYPEIRFFPPKSNKAYQYHSYNGWNRDAYSLRIWGLGFLPQVSTDLTPQTFSEKVLQGKNHWVIDFYAPWCGPCQNFAPEFELLARMIKGKVKAGKVDCQAYAQTCQKAGIRAYPTVKFYFYERAKRNFQEEQINTRDAKAIAALISEKLETLRNQARGIRMNFDNVEDEEKV

SEQ ID NO: 12230 - DNA, 2678 bp, Homo sapiens
  CDS (15)..(1538)
actattttgctgccatgtttactaatgatgtcagagaggcaagacaagaagaaataaaaatggaaggtgtagaaccaaattcgttgtggtccttgatccagtatgcttatacaggccgccttgaattaaaagaagataatattgagtgcctgttatctacagcttgccttcttcagctttcacaggttgtagaagcatgctgtaagtttttaatgaaacagcttcatccatccaactgtcctggaattcgttcttttgctgatgcccaaggttgtacagatttgcataaagtggctcacaattatactatggagcatttcatggaagtaatcagaaaccaggaatttgtattattaccagccagcgaaattgcaaagctcttggctagtgatgacatgaacattcctaatgaggagacaatattgaatgcacttcttacttgggtccgtcatgatttggaacagagacggaaagatctaagtaaacttttggcttatattaggctacctcttcttgcaccacagttcctggcagacatggaaaataatgtactttttcgggatgatatagaatgtcagaaactcattatggaagcaatgaagtaccatttattaccagagagacgacccatgttacaaagtcctcggacaaaacctaggaagtcaactgttggtacattatttgcagttgggggaatggattcaacaaaaggagcaacaagcattgaaaagtatgatctccgtacaaatatgtggactccagtagcaaatatgaatgggaggaggctacagttcggtgttgcagtgctagatgacaaactgtatgtggttggaggaagagatggactgaagactttgaatactgtagagtgctacaaccccaaaacaaaaacttggagtgtgatgccacctatgtccacacatagacatggccttggtgtggctgtactggaaggtcccatgtatgccgtaggaggacatgatggctggagctatctgaacacagtggaaagatgggaccctcaggctcgccagtggaattttgttgccactaagtctacccctaggagtacagtaggtgtggcagtactaagtggaaaactttatgcagttggtggtcgtgatggaagttcttgtctcaaatcagtagaatgttttgatcctcatactaataagtggacactgtgtgcacagatgtcaaaaaggagaggtggcgtaggagtgacgacctggaatggactgctgtatgctataggggggcacgatgctcccgcatccaacttgacttccagactctcagactgtgtggaaagatatgatcccaaaacagacatgtggactgcagtagcatccatgagcatcagcagagatgcagtgggggtctgtttacttggtgataagttatatgctgttggggggtatgatggacaggcataccttaataccgtggaggcttatgatccccagacaaatgagtggacccaggttgctccactgtgcctaggaagagctggagcttgtgttgtgactgtaaaattataatttagtgccctgttttctacatgaagacaccgtcttcctttattaatttagtataattattctatcaatggatacatttttagtaaatgtgcattgtcacaatcctgggcacaaagtgcctgatgtcaaaatgaagatagtaaaacaagggaggaagcagtggatggaccaggattaattcctttcatttcttagtaaattaaaacctgcagctggtggattgtgaacacacattcccgaagtaataagtgaggacgaatgcactgctctggaacataacccagtgctaactgggggtttcatttattcagtcaagcacatcttactcacatccagatttattttcctacagtgcaaacacaccagatgaaactttaaaatgttactttttgtaagcttatcataaatgagttgcagtaatttgtttgcttgtttgtttaaccacaaccactattttaatgatatactaaagataacactatttagttttttcagaaacatctgcattatatgtgtgttggttgtggattttgtttctaaaattggcttagtccaataaataaagaaaagcattaaggacttaaagcaacaataaccaaataaaaacttgacaggatctttgaagtctatttaaatattcattccattacatctagactcaccaagaactacatgttatgatgttaagttgaagttgaaacatgatgttttgcattaaatttaagatatgcaaatttatgtagagaaaataaatgttatataccctataatctttcacctaattagtatttaattatatggatttgttttatattataaaagatgttttgattttgtcttttgatattgacaaaattgtttggatatccttatgttctcaagtctgtatctgcctcccctgccttatttcttatgttttgccacagttaacccattgtgcttctttgtaatcaaacagtttgtgggagaatgggcttattgaatgtctaaaaaataagtttaaagtgtttgttaccctaagttttttacatttttaaactctaattacatatgtgaatgttattactctcagtgaattgttattgtttgcaaaaatgcactgggcagtaacattttgtgataaatcctataagatat

SEQ ID NO: 12231 - protein, 508 aa, Homo sapiens [sequence omitted]

SEQ ID NO: 12232 - DNA, 2603 bp, Homo sapiens
  CDS (103)..(2223)
ccgtgcggccagagctctagagagtggtgccgccttccaaccttcttccccaagccctggtggccggctccgcctcttctcgaatcttttccacagcccaaaatggccgcagaggtgtattttggcgatctagagctcttcgagccgttcgaccacccaggggagtcgattccgaagcccgttcacactcgcttcaaggacgacgacggcgacgaggaggacgaaaatggggtcggcgacgcggagctacgggagcggcttcggcagtgcgaggagaccatcgagcagctccgcgccgagaatcaagaacttaaacgaaaattgaacattctgactcgaccgagtggaatattggtgaacgatactaagttagatggacctatattacagattctattcatgaacaatgctatttcaaagcaatatcatcaagaaatagaggaatttgtatcaaatttagtaaaaagatttgaggaacagcagaaaaatgatgtggaaaagacttcctttaatcttttgccccagccatccagtattgtgctagaggaggaccacaaagtggaagagtcctgtgccattaaaaacaacaaggaagctttcagtgttgtaggaagtgtcctgtattttactaatttttgccttgataaattggggcaaccgcttctaaatgaaaaccctcagctttccgaaggatgggaaatacccaagtaccatcaagtcttcagccacattgtttctctagaagggcaagaaatacaagtaaaggcaaaaaggccaaagcctcactgtttcaattgtggttctgaagaacaccaaatgaaagattgcccaatgcctcggaatgctgctcgaataagtgaaaagagaaaagagtatatggatgcctgtggagaagcaaacaatcagaatttccagcagcgataccacgcagaagaagtagaagaaagatttggaagattcaagccaggagttattagtgaggaacttcaagatgcactaggtgtgacagacaagagtcttccaccttttatctatcggatgcgccagctagggtacccaccagggtggctcaaagaggctgaattggagaattcggggcttgcactctatgatggaaaagatggcactgatggggaaacagaagttggagaaatacaacagaataaaagtgtcacttacgatctctcaaaattggtcaactatcctggttttaatatatctactcccagaggaattccagacgaatggaggatctttggttccataccaatgcaggcatgtcagcagaaggatgtgtttgccaattaccttacttctaacttccaagcgccaggtgtgaagtctggcaacaagaggtcttcatctcactctagcccaggtagtccaaagaagcagaagaatgaaagcaactcagcgggatctcccgccgacatggagctcgattcagatatggaggtaccacatggttctcagagcagcgaaggttttcagtttcaaccaccattacctcctgacactcctccactcccccggggaactcctccacccgtcttcacccctccactcccaaagggcaccccgccgctgactcccagtgactcaccccagaccagaacagcatctggagctgtggatgaggacgcactgactctagaagaacttgaagaacagcagaggcggatctgggcagctcttgagcaggccgagagcgtaaacagcgactccgacgttcctgtggacacacctttaactggcaattccgttgcctcatcaccttgtccaaatgagctagacctccctgtcccggagggaaaaacatctgaaaagcagacgctggatgagcctgaggtaccagagatttttacaaagaaatcagaagctggacatgcctccagtccagactctgaggtgacatcactttgtcagaaggaaaaagcagagttggctccggtaaacactgaaggtgcccttcttgataatggcagtgtcgtaccaaactgtgacatcagcaatgggggcagccagaagctctttcctgcagacaccagtccttcaacggccactaaaattcatagccctatacctgacatgagcaaatttgcaactggaatcacgccatttgaatttgagaatatggcagaatctactggaatgtacctcaggataagaagcttgttaaagaactcaccccgaaaccagcagaaaaacaaaaaggcctctgaataatggcttgacttagcactgagagctatttaataactttgttccgttaattagtactaattaagtggatagatagaatggttttcctgtttgtccctcccatgtttaaaaatctatccaaggttcatgttccaaagtcaagcctattttaaagaaagactgagctcactagttcagtatattttattctcactgacaaaacttggggggagatgtgaatatgacctggtttagagagggtttgttaaggtttatactatttttggattgtgactatccgtcgagagtgatggtttttatctgtcttttgtacattgttttccctttctacattttgctaattatcctgtatataagtttaatatatcactttttaaaag

SEQ ID NO: 12233 - protein, 707 aa, Homo sapiens [sequence omitted]

SEQ ID NO: 12234 - DNA, 2617 bp, Homo sapiens
  CDS (255)..(2255)
agtctccgcagagcccgggcgggagtagctggtggaccccgttgagctgccgaacttccgggactcccccgcgaccccttcccagcttcccgtccgctccgccgcagcgattgtctcggtgggttgattcggcacaaaccgcccgacccaggggccggtgcgcgtgtggaaggggaagcactcccctcgtggtcgcctggaggtgcgctggaggagggggtgacataaccagggactcgaggtccgccgtgggaatgatccacgaactgctcttggctctgagcgggtaccctgggtccattttcacctggaacaagcggagtggcctgcaggtatcgcaggacttccctttcctccaccccagtgagaccagtgtcctgaatcgactctgccggctcggcacagactatattcgcttcactgagttcattgaacagtacacgggccatgtgcaacagcaggatcaccatccatctcaacagggccaaggtgggttacatggaatctacctgcgggccttctgcacagggctggattctgttttgcagccttatcgccaagcactgcttgatttggaacaagagttcctgggtgatccccatctctccatatcacatgtcaactacttcctagaccagttccagcttctttttccctctgtgatggttgtagtagaacaaattaaaagtcaaaagattcatggttgtcaaatcctggaaacagtctacaaacacagctgtggggggttgcctcctgttcgaagtgcactggaaaaaatcctggccgtttgtcatggggtcatgtataaacagctctcagcctggatgctccatggactcctcttggaccagcatgaagaattctttatcaaacaggggccatcttctggtaatgtcagtgcccagccagaagaggacgaggaggatctgggcattgggggactgacaggaaaacaactgagagaactgcaggacttgcgcctgattgaggaagagaacatgctggcaccatctctgaagcagttttccctacgagtggagattttgccatcctacattccagtgagggttgctgaaaaaatcctatttgttggagaatctgtccagatgtttgagaatcaaaatgtgaacctgactagaaaaggatccattttgaaaaaccaggaagacacttttgctgcagagctgcaccgtctcaagcagcagccactcttcagcttggtggactttgaacaggtggtggatcgcattcgcagcactgtggctgagcatctctggaagttgatggtagaagaatccgatttactgggtcagctgaagatcattaaagacttttaccttctgggacgtggagaactgtttcaggccttcattgacacagctcaacacatgttgaaaacaccacccactgcagtaactgagcatgatgtgaatgtggcctttcaacagtcagcacacaaggtattgctagatgatgacaaccttctccctctgttgcacttgacaatcgagtatcacggaaaggagcacaaagcagatgctactcaggcaagagaagggccttctcgggaaacttctccccgggaagcccctgcatctggctgggcagccctaggtctttcctacaaagtacagtggccactacatattctcttcaccccagctgtcctggaaaagtacaatgttgtttttaagtacttactgagtgtgcgccgggtgcaagctgagctgcagcactgctgggccctacaaatgcagcgcaagcacctcaagtcgaaccagactgatgcaatcaagtggcgcctaagaaatcacatggcatttttggtggataatcttcagtactatctccaggtagatgtgttggagtctcagttctcccagctgcttcatcagatcaattctacccgagactttgaaagcatccgattggctcatgaccacttcctgagcaatttgctggctcaatcctttatcctattgaaacctgtgtttcactgcctgaatgaaatcctagatctctgtcacagtttttgttcgctggtcagtcagaacctaggcccactggatgagcgtggagccgcccagctgagcattctcgtgaagggctttagccgccagtcttcactcctgttcaagattctctccagtgttcggaatcatcagatcaactcagatttggctcaactactgttacgactagattataacaaatactatacccaggctggtggaactctgggcagtttcgggatgtgaaaatttctggctcataaattgaaataacagccacgttcccaaggttgtaacagaagattcaaaacatcccattctagccacacacaaataaatatctgcggcttagtgataggactctaccttttctcctagaagcagttactgaacatccaggagtacaactccttcccatcattcccatgtggaagggtctctcccatcaaggagaacatgtggcatctctgatcctttacattgagaacatttgttggatatgttcatttattcaatagtcatttattgagcacctactacgtaccttggtactgttcaagctgtgggagatacagcggtaaacaaacaatatagagcagaaagtt

SEQ ID NO: 12235 - protein, 667 aa, Homo sapiens
MIHELLLALSGYPGSIFTWNKRSGLQVSQDFPFLHPSETSVLNRLCRLGTDYIRFTEFIEQYTGHVQQQDHHPSQQGQGGLHGIYLRAFCTGLDSVLQPYRQALLDLEQEFLGDPHLSISHVNYFLDQFQLLFPSVMVVVEQIKSQKIHGCQILETVYKHSCGGLPPVRSALEKILAVCHGVMYKQLSAWMLHGLLLDQHEEFFIKQGPSSGNVSAQPEEDEEDLGIGGLTGKQLRELQDLRLIEEENMLAPSLKQFSLRVEILPSYIPVRVAEKILFVGESVQMFENQNVNLTRKGSILKNQEDTFAAELHRLKQQPLFSLVDFEQVVDRIRSTVAEHLWKLMVEESDLLGQLKIIKDFYLLGRGELFQAFIDTAQHMLKTPPTAVTEHDVNVAFQQSAHKVLLDDDNLLPLLHLTIEYHGKEHKADATQAREGPSRETSPREAPASGWAALGLSYKVQWPLHILFTPAVLEKYNVVFKYLLSVRRVQAELQHCWALQMQRKHLKSNQTDAIKWRLRNHMAFLVDNLQYYLQVDVLESQFSQLLHQINSTRDFESIRLAHDHFLSNLLAQSFILLKPVFHCLNEILDLCHSFCSLVSQNLGPLDERGAAQLSILVKGFSRQSSLLFKILSSVRNHQINSDLAQLLLRLDYNKYYTQAGGTLGSFGM

SEQ ID NO: 12236 - DNA, 2899 bp, Homo sapiens
  CDS (24)..(1886)
aaaaaaaaaagtacgcggacaagatggcggcggcagcagtcgacagcgcgatggaggtggtgccggcgctggcggaggaggccgcgccggaggtagcgggcctcagctgcctcgtcaacctgccgggtgaggtgctggagtacatcctgtgctgcggctcgctgacggccgccgacatcggccgtgtctccagcacctgccggcggctgcgcgagctgtgccagagcagcgggaaggtgtggaaggagcagttccgggtgaggtggccttcccttatgaaacactacagccccaccgactacgtcaattggttggaagagtataaagttcggcaaaaagctgggttagaagcgcggaagattgtagcctcgttctcaaagaggttcttttcagagcacgttccttgtaatggcttcagtgacattgagaaccttgaaggaccagagattttttttgaggatgaactggtgtgtatcctaaatatggaaggaagaaaagctttgacctggaaatactacgcaaaaaaaattctttactacctgcggcaacagaagatcttaaataatcttaaggcctttcttcagcagccagatgactatgagtcgtatcttgaaggtgctgtatatattgaccagtactgcaatcctctctccgacatcagcctcaaagacatccaggcccaaattgacagcatcgtggagcttgtttgcaaaacccttcggggcataaacagtcgccaccccagcttggccttcaaggcaggtgaatcatccatgataatggaaatagaactccagagccaggtgctggatgccatgaactatgtcctttacgaccaactgaagttcaaggggaatcgaatggattactataatgccctcaacttatatatgcatcaggttttgattcgcagaacaggaatcccaatcagcatgtctctgctctatttgacaattgctcggcagttgggagtcccactggagcctgtcaacttcccaagtcacttcttattaaggtggtgccaaggcgcagaaggggcgaccctggacatctttgactacatctacatagatgcttttgggaaaggcaagcagctgacagtgaaagaatgcgagtacttgatcggccagcacgtgactgcagcactgtatggggtggtcaatgtcaagaaggtgttacagagaatggtgggaaacctgttaagcctggggaagcgggaaggcatcgaccagtcataccagctcctgagagactcgctggatctctatctggcaatgtacccggaccaggtgcagcttctcctcctccaagccaggctttacttccacctgggaatctggccagagaaggtgcttgacatcctccagcacatccaaaccctagacccggggcagcacggggcggtgggctacctggtgcagcacactctagagcacattgagcgcaaaaaggaggaggtgggcgtagaggtgaagctgcgctccgatgagaagcacagagatgtctgctactccatcgggctcattatgaagcataagaggtatggctataactgtgtgatctacggctgggaccccacctgcatgatgggacacgagtggatccggaacatgaacgtccacagcctgccgcacggccaccaccagcctttctataacgtgctggtggaggacggctcctgtcgatacgcagcccaagaaaacttggaatataacgtggagcctcaagaaatctcacaccctgacgtgggacgctatttctcagagtttactggcactcactacatcccaaacgcagagctggagatccggtatccagaagatctggagtttgtctatgaaacggtgcagaatatttacagtgcaaagaaagagaacatagatgagtaaagtctagagaggacattgcacctttgctgctgctgctatcttccaagagaacgagactccggaagaagacgtctccacggagccctcgggacctgctgcaccaggaaagccactccaccagtagtgctggttgcctcctactaagtttaaataccgtgtgctcttccccagctgcaaagacaatgttgctctccgcctacactagtgaattaatctgaaaggcactgtgtcagtggcatggcttgtatgcttgtcctgtggtgacagtttgtgacattctgtcttcatgaggtctcacagtcgacgctcctgtaatcattctttgtattcactccattcccctgtctgtctgcatttgtctcagaacatttccttggctggacagatggggttatgcatttgcaataatttccttctgatttctctgtggaacgtgttcggtcccgagtgaggactgtgtgtctttttaccctgaagttagttgcatattcagaggtaaagttgtgtgctatcttggcagcatcttagagatggagacattaacaagctaatggtaattagaatcatttgaatttatttttttctaatatgtgaaacacagatttcaagtgttttatctttttttttttaaatttaaatgggaatataacacagttttcccttccatattcctctcttgagtttatgcacatctctataaatcattagttttctattttattacataaaattcttttagaaaatgcaaatagtgaactttgtgaatggatttttccatactcatctacaattcctccattttaaatgactacttttattttttaatttaaaaaatctacttcagtatcatgagtaggtcttacatcagtgatgggttctttttgtagtgagacatacaaatctgatgttaatgtttgctcttagaagtcatactccatggtcttcaaagaccaaaaaaatgaggttttgcttttgtaatcaggaaaaaaaaaaattaatgaaccttaaag

SEQ ID NO: 12237 - protein, 621 aa, Homo sapiens
MAAAAVDSAMEVVPALAEEAAPEVAGLSCLVNLPGEVLEYILCCGSLTAADIGRVSSTCRRLRELCQSSGKVWKEQFRVRWPSLMKHYSPTDYVNWLEEYKVRQKAGLEARKIVASFSKRFFSEHVPCNGFSDIENLEGPEIFFEDELVCILNMEGRKALTWKYYAKKILYYLRQQKILNNLKAFLQQPDDYESYLEGAVYIDQYCNPLSDISLKDIQAQIDSIVELVCKTLRGINSRHPSLAFKAGESSMIMEIELQSQVLDAMNYVLYDQLKFKGNRMDYYNALNLYMHQVLIRRTGIPISMSLLYLTIARQLGVPLEPVNFPSHFLLRWCQGAEGATLDIFDYIYIDAFGKGKQLTVKECEYLIGQHVTAALYGVVNVKKVLQRMVGNLLSLGKREGIDQSYQLLRDSLDLYLAMYPDQVQLLLLQARLYFHLGIWPEKVLDILQHIQTLDPGQHGAVGYLVQHTLEHIERKKEEVGVEVKLRSDEKHRDVCYSIGLIMKHKRYGYNCVIYGWDPTCMMGHEWIRNMNVHSLPHGHHQPFYNVLVEDGSCRYAAQENLEYNVEPQEISHPDVGRYFSEFTGTHYIPNAELEIRYPEDLEFVYETVQNIYSAKKENIDE

SEQ ID NO: 12238 - DNA, 4384 bp, Homo sapiens
  CDS (534)..(1751)
agccgcgcgacgccgccgccttagaacgcctttccagtactgctagcagcagcccgaccacgcgttaccgcacgctcgcgcctttcccttgacacggcggacgccggaggattggggcggcaatttgtcttttccttttttattaaaattatttttcctgcctgttgttggatttggggaaattttttgtttgttttttatgatttgtatttgactgagagaaacccactgaagacgtctgcgtgagaatagagaccaccgaggccgactcgcgggccgctgcacccaccgccaaggacaaaaggagcccagcgctactagctgcacccgattcctcccagtgcttagcatgaagaaggccgaaatgggacgattcagtatttccccggatgaagacagcagcagctacagttccaacagcgacttcaactactcctaccccaccaagcaagctgctctgaaaagccattatgcagatgtagatcctgaaaaccagaactttttacttgaatcgaatttggggaagaagaagtatgaaacagaatttaattctcttgacatttgtgtcaatattttccctgtattctgttcatctccttttgaagactgccaatgaaggagggtctttattatatgaacaattgggatataaggcatttggattagttggaaagcttgcagcatctggatcaattacaatgcagaatattggagctatgtcaagctacctcttcatagtgaaatatgagttgcctttggtgatccaggcattaacgaacattgaagataaaactggattgtggtatctgaacgggaactatttggttctgttggtgtcattggtggtcattcttcctttgtcgctgtttagaaatttaggatatttgggatataccagtggcctttccttgttgtgtatggtgttctttctgattgtggtcatttgcaagaaatttcaggttccgtgtcctgtggaagctgctttgataattaacgaaacaataaacaccaccttaacacagccaacagctcttgtacctgctttgtcacgtaacgtgactgaaaatgactcttgcagacctcactattttattttcaactcacagactgtctatgctgtgccaattctgatcttttcatttgtctgtcatcctgctgttcttcccatctatgaagaactgaaagaccgcagccgtagaagaatgatgaatgtgtccaagatttcattttttgctatgtttctcatgtatctgcttgccgccctctttggatacctaacattttacgaacatgttgagtcagaattgcttcatacctactcttctatcttgggaactgatattcttcttctcattgtccgtctggctgtgttaatggctgtgaccctgacagtaccagtagttattttcccaatccggagttctgtaactcacttgttgtgtgcatcaaaagatttcagttggtggcgtcatagtctcattacagtgtctatcttggcatttaccaatttacttgtcatctttgtcccaactattagggatatctttggttttattggtgcatctgcagcttctatgttgatttttattcttccttctgccttctatatcaagttggtgaagaaagaacctatgaaatctgtacaaaagattggggctttgttcttcctgttaagtggtgtactggtgatgaccggaagcatggccttgattgttttggattgggtacacaatgcacctggaggtggccattaattggcaccactcaaactcaaactcagtccatctgatgccagtgttgagtaaactcaactactatgaaatttcacctaatgttttcagtttcacttccttttgaagtgcagattcctcgctggttcttctgagtgcagaataagtgaacttttttgttttgttttgtttttttaagaaacttatctgtatgttagaaatggatatgaacaacaaaaccacgagtctcgggttaagggaagtgacaattttattccattccagagaatggacaaactcttaacttttatcaagccacatgcttggctgtgtcattgtttaacttggatattttatgattttacttgaatgtgcctaatggaaccatttgatgtgagaaacaattctttttaatttacagcaaaatattgaataaccattgacaaaaacactattattttttgtaccaaaaatacttaaagacctcagaagcactcttttacttttaagaaattgcttttttgaactttattcagaagcagttatcaataaattccataaaataatgtcattggtatttaaaaatgaatattaatataatgaaatggtttgcctttttgtaggcataataagccaaatacttttttacccaaaataatttttagagaaaatgatgtaatgaaaaattgtaccatgaattaggagcatagttttttccatttaaacgtcaccattacttaaaagatgattgattgttgctataccaaatcagatgaactctgttcatcacttttcttctctgtccccaaacaatttggttcattcagactgaaatgtttgtgtcttcaacttattagaatggaagataatgcagatatttctgtgggaaataaaataactaattttgaggtaccaaatagtgcaattgggtaaaacagggtttattcagttgcatctgtctccagtgttgtattgacagctctgggtcttttttttgggccagcccttttttgacattgcttccagcagtggaaaatgggcatttgatggcaataggccaaaattattgtgtccagggagtacactttttcaaaatgctcacctactggaagtgtgaattacttgacaatgtatggcttagttgtgttcatgttttgtctacagtagaggtctaatccacaggttacacctatgtttgatatgatataagttctctttgcgtaggccactgggtttctcatgcagtaagctttataaaaactcatttgcactggactgtcatctcattcttgtacaacgtagaattacttgtttacatccaacaaatggttagctagggaaaacagtgcaaactgagtgttagtagtcattttggtccaactgcatgtcaacccttccatttcaatcccagttagaaatgaaaataattactttgaaacttggctttaagagcacatttatcgtacgtcacagtgtatggtgaatatattattaaataatgtggtacttcgctcatcaggcataatgtctaaaatctaatatacataattccattaagtggttgaaggaagcaaataatggaattgtcaattggtcatctggctgtaaggtttgcccttgaactaaaaatgttgtttggggcaagggccagaaatgtggagacatggtttttgttacgcattcttgtattatatgtgactaaatttacaaacaagatacatgtgtaattaaagacccttatggaactggaagacgtcttgtagtgctacattgggtgaaaccgttggtccatttttgtctgtttctatgaagataaaataattgggggccatctagaaatagaaaggcagtgggaagacagattctacggcactgctttcatttaattgggctttaggcactccattcgaatgcagaacctcacctctagttgagaccaagaattggcaaatttgcatgagctcctggaaagagttgctgactttgtatctaagacctgccagggaataccaagagttgtttctacagacttttttttttttttgtatgggagaagatactgtggcaaccaggaaggaatggaaaaaaaattcttttctctacagcaaattaatgtgaggaagctcctccaatcctctggctatttaaggttcaaaatcaagtgcctagggaaaattccaatggatgattttctgggagctatcttgtctaccttgaggttcctgaacaatgaattcccattaatgagcagtcttcagtattaaaaccactgtcttgtcacctcattttgcattactgtcttccgtggatgtttcagttacaactgtaatgttatttatagaacaacattaatccattaaagctaacctatttttcaatatttatgataatctatgtacatatattgtctgtccatatgtatttgtaaataggttgtatataatgtcaggtttgggtcttgggttcaagtgtatatattcctgtaagtttcttaactgcattttgatgaattcacattatgtaactataagaattgtcccaaaagtacctgtacagaaaattgaatattgaaaaattgacaaattgtgtacaaacactaaaaaaaacttgtttaaattgtatttgcaataaacaacatcaaattttttcatgac

SEQ ID NO: 12239 - protein, 406 aa, Homo sapiens
MKQNLILLTFVSIFSLYSVHLLLKTANEGGSLLYEQLGYKAFGLVGKLAASGSITMQNIGAMSSYLFIVKYELPLVIQALTNIEDKTGLWYLNGNYLVLLVSLVVILPLSLFRNLGYLGYTSGLSLLCMVFFLIVVICKKFQVPCPVEAALIINETINTTLTQPTALVPALSRNVTENDSCRPHYFIFNSQTVYAVPILIFSFVCHPAVLPIYEELKDRSRRRMMNVSKISFFAMFLMYLLAALFGYLTFYEHVESELLHTYSSILGTDILLLIVRLAVLMAVTLTVPVVIFPIRSSVTHLLCASKDFSWWRHSLITVSILAFTNLLVIFVPTIRDIFGFIGASAASMLIFILPSAFYIKLVKKEPMKSVQKIGALFFLLSGVLVMTGSMALIVLDWVHNAPGGGH

SEQ ID NO: 12240 - DNA, 2491 bp, Homo sapiens
  CDS (98)..(2491)
gctgacgggtttgaaatggcttcgatgttagccgggacccgactcagatcgatgctatagaagacaaacaaggaaaggttttttttccttttgcatcatggctcaatttggaggacagaagaatccgccatgggctactcagtttacagccactgcagtatcacagccagctgcactgggtgttcaacagccatcactccttggagcatctcctaccatttatacacagcaaactgcattggcagcagcaggccttaccacacaaactccagcaaactatcagttaacacaaactgctgcattgcagcaacaagccgcagctgcagcagctgcattacaacagcaatattcacaacctcagcaggccctgtatagtgtgcaacaacagttacagcaaccccagcaaaccctcttaacacagccagctgttgcactgcctacaagccttagcctgtctactcctcagccaacagcacaaataactgtatcatatccaacaccaaggtccagtcaacagcaaacccagcctcagaagcagcgtgttttcacaggggtggttacaaaactacatgatacatttggatttgtggatgaagatgtattctttcagcttagtgctgtcaaagggaaaaccccccaagtaggtgacagagtattggttgaagctacttataatcctaatatgccttttaaatggaatgcacagagaattcaaacactaccaaatcagaatcagtcgcaaacccagccattactgaagactcctcctgctgtacttcagccaattgcaccacagacaacatttggtgttcagactcagccccagccccagtcactgctgcaggcacagatttcagcagcttctattacaccactattgcagactcaaccacagcccttattacagcagcctcagcaaaaagctggtttattgcagcctcctgttcgtatagtttcacagccacaaccggcacgacgattagatcccccatcccgattttcaggaagaaatgacagaggggatcaagtgcctaacagaaaagatgatcgaagtcgtgagagagagagagaaagacgtagatcgagagaaagatcacctcagaggaaacgttcccgggaaagatctccacgaagagagcgagagcgatcacctcggagagttcgacgtgttgttccacgttacacagttcagttttcaaagttttctttagattgtcccagttgtgacatgatggaactaaggcgccgttatcaaaatttgtatatacctagtgacttttttgatgctcaatttacatgggtggatgctttccctttgtcaagaccatttcagctgggaaattactgcaatttttatgtaatgcacagagaagtagagtccttagaaaaaaatatggccattcttgatccaccagatgctgaccacttatacagtgcaaaggtaatgctgatggctagccctagtatggaagatttatatcataagtcatgtgctcttgctgaggacccacaagaacttcgagatggattccaacatcctgctagacttgttaagtttttagtgggcatggaaggcaaggatgaagctatggccattggaggccactggtctccttcgttggatggaccagacccagaaaaagatccctctgtgttgattaagactgctattcgttgttgtaaggctctgacaggcattgatctaagtgtgtgcacacaatggtaccgttttgcagagattcgctaccatcgccctgaggagacccacaaggggcgtacagttccagctcatgtggagacagtggttttatttttcccggatgtttggcattgccttcccacccgctcagagtgggaaaccctctcccgaggatacaagcagcagctggtcgagaagcttcagggtgaacgcaaggaggctgatggagaacaggatgaagaagagaaggatgatggtgaagctaaagaaatttctacacctacccattggtctaaacttgatccaaagacaatgaaggtaaatgacctccgaaaagaattagaaagtcgagctcttagttccaaaggattaaaatcccagttaatagcccgattgacaaaacagcttaaagtagaggaacaaaaagaagaacagaaggagttagagaaatctgaaaaagaagaggatgaggatgatgataggaaatctgaagacgataaagaggaagaagaaaggaaacgtcaagaggaaatagaacgccagcgtcgagaaagaagatatattttgcctgatgaaccggccatcattgtacatccaaattgggctgcaaaaagtggcaagtttgattgtagcatcatgtctttgagtgtcctattggactacagattagaggataataaagaacattcatttgaggtttcattgtttgcggaacttttcaacgaaatgcttcaaagagattttggtgtccgtatatacaaatcattactgtctcttcctgagaaagaggac

SEQ ID NO: 12241 - protein, 798 aa, Homo sapiens
MAQFGGQKNPPWATQFTATAVSQPAALGVQQPSLLGASPTIYTQQTALAAAGLTTQTPANYQLTQTAALQQQAAAAAAALQQQYSQPQQALYSVQQQLQQPQQTLLTQPAVALPTSLSLSTPQPTAQITVSYPTPRSSQQQTQPQKQRVFTGVVTKLHDTFGFVDEDVFFQLSAVKGKTPQVGDRVLVEATYNPNMPFKWNAQRIQTLPNQNQSQTQPLLKTPPAVLQPIAPQTTFGVQTQPQPQSLLQAQISAASITPLLQTQPQPLLQQPQQKAGLLQPPVRIVSQPQPARRLDPPSRFSGRNDRGDQVPNRKDDRSRERERERRRSRERSPQRKRSRERSPRRERERSPRRVRRVVPRYTVQFSKFSLDCPSCDMMELRRRYQNLYIPSDFFDAQFTWVDAFPLSRPFQLGNYCNFYVMHREVESLEKNMAILDPPDADHLYSAKVMLMASPSMEDLYHKSCALAEDPQELRDGFQHPARLVKFLVGMEGKDEAMAIGGHWSPSLDGPDPEKDPSVLIKTAIRCCKALTGIDLSVCTQWYRFAEIRYHRPEETHKGRTVPAHVETVVLFFPDVWHCLPTRSEWETLSRGYKQQLVEKLQGERKEADGEQDEEEKDDGEAKEISTPTHWSKLDPKTMKVNDLRKELESRALSSKGLKSQLIARLTKQLKVEEQKEEQKELEKSEKEEDEDDDRKSEDDKEEEERKRQEEIERQRRERRYILPDEPAIIVHPNWAAKSGKFDCSIMSLSVLLDYRLEDNKEHSFEVSLFAELFNEMLQRDFGVRIYKSLLSLPEKED

SEQ ID NO: 12242 - DNA, 2646 bp, Homo sapiens
  CDS (213)..(1136)
atcactcaagatggctgcccccatcaagatgaccggggtgtgccggggggaaaggggcagcatgatggtctgagatggtgtagcgtcggaccatgtggcagtttctgaggctggggagccggataatggggggtggggcccgttggggggtaaaggggcaatagcgtcctttcacaggctaacctcggctcttcccagtcctctggactaaaatggggaacacattgggcctggcaccaatggggactttgccccgccggagcccccgccgagaggaacccctgcccaaccctgggagcttcgatgagctgcaccgtctatgcaaagatgtattcccagcacagatggagggagtgaagctcgttgtcaacaaggttctgagcagccatttccaggtggcgcacactatacacatgagtgccctgggcttgccgggatatcacctccatgcggcctatgcaggggattggcagctcagtcccactgaggtgttccccactgtggtaggggatatggacagcagtggcagcctgaacgcccaggtcttgctcctcttggcagagcggctccgagctaaggctgtcttccagacgcagcaggccaagttcctgacatggcagtttgatggcgagtatcggggagatgactacacagccactctgaccctaggaaatcctgacctgattggggagtcggtgatcatggttgctcacttcctgcagagcctcactcatcggctggtgctgggaggagagctagtttatcaccggcggccaggcgaagagggggccatcttgacactggctgggaagtactcggctgtacactgggtagctacattgaatgtgggatcaggcggggcccatgcaagttactaccacagggcaaatgaacaggttcaggttggagtggagtttgaggcaaacacaaggctacaagacacaacattctcctttggttaccacctgactctgccccaggccaacatggtatttagaggcttggtggatagtaactggtgtgtaggtgctgtgctggagaagaagatgccccctctgcctgtcaccctagcccttggagccttcctcaatcactggcgcaacagattccattgtggcttcagcatcactgtgggctgaggttgtccagagccagcccccacagcagctggaacctctgagtcaggtgccctagggccaaagactaggcccctcttcagagcccaccttgctgggtgatctctaggacccaggagcagagtggtggacaggaccatgccctcctcagaactggagctgccacaggggcagttgatgaggcagaggtttgaggatcccccctctgctaccagccccagtatcaccttccccatgctcttgtggctgtggactaagggagaaggattaaggggtatggctgaattcccccggcaccccttgccctcaggcttccttcttcctttccctttggttaatcctgcatgggattagctgaccatcctgttttccatcccagagcctcccaaggctgggaaagtagggctgaagggctagatgtttggtctcaggaagtggggcccacccattcccagaaggagcttctttacctcttagccctgaggtttcctccttcccatcttctgtgcttccagagaacaactttgttcctatggtcacccccactatccccatgaccgcatgaagaggcagttattgctttagtctttcattgcaaccactgggctccctttgaacccggcccaatctttggtcccagcattttcccactccagtgtatccagggtgttccaggtgagctggggaaggaagcgagcatggcctcagctgcagatctcctggagcagcggcatcatggcagacaggccctggatgtgctggatttggtacccgtaggcctcattaatgctccggagctcagccagcaggcctagcaacttcgcatacagaaacctttggaggaagtagtggggttgccaggaaaacaggagggaaataaggcagttgggagtcttgtctctaggccctgatcccctgaactattcctcagtgaagccaggtctgaacattagagaaaatcatgctctggtatgacagactatcagaggttccaaaggtcctccagggggcctcggtctgacactgtcttctctcaccatgctcagttttttctgaacccagagctctgagagccgagtgtgaagaaagctccagacttggccagaactccaaccatgtggaatctgagggcctggccttctagagcaggttctagaaggtggatgtgttctatggtataaagcatcccctttctggccaaactagctcttggaggaacgagcaaaacagaagcggtgcatacctcagagcctggataaatcacagactattgaacctggaactggctttgaccatgaaactgtgaatggccctaacttcaagggaaatgagaaatcgaaggaattggcccaatggcgaggagaggaaaggccaagggaagagaaaagtctgcgttagtctggagaagttggactagtgaggtaatggatgtcatcaatctcaggaatgctattacccagagcctctgagctactactttgcatctgtactgaataaaaaaaaaatctgg

SEQ ID NO: 12243 - protein, 308 aa, Homo sapiens
MGNTLGLAPMGTLPRRSPRREEPLPNPGSFDELHRLCKDVFPAQMEGVKLVVNKVLSSHFQVAHTIHMSALGLPGYHLHAAYAGDWQLSPTEVFPTVVGDMDSSGSLNAQVLLLLAERLRAKAVFQTQQAKFLTWQFDGEYRGDDYTATLTLGNPDLIGESVIMVAHFLQSLTHRLVLGGELVYHRRPGEEGAILTLAGKYSAVHWVATLNVGSGGAHASYYHRANEQVQVGVEFEANTRLQDTTFSFGYHLTLPQANMVFRGLVDSNWCVGAVLEKKMPPLPVTLALGAFLNHWRNRFHCGFSITVG

SEQ ID NO: 12244 - DNA, 3303 bp, Homo sapiens
  CDS (157)..(1131)
aaggaaattcaggaagcaaaagctcccagtccttccataaaccggcaaaccagcattgaaacggatagagtgtctaaggagttcatagaatttctcaagaccttccacaagacaggccaagaaatctataaacagaccaagctgtttttggaaggaatgcattacaaaagggatctaagcattgaagaacagtcagagtgtgctcaggatttctaccacaatgtggccgaaaggatgcaaactcgtgggaaagtgcctccagaaagagtcgagaagataatggatcagattgaaaagtacatcatgactcgtctctataaatatgtattctgtccagaaactactgatgatgagaagaaagatcttgccattcaaaagagaatcagagccctgcgctgggttacgcctcagatgctgtgtgtccctgttaatgaagacatcccagaagtgtctgatatggtggtgaaggcgatcacagatatcattgagatggattccaagcgtgtgcctcgagacaagctggcctgcatcaccaagtgcagcaagcacatcttcaatgccatcaagatcaccaagaatgagccggcgtcagcggatgacttcctccccaccctcatctacattgttttgaagggcaaccccccacgccttcagtctaatatccagtatatcacgcgcttctgcaatccaagccgactgatgactggagaggatggctactatttcaccaatctgtgctgtgctgtggctttcattgagaagctagacgcccagtctttgaatctaagtcaggaggattttgatcgctacatgtctggccagacctctcccaggaagcaagaagctgagagttggtctcctgatgcttgcttaggcgtcaagcaaatgtataagaacttggatctcttgtctcagttgaatgaacgacaagaaaggatcatgaatgaagccaagaaactggaaaaagacctcatagattggacagatggaattgcaagagaagttcaagacatcgttgagaaatacccactggaaattaagcctccgaatcaaccgttagcagctattgactctgaaaacgttgaaaatgataaacttcctccaccactgcaacctcaagtttatgcaggatgatcacaatttagtggagagtatttatttgagcctaaattgtaggtagcccttactacactcaactgattgggatctagaatgtaactaaattgcttataaatgtcagagcattttttaaaggtacagtatatggggattgtttcgtttttcctagcaggggaaccttagttaataataaaatactacttatttgagttactgatacagattcatttaaggcttgtgtgcaaattttgtctcaatcttttttccctccatgattttcctatgtgcttcctctggcattcactgtggttttggtaaataattgccttttaaaggattaaacaaatgaatgctacaaagtgtatgttcaagaaaattaaatggtaccactcttccacagtttggaataattttataattgtaaagatagaaattatattgataagtaaatatgtaaaattgtaaatatgtaaaaaaaaagaatggtgtctgctgtgcatggcattttatatgttaattttttagtttaaaatgaagtatattgaatgtttgcctttagcaccattttatttggtttgtcccactaaaatgactcgagaagtgtttagacaaactccccttaagatgtgcactccatctttaagaacgtgttagccttaactttgaggttctatatagtcagagactatgacaccactaaggttcagaataaagtttaggccacataaaattgctgtttaatgtagtcgatggaagactttaaactatgcttctagcttatttttccctcattcattcagcaaatctctattgagttcttcagtgagaaggagcaggcactgggcctggaatggaaggcgggaatgaatgggcctctgatggtgagaggtgacggggtccctcagctgtgagatgcaaggggcgccttgcagcctccataatatacatttgactttgcaaacgtctagacatgttttctgaacctttttcaggacatttcaacctcgggactattcatattagtggcctgagaggtgttgttgtggggccaccctgtgcatggtagaatgttcagcagcattcctgccatccatatccattaggtgccagtagcacccccgctagagctgtgaaaaattctctccagacatagtcagatgtctcctggggccatatcacccctccgttaagaaccactgatgtcttttacaaaccaggagttatcctcctggtggttaatatggtgtaaccaaagaatcttgcactcaatgcacagtgtgatgttaactaaaacgagttaaatatttaggaggcttgacagctacctgcattgtagaaccttttcttatctcagtggaaccttctataacctaaatataccattgatgattcttcttccattcagtgacatccacagattatgcagctatacttgtgaaatcgtgcatgaggccccagggcaccgttctagaacaacgtcacttcacacaggcagctgagaaaggttctcttgcttttccagtatcttcctaaggatggagcccaaaattgcagagcagtaactttggaataaaaccagggtgggtataaaacttcttattcttaaatttacatataagatctattaagcttgacacatctgtgtcatcacgcactgaagacaggaagcagttcactgagtcagctggttcccaagctcgcacagaaggtgataagttactatcaaatgccagtgagaatcttcttatagaataacctgggcccaagtgattttagtacaaaacttgcccttctttggtttaattttctatgtgcttttaggtgtgaatccagatatgcggtcttaattcctttggaaatacacagttcgtttagttactgtacactctgtttgttcaataaactgcatatcaacttcccacaaaagctgacttttttgggtctcttacatataaagtaggttattgagttgatttttttggaggtatctcatattggtcgaattcttctggtatggactcttgccttatatagaggcttctatttctcttaagtcagcatcaatacaacggccggagtttctgtttttgcaataagaagatgttggtattttatgtagggtaaatgtgactggaatacacctttggaacggaattctttatcaataaagtttcacaatccgtc

SEQ ID NO: 12245 - protein, 325 aa, Homo sapiens
MHYKRDLSIEEQSECAQDFYHNVAERMQTRGKVPPERVEKIMDQIEKYIMTRLYKYVFCPETTDDEKKDLAIQKRIRALRWVTPQMLCVPVNEDIPEVSDMVVKAITDIIEMDSKRVPRDKLACITKCSKHIFNAIKITKNEPASADDFLPTLIYIVLKGNPPRLQSNIQYITRFCNPSRLMTGEDGYYFTNLCCAVAFIEKLDAQSLNLSQEDFDRYMSGQTSPRKQEAESWSPDACLGVKQMYKNLDLLSQLNERQERIMNEAKKLEKDLIDWTDGIAREVQDIVEKYPLEIKPPNQPLAAIDSENVENDKLPPPLQPQVYAG

SEQ ID NO: 12246 - DNA, 2715 bp, Homo sapiens
  CDS (130)..(603)
ttttgcttcgatgtgctctactgtcacctgtatggataccagcagccccggaccccccgattcaccaacgagccctacccactgtttgtaacatggaagattggtcgagacaaaagattacgtggatgcatgggtactttttctgccatgaatttgcattcaggactcagggagtacacacttaccagtgcccttaaagatagccgttttcccccaatgacaagggatgagctgccacggcttttctgctcagtgtctctgctcactaactttgaagatgtctgtgattatttggactgggaggtgggtgtacatggcattagaatagaattcatcaatgaaaaaggatcaaaacgcaccgccacctacctaccggaggttgcaaaggagcaaggatgggaccatatacagaccatagactccttattgaggaaaggaggatacaaagctccgattactaatgaattcaggaaaaccataaaactgaccaggtatcgtagtgaaaagatgaccctgagctatgctgaataccttgctcatcgccagcatcatcatttccaaaatggcattgggcatccccttccgccatacaaccattattcctgacactgagccgcacaaccagtcactgggcctctctgcagacctcttcccaggagaccctacaccttcttggtctagctatctcttttactgtaccattttatgatgatagtttccgttgccatggtgaagcttcgacatcgtcaactaagatcatcatggtaacgggtagaaaaatggcatttgttaagatcctgttttattattttagatcgttgattttttttttgcagcatatataattttgggtttttttttccttataatattatgtagaattttgctttgctgtctcagtcaggtttctgtttttctgtcctccttgcctttcttcccgttttgcttcctgttttccttcttccttcccgttttccttcttccttccctgcctcccttcctttgactgtggatggaagaaagtgtgcagtttttagggattttacttaggttcgtctttagttttcctcagtaagatagttgttttttgatacctgagtttgggattaattcatatcaaattcaggtatttgtatattactcttgatttttgtctgaaattcactttgctatgacagcctagtagttgggtcttcactccttagtatatgtttttcccatggtgaaaatacatgaactttagttctagtagtgagcattcaaaggtccgtgatagggcttgtcacagagagagagaaatcatttatccctattgtgctggttatcatagaagagactgcctcaccactttatagaaccaatttgcaaactaaaacactgtttggagaaggtacaaactacctttcaaaaaggctacaggaaacattttatgagcagcaaatattaggaagagagcagatacagaatttagtgcctttgagaagaatataattaagtggaattaagaggggttagaaaaaaggcaatttagaaaaatattcttgtaaaactttattgtttctatatgtgaaacagaagattagacaaattccttactcttaagtatttttttaagctgaaaaaaaattattttgagcaaataaccaataagagacatttgtctattttatattaatttaaatttgttagctctaggtttcaataagtcatgattggctagaatccattttagctaccatctaaagatatggtaaagacaatttagtaaaacaaaagttcatatttgccatgatttcagatatgtttgtcatggggacaatattagagttttagagatactataaaatagcttgaatttctttctgcactacatacttttgatagaaacacatttactacattgataagatgttatgtcacacctgtgaaaatggagttggcattcagatatgctatagttagagcccagctcatctgcaagtatagtcttcccatgatgcatacaaagataacttactgatgtcgataggaggtccatacatatatccccaggaaaaatgacagattattctggaggaagatgaccttcattttatggttatgtgtgtgtgtctgtgtgtctttggaaaaatatatataattttttcaaataggaagccaacatatcaagtgatgaattaaagtatgctgcagaatatatattctaaaactacaaaaaagtcactgaatatcaaaatgatacagcttatacatatagttactgtgacaagtgacagactgctagttcagaattcaaaaatcctttcctagtttgtgagataatgggctaaattccttctgcctgccactggggcaaagcaaattgctttagtttttgatgagagttcttagaagtttgttggtattccttcatccacagcatccattgttgaaataaccattttcagttgtgatgccttaactaagaagccaattgttagcctgaaatgcaatcttggtagccagtttcaatgaagctagagattagtcagaaaaagttagctgttgggctttagaaagggattttgagtcctgtcatttctacttgggagcattttggagcagattagtctttcagtataaaaacaagtggctacctgatggaaacttttcttacccttatagggaaactgagcacaagctgaatgatattgtctgctgcaaaacaaaacaaac

SEQ ID NO: 12247 - protein, 158 aa, Homo sapiens
MGTFSAMNLHSGLREYTLTSALKDSRFPPMTRDELPRLFCSVSLLTNFEDVCDYLDWEVGVHGIRIEFINEKGSKRTATYLPEVAKEQGWDHIQTIDSLLRKGGYKAPITNEFRKTIKLTRYRSEKMTLSYAEYLAHRQHHHFQNGIGHPLPPYNHYS

SEQ ID NO: 12248 - DNA, 2647 bp, Homo sapiens
  CDS (40)..(1305)
agagccgcgagctggaccagccgtgcaaatctctagaagatgacggtgttctttaaaacgcttcgaaatcactggaagaaaactacagctgggctctgcctgctgacctggggaggccattggctctatggaaaacactgtgataacctcctaaggagagcagcctgtcaagaagctcaggtgtttggcaatcaactcattcctcccaatgcacaagtgaagaaggccactgtttttctcaatcctgcagcttgcaaaggaaaagccaggactctatttgaaaaaaatgctgccccgattttacatttatctggcatggatgtgactattgttaagacagattatgagggacaagccaagaaactcctggaactgatggaaaacacggatgtgatcattgttgcaggaggagatgggacactgcaggaggttgttactggtgttcttcgacgaacagatgaggctaccttcagtaagattcccattggatttatcccactgggagagaccagtagtttgagtcataccctctttgccgaaagtggaaacaaagtccaacatattactgatgccacacttgccattgtgaaaggagagacagttccacttgatgtcttgcagatcaagggtgaaaaggaacagcctgtatttgcaatgaccggccttcgatggggatctttcagagatgctggcgtcaaagttagcaagtactggtatcttgggcctctaaaaatcaaagcagcccactttttcagcactcttaaggagtggcctcagactcatcaagcctctatctcatacacgggacctacagagagacctcccaatgaaccagaggagacccctgtacaaaggccttctttgtacaggagaatattacgaaggcttgcgtcctactgggcacaaccacaggatgccctttcccaagaggtgagcccggaggtctggaaagatgtgcagctgtccaccattgaactgtccatcacaacacggaataatcagcttgacccgacaagcaaagaagattttctgaatatctgcattgaacctgacaccatcagcaaaggagactttataactataggaagtcgaaaggtgagaaaccccaagctgcacgtggagggcacggagtgtctccaagccagccagtgcactttgcttatcccggagggagcagggggctcttttagcattgacagtgaggagtatgaagcgatgcctgtggaggtgaaactgctccccaggaagctgcagttcttctgtgatcctaggaagagagaacagatgctcacaagccccacccagtgagcagcagaagacaagcactctgagaccacactttaggccaccggtgggaccaaaagggaacaggtgcctcagccatcccaacagtgtcgtcagagggtccccagggcattttcatggcaagtacccctctgcccccactccagcagtgcttcccaaagtgtgctctgtcacctgctttgcaatcggcttccattagcgcatgttttattttggtgtgacggttggccctcctaaacacggactttcctcaggctggttcaagacggaaaaggactttcttctgttttcttccaaagtgcaaccacagtggagagcccacggtgggcttagcctgcctaggcccttccatttctcttctttgaccgtgctaggaattccaggaaagtgcattcctgccctggtgaccttttcctatgtctaggctcctccacaggtgctgctattttgtgagctccggctcctgtttagcttttatttcagttctaacctcagtccagaaacatatgtgaggttgtttccctcttcagccacggctacaataccggaaaatgctagtttttatttatttttttaagtagtgcttcctaaatggtttgcatgagagccacctggggtacatgttgaaaacttatttggggtctaccccaaacctaataacccaaatttggggatggggcccaggaatatgcatttttaaaaagtcatctgcccctcccaggtgattctgtaagttgtccctcaactgtacttggagaaatcgtgttttaaagcagtagtccacaaagtattctgctcatgtgcccccaaaagtattttgaaaaatcatgtataccctcacccacctaagttgatatctaaaattttatctaagttggtatctaaaatttttcatgggaagttaaatagttgacaaagtatgtatttgctggtgtcgtgtaaatattggtattttaaaataaaaactgttacatcactattttaaacatatccagtacaatttaaatatcacaacaatttgacacccttcattcatttataaaaataaatgagctagttctttagtagttaaacatttcaaattggcttttctccttctgtatttccataccacttttcagccaagaatcctatcataatgtaatctattatgcccgacatcttttaatcattcaccccattacttcttgtcaacaaaaaatataaatggaaattttttttttagctcttgctttaagtgtttgtttgttatctcagtccagaaccaatattatcgtaattaattattggtatataatgaaaacggtattaattcttggatgattaaaagtttttttattag

SEQ ID NO: 12249 - protein, 422 aa, Homo sapiens
MTVFFKTLRNHWKKTTAGLCLLTWGGHWLYGKHCDNLLRRAACQEAQVFGNQLIPPNAQVKKATVFLNPAACKGKARTLFEKNAAPILHLSGMDVTIVKTDYEGQAKKLLELMENTDVIIVAGGDGTLQEVVTGVLRRTDEATFSKIPIGFIPLGETSSLSHTLFAESGNKVQHITDATLAIVKGETVPLDVLQIKGEKEQPVFAMTGLRWGSFRDAGVKVSKYWYLGPLKIKAAHFFSTLKEWPQTHQASISYTGPTERPPNEPEETPVQRPSLYRRILRRLASYWAQPQDALSQEVSPEVWKDVQLSTIELSITTRNNQLDPTSKEDFLNICIEPDTISKGDFITIGSRKVRNPKLHVEGTECLQASQCTLLIPEGAGGSFSIDSEEYEAMPVEVKLLPRKLQFFCDPRKREQMLTSPTQ

SEQ ID NO: 12250 - DNA, 2681 bp, Homo sapiens
  CDS (45)..(1280)
agagctgaacctgcatcccggacctgcggcgaccgtcgtacaccatgggcctccacctccgcccctaccgtgtggggctgctcccggatggcctcctgttcctcttgctgctgctaatgctgctcgcggacccagcgctcccggccggacgtcaccccccagtggtgctggtccctggtgatttgggtaaccaactggaagccaagctggacaagccgacagtggtgcactacctctgctccaagaagaccgaaagctacttcacaatctggctgaacctggaactgctgctgcctgtcatcattgactgctggattgacaatatcaggctggtttacaacaaaacatccagggccacccagtttcctgatggtgtggatgtacgtgtccctggctttgggaagaccttctcactggagttcctggaccccagcaaaagcagcgtgggttcctatttccacaccatggtggagagccttgtgggctggggctacacacggggtgaggatgtccgaggggctccctatgactggcgccgagccccaaatgaaaacgggccctacttcctggccctccgcgagatgatcgaggagatgtaccagctgtatgggggccccgtggtgctggttgcccacagtatgggcaacatgtacacgctctactttctgcagcggcagccgcaggcctggaaggacaagtatatccgggccttcgtgtcactgggtgcgccctgggggggcgtggccaagaccctgcgcgtcctggcttcaggagacaacaaccggatcccagtcatcgggcccctgaagatccgggagcagcagcggtcagctgtctccaccagctggctgctgccctacaactacacatggtcacctgagaaggtgttcgtgcagacacccacaatcaactacacactgcgggactaccgcaagttcttccaggacatcggctttgaagatggctggctcatgcggcaggacacagaagggctggtggaagccacgatgccacctggcgtgcagctgcactgcctctatggcactggcgtccccacaccagactccttctactatgagagcttccctgaccgtgaccctaaaatctgctttggtgacggcgatggtactgtgaacttgaagagtgccctgcagtgccaggcctggcagagccgccaggagcaccaagtgttgctgcaggagctgccaggcagcgagcacatcgagatgctggccaacgccaccaccctggcctatctgaaacgtgtgctccttgggccctgactcctgtgccacaggactcctgtggctcggccgtggacctgctgttggcctctggggctgtcatggcccacgcgttttgcaaagtttgtgactcaccattcaaggccccgagtcttggactgtgaagcatctgccatggggaagtgctgtttgttatcctttctctgtggcagtgaagaaggaagaaatgagagtctagactcaagggacactggatggcaagatgctgctgatggtggaactgctgtgaccttaggactggctccacagggtggactggctgggccctggtcccagtccctgcctggggccatgtgtcccccctattcctgtgggcttttcatacttgcctactgggccctggccccgcagccttcctatgagggatgttactgggctgtggtcctgtacccagaggtcccagggatcggctcctggcccctcgggtgacccttcccacacaccagccacagataggcctgccactggtcatgggtagctagagctgctggcttccctgtggcttagctggtggccagcctgactggcttcctgggcgagcctagtagctcctgcaggcaggggcagtttgttgcgttcttcgtggttcccaggccctgggacatctcactccactcctacctcccttaccaccaggagcattcaagctctggattgggcagcagatgtgcccccagtcccgcaggctgtgttccaggggccctgatttcctcggatgtgctattggccccaggactgaagctgcctcccttcaccctgggactgtggttccaaggatgagagcaggggttggagccatggccttctgggaacctatggagaaggggaatccaaggaagcagccaaggctgctcgcagcttccctgagctgcacctcttgctaaccccaccatcacactgccaccctgccctagggtctcactagtaccaagtgggtcagcacagggctgaggatggggctcctatccaccctggccagcacccagcttagtgctgggactagcccagaaacttgaatgggaccctgagagagccaggggtcccctgaggcccccctaggggctttctgtctgccccagggtgctccatggatctccctgtggcagcaggcatggagagtcagggctgccttcatggcagtaggctctaagtgggtgactggccacaggccgagaaaagggtacagcctctaggtggggttcccaaagacgccttcaggctggactgagctgctctcccacagggtttctgtgcagctggattttctctgttgcatacatgcctggcatctgtctccccttgttcctgagtggccccacatggggctctgagcaggctgtatctggattctggcaataaaagtactctggatgctgt

SEQ ID NO: 12251 - protein, 412 aa, Homo sapiens
MGLHLRPYRVGLLPDGLLFLLLLLMLLADPALPAGRHPPVVLVPGDLGNQLEAKLDKPTVVHYLCSKKTESYFTIWLNLELLLPVIIDCWIDNIRLVYNKTSRATQFPDGVDVRVPGFGKTFSLEFLDPSKSSVGSYFHTMVESLVGWGYTRGEDVRGAPYDWRRAPNENGPYFLALREMIEEMYQLYGGPVVLVAHSMGNMYTLYFLQRQPQAWKDKYIRAFVSLGAPWGGVAKTLRVLASGDNNRIPVIGPLKIREQQRSAVSTSWLLPYNYTWSPEKVFVQTPTINYTLRDYRKFFQDIGFEDGWLMRQDTEGLVEATMPPGVQLHCLYGTGVPTPDSFYYESFPDRDPKICFGDGDGTVNLKSALQCQAWQSRQEHQVLLQELPGSEHIEMLANATTLAYLKRVLLGP

SEQ ID NO: 12252 - DNA, 3558 bp, Homo sapiens
  CDS (64)..(1716)
gaaaatgctaaacgactcaataaactaagagatgagcttgttaaactcaaatcctttgcactcatgctggtggatgaaagacaaatgcacattgaacaacttggcctgcaaagccagaaagtacaggatcttactcagaagctgagggaagaagaagagaagctcaaagccattacttccaaatccaaagaagacagacagaaattgctcaagttagaagtggactttgaacacaaggcttcgaggttttctcaagagcatgaagagatgaacgctaaactggctaatcaagagtctcacaataggcaacttagactcaagctggttggcttaacccaaagaatcgaggagctagaagagaccaacaaaaatctgcagaaggcagaggaagaacttcaagaattaagagataaaattgccaaaggagaatgtggaaactctagcctcatggcagaagtggaaaatcttcgaaagcgtgtgcttgaaatggaaggtaaagatgaggagatcactaaaactgaatcccagtgtagggaattgaggaagaagctgcaagaggaagaacaccatagtaaggagctcagacttgaagttgagaagctacagaagagaatgtctgaactagagaaattggaagaagcatttagcaagagtaaatctgagtgcacccagctacatttaaatctggagaaagaaaagaacttaaccaaagacctgctaaatgaattggaggtggtcaagagtcgagttaaagaattggaatgttctgaaagtagattggaaaaggctgaattaagcctaaaagatgatcttaccaagttgaagtcatttaccgtgatgctggttgatgaaaggaaaaatatgatggaaaaaataaaacaagaagagagaaaagtggatggactcaataaaaattttaaggtggaacaaggaaaagttatggatgtaactgaaaaactaattgaagaaagtaagaaacttttaaaactaaaatctgaaatggaggaaaaagtatacaacttgacaagagaaagagatgagttgataggcaaattgaaaagtgaagaagaaaaatcctctgaattaagctgcagtgttgacttactaaagaagagacttgatggtatagaggaagtggaaagagaaataacaagaggaaggtcacgaaaagggtctgagctcacctgcccggaagataataagattaaggaactaacacttgaaattgagagactgaagaaacgtctccaacaattggaagtggtcgaaggggatttgatgaagacagaagatgagtatgatcagctggaacagaaatttagaactgagcaggataaggctaacttcctctctcaacaactagaggagatcaagcaccaaattgccaagaataaagcaatagagaagggtgaggttgtgagccaggaagctgaactgagacacagatttcggttggaagaagctaaaagtcgagacttaaaagccggagtacaagctcttaaagagaagattcacgaattaatgaacaaagaagatcagctttctcagctccaggtagattattctgtacttcaacaaagatttatggaagaagaaaataagaacaaaaacatggggcaggaggttctcaatctgaccaaagagttggagctttccaagcgctacagcagagctcttaggcccagtgtgaatggaaaaagaatggtggatgttctgtgacgtcaactggagtccaaactgatgcagtcagcggtgaagcagcagaggaagaaacgccagctgtattcatacggaaatccttccaggaagaaaatcatattatgagtaatcttcggcaggtgggattgaagaaacccgtggaaagatcttctgttctagacaggtatcctccagcagcaaatgagctcactatgagaaagtcttggattccatggatgagaaagagggaaaacggcccctccatcactcaggagaaagggccccgaacaaattccagtccagggcacccaggagaggtagtcctttcaccaaagcagggccagcccctgcatattcgagtgacaccagaccacgagaacagcactgcgactttggagataacaagcccgacatctgaagaatttttttctagtaccactgtcattcctaccttagggaatcagaaaccaagaataaccattattccatcaccaaacgttatgcctcaaaaacaaaaaagtggagatactactcttggcccagaacgagccatgtccccagtcacaattactacattttccagagagaagactccagaaagtggaagaggcgcatttgcagacaggcccacatcccctattcagataatgacggtgtctacatcagcagcaccagctgagattgcagtttctcccgaatcccaggaaatgcccatgggacggacaatcctcaaagtcaccccagaaaaacagactgttccaactccagtacggaaatacaactccaatgccaatatcataaccacagaggacaataaaattcacattcacttagggtctcagtttaaacggtcccctgggacttcaggtgaaggagtcagtccagttattactgtccgaccagtaaacgtgacagccgaaaaggaggtttccaccggcactgtccttcgctctcccaggaatcacctctcctcacggcctggtgcaagcaaagtgacgagcactatcaccataacaccggtcacaacgtcatctgctcgaggaacccagtcagtgtcaggacaagacgggtcatcccagcggcctacacccacccgcattcctatgtcaaaaggtatgaaagcaggaaagccagtagtggcagccccaggagcaggaaatctgaccaaattcgagcctcgagctgagactcagtctatgaaaatagagctgaagaaatctgcagccagcagcaccacctctctcggaggggggaagggctgagggcagtggctaagggggtatgttgtgcagatgctactgctgccgtgaaagtgaaccttcatctgtttgtgccagttctttacatgtactaatttaagttttaaatattgtgtttataaaataaccaactaataaccatttgtctttcccattttgtgcatttgttttgatgctggggaacaaaattagcaaaactattgcttgctgcctagaagccagggcgtggtttctagttccagttttgcttctagcaagtggacccatcaatagacccatctgagcctgtttcctcatcagttagatgtggggactcaatcacacgctcttcaagtccggctcccatatttcctaattgcaagccaaatttaatgtaccttgttccacaataattttttattaaaaaaatcctattacaaaataagacatactttaactattgtcatttgcctctttcacatcatgaatttgctttatgtgctggaaaaaacatcacatagctatcacagggcctggacctctaaaattttgcaaaaacaaaaggttctaagatgatttcaggaaataatgtgaacatgtaataaaatggaaatgaaatatg

SEQ ID NO: 12253 - protein, 551 aa, Homo sapiens
MLVDERQMHIEQLGLQSQKVQDLTQKLREEEEKLKAITSKSKEDRQKLLKLEVDFEHKASRFSQEHEEMNAKLANQESHNRQLRLKLVGLTQRIEELEETNKNLQKAEEELQELRDKIAKGECGNSSLMAEVENLRKRVLEMEGKDEEITKTESQCRELRKKLQEEEHHSKELRLEVEKLQKRMSELEKLEEAFSKSKSECTQLHLNLEKEKNLTKDLLNELEVVKSRVKELECSESRLEKAELSLKDDLTKLKSFTVMLVDERKNMMEKIKQEERKVDGLNKNFKVEQGKVMDVTEKLIEESKKLLKLKSEMEEKVYNLTRERDELIGKLKSEEEKSSELSCSVDLLKKRLDGIEEVEREITRGRSRKGSELTCPEDNKIKELTLEIERLKKRLQQLEVVEGDLMKTEDEYDQLEQKFRTEQDKANFLSQQLEEIKHQIAKNKAIEKGEVVSQEAELRHRFRLEEAKSRDLKAGVQALKEKIHELMNKEDQLSQLQVDYSVLQQRFMEEENKNKNMGQEVLNLTKELELSKRYSRALRPSVNGKRMVDVL

SEQ ID NO: 12254 - DNA, 2922 bp, Homo sapiens
  CDS (142)..(693)
tcggaactcgccaggggcgccgccggcggcggagggagcgtgactgcgctgcgcagggcgctaggaggcattgtcgccgctcaggcccttttgtgagaagcagaccagcctgggggctggcggcaggacacctgtgtctgcatgctgaagaagatgggtgaggccgtggccagagtagcaaggaaggtcaacgagacggtggagagcggctctgacactctggagctccacctggaggggaacttcctacaccgcctccccagcgaggtcagtgccctgcagcacctcaaggccattgacctgtcccggaaccagttccaggacttccctgagcagcttaccgccctgccggcgctggagaccatcaacctggaggagaacgagatcgtagatgtgcccgtggagaagctggccgccatgccagccttgcgcagcatcaacctccgcttcaacccactcaacgccgaggtgcgcgtgatcgccccgccgctcatcaagtttgacatgctcatgtctccggaaggcgcaagagcccccctaccttacgccaccctcctcatgcccacccagcaagggacagaggccacaggcctggaaccctggaagggagggaggcccatgggaggccaagcctgggggctgggggcgggtgggccgagcagcacgtggtgggtggggtgcagctggtctggatagatagcttacagcagtagtgggctctggaatgcccaagggaagaggcaaggtggggcctgcagcctggactcggcactcacagctgctgtgcaaactcaggcagatctcctgccctctctgagccttgtcacttgaaaaaaacaggaccctttccctcctttgggctccctggaggtttttaagcagtacgtgcctccagttacctccagatcagcaggcacaggtgggcattgccaggtattttctgagcccctgcgggtttgaggccttgtttttagtgctgagagccagttgctgccctgagaagagaagacaacctccatctatttattgcttcctgagaactgacctggatgcggccctctgcagggcccagtcttcagtcctgtggtccctggactggtgggaacctgaactaggagtcctgggagagctgtggtgggaatatgggctggcactgctgcagggcaagaacattcatgtaggagcccgaggaccagcaggctgggaatggggagcaagtcacgtcagctctgtcattccccacagttaacaaattggcggggtgggaagtcctgagtgctccgtccctctagcatcactcctgagctgcgggagaggtggcccagagaacagcagagtcagttacacctgcagctcttgtctaaagtgattagatggccaccctcaccactgtccagtccagcagcagcctggctgccttgtcatggcctcctgggggcagaaggcgatgtggaccacgggatttgtagccagccagctcccaggccaacgcccaaagccctgatgacctggttcttctgaggccctcaacctggcatcttagggtatggtcaggcaacagggtgaccagctgtcctggtttcccaggacatggaactttcaatgctaaaactggacagtacccagcaagtggggatggttggtcccctaccaggagagggcctggggctcttgcttcccgagaacgcctgtggcttgaagaaccttgactgcttggtcctcaggtatctacctcccaccttctcctcatctgtggagcaagccaactcagtgccccagaccccacctgatctgcatctttgtttgcatctccagagacacctgaggccccagagcttgaggcaaagccaggccgtccaaatcctgtgtgccgtggacgagtggccactttactactcctaaggctaagatgttgagagctcagaccactgctcagagcagtaatccctgctcagaatgctcccagttccctcgtccctgcccaggtctcttgtctcttgggaaggaactgataggtcgggccattgttgggccatcactgagcgctcagtatctcaagagactctgttcattctgctcgtatcccaaggcctggttggtcaaactctgggcaaagggttttcaggatgaggaggtcaagacaggatgtccagagctaccgagttcatctgtgggtgttgggggcaagtgggggctgaagtcctgtgcaggctgcgctggccccacctgccttgtgccctggagtggggtttctccttgttgaagaagaggcatccttctctgatgtgcacaaacacaatgtatgaccagagccttgcaactcaaagtgtggtctgtggaccagcagcggcagtgacacctgggagcttgttaggaatgcagagtctaggcctcaccctatacctcccgactcagaccctgcattttagcaagacccccagctgattcctataagcactttagagtttgagaagcaaggacctaggctggggatgtcctccgagcagagggtgaagtttctctcagttctctccctgccacttccagggatctgagcctgtgttcagcctcctccctaacccaccctgggagacacttggcctgttagattgttccagagtctgcatggcactcctgaagaagggagtgggacctgcagtcaccaggagatgagggttaggtgtgcccagccctccagacccggcctttctggttaacccctgcatgccaagctgcctgctgccccaggtcctcacctcaggcctttgaaggggcagcttctggaagttgttttctcctctgcttggagagtttgcccttgtctgtcttggaaagtgtgggcagccacagatgcccccaaatcagagctcacagtgagtgagcccctaagcttcagtctgcgataaagaatgcattggtttc

SEQ ID NO: 12255 - protein, 184 aa, Homo sapiens
MLKKMGEAVARVARKVNETVESGSDTLELHLEGNFLHRLPSEVSALQHLKAIDLSRNQFQDFPEQLTALPALETINLEENEIVDVPVEKLAAMPALRSINLRFNPLNAEVRVIAPPLIKFDMLMSPEGARAPLPYATLLMPTQQGTEATGLEPWKGGRPMGGQAWGLGAGGPSSTWWVGCSWSG

SEQ ID NO: 12256 - DNA, 2308 bp, Homo sapiens
  CDS (138)..(1367)
taaatgtccactttgctccccggattgtagttgaccccaaacccacaaccacagacattggctctgatgtgacccttacctgtgtctgggttgggaatccccccctcactctcacctggaccaaaaaggactcaaatatggtcctgagtaacagcaaccagctgctgctgaagtcggtgactcaggcagacgctggcacctacacctgccgggccatcgtgcctcgaatcggagtggctgagcgggaggtgccgctctatgtgaacgggccccccatcatctccagtgaggcagtgcagtatgctgtgaggggtgacggtggcaaggtggagtgtttcattgggagcacaccacccccagaccgcatagcatgggcctggaaggagaacttcttggaggtggggaccctggaacgctatacagtggagaggaccaactcaggcagtggggtgctatccacgctcaccatcaacaatgtcatggaggccgactttcagactcactacaactgcaccgcctggaacagcttcgggccaggcacagccatcatccagctggaagagcgagaggtgttacctgtgggcatcatagctggggccaccatcggcgcgagcatcctgctcatcttcttcttcatcgccttggtattcttcctctaccggcgccgcaaaggcagtcgcaaagacgtgaccctgaggaagctggatatcaaggtggagacagtgaaccgagagccacttacgatgcattctgaccgggaggatgacaccgccagcgtctccacagcaacccgggtcatgaaggccatctactcgtcgtttaaggatgatgtggatctgaagcaggacctgcgctgcgacaccatcgacacccgggaggagtatgagatgaaggaccccaccaatggctactacaacgtgcgtgcccatgaagaccgcccgtcttccagggcagtgctctatgctgactaccgtgcccctggccctgcccgcttcgacggccgcccctcatcccgtctctcccactccagcggctatgcccagctcaacacctatagccggggccctgcctctgactatggccctgagcccacaccccctggccctgctgccccagctggcactgacacaaccagccagctgtcctacgagaactatgagaagttcaactcccatcccttccctggggcagctgggtaccccacctaccgactgggctacccccaggccccaccctctggcctggagcggaccccatatgaggcgtatgaccccattggcaagtacgccacagccactcgattctcctacacctcccagcactcggactacggccagcgattccagcagcgcatgcagactcacgtgtaggggccagagcctggctggggcatctctgcggggcagaggagaaggctttcgcagctgttccctgatattcagggacattgctcattgctcccttctcggaccagccttcttcctcccaccatggcaggtggggagcaggtctcccagagacaccccgtcccgaggatggtgctctgtgcatgccccagcctcctgggcctgcccttccctcttcttcgggaggatgtgtctcttctgacctgcactcttgcctgaccctagaatggggacagggaaagtgaaggttagggaaagcagaggggggcactttttagcattccctttctatcccacccctctgatctcccataagtggaaatgggggtacccagggatgggcaggctttggcctagggacatgaagtatgggagtgggtggctgtggcacagacaggtggaaaacgggatagcctggccagtccctctgttgtctgcattcgtgccctgggtgcctctctccttcctcagggtactgcagaagggagcgaacagggtactgttcgctcttgtctacagaacagccctggcactgcattcaaatccagtcttcattcagctgggatcaaaatgccagtcaccttggctacccactgtggacagctgtctgtcagcatgcagagggatccaggaatccccccggcagcacggcccgctttccttctcctccatgctgggccagccagataagtcagggtcctggtggagaaagaaaggctaggaccatgtcctcattgacccagatactgctgtgtgctgcacagcagtgaaccaacactagagggagccacacaagcctcctctccccagtctgccccacttcctggctttaactcttgagctggtttggggagtggtgaggtaggggtgggggtgctgtaggctctttttcaaaaaaaaac

SEQ ID NO: 12257 - protein, 410 aa, Homo sapiens
MVLSNSNQLLLKSVTQADAGTYTCRAIVPRIGVAEREVPLYVNGPPIISSEAVQYAVRGDGGKVECFIGSTPPPDRIAWAWKENFLEVGTLERYTVERTNSGSGVLSTLTINNVMEADFQTHYNCTAWNSFGPGTAIIQLEEREVLPVGIIAGATIGASILLIFFFIALVFFLYRRRKGSRKDVTLRKLDIKVETVNREPLTMHSDREDDTASVSTATRVMKAIYSSFKDDVDLKQDLRCDTIDTREEYEMKDPTNGYYNVRAHEDRPSSRAVLYADYRAPGPARFDGRPSSRLSHSSGYAQLNTYSRGPASDYGPEPTPPGPAAPAGTDTTSQLSYENYEKFNSHPFPGAAGYPTYRLGYPQAPPSGLERTPYEAYDPIGKYATATRFSYTSQHSDYGQRFQQRMQTHV

SEQ ID NO: 12258 - DNA, 2913 bp, Homo sapiens
  CDS (513)..(1826)
aggagatcctggggccttacctactagcggaatcgactgaagagacgcctgccagtgcgggaggtaggaagctcgatccccaaagaaaagagcgagtgggcaggcagctgcgagacagaaccggagtgtgcagggtccctagaggccggttcctggtctgtgctgctctcctggaagccatggtacaggcagagctcagggcgatccccaggtgagggcagcggctctgcctgggattccaccgcagtacaaccgggtagatgcggggtggagaagaaaggatgttgcctgcactgctcgccaatagcaccctgagaggctacatttgcagaagcagcagcagcagaagacacagcgccggtccaggaggcggctcgagctgttcgtaaagtcgcccgacagctttttctccgtagtatgcgagttgacaaaacagccagagaacagggctccccattacaatcttttcgagatcttttcccttgctaaccggatctgatttgtgcgaaaacatgccttgcacttgtacctggaggaactggagacagtggattcgacctttagtagcggtcatctacctggtgtcaatagtggttgcggttcccctatgcgtgtgggaattacagaaactggaggttggaatacacaccaaggcttggtttattgctggaatctttttgctgttgactattcctatatcactgtgggtgatattgcaacacttagtgcattatacacaacctgaactacaaaaaccaataataaggattctttggatggtacctatttacagtttagatagttggatagctttgaaatatcccggaattgcaatatatgtggatacctgcagagaatgctatgaagcttatgtaatttacaactttatgggattccttaccaattatctaactaaccggtatccaaatctggtattaatccttgaagccaaagatcaacagaaacatttccctcctttatgttgctgtccaccatgggctatgggagaagtattgctgtttaggtgcaaactaggtgtattacagtacacagttgtcagacctttcaccaccatcgttgctttaatctgtgagctgcttggtatatatgacgaagggaactttagcttttcaaatgcttggacttatttggttataataaacaacatgtcacagttgtttgccatgtattgtctcctgctcttttataaagtactaaaagaagaactgagcccaatccaacctgttggcaaatttctttgtgtaaggctggtggtttttgtttctttttggcaagcagtagttattgctttgttggtaaaagttggcgttatttctgaaaagcatacgtgggaatggcaaactgtagaagctgtggccaccggactccaggattttattatctgtattgagatgttcctcgctgccattgctcatcattacacattctcatataaaccatatgtccaagaagcagaagagggctcatgctttgattcctttcttgccatgtgggatgtctcagatattagagatgatatttctgaacaagtaaggcatgttggacggacagtcgggggacatcccaggaaaaaattgtttcccgaggatcaagatcaaaatgaacatacaagtttattatcatcatcatcacaagatgcaatttccattgcttcttctatgccaccttcacccatgggtcactaccaagggtttggacacactgtgactccccagactacacctaccacagctaagatatctgatgaaatccttagtgatactataggagagaaaaaagaaccttcagataaatccgtggattcctgaacagtatggaaaagcaaactgtgcaactactacattatatcattacctggtatcccatggattttgtgcttgggacagaccataaatgatggaaaatgtcaacacaaaaatagctgaaagccaggtacaactactgcatttatatatgtaagttttgtatatcaaaaataattggtctaaatttcctagacttagacttgatttcttaacattagggtatcgcatactcaaatggtagacaatgaccccaactaaatcttcctgatgttacactgctttatcaagaggatggactttttttttttgagacagacagagtcttgctctgtcacccaggctggagtgcagtggcgcaatctcgggtcactgcaagctctgcctcccaagttcatgccattctcctgcctcagcctcccaagtagctgggactacaggcacctgccaccatgcccagctaattttttttttttcagtagagacagggtctcaccatgttagccaggatggtcttgatctgacctcgtgatccgccgacctcggcctcccaaagtgctggaattacaggcgtgagccactgcgcctggccaagaatggacattttttaaaaaaacatcagtacttcctaccactgctgcatgagtataatgctccggaattatcagaaagcataatgcagaaatacgaattagtggaacttaatcatgtgccatataagcttacctaacaaacagttatatccctattcctcaactgaatgtctttcaataaataagaatttatcatttattttctgcaacttttttatgtctcattctttaaacattaaaaacccttaatattttaacaaaaatttcttgattagaggcacagtgaaaaagaagtcaaaaaaaaaagttctacttttcatcagtgctattaaaggtggcagcaaatgtaaatcttggctgaatggtcttaattactcattaaaccacagtcagaaagacatataggtgctatttgggaaaactttttattacctaggatggggtttctctaattgctaatcacaaccccactgggtcatgtttgacattttataatg

SEQ ID NO: 12259 - protein, 438 aa, Homo sapiens
MPCTCTWRNWRQWIRPLVAVIYLVSIVVAVPLCVWELQKLEVGIHTKAWFIAGIFLLLTIPISLWVILQHLVHYTQPELQKPIIRILWMVPIYSLDSWIALKYPGIAIYVDTCRECYEAYVIYNFMGFLTNYLTNRYPNLVLILEAKDQQKHFPPLCCCPPWAMGEVLLFRCKLGVLQYTVVRPFTTIVALICELLGIYDEGNFSFSNAWTYLVIINNMSQLFAMYCLLLFYKVLKEELSPIQPVGKFLCVRLVVFVSFWQAVVIALLVKVGVISEKHTWEWQTVEAVATGLQDFIICIEMFLAAIAHHYTFSYKPYVQEAEEGSCFDSFLAMWDVSDIRDDISEQVRHVGRTVGGHPRKKLFPEDQDQNEHTSLLSSSSQDAISIASSMPPSPMGHYQGFGHTVTPQTTPTTAKISDEILSDTIGEKKEPSDKSVDS

SEQ ID NO: 12260 - DNA, 2568 bp, Homo sapiens
  CDS (22)..(1347)
gcgaagctgagaggcctatggatgaggaggacgcggcggccccggtttgttctcatgaacaagatggatgacctcaacctgcactaccggtttctgaattggcgccggcggatccgggagattcgagaggtccgagctttccgatatcaggagaggttcaaacatatccttgtagatggagatactttaagttatcatggaaactctggtgaagttggctgctacgtggcttctcgacccctgaccaaggacagcaattattttgaggtgtctattgtggacagtggagtccggggcaccattgctgtggggctggtccctcagtactacagcttggatcaccagcctggctggttgcctgactctgtagcctaccatgctgatgatggcaagctgtacaatggccgagccaagggccgccagtttgggtcaaagtgcaactccggggaccggattggctgtggcattgagcctgtgtcctttgatgtgcagaccgcccagatcttcttcaccaaaaatgggaagcgggtgggctctaccatcatgcccatgtccccagatggactgttcccagcagtgggcatgcactccctgggtgaggaggtgcggctgcacctcaacgctgagctgggccgtgaggacgacagcgtcatgatggtggacagttacgaggatgaatggggccggctacatgatgtcagagtctgtgggactctgctggagtacttagggaagggcaaaagcatcgtggatgtggggctggcccaggcccggcacccactcagcacccgcagccactacttcgaggtggagatcgtggaccctggagagaaatgctacatcgccctggggctggcacggaaggactatcccaagaacaggcaccctggctggagcagagggtctgtggcttatcatgcagacgatgggaagatcttccatggcagtggtgtgggggacccctttgggccacgctgttacaaaggggacatcatgggctgtggaatcatgttcccccgggactacattttggacagtgagggggacagtgatgacagttgtgacacagtgatcctgtctccgactgcccgggccgtccggaacgtgcggaatgtcatgtacctgcaccaggaaggggaagaggaagaggaggaagaggaagaggaagaggatggggaagagatagagccggagcatgagggcaggaaggtggtggttttcttcactcggaatggcaagatcattgggaagaaggatgctgttgttccttctggaggcttcttccccaccattggaatgctgagctgcggggagaaagtcaaagtagatctgcaccccttgagtggctagggcctcccctccagacctgctccttctccctgctcaccctctgctgggccaggcacccagttcctgacttcccagaggcttcgtttacccagcaggcccctggaggtgtgtagtcactctgcccccactggctcaggcccctgtcacgcttctctgtgcccacgtttctgacctggtgctgccactgttgtcagtccctgggcctgagtccctggttggacaggaatggacccaaagaatggtgttggtatgtgggtggtcccactcgctttggtcagtgggcttctgggtccccctttccctcaccggccctgtgtgggtggagaggcgtgagcaccctatctcagctgctattcgggcatgatgctttgtagagggtagagtagacagccccctcccctactcaccatggtatttctccttgaattcctctttcttgttttctttcctggttgtgtgaaccagttgctgctgtcatacccctggcagggccaggggacctctctttggtcatctctgtcctttcactggctgctgccccaggaagactcctctaggctctccatctttcccttgagagctggctccccaccccaacctgctcaggcaccacagaggatctaggtctctggctccccatacctggacccacatgggtgggtgcctgttgcatgtttaagagagaggggctgtgaggtgacagggcactagggccttcactcctttctccccttccatcctttctttaccagtgccacccatgtccctagctcccgggtattggggctgaggctctggggcctgtctccctgccagcgtgagggcaagaccccagagccttagctgagcaagcccagaggggcagcgtggcccctccctccccttttcctgccccgtcccatgcctcagcttgctgcttgtgccagttgcctgtttcgcttcagtgtttgattctagcacttacatgtgtcctccccaccaagccctctatctccttctaatccttcaacccctggccccctccccgtaacagtgacttttccagggaggaagaggcagcaggagctgttggccttggtttgcacagagcgggtagggctgtagggaaagcgggtgagctgttgtgctgctgggcctccctttggccctcgcttcccaccctacgatgtatgaaatgtatgtacagaccagagatgtttatacagccgataaagatgg

SEQ ID NO: 12261 - protein, 442 aa, Homo sapiens
MRRTRRPRFVLMNKMDDLNLHYRFLNWRRRIREIREVRAFRYQERFKHILVDGDTLSYHGNSGEVGCYVASRPLTKDSNYFEVSIVDSGVRGTIAVGLVPQYYSLDHQPGWLPDSVAYHADDGKLYNGRAKGRQFGSKCNSGDRIGCGIEPVSFDVQTAQIFFTKNGKRVGSTIMPMSPDGLFPAVGMHSLGEEVRLHLNAELGREDDSVMMVDSYEDEWGRLHDVRVCGTLLEYLGKGKSIVDVGLAQARHPLSTRSHYFEVEIVDPGEKCYIALGLARKDYPKNRHPGWSRGSVAYHADDGKIFHGSGVGDPFGPRCYKGDIMGCGIMFPRDYILDSEGDSDDSCDTVILSPTARAVRNVRNVMYLHQEGEEEEEEEEEEEDGEEIEPEHEGRKVVVFFTRNGKIIGKKDAVVPSGGFFPTIGMLSCGEKVKVDLHPLSG

SEQ ID NO: 12262 - DNA, 3279 bp, Homo sapiens
  CDS (87)..(1796)
actgccggcctgcgcggtactcactgccggcctccgcggtacccactgccggcctccgcgctacccggccgcagcgcgcgagtcacatggaagctcctgaggagcccgcgccagtgcgcggaggcccggaggccacccttgaggtccgtgggtcgcgctgcttgcggctgtccgccttccgagaagagctgcgggcgctcttggtcctggctggccccgcgttcttggttcagctgatggtgttcctgatcagcttcataagctccgtgttctgtggccacctgggcaagctggagctggatgcagtcacgctggcaatcgcggttatcaatgtcactggtgtctcagtgggattcggcttatcttctgcctgtgacaccctcatctcccagacgtacgggagccagaacctgaagcacgtgggcgtgatcctgcagcggagtgcgctcgtcctgctcctctgctgcttcccctgctgggcgctctttctcaacacccagcacatcctgctgctcttcaggcaggacccagatgtgtccaggcttacccagacctatgtcacgatcttcattccagctcttcctgcaacctttctttatatgttacaagttaaatatttgctcaaccagggaattgtactgccccagatcgtaactggagttgcagccaaccttgtcaatgccctcgccaactatctgtttctccatcaactgcatcttggggtgataggctctgcactggcaaacttgatttcccagtacaccctggctctactcctctttctctacatcctcgggaaaaaactgcatcaagctacatggggaggctggtccctcgagtgcctgcaggactgggcctccttcctccgcctggccatccccagcatgctcatgctgtgcatggagtggtgggcctatgaggtcgggagcttcctcagtggcatcctcggcatggtggagctgggcgctcagtccatcgtgtatgaactggccatcattgtgtacatggtccttgcaggcttcagtgtggctgccagtgtccgggtaggaaacgctctgggtgctggagacatggagcaggcacggaagtcctctaccgtttccctgctgattacagtgctctttgctgtagccttcagtgtcctgctgttaagctgtaaggatcacgtggggtacatttttactaccgaccgagacatcattaatctggtggctcaggtggttccaatttatgctgtttcccacctctttgaagctcttgcttgcacgagtggtggtgttctgagggggagtggaaatcagaaggttggagccattgtgaataccattgggtactatgtggttggcctccccatcgggatcgcgctgatgtttgcaaccacacttggagtgatgggtctgtggtcagggatcatcatctgtacagtctttcaagctgtgtgttttctaggctttattattcagctaaattggaaaaaagcctgtcagcaggctcaggtacacgccaatttgaaagtaaacaacgtgcctcggagtgggaattctgctctccctcaggatccgcttcacccagggtgccctgaaaaccttgaaggaattttaacgaacgatgttggaaagacaggcgagcctcagtcagatcagcagatgcgccaagaagaacctttgccggaacatccacaggacggcgctaaattgtccaggaaacagctggtgctgcggcgagggcttctgctcctgggggtcttcttaatcttgctggtggggattttagtgagattctatgtcagaattcagtgacgtggtaggaaagaaagtcaggtcgagtgatgcttttgagcttacacacaattcacaggcccaccagtgacaatttactgtgagttaatgtcattcaggtgtgcccatggattttgagggctggaaatgcaaagacacatttttctataaaaagaaaaagcaactaaggttaaaagctatattgtggcccaagacactgtctgaaagatgacatgagtagtaattcaccactatctgaaccaagcaaggatcaatgtgctgactgcattggccaatggctttgatacttctgctatttttttagacacaaacccataaactaactgcttaagaattcatactgcttgaattatgtaaaatatattttacagtatatctttccttgggccttagattactattcactgggcaaatggtatttgtttttgttttaattttttttttaatagacggaagtcttgctctgtcatgcaggctggagtgcggtggtgcgatcatagctcactgcagcctcgaactcttgggcttcaagcaatcctcctgtgtcagccaccagagtagctgagactacaggggtatgccaccatgcccagctggcatttgttaatcttcatttgaggtctagatctaggcactgtggacactgaaaaacagttgggaaatctttcgagctgtggaaatccaaacaaagactgataattcctggtaggggtgtgtgcgtgacgtactgcagcctcaacctcctgggctcaagtgatcctcccacctcagcctcctgagtagctgagaccacaggcgtgtgccaccacgcctagctaattttttataccagggtctaccctttgtttcccaggctggtcttgaattcctgggatcaagcaatccttccaccttgccctcccaaagtgttgggattataggcatgagccaccacgactggccagaggacaaaattttaataaaggtcttagcttaagcagtaatcctacttcattaagccttcctggggtgcggtacacaccgttaattcagcaaccctcagtacatactaagtatgctcagtgctgtgaaagtggattacaccaaattaagtcattcttatcacacccaatcaaaagtcaagaagccagggataaaagcacctcaggcacataacattaatctagtaatgtaattctctgcacatccagctggtgaaactgcgtgctgtaagctgggaccagctttgtccataactgctgagagaacttgctgaagctctaggaataattttgcctgcccggttgctcaccagttgtagcttgccagctcccaacacccttcctggtgccaataaactttctcaaagagcaatactgacatttcttttgataaaacctccagccttctctgtgttgttccgacataccgaggaccaactggtctacatggatgccctgaacatgcaattctttcttccaaaataaaacattaaatagag

SEQ ID NO: 12263 - protein, 570 aa, Homo sapiens [sequence omitted]

SEQ ID NO: 12264 - DNA, 2716 bp, Homo sapiens
  CDS (78)..(1328)
tactaaagaatgagaaagatgaggtgcaaaaattacaaaatatcattgcaagtcgagctactcagtataatcatgatatgaagagaaaagagcgtgaatataataaactgaaggaacgtctacatcaacttgttatgaacaagaaagataagaaaatagctatggacattttgaattatgtcgggagagctgatggaaaaagaggctcctggaggactggtaaaactgaagccaggaatgaagatgaaatgtataaaattctcttgaatgattatgaatatcgtcagaaacaaatcctaatggaaaatgcagaacttaagaaggttcttcaacaaatgaaaaaggaaatgatttctcttctttctccccaaaagaagaaacctagagaaagagtagatgatagtacaggaactgttatttccgatgttgaagaagatgccggggaactaagcagagagagtatgtgggacctttcctgtgaaactgtgagagagcagcttacaaacagcatcagaaaacagtggagaattttgaaaagtcatgtagaaaagcttgataaccaagtttcaaaggtacacctggaaggttttaatgatgaagatgtaatctcacgacaagaccatgaacaagaaactgaaaaactcgagttagaaattcagcagtgtaaagaaatgattaaaactcagcaacagcttttacagcagcagctcgctactgcatatgatgatgataccacttcactattacgagactgttatttgttggaagaaaaggaacgtctcaaagaagaatggtccctttttaaagagcagaaaaagaattttgagagggagagacgaagctttacagaagccgctattcgcctgggattggagagaatggcatttgaagaagaaagagccagttggttaaagcagcagtttctaaatatgactacctttgaccaccagaactcagaaaatgtgaaacttttcagtgccttctcaggaagttctgattgggacaatcttatagtgcactcgaggcagccgcaaaagaagcctcacagtgtgtctaatgggtctccagtttgcatgtctaaacttactaaatctcttcctgcttcaccttccacttcagacttttgccagacacgttcctgcatatctgaacatagttcaatcaatgtactgaatataactgctgaagaaattaaaccaaatcaggttggaggagaatgtacaaatcaaaaatggagtgtggcgtcaagacctggatcacaggaaggttgctatagtggatgctccttgagctacacaaattctcatgtagaaaaagatgacttaccttagacatgtggactggaatttttttcattaatgtgttcatcaagtttcacatctaagttgaaacagggtgtgtcataaagtcagttatctctaataacttaagatggtctgagttgtttgtttggacttccctgtcttcccccaaagagttgaaatcttaaatctatttaaaaggatataaaagctttggatatgtatttttagtaacagaagcatctggttctgtgaataaaggaatgtatagatgtttggatggaaacaaaagcactagactgagtttcctcttataggtattaaaaatagcacttttaggaaactgattattgtaaatgtttaattttgtctcaaatatagttggcattggaagtttagcctttacttgaatgtatactgtagatttttaacaaagcgagttctatatttattatgtttagtgtggtttgaaattacctctttcatatgttttaaataaagtgaaatttatgtatgttttgtacatagatacacatgattatgttaagaggctttaagatttaaaagtttcacacaaccataagtatagtatttcatgccagtaaaatttttttagtggtattctgtttacagatgtattaggaccattgatgcattacatttaagaattctctttaatacatctgggcaataaatattgaaaggtattccatgaagctgagttctttagataatcaacactactaacattacatttttgagatttttatgacattagatttttattttgtatatgtagaatattataatttttaaaaggactattgatgatagaagaataggggcaagacgacaaaagtacctttgaataaaacaatttaagaaattggtttaagatattggatgatagaagatatttaagatatctagatggtgatattttccttacaagatgggtaccagtatagtaatatttgtatactaactagggctttgtattgtcaataattttttaataattttttaatgaggtatttaccactgaagaaatatgataatataaaaccatcaaattttataattgagatgatactctggaaaaacatgtcatttcattttcagaaaactcttaagctctcttcagtctctgtaatgtttctgattgcatgtttcttcatgaaaagtatgttgttgttttgatagtaataataataaatgtaggctcagctctttcccaggattttcatcaaaaagctttaagtgcctaaccctgcttgtctctgtacatagaagcctgcacagatccaacccttgctaggtatcatagtttaggcccatttaccttcccctgtactggcagttcagccgcttacatgcactcaccctgtttgtggctattttaaattcatattatt

SEQ ID NO: 12265 - protein, 417 aa, Homo sapiens [sequence omitted]

SEQ ID NO: 12266 - DNA, 2845 bp, Homo sapiens
  CDS (94)..(1380)
gcgcgagggaggcgagccggagcccgagcactagcagcagccggagtcggcggaaagcacccgggcgcagccggagccggtgccgcagctgcgatggccgtggccgtggggagaccgtctaatgaagagcttcgaaacttgtctttgtctggccatgtgggatttgacagcctccctgaccagctggtcaacaagtctacttctcaaggattctgtttcaacatcctttgtgttggtgagacaggcattggcaaatccacgttaatggacactttgttcaacaccaaatttgaaagtgacccagctactcacaatgaaccaggtgttcggttaaaagccagaagttatgagcttcaggaaagcaatgtacggctgaagttaaccattgttgacaccgtgggatttggagaccagataaataaagatgacagctataagccgatagtagaatatattgatgcccagttcgaggcctacctgcaagaggaattgaagattaaacgttctctcttcaactaccatgacacgaggatccatgcctgcctctactttattgcccctactggacattcactaaagtccctggatctggtcaccatgaaaaagctggacagtaaggtgaacatcattccaataattgcaaaagctgacaccattgccaagaatgaactgcacaaattcaagagtaagatcatgagtgaactggtcagcaatggggtccagatatatcagtttcccactgatgaagaaacggtggcagagattaacgcaacaatgagtgtccatctcccatttgcagtggttggcagcaccgaagaggtgaagattggcaacaagatggcaaaggccaggcagtacccctggggtgtggtgcaggttgagaatgaaaatcattgcgattttgtgaaacttcgagagatgctgatccgcgtgaacatggaggacttgcgagagcagactcacacccgccactatgaattgtaccgacgctgtaagcttgaagagatggggttcaaggacactgaccctgacagcaaacccttcagtcttcaggagacatatgaagcaaaaaggaatgaattcctgggagaactgcagaagaaagaagaagaaatgagacaaatgtttgttatgagagtgaaggagaaagaagctgaacttaaggaggcagagaaagagcttcacgagaagtttgaccttctaaagcggacacaccaagaagaaaagaagaaagtggaagacaagaagaaggagcttgaggaggaggtgaacaacttccagaagaagaaagcagcggctcagttactacagtcccaggcccagcaatctggggcccagcaaaccaagaaagacaaggataagaaaaatgcaagcttcacataaagcctggcaagccaaggatgttcccgcattcacctgcttttgcagtaatatcgtatctctgccatgtgtgttctttagttttattttattttattttatttttttacccttcctcaaacaccagtaactattattaactcgttttgctgaatgttgttgggtggtagaaaatgatagaacaagggaataaccgcgaatgctctgtgcagctggactctgtttccggaaagtaaatgatttgctttttatgcctgttctgaatggcagcacgaagcaggcctgttacttgtatgtcgctttggacagaggaaagtggggtaaaatgctacctgtacgtctgacatgaaaacttctcaccgcctcagcagctgaactaaaaacctgaatagccatgacaagagtttgcattttcttgatgattcatctccatgagtgcacaatccctgaactcactgtcttttctccacacttgtcctaagccaaggtagatttgtacgtagacagactggtgagcaagcattatattttatttttacccttgcatgacattttcattttaatcaataacattatttggcctgagcttgtgggtctgttcagactgtctcctctcatggtttgaaactgcatctgaatgcctgccttcaatcctggccaagttggagtagactggtatgagaaaactatgattagttcacatttactggtgcatccttgatcctctcacagatagaggtcttaaaggttggatcatgtaacattgcttagtagaagaatcttcttctaaggatgatgggctttctacagcctgcttaccactaacagtaaggaatctttcataaacacacctcagtttgttcccagtgggcttagagggaggacctgatgactgattccaggatacttgtacttctaataacatttttcatgaatcatgagaaaatttccacagatacttcccttagaaaatttgctataaactctgtatcattggtagcacaaatttgagcgaggccctgtcaattttaaggtggaaataggaaggaccacaacatgacccgtaagtcaagaaggtagacatttcatatccagcttccttgcttagtctcctttcagtatttggcaataaaagaaagaagaaatagaacagctgaagtctcaaatcattgtctggaattttcctcaccttggctagctccacctgctctttgtctaaggcccttgcctcatcagggattagaactggcccatatgccagaacctgtactaaatgcctaatttgtatggaagagtgcatatttaatctcttttctatactgctcctttctgatgcttatcctttcatctgtgtgattgttttttcccctctactaacaagatcctcccagctttctctctacatgtagaaaggataacatttctcatgaacccactgcccctctgcattttcctcactggttag

SEQ ID NO: 12267 - protein, 429 aa, Homo sapiens
MAVAVGRPSNEELRNLSLSGHVGFDSLPDQLVNKSTSQGFCFNILCVGETGIGKSTLMDTLFNTKFESDPATHNEPGVRLKARSYELQESNVRLKLTIVDTVGFGDQINKDDSYKPIVEYIDAQFEAYLQEELKIKRSLFNYHDTRIHACLYFIAPTGHSLKSLDLVTMKKLDSKVNIIPIIAKADTIAKNELHKFKSKIMSELVSNGVQIYQFPTDEETVAEINATMSVHLPFAVVGSTEEVKIGNKMAKARQYPWGVVQVENENHCDFVKLREMLIRVNMEDLREQTHTRHYELYRRCKLEEMGFKDTDPDSKPFSLQETYEAKRNEFLGELQKKEEEMRQMFVMRVKEKEAELKEAEKELHEKFDLLKRTHQEEKKKVEDKKKELEEEVNNFQKKKAAAQLLQSQAQQSGAQQTKKDKDKKNASFT

SEQ ID NO: 12268 - DNA, 2931 bp, Homo sapiens
  CDS (149)..(1261)
tggagagaagccacatgagtgtaaggaatgtggaaaggcctttcgtcagttttcccaccttgtgggtcataaaagaattcatactggagaaaaaccctatgaatgcaaggaatgcgggaagggctttacatgtaggtatcaacttaccatgcatcagagaatttattcaggggagaaacactatgaatgtaaagaaaatggggaggcttttagtagtggccatcaacttactgcacctcatacatttgaaagtgttgagaaaccttataagtgtgaggaatgtgggaaagcctttagtgtgcatggacgacttactcgacatcagggtattcatagtggtaagaaaccctatgaatgtaacaaatgtgggaagtcctttaggctcaattcatcccttaaaatacatcaaaatattcataccggtgagaaaccctacaaatgtaaggaatgtgggaaggccttcagtcagcgtgcacaccttgcccatcataacagaattcatactggttacaaaccctttgaatgtaaagaatgtgggaagtcctttcgttgtgcctcatatcttgttatacatgagagaattcatacaggagagaaaccctatgtatgtcaagagtgtgggaagggttttagttatagccataaactcactatacatcgcagagttcatactggtgagaaaccttatgaatgtaaggaatgtgggaaggcctttagtgtatctggacaacttactcagcatctgagtattcacagtggtaagaaaccctttgaatgcaacaaatgcgggaagtcttttaggttcatttctgtacttaaagcccatcagaatattcatagcgctgagaaaccctacgaatgtaaggaatgtggcaaggcctttcgtcatgccacaagcctcatatatcatgaccgaactcatgctggtgaaaagtcctatgaatgtaaagaatgtggggaaacttttagtcatgcttcacatcttattattcatgagagaattcataccagtgataaaccctatgaatgtaaaagatgtgggaaggcatttcactgtgcctcatatcttgttagacatgaaagcgttcatgctgatggaaatccctatatgtgtgaagagtgtgggaaagcttttaatagtagccatgaacttagtatacatcatagagttcatactggtgagaaaccctttaaatgtaacaaatgcagaaggtcctttaggcttagatccatccttgaagtacatcagagaattcatatttgatagagaaattgtggcatatacaggtagtaaagaaagcacattgtgtcaatggatttatcccactgaacaatttgaatgaagacaatgtggaatggctttgagatacagttcagtttttattaggcatcaatttgtattggtgtgaacttttcaaaatgtaaatcatatatgcagtttctttggtatgacctgtgttaactcagattcagagaatttataatgtatttttttaataacataagaaaacttttctgatattcctctagttttggattgccaaaatattcacagtagaggaaaactgagaaaacgtaggaaaccattctttatacttgcatgtaaacatcttccagcaacaatcatttattgttaaacctggaaaaagccattacacaggaaacctctgttgatataagcgatgatgggaaaggctatttagccactctgcatatttaatgctcatgatcaacatctgcttcctatagctgggatgatatgggggaagatatttatcccttctggggatcatatataaatgatgatagtagtacctacagtatagtgctgttagaattacatgagttagatgtggaggtcagagtggaagcaggtgtgagagggtcccgcagaagaaaacatggctgccaaagtgtttgagtccatcggcaagtttggcctggccttagctgttgcaggaggcatggtgaactctgccttatgtaatgtggatgctgggcacagagctgccatctttgaccaattccgtggagtacagaacattgtggtaggggaagggactcactttctcatcccatgtgtacaaaaaccaattatctttgactgctgttctcaaccacgtagtgcgccagtcatcactggtagcaaagatttacagaatgtcaacatcacactgtgcatcctcttccggcccatcactagccagcttcctcgcatcttcaccagcattggagaggactacgatgagtgtgtgctgccgttcattaccacggagatcctcaagtcactggtggctcgctttgatgctggagaactaatcacccagagggagctggtctccagccaggtgagcaacaaccttatggagtgagcagccacctttgggctcattctggacgacgtgtctttgacacatctgaccttcttgaaggagttaacagacaggtggccccccaggaagcagagagcgccagatttgtggtggaaaaggcggccatcatctctgctgagggtgactccaaggcagctgagctgatcgccaactcactggccactgcaggggacggccagagcgagctgtgcaagctggaagctgcagaagacattgcataccagctctcatgctctcggaacatcacctgcctgccggcagggcagtccgtgctcctccagctgccctagtgaggccccagcctacctgcacctccgtgaggcaactgggccacagccccgatgattcgtaacaccacctttcgccctcaccccagaaatcactgaaatttcatgattggcttaaagtgaaggaagtaaaggtaaaatcacttcagatctctaaaaaacaaagaattacatgagttagtacatgaaaaaattatgggaaactacatgaaatatactgttacgttcaataaacattagcttctgtatat

SEQ ID NO: 12269 - protein, 371 aa, Homo sapiens
MHQRIYSGEKHYECKENGEAFSSGHQLTAPHTFESVEKPYKCEECGKAFSVHGRLTRHQGIHSGKKPYECNKCGKSFRLNSSLKIHQNIHTGEKPYKCKECGKAFSQRAHLAHHNRIHTGYKPFECKECGKSFRCASYLVIHERIHTGEKPYVCQECGKGFSYSHKLTIHRRVHTGEKPYECKECGKAFSVSGQLTQHLSIHSGKKPFECNKCGKSFRFISVLKAHQNIHSAEKPYECKECGKAFRHATSLIYHDRTHAGEKSYECKECGETFSHASHLIIHERIHTSDKPYECKRCGKAFHCASYLVRHESVHADGNPYMCEECGKAFNSSHELSIHHRVHTGEKPFKCNKCRRSFRLRSILEVHQRIHI

SEQ ID NO: 12270 - DNA, 2277 bp, Homo sapiens
  CDS (11)..(907)
attgaggaacatggcgttgctggtgcgagtccttaggaaccagactagcatttctcagtgggttccagtatgcagccgattgatacctgtgtctcctacccaaggacagggggacagggctctgtctcgcacttcccagtggccccagatgagccagtcccaagcatgtggtggatcagaacagattcctggaatagacatacagctgaataggaagtatcacaccacacgtaagctttctactaccaaagattccccacagcctgttgaggagaaggttggtgctttcacaaagataatagaagccatgggattcacgggacctttgaaatacagtaaatggaagattaagattgcggccctgcgcatgtatactagctgtgtggagaaaactgacttcgaggaattccttctaaggtgtcagatgcctgatacattcaattcatggtttcttataaccctactccacgtctggatgtgtctagtccgaatgaagcaggaaggccggagtgggaagtacatgtgtcgtatcatagttcattttatgtgggaggatgttcagcagcgcggcagagtcatgggggttaatccctatatcctgaagaagaacatgatcctcatgacaaatcatttctatgcagcgatcttgggatatgatgaggggatcctttcagatgatcatgggctggccgctgccctctggagaaccttcttcaaccggaaatgtgaagaccctcgacatcttgaattgctggtagagtatgtgaggaaacagatacagtacctggactccatgaacggggaggatctgcttctgacaggggaggtgagctggcgccctctagtggagaagaatcctcagagcatcctgaagccccattctccgacttacaacgacgagggactttgatgggctgggccctccgcacggcccgccagctggcttcgaggaacctccaggagagaagtgcctgttggtccaggaccctgcagaaagtggcctgaactgacctctgaacagcatctgtcaaatacctggccccatttgtgttgagtttcctcttagtgggcccaggagtctgatctgctggggtacagggctgggagaacccctagctctcccggggtgtcctctcccttaggggaagccccgagtgagagtcccccagcacacactccccaaccccctccagcaactacatgtgactgatagcttttcccaaaggccaaggaagggatggtgtaggttcaaaagggaaaccccccagggcctgctgtggcctaggagcagattgtaatgctgccgagtccggtcggtgaccacgcgttgtccctcggctttcagccatggggttgagttggccattaaaagaaacagagacttctctctgccatggcccttctttattccagggacttagaaacttgcctgagatggtggacgcagtaatgagggcaccgcgcagctcagttagagacggagaaagggaagaggctgggatggtctctgctgctcttgcctctagttcatggagatgtgtctctgttcaggccaagatacagccagccaggcctgtcgtctgggacccaggaggcctctgatgaccaagggctttcacatcctaagtcatttggaaggaggccttgagaacaaagtcacctttgtcactcccagtgaactgaatgaggaacatgctgtctcctgtcttggcctcccctttcatgagatactggggagaagagaacattcctcctggcttagttgtagcagacccagacctgtgcccagctttggtcccccttcccaacttctgaagcacgtgctgcagagccaccttggtctgagcacctgaggaccagcccctcctccctcagtgcgggtcatctcttgggggattttcttaaagtgaagaaagggggtggggaaccatattgcccctccctcccccatcaaacttccttcatttaacttgctataaaatgagtcatataaagaaactctatatgggtgaggtatatcccacttctgtgaaaacattacaaatcaaaccgcttctctcagtttatttaagatgcttttgttgcgagcggagctctagagtgaagcctcctgtgtgtgtgtgagataataacaccttgtaactcattacagctgggcactatttacataaaccagagctgagccaggcaggaatttgctgattaatttatttttaatggagtgaagtataccatgcaccaaaataaactttactgtgtgtacctaactgctcctgg

SEQ ID NO: 12271 - protein, 299 aa, Homo sapiens
MALLVRVLRNQTSISQWVPVCSRLIPVSPTQGQGDRALSRTSQWPQMSQSQACGGSEQIPGIDIQLNRKYHTTRKLSTTKDSPQPVEEKVGAFTKIIEAMGFTGPLKYSKWKIKIAALRMYTSCVEKTDFEEFLLRCQMPDTFNSWFLITLLHVWMCLVRMKQEGRSGKYMCRIIVHFMWEDVQQRGRVMGVNPYILKKNMILMTNHFYAAILGYDEGILSDDHGLAAALWRTFFNRKCEDPRHLELLVEYVRKQIQYLDSMNGEDLLLTGEVSWRPLVEKNPQSILKPHSPTYNDEGL

SEQ ID NO: 12272 - DNA, 3682 bp, Homo sapiens
  CDS (87)..(3116)
acggcgcgcgcgcaccccttccgcgcagccccctgacctgcagcctccggacctcgctgcagcgcggacccggcccgcccgcccgaatgagtcagctgaggctgctgccgtcccgtcttggggtacaggctgcgaggctcctggctgcacatgacgtcccggtgtttggctggcgcagcaggtcctccgggccaccggccaccttcccaagcagcaaaggtggaggcggctccagttacatggaggagatgtacttcgcctggttggaaaacccccagagtgtccacaagtcctgggacagcttcttcagggaagccagcgaggaagccttttctggctctgctcagccacggcccccttctgttgtccatgagggcaggtctgcagtctcaagtcggaccaagaccagcaaattggtggaggaccacctggctgtacagtccctgatccgggcctaccagatccggggtcaccatgtggcccagctggaccccctgggcattctggatgcagacctggactcctttgtgccctcagacttgatcacaaccattgataaactggccttctatgaccttcaggaggctgaccttgataaggagttccagctgccgacaaccaccttcattgggggctctgaaaacaccctttctctgcgggagatcattcggcgcctggagaacacctactgccagcacattggcctggagttcatgttcatcaacgatgtggagcagtgccagtggatccggcagaagtttgagacccctggtgtgatgcagttctccagcgaggagaagcggaccctgctggcccggctagtgcgctccatgaggtttgaagacttcctggcccggaaatggtcctcagagaagcggtttggcctggagggctgtgaagtgatgattcctgccctcaagaccatcatcgacaaatccagcgagatggggattgagaatgtcatcttggggatgccacacaggggaaggctgaacgtgctggccaacgtgatccgcaaggacctggagcagatcttctgccggtttgaccccaagctggaggcggcggacgagggctccggggatgtcaagtaccacctgggcatgtaccatgagaggatcaaccgcgtcaccaaccggaacatcactctgtcgctggttgccaacccctcccacctggaggcagtggaccctgtggtgcaggggaagacaaaggcagagcagttctaccgtggagatgcccagggcaagaaggtcatgtccatcctggttcatggggacgccgcctttgctggccagggcgtggtatatgagaccttccacctgagcgacttgccctcctacacgaccaatggtaccgtgcacgtcgtcgtcaacaaccagattggattcaccacagacccccgaatggcccgctcctcaccatacccgaccgacgtggcccgggtggtcaatgcgcctatcttccatgtgaatgccgatgacccagaggctgtgatatatgtgtgcagtgtggcagccgaatggagaaacactttcaacaaagatgttgtcgtggacctggtctgttaccgccggcgtggccacaatgagatggacgagcccatgttcacccagccgctcatgtacaagcagatccacagacaggtgcctgtgctgaagaagtacgcagacaagctgattgccgagggcacagtcaccctgcaggagtttgaggaagaaattgccaaatacgaccggatctgtgaggaggcttatggcaggtccaaggataaaaagattctgcatataaagcactggttggactccccctggcctggcttcttcaacgtagatggggagcccaagagcatgacatgcccagccacggggatccctgaggacatgctcacccacatcggcagtgtggccagctctgtgcccctggaggactttaagatccacactggcctctctcgcattctgcggggccgtgcggacatgaccaagaaccggacggtggactgggcgttggcagagtacatggcctttggctccctgctgaaggaaggcatccacgtgcggctcagcgggcaggatgtggagaggggcacattcagtcaccggcaccatgttctccatgaccaggaggttgaccgcaggacgtgtgtgcctatgaatcatctctggcctgaccaggccccgtacaccgtgtgcaacagctccctctcggagtacggagtcctgggctttgagctgggctatgccatggccagccccaatgccctggtcctctgggaggcccagtttggggacttccacaacacggcccagtgcatcatcgaccagttcatcagcaccggccaggccaagtgggtgcggcataatggcattgtgctgctgctgccccatggcatggaaggcatgggcccagagcactcgtcagcgaggcccgaaaggttcctgcagatgagcaatgatgactcggatgcctaccctgcattcaccaaggacttcgaggtgagccagctctatgactgcaactggatcgtggtcaactgctccacaccggccaactacttccacgtgctgcgccggcagatcctgctgcccttccgcaagccgctgattatcttcacacctaaatctctgctgaggcacccagaggccaagtccagctttgaccaaatggtatccgggaccagcttccagcgggtgattcctgaagatggggccgcagcacgggcccctgagcaggtgcagcggctcatcttctgcacgggaaaggtgtactatgacctggtgaaggagcggagcagccaggacctggaggagaaagtggccatcacgcgcctggagcagatctctccattccccttcgacctgatcaagcaggaggcagagaagtacccaggtgcggagctggcctggtgtcaggaggagcacaagaacatgggctactatgactacatcagcccacgcttcatgaccatcctgaggcgcgcacggcccatatggtatgttggccgggacccagcggctgcaccagccacaggaaacaggaacactcacctggtgtcactgaagaagtttctggatactgccttcaatctccaggcctttgagggcaagacattttagagctgggcaaaacctgtgtaggtctcgctgtgggtttgctggggaccaagggggtgatgaaaaggggaggggcggagctcctgcccaagagaggggctgtggggccccaggataaaacagacacagtgacagggccaagagccagcactgctggccttggtgtcatgccagaatctaccaggactgagggagccagaggagtcctgtaggcaggctactgtgctggagcatcccccagctgctcccatcttgctggaatttcttgggcggcttctccacctgtatctcaagacagacacccgggggcctgtgtctgtggccgctcccatcccggcagccctggctgctgctcgccccaccctcgcttatctgtagattcaaagcgatgttctcttctgtgctcttagaagtagggagttcagcagtaacagccaggtgaagcgaacctgctgggtgatttgtttgcgctctgttttatggggcattcctgcgagatgtgtcagcttctgtatgagatgcagccacagctcatgtgtaccaaagtagaaaaccaaatcacagag

SEQ ID NO: 12273 - protein, 1010 aa, Homo sapiens
MSQLRLLPSRLGVQAARLLAAHDVPVFGWRSRSSGPPATFPSSKGGGGSSYMEEMYFAWLENPQSVHKSWDSFFREASEEAFSGSAQPRPPSVVHEGRSAVSSRTKTSKLVEDHLAVQSLIRAYQIRGHHVAQLDPLGILDADLDSFVPSDLITTIDKLAFYDLQEADLDKEFQLPTTTFIGGSENTLSLREIIRRLENTYCQHIGLEFMFINDVEQCQWIRQKFETPGVMQFSSEEKRTLLARLVRSMRFEDFLARKWSSEKRFGLEGCEVMIPALKTIIDKSSEMGIENVILGMPHRGRLNVLANVIRKDLEQIFCRFDPKLEAADEGSGDVKYHLGMYHERINRVTNRNITLSLVANPSHLEAVDPVVQGKTKAEQFYRGDAQGKKVMSILVHGDAAFAGQGVVYETFHLSDLPSYTTNGTVHVVVNNQIGFTTDPRMARSSPYPTDVARVVNAPIFHVNADDPEAVIYVCSVAAEWRNTFNKDVVVDLVCYRRRGHNEMDEPMFTQPLMYKQIHRQVPVLKKYADKLIAEGTVTLQEFEEEIAKYDRICEEAYGRSKDKKILHIKHWLDSPWPGFFNVDGEPKSMTCPATGIPEDMLTHIGSVASSVPLEDFKIHTGLSRILRGRADMTKNRTVDWALAEYMAFGSLLKEGIHVRLSGQDVERGTFSHRHHVLHDQEVDRRTCVPMNHLWPDQAPYTVCNSSLSEYGVLGFELGYAMASPNALVLWEAQFGDFHNTAQCIIDQFISTGQAKWVRHNGIVLLLPHGMEGMGPEHSSARPERFLQMSNDDSDAYPAFTKDFEVSQLYDCNWIVVNCSTPANYFHVLRRQILLPFRKPLIIFTPKSLLRHPEAKSSFDQMVSGTSFQRVIPEDGAAARAPEQVQRLIFCTGKVYYDLVKERSSQDLEEKVAITRLEQISPFPFDLIKQEAEKYPGAELAWCQEEHKNMGYYDYISPRFMTILRRARPIWYVGRDPAAAPATGNRNTHLVSLKKFLDTAFNLQAFEGKTF

SEQ ID NO: 12274 - DNA, 2432 bp, Homo sapiens
  CDS (104)..(1546)
gcgccagcaggaagtgggagaagaggcgacccaaggcgggctggcgggctggcggcagtcgctacttgcctagtagcctcagccgctgtgggctcctggggagatggaggggccggggctgggctcgcagtgcaggaatcacagccatggcccccaccctccaggatttggtcgatatggcatctgtgcacatgaaaacaaagaacttgccaatgcaagagaagctcttcctcttatagaggactctagtaactgtgacattgtcaaagctactcaatacggaatttttgaacgatgtaaagagttggtagaagcaggatatgatgtcaggcaaccagataaagaaaatgtgtcgcttcttcattgggctgctattaacaacagactggatcttgtaaggttttatatttcaaaaggtgctgttgtagatcagttgggtggagatttaaattcaactcctcttcactgggccatccgacaaggacatttacctatggtcatattattactccagcatggtgcagaccccactcttattgatggagagggattcagcagcatccacctggcagtattgtttcaacacatgcctattatagcatatctcatctcaaagggacagagtgtgaatatgacagatgtaaatgggcagacacctctcatgttatcagctcacaaagtaattgggccagaaccaactggatttcttttaaagtttaatccttctctcaatgtggttgataaaatacaccaaaacactccacttcactgggcagttgcagcaggaaatgttaatgcagttgataagcttttggaagctggttctagcctggatatccagaatgttaagggagaaacacctcttgatatggctctacaaaacaaaaatcagctcattattcatatgctaaaaacagaagccaaaatgagagccaaccaaaagttcagactttggaggtggctgcagaaatgcgagctcttcctgctgctgatgctttctgtgattaccatgtgggctattggatacatattggacttcaattcagattcttggcttttaaaaggatgtcttctagtaacactgttttttctgacatctttgtttccaaggttcttggttgggtataagaaccttgtatacttaccaacagcctttctgctaagttctgttttttggatatttatgacttggttcatcttattttttcctgatttagcaggagcccctttctatttcagtttcattttcagcatagtagcctttctatactttttctataagacttgggcaactgatccaggcttcactaaggcttctgaagaagaaaagaaagtgaatatcatcacccttgcagaaactggctctctggacttcagaacattttgtacatcatgtcttataaggaagccattaaggtcactccactgccatgtatgcaactgctgtgtggctcgatatgatcaacactgcctgtggactggacggtgcataggttttggcaaccatcactattacatattcttcttgtttttcctttccatggtatgaggctggattatatatggatctttcatctatttgtccagtcattgtgccacaacattcaaagaagatggattatggacttacctcaatcagattgtggcctgttccccttgggttttatatatcttgatgctagcaactttccatttctcatggtcaacatttttattattaaatcaactctttcagattgcctttctgggcctgacctcccatgagagaatcagcctgcagaagcagagcaagcatatgaaacagacgttgtccctcaggaagacaccatacaatcttggattcatgcaggacctggcagatttctttcagtgtggctgctttggcttggtgaagccctgtgtggtagattggacatcacagtacaccatggtctttcacccagccagggagaaggttcttcgctcagtatgaagaaaagcaacccaaaactctcaatctgatttgtttttgtttatgtcgatgccctgtagtttgaaagtgaagtaaagatttagaattcacctaagtccaaaggaaaacacgtggtttttaaagccattaggtaaaaaaagttctcaataaaggcattacaattttttaggtttagaaagatggacttttctgataaatcttggcagacatctaaaaaaaaaaccatatttttcacaagaaaatgcaagttactttttttggaaataatactcactgattatggataaaatggaatattttcagatactatattggctgtttcaaaatagtactattctttaaacttgtaatttttgctaagttatttgtctttgttgtatctataaatatgtaaaaaatatttaaatagatgtacctgttttgctttcacacttaataaaaaattttttttttgtagttg

SEQ ID NO: 12275 - protein, 481 aa, Homo sapiens
MEGPGLGSQCRNHSHGPHPPGFGRYGICAHENKELANAREALPLIEDSSNCDIVKATQYGIFERCKELVEAGYDVRQPDKENVSLLHWAAINNRLDLVRFYISKGAVVDQLGGDLNSTPLHWAIRQGHLPMVILLLQHGADPTLIDGEGFSSIHLAVLFQHMPIIAYLISKGQSVNMTDVNGQTPLMLSAHKVIGPEPTGFLLKFNPSLNVVDKIHQNTPLHWAVAAGNVNAVDKLLEAGSSLDIQNVKGETPLDMALQNKNQLIIHMLKTEAKMRANQKFRLWRWLQKCELFLLLMLSVITMWAIGYILDFNSDSWLLKGCLLVTLFFLTSLFPRFLVGYKNLVYLPTAFLLSSVFWIFMTWFILFFPDLAGAPFYFSFIFSIVAFLYFFYKTWATDPGFTKASEEEKKVNIITLAETGSLDFRTFCTSCLIRKPLRSLHCHVCNCCVARYDQHCLWTGRCIGFGNHHYYIFFLFFLSMV

SEQ ID NO: 12276 - DNA, 3598 bp, Homo sapiens
  CDS (266)..(685)
aagtgcacggaggagttccgggggccaggcggccgccgcgagtctggtatcctgagcttcgtgagttgagcgctgctgctccgcggtggagtcaccgcaccgctcccgggatcatggtgttctacttcaccagcagcagcgttaattcatctgcctacactatttacatgggaaaagataaatatgaaaatgaagatctgatcaagcatggctggcctgaagatatctgggagagaatatagaagacatcccaaaggaagtgctgatggactgtgcccaccttgtgaaggccaatagcattcaaggctgcaagatgaacaacgttaatgtggtatatacgccgtggtctaacctgaagaaaacagctgacatggatgtggggcagataggctttcacaggcagaaggatgtaaaaattgtgacagtggagaagaaagtaaatgagatcctgaaccgattagaaaagaccaaagtcgagcggttcccagacctagcagcagagaaagaatgcagagatcgtgaagagaggaatgagaaaaaagcccaaattcaggaaatgaaaaagagagaaaaagaagaaatgaagaagaagagggaaatggatgaacttaggagctattcatcactaatgaaagttgaaaatatgtcttcaaatcaggatggcaatgattcagatgaattcatgtaaaaggagaaaaggagaaaaggacctttgaaagatgtgaatgtagagacaattgcagaccttttggtttcatctgtgttctgaagtataaaatacaaccaaaattctaccttcatcctacccagaaattattgattttcaagttttaaaaaaattgtaccttttttgctgacagaaaaggatcagatatgtataaaatagttgaacttgacagcatataacttaaagtgaaaatgtttttgccagaacatgtcttggtaccttgtgaaagcaggctgcccttgttcttgagatagactttaaaatgaaccagctctgaaaagtacttctgctgctctggtctatccctgaaaacagatgtcttgaaacacttttcatattcttaaaataatcttcacttctgttaagaagaacatgttggtgggtaattatgcgaatgtttccctgtccctgatttctcgattaggcgtatgggttttgaaaaagagatttttcagaagattgtcagcttcagtattcacgttccatcgtgtcatctgggtctgttagtgtagtgaccctcagtgcagtctgtcccagcgtttacgtccttgcttcctctgagcggaggcctccatcttagtatcaacatatttaaagaaattgatggtgttcatcaagctggggcctgtggcagttgttgcctgagcaccaagtaacccaagccacctatgtgacaacttctgggcccaggagtaatttctcagcattgagggtaaaataggatggagtgctctgttgatcatttgggagatgtaggttacctgatttgtgccttaggatgcagcgtgaagcagaagtccatattgcaattatgattttagaaggaactaagcattttactcacacccacagcagcaagaatgacctcctgcagcagatattccacctgtaatagcactttggaactgtgggcaaaaccaaaaggctagtgcttccatttattccatgttggtgtatggggttgaactggaaaattccctgaggcaaaactcactggccaaattttgagagggtatagaaaatgactttagaaatgagtggttttgtgtatgtgtctgatgatattcagtctgatgttccgcaattttaaaagttataataaaataccatttttttaatctggaaggacattgatatatgaattcttagaatttgctattaaaaagggtagcccccattccacaagctggttttgagggtgatcttgctctaaaaaacctcattcatcataggctcagtctgacaggttctgtacggggctatcatctttctcctcctctgctaaatgcctctttcttccagctgctcactgggtcaaagggatgtcctttctcagatgtattcttgatacatctcagatgtattcgtagctgtgctccttccatacttccaaggagtccggcttctacagaattcctctgtacctcacactgcaacacatgtagatagcgcttttgaaaaatacatatatttttactatagtatgagaggtcctggggctcaaactttaaacatttcctaactcagcttacactggtttaaaatgtccaggtctctgctgaattctcttgttgaattcatagctctccaacctcctctgtgttgattcctatgcccctaaccctgcggcctctttgttttatttttttccccatctctgttggtcccagggaaagcaaggaaattttcttttgaggacttataggttgattgcccacaggtcaaactgttggcattgaactcctctcatttcttgccattggattgtttcctaaacgttggataggagaattcgaaattgttgctatttttatgagctgtgcccttgatcaaatctgtgctgtgggtctgagtcattttgccaatgtcgtcttcagtttcaacactctgatcagcatgcaggcgaggggcatgtttaatttacttcactaactgctatattctatagctttagacttcatatttcttatccacctttgtctaggctcacgatctttgggcgagggagctttgtcaccgtggttgggctagaacaaatattgagaagtttaccaacacagatgttgagaagtttattgaaaggcactgacattagcagaataagtgatggacattagttgaaccccttcagtgtctatgtgttttattgtattgtctttaactcgttcttgaagcacagatttcagcgagcctttcagctattcagtgccagcggttttccccactcaggaaagatggtgtgagccatacacacagcaggattagacggggagagtttcagctgcagcttctagtttaagaccaaagcccttcctcccgctgctgcatctgtctgagaggggaagctcttgttttccaagctggaaccgtttatgaggaaaactgagcagggtggcaaaatggaaaaggaacaattttctagtttttcctacgcgtgatattgacgcgtgctttttctttgatttgaggtacagcatgtaaataacaaatttccatattcaaaatgatcatattagagtgactgagtgaccttttgattttgaagcagactaaaatctgaccagaccacaatgaaaagtataaaattagaaacttaaattccaagctaaatttcagctttgacccacctaactccagtgaataggtggcagctcagaaacaaggacagcactgctgctgccagagcaagctcacatccagctggcacttcgtgagagctccttcctgccgggcacgtgtgagttcagcgtgggcaagagacttttatgcacattctgtcattcaaaagggaaatgatgccaaccccagatgcagcatgtcctgaatgaatgatctgtaaaatacaataataaaagcttatagtttgagtag

SEQ ID NO: 12277 - protein, 140 aa, Homo sapiens
MDCAHLVKANSIQGCKMNNVNVVYTPWSNLKKTADMDVGQIGFHRQKDVKIVTVEKKVNEILNRLEKTKVERFPDLAAEKECRDREERNEKKAQIQEMKKREKEEMKKKREMDELRSYSSLMKVENMSSNQDGNDSDEFM

SEQ ID NO: 12278 - DNA, 2922 bp, Homo sapiens
caatctttacaattttattgtaaatcatagtgtgagatacagctgcaaatatagggaagtaagttcacaaactgttattttctaaagctaaagctaacattaggccttgctatggtagaactcttcactgggttgtttcttaaaaaaaattcacgcaactgacaggaggaattgtctttattcttgcattaatgataaatgtaatctacaagatggccttcatggattagaaaaaggaatcagaccacaaggaaaaagaaattgctggttttcactcaagatttatctagaaaagtgtactgactactggaataatagtttacccctgggttgtaccacagaatgagaaattctacaagattatacaactctttttctacaagattacactactcatattgtttttattccattccggaattagaaattaactttctaaatatcgttttttttctccaaaaaaatcctcttaccagctaacctggatatggacaaaaatatcttgattgctgtaaaggtctatctccctagtaaaaatgaataaattgcccttgaatttattcaaggcaatcactatcagctgtggaacacccaggtaaactaacacaactaggttcctacacacaaaacaaatattctaaactgtttccacagggcagccaccaagggaaaaataaggaaatttaactattttattctaaacacttcatttacatataaggcaactgtggccccaaggttgtgatttattaacctagttaacggcagaagctgcactaaaacctggatcttctacttaaaatgttgttttggccaggcgcggtggctcacgcctgtaatcccagcactttgggaggccaaggcggacggatcacaaggtcaggtgtttgagaccagcctggccagcatggtgaaaccccgtctctactaaaaatacaaaaaattagccgggcatggtggcctgcacctgtaatcccagctacttgggaggctgagtcagaattgcttgatcctgggaggcagaggttgcactgagcagtgatcacaccactgcactccagtctgggtgacagagcgagactccatctcaaaaaaaaaaaagtttgattcttttatcatcaagcattaatttaatatccaaaggcatatatttgtatttactgtgctttaaacatttgtctgtgcgtcaatgctttaaagggacatactatgtggtgattcattttcaaagtaagaatttgcagaaaatgagaaacaaactttctgaacaatacaattttaatgcatactaaggctggttaactggttagaatactaggttaacaaggccaaactccagataggccaacagcttttcaaaccaatattcctgacactgccaggaataaagaaaactcttcactactgagggagggacagaaaacctagaaaaataaaccatactaaaagaaaaagggtattttgtttgtcactttaaagctgctttttctttaaacggtacacatattttcaacattcttacaaatgggccttctattaaaaagcaaactattgctaattccatggctttaagtggaatacttccaatcacttcctctatccagaaaatccgtgacactacatgccagctactttgcatatttataactgtttaataaactattcaaaattagcatctaaaataattatactttggacacacgaaggcatatatttggtgagaacattgtaattttcattttgtaaactatatattctatattcaagtaataacacagcattgcctatacagaactgaggcctgcgctgagacccaaaacttgtcttttcctaaatgcaccactacgaagagctaataagaggtctgtccagatgctaagaccaggtacttcaaaatctccatcctgcgctttacaggtctccagggcagttagaactttatctttcagaggtggaggggcctgacagaggctttgaaacctattgtgcaactcctcccagggcacatcttgggactcagttccaacccaaatgcctttctgaaggtcatagtgcaaacgttgaccccagtctgttagcagacccagatagacaggagacagcgctgggtggcggctagtcactaaagtcaaaagcccggctgggagggcgcgacaaaaggcagcaaagacttccgaattccccagaagccagtggactagcacttggctcccctctccaggtgatttgtggatgccgggttccaactcttcttggggccgacgagacaaaggcggctgcaacagcgccaccgctatcaccttcaggaagttgttctgaggcaagcgctcccacaggctgctgagaaacctggcgggacgctccgcttcggccttccccacctcctgcagacgctccagcagcagctccgcctgggtcttcatcagagagtcctcctggagatttgggttctctctatagccattgaagcgcagcatgtgcaccgcagaccgccggcgggcaaggcgggccaggctctcttggagtgtctcctcatcggcgtcccggacgcccgggccgggaaagagttgctgcaccaggtggtaacgagctgcatccccgagggcccggttctccagcaggcgcagagagagcaggacgtcacagtgaccgagggcctggaagttcgctaatcccggaactggaccccgcccaaagccgccctcttgcctccactggttgtgcagccgccgctccagagccgtgcgaatggggccatgccgaccaaagcgccgatggatgtggcgcaggtagcgcgcccactgcaaggcccggcgcacggtggcggggtcccaggtgctgacgtaggtagtgcttgagaccgccagaagctcggaaaagcgatccaggtgctgcagaagggattccatgaggtgcgcgaag

SEQ ID NO: 12279 - DNA, 1242 bp, Homo sapiens
  CDS (115)..(1005)
gaagaagaatttacaggttttaaccaagaagatctggaagaagaaaaaggtgaaacacaggtaaaagaagcagaagattcagattctgatgataacataaagagaggaaaacatatggactttctgtcagattttgagatgatgttgcagcgaaaaaagagcatgagtggcaagcgcagacggaaccgcgatggtggcacctttattagtgatgcagacgacgtcgtgagtgccatgatcgtcaagatgaatgaagctgctgaggaagacagacagttgaacaatcaaaaaaagccggcactgaaaaaattaactttactgcctgctgtagttatgcaccttaagaagcaggaccttaaagaaacattcattgacagtggtgtgatgtctgccatcaaagaatggctctcacctctaccagataggagtttgcctgcactcaagatccgggaggagctgctgaagatcctgcaagagctgcctagtgtgagccaggagaccctgaagcatagtgggattggacgagcagtgatgtatctctataaacaccccaaggagtcaaggtctaacaaggacatggcagggaaattaatcaatgagtggtctaggcctatatttggtcttacctcaaactacaaaggaatgacaagagaagaaagggagcagagagatctagaacagatgcctcaacgacgaagaatgaacagcactggtggtcagacacccagaagagacctggaaaaggtgctgacaggagaggagaaggctcttagacctggagatcctggattctgtgcccgtgcaagggtcccaatgccttcaaacaaggactatgttgtcaggcccaaatggaatgtggaaatggagtcatccaggtttcaggcgacctccaagaagggtatcagtcgactggataaacagatgagaaagttcacagatataaggaaaaaaagcagatctgcacacgcagtgaaaatcagcattgagggcaacaaaatgccattgtgaccttgcctggaatgtgtccccatctctactctaagaaatgcgcaatggactctttggagaaagaagatattttaaaacatttttagtgtgtctgtaaatggttcagcgtgtatcagatgttgtcataggactcacatttctctcagttatatttaaaaccgttgtgtactttgtacaaaggaatactagtcatacttctataaactttacacaataaaatttcattctggtttt

SEQ ID NO: 12280 - protein, 297 aa, Homo sapiens
MDFLSDFEMMLQRKKSMSGKRRRNRDGGTFISDADDVVSAMIVKMNEAAEEDRQLNNQKKPALKKLTLLPAVVMHLKKQDLKETFIDSGVMSAIKEWLSPLPDRSLPALKIREELLKILQELPSVSQETLKHSGIGRAVMYLYKHPKESRSNKDMAGKLINEWSRPIFGLTSNYKGMTREEREQRDLEQMPQRRRMNSTGGQTPRRDLEKVLTGEEKALRPGDPGFCARARVPMPSNKDYVVRPKWNVEMESSRFQATSKKGISRLDKQMRKFTDIRKKSRSAHAVKISIEGNKMPL

SEQ ID NO: 12281 - DNA, 3720 bp, Homo sapiens
  CDS (148)..(1230)
gctctacagcggaggtggctgtggcggtggcgctggtggctgcggcggcggcggcggcagcggcgctcgagcggttcctgtcagggtcagccggcgggccccctgggtggtccacctgcaaatcgcggagcggcgccccagggatcgatggcgatgaactataacgcgaaggatgaagtggacggtgggcccccgtgtgctccggggggcaccgcgaagactcggagaccggataacacggccttcaaacagcaacggctgccagcttggcagcccatccttacggctggcacggtgctacctattttcttcatcatcggtctcatcttcattcccatcggcattggcatttttgtcacctccaacaacatccgcgagatcgagattgattataccggaacagagccttccagtccctgtaataaatgtttatctccggatgtgacaccttgcttttgtaccattaacttcacactggaaaagtcatttgagggcaacgtgtttatgtattatggactgtctaatttctatcaaaaccatcgtcgttacgtgaaatctcgagatgatagtcaactaaatggagattctagtgctttgcttaatcccagtaaggaatgtgaaccttatcgaagaaatgaagacaaaccaattgctccttgtggagctattgccaacagcatgtttaatgatacattagaattgtttctcattggcaatgattcttatcctatacctatcgctttgaaaaagaaaggtattgcttggtggacagataaaaatgtgaaattcagaaatccccctggaggagacaacctggaagaacgatttaaaggtacaacaaagcctgtgaactggcttaaaccagtttacatgctggattctgacccagataataatggattcataaatgaggattttattgtttggatgcgtactgcagcattacctacttttcgcaagttgtatcgtcttatagaaaggaaaagtgatttacatccaacattaccagctggccgatactctttgaatgtcacatacaattaccctgtacattattttgatggacgaaaacggatgatcttgagcactatttcatggatgggaggaaaaaatccatttttggggattgcttacatcgctgttggatccatctccttccttctgggagttgtactgctagtaattaatcataaatatagaaacagtagtaatacagctgacattaccatttaattttatattatgaaagcaaatcatctgcatgtgcatcaaggccagtcctattcaacctagctttcgaatgctgatatctggttagtatgtcattttgaagttggcacataacttttctaaaaaaaagcagtctttgttgtttgcttcttccctacggatgacttctaaaaatatatgacgggtataaaaaaattagctatattgatcatatcaacactgtaactgctgaaatggcattctaatgtttgctttttattcggacaggccacatgatgcatagagcctctttcatgtgacttgtgtctactgcttaaatctttatgctgtgttgatgatattatattgacatatgaagctgtatatgtgtatgtattttgtggagaaagggattacaagatgtatgagtataatgacttgctaacctttcaggattcagagaaagatgaagaaagaccatatctaaataatacacttcatcattttcatgtgtataaatgcttaaagtaccatctttgttgaggtggttcatgtatccagtttatccagtacagttatttgtcaagcttagctttgatttcaaaggacacgcttaccttgtctggcataagaattaatgctcatgtctgcagtggttgggtaggtcctgcttaggagaattaaaaaattcctctttccgtttggttgaatgttgcagtcaggaaccccaactcacttggaatgtttttatatgtaatcatttcccttgaagcttatactttataagggaagaaagaattcaggtgatatgggaaaactgcttggcagaccttcatcttctgcctcaactgtaaaccacatgtaaatgcttaatggagactgttttcattcttgtgatatttaacattcagaaaattacttcagctttggaaatactcaggctgtttttattctgcaggtaagtgttttgacttaagtactaatattccagaaatttttgaaagcagtaaccttaatttcctatgtatttcattccacttttgcatataggtcaaatagcaatgtgtatgcacattctctttagttaaggcaccaattgttttggttggttttcctaagacatactttaaaaagatgttctataaatttcctagttaaattatggggattttggagtatgtacatgataaattataatacgtatatggttgaagttattttattttttactaatgaattattttaatattccttattgaataaatgctgtaacttgtttgctatggaacttattcttaaagttctagttaaaaataatttttccacatgcatgaaaatatgtattaatcagaggtggcttaattacattgaaattgcttttttgttgttgtttttttactgaaataactcatgtttgtgtagaagaatgcctgtttactcagagtttatattttccttcagttatattttaaatcaaaaggtctgggtaatgtatacttttgattaatatatactttttttaaaaaacaaaaaacaatgtaatggttaatagtagaaatgtgccacacttttcaagttttatataacatatgaaattcagttaaaagaatgtgtgtttcataatgacttttaactggtaaaaatattacttgcacgaagtacttgatgtatggttatcctgaaatttcggagtatttggtgtgttctttgtctaaaaatagtctgttttgtcagtccttcagaatattatttattctgaagattgtccctcttgcacttggcagtttattttcggggatacattgttgggggagaggggtttctgccactctttccagattgagtctgtgctgtttaaggaggactaccatcctgcaactctttttctaattggggcacagaggatgtcgctaaagaaaagttgaagagccctttcagcactttctcatctgtggagaagatggaatcttaaaatacatttggagttttatctgttttacaagtccattgatggcctaagttcctcctgttttctgctgtttgatctctaaggaactcctgttgctaaatatgaagagtatggaacattcatatagtctctgtgaagcatggggggagggaagacatttctttttcttataggctttatgctcaaatgtcatagtctcctttcaaagaattgtgttgcattttaaatgcacccagcttaagtagaagacattgaaggatgcattaattttcaggaactattttgaattatgaaaagattcccaattgaaaaaattattcaacaagtaaaagctaagaaatttcattgaaatcataaggcagtttaagcataaattgataaaaatagctgtgtactactaattaatagaaaatcattcaaccaagagaagagtcaagtgaatatcgtttgtttatttgctagtgagtttctttgtaacgttgattttattaaatgataatatttggttagtatgtcctatgttaataaaaatgaacaaaatt

SEQ ID NO: 12282 - protein, 361 aa, Homo sapiens
MAMNYNAKDEVDGGPPCAPGGTAKTRRPDNTAFKQQRLPAWQPILTAGTVLPIFFIIGLIFIPIGIGIFVTSNNIREIEIDYTGTEPSSPCNKCLSPDVTPCFCTINFTLEKSFEGNVFMYYGLSNFYQNHRRYVKSRDDSQLNGDSSALLNPSKECEPYRRNEDKPIAPCGAIANSMFNDTLELFLIGNDSYPIPIALKKKGIAWWTDKNVKFRNPPGGDNLEERFKGTTKPVNWLKPVYMLDSDPDNNGFINEDFIVWMRTAALPTFRKLYRLIERKSDLHPTLPAGRYSLNVTYNYPVHYFDGRKRMILSTISWMGGKNPFLGIAYIAVGSISFLLGVVLLVINHKYRNSSNTADITI

SEQ ID NO: 12283 - DNA, 3201 bp, Homo sapiens
  CDS (76)..(3201)
ctgggccgagagcgggtggctgagccgggacctcgcgtgattctcggaacccgaggagaagcggcgtccggggctatggctgtgactctggacaaagacgcttattatcggcgagtgaagagactgtacagcaattggcggaaaggagaagatgagtatgccaacgttgatgccattgttgtatcagtgggtgttgatgaagaaattgtttatgccaaatcaactgccttacagacatggctctttggttatgaactaactgatactatcatggtcttttgtgatgacaaaatcatctttatggccagcaagaaaaaagtggagttcttgaaacagattgccaacactaagggcaatgagaatgctaatggagcccctgccatcacactgctaatacgagaaaagaatgaaagtaataagagtagctttgacaaaatgattgaagccattaaagaaagcaagaatggcaagaaggttggagtgttcagcaaagacaaattccctggagagttcatgaagagctggaatgactgcctcaacaaagaaggctttgacaaaatagatatcagtgcagttgtggcatataccatcgctgtaaaggaggatggggagctcaacctaatgaagaaagcagccagcatcacttctgaagtcttcaacaaattcttcaaggaaagagtcatggaaatagttgatgcagatgagaaagttcgacacagcaaactggctgagtctgtggaaaaggccattgaagagaaaaaataccttgctggggcagacccttctactgtggaaatgtgttaccctcctatcattcagagtggtggcaactataatctcaagttcagtgtggtgagtgacaagaatcatatgcactttggggctatcacttgtgccatgggtattcgcttcaagtcttactgctccaaccttgttcgcactttgatggttgatccttctcaagaagttcaagaaaattataactttttgctccagcttcaagaggagctgctgaaggaattaagacatggtgcgaagatatgtgacgtgtataacgctgtcatggacgtggttaaaaaacagaagccagaactgctgaacaaaattaccaaaaacctagggtttgggatgggaattgaattccgtgaaggctccctagtaatcaatagcaaaaatcaatacaaactgaagaaaggaatggttttcagcatcaatttaggattctcagacctgactaacaaggaggggaaaaagccagaagagaaaacctatgccctgttcattggtgacacagtgcttgtggatgaggatggcccagctactgttctcacttctgtgaagaagaaagtgaagaatgtggggattttcctaaagaatgaagatgaggaagaagaggaggaggagaaagatgaggcagaggaccttttgggaagaggttctcgggcagcattacttacagaaagaacaagaaatgaaatgactgcagaagagaagcgaagagcacatcagaaagaactagcggctcaactcaatgaagaagcaaagaggcgattgactgaacaaaagggagaacagcagattcagaaagctcgcaagtctaatgtgtcctataaaaacccatctctgatgcctaaggaaccgcatattcgggaaatgaagatctacatcgataagaaatatgagactgtaataatgcccgtgtttggcattgcaacaccgtttcacattgccacaatcaagaatataagtatgtccgtggaaggagattatacttacttgcgaatcaacttttattgcccaggcagtgctctgggcaggaatgaaggcaacatctttcctaaccctgaagcgacttttgtcaaggaaattacataccgagcatcaaatattaaggcacccggagaacagacagtaccagccttgaaccttcagaatgctttccgaattattaaagaagtacagaaacgttataaaactcgagaagctgaagagaaagagaaggagggcattgtaaaacaagactcactggtgatcaatctaaaccggagtaatccgaaactgaaagatctatacattcgcccaaatattgcccaaaagaggatgcaaggctcactggaggcccatgtcaatggcttccgcttcacatctgttcgaggagacaaagtggatattttgtacaataatattaagcatgctttgttccagccctgtgatggagaaatgattattgtcttgcactttcacctcaagaatgccatcatgtttgggaagaagcggcacacggatgtgcagttctacacagaagtgggagagataaccacggacttggggaaacatcagcatatgcatgaccgagatgacctctatgctgagcagatggaacgagaaatgaggcacaaactgaaaacagcctttaaaaatttcattgagaaagtagaggctctaactaaggaggaactggaatttgaagtgccttttagggacttgggatttaacggagctccctataggagtacctgcctccttcagcccactagtagtgcgctggtaaatgctacggaatggccaccttttgtggtgacattggatgaggtagagctgatccactttgagcgggtccagtttcacctgaagaactttgatatggtaatcgtctacaaggactacagcaagaaagtgaccatgatcaacgccattcctgtagcctctcttgaccccatcaaggaatggttgaattcctgcgacctgaaatacacagaaggagtacagtccctcaactggactaaaatcatgaagaccattgttgatgaccctgagggcttcttcgaacaaggtggctggtctttcctggagcctgagggtgaggggagtgatgctgaagaaggggattcagagtctgaaattgaagatgagacttttaatccttcagaagatgactatgaagaggaagaggaggacagtgatgaagattattcatcagaagcagaagagtcagactattctaaggagtcattgggtagtgaagaagagagtggaaaggattgggatgaactggaggaagaagcccgaaaagcggaccgagaaagtcgttacgaggaagaagaagaacaaagtcgaagtatgagccggaagaggaaggcatctgtgcacagttcgggccgtggctctaaccgtggttccagacacagctctgcacccccc

SEQ ID NO: 12284 - protein, 1042 aa, Homo sapiens
MAVTLDKDAYYRRVKRLYSNWRKGEDEYANVDAIVVSVGVDEEIVYAKSTALQTWLFGYELTDTIMVFCDDKIIFMASKKKVEFLKQIANTKGNENANGAPAITLLIREKNESNKSSFDKMIEAIKESKNGKKVGVFSKDKFPGEFMKSWNDCLNKEGFDKIDISAVVAYTIAVKEDGELNLMKKAASITSEVFNKFFKERVMEIVDADEKVRHSKLAESVEKAIEEKKYLAGADPSTVEMCYPPIIQSGGNYNLKFSVVSDKNHMHFGAITCAMGIRFKSYCSNLVRTLMVDPSQEVQENYNFLLQLQEELLKELRHGAKICDVYNAVMDVVKKQKPELLNKITKNLGFGMGIEFREGSLVINSKNQYKLKKGMVFSINLGFSDLTNKEGKKPEEKTYALFIGDTVLVDEDGPATVLTSVKKKVKNVGIFLKNEDEEEEEEEKDEAEDLLGRGSRAALLTERTRNEMTAEEKRRAHQKELAAQLNEEAKRRLTEQKGEQQIQKARKSNVSYKNPSLMPKEPHIREMKIYIDKKYETVIMPVFGIATPFHIATIKNISMSVEGDYTYLRINFYCPGSALGRNEGNIFPNPEATFVKEITYRASNIKAPGEQTVPALNLQNAFRIIKEVQKRYKTREAEEKEKEGIVKQDSLVINLNRSNPKLKDLYIRPNIAQKRMQGSLEAHVNGFRFTSVRGDKVDILYNNIKHALFQPCDGEMIIVLHFHLKNAIMFGKKRHTDVQFYTEVGEITTDLGKHQHMHDRDDLYAEQMEREMRHKLKTAFKNFIEKVEALTKEELEFEVPFRDLGFNGAPYRSTCLLQPTSSALVNATEWPPFVVTLDEVELIHFERVQFHLKNFDMVIVYKDYSKKVTMINAIPVASLDPIKEWLNSCDLKYTEGVQSLNWTKIMKTIVDDPEGFFEQGGWSFLEPEGEGSDAEEGDSESEIEDETFNPSEDDYEEEEEDSDEDYSSEAEESDYSKESLGSEEESGKDWDELEEEARKADRESRYEEEEEQSRSMSRKRKASVHSSGRGSNRGSRHSSAPP

SEQ ID NO: 12285 - DNA, 2273 bp, Homo sapiens
  CDS (81)..(1895)
agtgcccgcgcagcgttgagttgcacagcggtattctcaccaggccctgcaatcggtgggccacagtgccggccacagagatggtggaaggaccaggctgtactctgaatggagagaagattcgcgcgcgggtgctcccgggccaggcggtgaccggcgtgcggggaagcgctctgcggagtccgcagggccgcgccttgcggctcgcagcctccacggttgtggtctccccgcaggctgctgcactgaataatgattccagccagaatgtcttgagcctgtttaatggatatgtttacagtggcgtggaaactttggggaaggagctctttatgtactttggaccaaaagctttacggattcatttcggaatgaaaggcttcatcatgattaatccacttgagtataaatataaaaatggagcttctcctgttttggaagtgcagctcaccaaagatttgatttgtttctttgactcatcagtagaactcagaaactcaatggaaagccaacagagaataagaatgatgaaagaattagatgtatgttcacctgaatttagtttcttgagagcagaaagtgaagttaaaaaacagaaaggccggatgctaggtgatgtgctaatggatcagaacgtattgcctggagtagggaacatcatcaaaaatgaagctctctttgacagtggtctccacccagctgttaaagtttgtcaattaacagatgaacagatccatcacctcatgaaaatgatacgtgatttcagcattctcttttacaggtgccgtaaagcaggacttgctctctctaaacactataaggtttacaagcgtcctaattgtggtcagtgccactgcagaataactgtgtgccgctttggggacaataacagaatgacatatttctgtcctcactgtcaaaaagaaaatcctcaacatgttgacatatgcaagctaccgactagaaatactataatcagttggacatctagcagggtggatcatgttatggactccgtggctcggaagtcggaagagcactggacctgtgtggtgtgtactttaatcaataagccctcttctaaggcatgtgatgcttgcttgacctcaaggcctattgattcagtgctcaagagtgaagaaaattctactgtctttagccacttaatgaagtacccgtgtaatacttttggaaaacctcatacagaagtcaagatcaacaggaaaactgcatttggaactacaactcttgtcttgactgattttagcaataaatccagtactttggaaagaaaaacaaagcaaaaccagatactagatgaggagtttcaaaactctcctcctgctagtgtgtgtttgaatgatatacagcacccctccaagaagacaacaaacgatataactcaactatccagcaaagtaaacatatcacctacaatcagttcagaatctaaattatttagtccagcacataaaaaaccgaaaacagcccactactcatcaccagagcttaaaagctgcaaccctggatattctaacagtgaacttcaaattaatatgacagatggccctcgtaccttaaatcctgacagccctcgctgcagtaaacacaaccgcctctgcatcctccgagttgtgaggaaggatggggaaaacaagggcaggcagttttatgcctgtcctctacctagagaagcacaatgtggattttttgaatgggcagatttgtccttcccattctgcaaccatggcaagcgttccaccatgaaaacagtattgaagattggacctaacaatggaaagaatttttttgtgtgtcctcttgggaaggaaaaacaatgcaattttttccagtgggcagaaaatgggccaggaataaaaattattcctggatgctaatatctgtagattctctggcatttagtctcttcaaactgtgtataatgtttggtcctcctctgtttcatagaaaagtcatagaatatctatgatacattgaaaagttactgcaatatttgagaactgttctttttttttcttgtgtgtgccatctttccattgttggctacgtcttttcttttgccttgatgaacgttctatgtatttcatcggatatacagcatattccatttaggatgtgtatttaatgcatttagtaatgacgataaagtgtttttagtatgcttttagtctcttgtaactggggagaagcagtgttttttttttaggaaaggattatgcgacacaataaaataagatattctgtctgtagtg

SEQ ID NO: 12286 - protein, 605 aa, Homo sapiens
MVEGPGCTLNGEKIRARVLPGQAVTGVRGSALRSPQGRALRLAASTVVVSPQAAALNNDSSQNVLSLFNGYVYSGVETLGKELFMYFGPKALRIHFGMKGFIMINPLEYKYKNGASPVLEVQLTKDLICFFDSSVELRNSMESQQRIRMMKELDVCSPEFSFLRAESEVKKQKGRMLGDVLMDQNVLPGVGNIIKNEALFDSGLHPAVKVCQLTDEQIHHLMKMIRDFSILFYRCRKAGLALSKHYKVYKRPNCGQCHCRITVCRFGDNNRMTYFCPHCQKENPQHVDICKLPTRNTIISWTSSRVDHVMDSVARKSEEHWTCVVCTLINKPSSKACDACLTSRPIDSVLKSEENSTVFSHLMKYPCNTFGKPHTEVKINRKTAFGTTTLVLTDFSNKSSTLERKTKQNQILDEEFQNSPPASVCLNDIQHPSKKTTNDITQLSSKVNISPTISSESKLFSPAHKKPKTAHYSSPELKSCNPGYSNSELQINMTDGPRTLNPDSPRCSKHNRLCILRVVRKDGENKGRQFYACPLPREAQCGFFEWADLSFPFCNHGKRSTMKTVLKIGPNNGKNFFVCPLGKEKQCNFFQWAENGPGIKIIPGC

SEQ ID NO: 12287 - DNA, 2591 bp, Homo sapiens
  CDS (72)..(1400)
agaaagttactgggagataacttcgaaggattttgcaacaaattcgagctgtccgactctgagaatgagacatgaaaaatgctgtaattggaaacaacaagcagaaagccaatctcattgttttaggagctgttccaagattgttgtacttgcttcagcaagaaacctcaagcacagggctgaaaactgaatgtgcagtggtgttgggaagtcttgctatgggtactgaaaacaatgtcaagtctctactggactgccatattatccctgccttattgcaaggactactgtccccagacctgaagtttattgaagcttgcctccgatgcctgcgtaccatcttcaccagtcctgtcactccagaggagctactgtatacagatgccacagtgataccacacctcatggcactgcttagcaggtcccgctatacccaggagtacatctgtcagatcttctcacactgctgtaaagggccagatcatcaaacaattttatttaaccacggtgcagttcagaatattgctcacctactaacctcactgtcctacaaagttcgaatgcaagcactgaaatgtttctcagttttagcttttgaaaacccccaggtatcgatgaccctggtaaatgttttggttgatggagaattgttaccacagatttttgtgaagatgttacagagggataagcctattgagatgcagctcacatcagcaaaatgtttaacttacatgtgtagagctggagcaattcggacagatgataactgtattgtattaaagacattaccttgtttggttcgaatgtgcagtaaggagagattactagaggagagagttgaaggagctgagacacttgcctatctgattgaaccagatgttgagctacagagaatcgctagcataactgatcacctcattgccgtgcttgctgattatttcaagtatcccagctcagtgagtgccatcactgatattaaaaggcttgatcatgatttaaaacatgctcacgaactccgccaggctgcattcaagctctatgcctctcttggagcaaatgatgaagacatccggaagaagatcattgagactgaaaatatgatggaccgaattgtgactggcttgtctgagtctagtgtcaaggtgcggttagctgccgtcagatgtttgcacagtttatccagatctgtgcagcagcttcgaaccagtttccaggatcatgctgtttggaaacctttaatgaaggttttacaaaatgcaccagatgaaatcctagtggtagcatcttccatgctgtgtaatcttcttcttgaattttctccaagcaaagagccaattttggaatcaggagccgtagagctactttgtggattaactcagagtgaaaatcctgtttacgagtgaatggaatttgggctttaatgaatatggcatttcaggctgaacaaaaaataaaagcagatattttacgaagcttgagtactgaacagctattccggttattatcagattcagatttgaatgtgctgatgaagacattgggacttcttagaaatctcctctccactcgtcctcatatagataaaataatgagtactcatggaaagcaaattatgcaagccgtcactcttattctagaaggggaacataacattgaggtcaaagagcagacactgtgcatcttagccaacatagcggatgggacaacagcaaaagatcttattatgaccaatgatgatatcctacagaaaatcaagtattacatgggccattcacatgttaaactgcagcttgcagccatgttttgtatatcaaacctcatatggaatgaagaggaaggttcacaagaacgccaggataaattacgagacatgggcatcgtagatattctacacaaactgagtcagtcaccagattcaaacctttgtgacaaggcaaagatggcactgcagcagtacctggcatgatgggagtgcccctgggcacctgcgagcatcccacctccttgtttaaggaagtacaggaaccagcctcatttgattccttctatttgcacaagtcaccttggactgcagggagctgttttgcaaaagcagtttagtaggcttagatctcaaattcatcttgagaacatttttttgaggtagtaatttcctcagaagactcttgtgttttgttttggtttttttttctgagctactcggactctttattagaacaatcaatcattttcctttggacctacaatttttgcctatgctgcagccactttgtgagtgagaatgaatatgtctgtgtgaacacacaggcatgcgtgtgtatgtgcacgtacatgggccagaatgaatggatgtgtgtgtgtgagggatacctcagatttttcttttcttattttgtgtgaaaatctcttttctacagattttccagggtttaagcattgcttgctgtataaaaaactttactgaattatatacagtttgaatgaaatgttattttaaaaacaaaacaattgttaagtgttccataaaggttatgttgaattttggtcagatgaatatttgtaagtaaaaaatatatgcatttctgaacctc

SEQ ID NO: 12288 - protein, 443 aa, Homo sapiens [sequence omitted]

SEQ ID NO: 12289 - DNA, 2416 bp, Homo sapiens
  CDS (12)..(1289)
tatccaaggacatgagcagtttacacatctcacccaattcagggaatgtcactagtgcatctgggtctcagatggcaagcggcatcagcctggtctccttcaacagccgacccgacggcatgcaccagcgctcctactcagtctccagtgccgaccagtggagtgaggctacggtcattgcaaactcggccatcagcagtgacacagggctgggtgactccgtatgctccagccccagtatctccagcaccaccagccccaagctcgacccgcccccctcccctcacgccaacagaaagaagcaccgaaggaagaaaagcactagcaacttcaaagccgacggcctgtccggcactgctgaagaacaagaagaaaattttgagtttatcattgtgtccctcactggccaaacatggcactttgaagccacgacgtatgaggagcgggacgcctgggtccaagccatcgagagccagatcctggccagcctgcagtcgtgcgagagcagcaagaacaagtcccggctgacgagccagagcgaggccatggccctgcagtcgatccggaacatgcgcgggaactcccactgtgtggactgcgagacccagaatcccaactgggccagtttgaacttgggagccctcatgtgcatcgaatgctcagggatccaccggaatcttggcacccacctttcccgagtccgatctctggacctggatgactggccaatcgagctcatcaaggtgatgtcatccatcgggaacgagctagccaacagcgtctgggaagagagcagccaggggcggacgaaaccatcggtagactccacaagggaagagaaggaacggtggatccgtgccaagtacgagcagaagctcttcctggccccgctgccctgcacggagctgtccctgggccagcacctgctgcgggccaccgccgacgaggacctgcggacggccatcctgctgctggcacacggctcccgggacgaggtgaacgagacctgcggggagggagacggccgcacggcgctgcatctggcctgccgcaaggggaatgtggtcctggcgcagctcctgatctggtacggagtggacgtcacggcccgagatgcccacgggaacacagcgctggcctacgcccggcaggcctccagccaggagtgcatcgacgtgctgctgcagtacggctgccccgacgagcgcttcgtgctcatggccacccccaacctgtccaggagaaacaataaccggaacaacagcagtgggagggtgcccaccatcatctgaggaacagccgtgcccgcctgctcgccgcacctgggacgcggcagcctcgccgcattctcgctcagaagtcacagcacgtgagtcccgtcgcatcccctccctcttcctggtggccacctccctcccgcccacccactctcaccccaaacaaaatcacaaaacctggacatcctcaaggggcgaagaggcggccgggagactgcagaagtggctccttttcataaactcccctaaaccacacacaggagagagcgacgggcctcggccctttgatgatagcacatggcgcaggacccttgtcctgggggctcaagggatggggacgcgagggggaggggaggcgaggaacaaggagaaggggcaactttccttaactggcagttgagcacatagtacatttcccctctaccaaacggaacacttggattccatctcttctctgaggagctcgacggcataaatcagaagcaagcacagagtttgtcaggtttgaagcccctatgatggtgtgtgtcaaatcagttgtagctaatctgtccagggagaatactggcttcattacacttgtacagccgagttcttcccgcattactgctgtttaatagaacgtgattagtcatcgccgagaagaaagcatattagccgaggaggtagtcacgcggcacgcgccggtgattgccacgatgtgattgcaatactcttagaagcaccatattatcccagacatgttctttcaagcccttggagccctctctaaattcactgtcatcatttagtatctgtttaatttttcagtccaaagagaggaaatcagtcgctgagtattatttgactccggtctccttggtgcaaaaacaaaatgggaaaaataaataagaataactcagaaactcaaaaggaaaccacaaattcagctaataatagcatttcgagtatatttcgtaaactaaggaaatacacaaaaggctgtttgttccgactgtaagagatatttgatgtccttttgccgaggtggatgtgttagtctcaggccctcctggaccacgttgcccaagtcacacaggcttctgtgttatgtatttagataagatgtgtgaaaatatatttgaataaaagaagttcat

SEQ ID NO: 12290 - protein, 426 aa, Homo sapiens [sequence omitted]

SEQ ID NO: 12291 - DNA, 2457 bp, Homo sapiens
  CDS (154)..(879)
acaggaagtgaagagcttccgccgggagaccgcggctgcaggaacggaggcggaaggggccctgcggcgacgacgtcgtcgacgggggtggccgtgggagctgagcacggagaagactccctctctcggaagccggatcccgagccgggcaggatggatcaccaccagccggggactgggcgctaccaggtgcttcttaatgaagaggataactcagaatcatcggctatagagcagccacctacttcaaacccagcaccgcagattgtgcaggctgcgtcttcagcaccagcacttgaaactgactcttcccctccaccatatagtagtattactgtggaagtacctacaacttcagatacagaagtttacggtgagttttatcccgtgccacctccctatagcgttgctacctctcttcctacatacgatgaagctgagaaggctaaagctgctgcaatggcagctgcagcagcagaaacatctcaaagaattcaggaggaagagtgtccaccaagagatgacttcagtgatgcagaccagctcagagtggggaatgatggcattttcatgctggcatttttcatggcatttattttcaactggcttggattttgtttatccttctgtatcaccaataccatagctggaaggtatggtgctatctgcggatttggcctttccttgatcaaatggatccttattgtcaggttttctgattattttactggatatttcaatggacagtattggctttggtggatatttcttgtacttggcctgctccttttcttcagaggatttgttaattatctaaaagtcagaaacatgtctgaaagtatggcagctgctcatagaacaaggtatttcttcttattgtagagactgcatcaacccgacattcctttcttataccaatgtgaaatttccagatcatctgtaaacctacaactttaatagaagactactaataacagaagacaaattagtgaagaaaagacggagtttcgaaattgaatggcagggtggtttttgcttacaagccatttctgttcattctttaagtatctatatttcatttgttttgcacatatgcatatgtgcccatttaagatatttgcatatacttgatagaaaccataaagttgtagcagttaagtccagtcacatttggttaatcagtgtttgatataattgaaagagttgagtggataaacagtcttccagcttgtaaatgccattgacttctgacctgacatttagtataataaaaatgaaattcttaaccatgtcaaatgatttagtttctggctcttagactcatctggcagttctacacatgaaacatcttttgttatataaggtgtattgaaacctgcagtgctgattattagaaaggatttgtcagatttttgaacatgatatttacattattatttaggaaaactcttcctgtaaataaccatgcataacttactttctgcaatgttttcttagaaattgtgtccagatagctttcactaattttaaattaagtgaactaaatatatatgtgtatatgtatactcatatatatacacacacacacatatatatatctagaaacgtgagtgttaaagatagaatttgttttaggacaaattttaagaaaatgtgggaataccaaatgtcctttataagaaaaataaattttattttaagggacatactagttttagggattttcagatgggaagctgcatttttaggattgcccatcttaagagatcttgcaggaagagattgtattagatattatatttatttcatttaagataattttcaaagttaattttctaaataagataattctcatttgtgtttgtcttttaaaaggccaataaaatatctttcagtatcattgtaataattttttagagtttaatttgtaaagcttagcaaataaaatcttgtactatgaatagcttcttgctttatgactttaggattaacttgtaaaaaacatatcctgaactgagatatgcaaaatactcattttcaagttatggaaatgtgtttgtggcatataggactgtggggtctgtgtgtgtagtgagagtgtgtagccactattataactggaatttaatttacattcataaactactatatttcccatcttgcaaatcattttatgtctcatctgtttttcctttcggttatatctttggttttgaataccaacatttaaaatgatggtattttatcttttaaacttaaaaattatttaatacagctatatggaccttataaaattgatttcttatttattattagacattactactaaaaggtacatctaactattcagggacatttttccatttccaaaaaataaaatttattatgctttataacctcttctgtattttctaattttttcattgtctttgataaataaaacagttttgttttgct

SEQ ID NO: 12292 - protein, 242 aa, Homo sapiens
MDHHQPGTGRYQVLLNEEDNSESSAIEQPPTSNPAPQIVQAASSAPALETDSSPPPYSSITVEVPTTSDTEVYGEFYPVPPPYSVATSLPTYDEAEKAKAAAMAAAAAETSQRIQEEECPPRDDFSDADQLRVGNDGIFMLAFFMAFIFNWLGFCLSFCITNTIAGRYGAICGFGLSLIKWILIVRFSDYFTGYFNGQYWLWWIFLVLGLLLFFRGFVNYLKVRNMSESMAAAHRTRYFFLL

SEQ ID NO: 12293 - DNA, 3051 bp, Homo sapiens
  CDS (79)..(2700)
agaaccgctgtggcaccgctactccgtgccgcgcccgtcgagcattgcgttgctgcattgcgccccaccgactccactatgttgaagaaattcgacaagaaggatgaggagtcaggtggaggctccaacccattccagcaccttgagaagagtgcggtactccaggaggcccgtgtatttaatgaaactcccatcaaccctcggaaatgtgcccacatcctcaccaagattctttatctcataaaccagggggagcacctggggaccacggaagcgaccgaggccttctttgccatgaccaagctctttcagtccaatgatcccacactccgtcggatgtgctacttgaccatcaaggagatgtcttgcattgcagaggatgtcatcattgtcaccagcagcctaacaaaagacatgactgggaaagaagacaactaccggggcccggccgtgcgagccctctgccagatcactgatagcaccatgctgcaggctattgagcgctacatgaaacaagccattgtggacaaggtgcccagtgtctccagctctgccctcgtgtcttccttgcacctgctgaagtgcagctttgacgtggtcaagcgctgggtgaatgaggctcaggaggcagcatccagtgataacatcatggtccagtaccacgcactagggctcctgtaccatgtgcgtaagaatgaccgcctagccgtcaataagatgatcagcaaggtcacacggcatggccttaagtctccctttgcctactgcatgatgatccgggtggccagcaagcagctggaagaggaggatggcagccgtgacagcccactgtttgacttcatcgagagctgcttgcgcaacaagcacgagatggtggtgtatgaagccgcctcggccatcgtcaatctgccaggctgcagtgccaaagagctggccccggctgtgtcagtgctccagcttttctgcagctcacccaaggctgctctccgctatgctgctgttcgtaccctcaataaggttgccatgaagcatccgtcagctgtgacagcttgtaatctggatctggagaacctggtcacagattcaaaccgcagcattgccacgctggccatcaccaccctccttaagacgggcagcgagagcagcatcgaccgcctcatgaagcagatctcctccttcatgtcagaaatctcggatgaattcaaggtggtggttgtccaggccatcagtgccctgtgtcagaaatatcctcgcaaacacgccgtccttatgaacttcctgttcaccatgctgcgggaagagggtggctttgagtataagcgcgctatcgtggactgcatcatcagcatcattgaagagaactcagagagcaaggagacagggctgtcacatctgtgcgagttcatcgaggactgcgagttcacagtgctggccacccgtattctacatctcctgggccaggaggggcccaagaccaccaatccctcaaagtacatccgcttcatctataaccgagtggtcttggagcatgaggaggtccgggcaggtgctgtgagtgctctggcgaagtttggagcccagaatgaagagatgttacccagtatcttggtgttgctgaagaggtgtgtgatggatgatgacaatgaagtaagggaccgagccaccttctacctaaatgtcctggagcagaagcagaaggcccttaatgcaggctatatcctaaatggtctgactgtgtccatccctggtctggagagggctctgcagcagtacactctagaaccatcagaaaaaccttttgacctcaagtctgtgcccctggccacggcgcccatggcagagcagagaacagaaagtacccccatcacagcagtcaaacagcctgagaaagtggcagctaccaggcaggagatcttccaggagcagttggcagcagtgccagtgttccgcggtcttgggcccctcttcaagtcctcgcctgagcccgtggccctcaccgagtcagagacggagtatgtcatccgctgcaccaaacacaccttcaccaaccacatggtttttcagtttgactgcacaaacacactcaatgaccagaccttggagaatgtcacagtgcagatggagcccactgaggcctatgaggtgctctgttacgtgcctgcccggagcctgccctacaaccagcccgggacctgctacacactggtggcactgcccaaagaagaccccacagctgtggcctgcacattcagctgcatgatgaagttcactgtcaaggactgtgatcccaccactggggagactgatgacgaaggctatgaggatgagtatgtgctggaagatctggaagttactgtagctgatcacattcaaaaggtcatgaaactgaacttcgaagcagcctgggatgaggtaggggatgaatttgagaagggggaaacgttcaccttgtctaccatcaagacacttgaagaggctgtgggtaatattgtgaagttcttgggaatgcacccttgtgagaggtcagacaaagtgccggataacaagaacacccacacgttgctcctggctggtgtgttccggggtggtcatgacatcctgatgcgctcccggctgctgcttttggacacagtgacaatacaggtgacagccagaagtttggaggagctgccagtagacatcatcttggcatctgtgggataagaggccagcctgcataggacctcatacccttccccaacactacctggaagttgtgccttcctcatgaaactggcagaaaccccttcccaagcttctgtattgaaaaacaattaggaatcattgcagatttttttttattctgctcccacctcccacccgggactacttgctggtgacttttttttttttttttttttaaataggggatgattttagcttgtcctaaatcttgctgtccacccttccaggaaagggacattgtaaatgaataaaacattctcaactcctcttgaatctatcccccaagaaaccatcttatccctgtaataaatcagcatgtatttattg

SEQ ID NO: 12294 - protein, 874 aa, Homo sapiens [sequence omitted]

SEQ ID NO: 12295 - DNA, 2510 bp, Homo sapiens
  CDS (344)..(1945)
atggcttgggtaccacaacttccggtgcgcctttctttacagttcgtaaggttcataggcgggtggtcctgggctccaggaaccactgcaacttggggagttggatatcacttctgatgaattcatcctggatgaagtggatgttcacattcaggcaaatctggaggatgagttagtaaaggaagctcttaaaacgggtgtagatctccgtcactattcaaagcaagttgagctggagctacagcagattgaacagaaatccattcgggattatattcaagagagtgagaatatagcatctctacacaaccagatcacagcctgtgatgctgtcctggagcgaatggagcagatgttgggagcttttcagagtgacctcagctccatcagctctgagatccggacactgcaggaacagtcaggagccatgaacattcgacttcgaaatcgccaggcagttcgggggaaacttggggagcttgttgatggtctggtggtgccttctgctctggtcacggcaattctggaggctccagtgacagagcccaggttcttggagcagctacaggagctggatgccaaggcagccgcagtcagagagcaggaagctagaggcacagcagcctgcgcagatgtcagaggcgtgctcgatcggctccgggtcaaggcagtgacgaagatccgagagtttatcctccagaagatttattccttcaggaaacccatgaccaactatcagatcccccagacggccctgctgaagtacaggttcttctatcagtttctgctgggcaatgaacgagcaacagcaaaggagatcagggatgaatatgtggagacgctgagcaagatttacctgtcttactaccgctcttacctggggcggctcatgaaggtgcagtatccatttgaggccctcttccgcagccagcactacgccctcctagacaattcctgccgcgaataccttttcatctgtgaattttttgttgtgtctggcccagctgcacacgacctgttccatgctgtcatgggccgtacactcagcatgaccctgaaacacctggattcttatctagctgactgctacgatgccattgctgtttttctctgtatccacattgttctccggttccgtaacattgcagcaaagagggatgttcctgccctggacaggtactgggaacaggtgcttgccttgctatggccacggtttgaactgatcctggagatgaatgttcagagcgtccgaagcactgacccccagcgcctaggggggttggatactcggccccactatatcacacgccgttatgcagagttctcctccgctcttgtcagtatcaaccagacaattcctaatgaacggaccatgcaattgctgggacagctgcaggtggaggtggagaattttgtcctccgagtggcagctgagttctcctcaaggaaggagcagcttgtgtttctgatcaacaactatgacatgatgctgggtgtgctgatggagcgggctgcagatgacagcaaagaggttgagagcttccagcagctgctcaatgctcggacacaggaattcattgaagagttgctgtctcccccttttgggggtttagtggcatttgtgaaggaggctgaggctttgattgagcgtggacaggctgagcgacttcgaggggaagaagcccgggtaactcagctgatccgtggccttggtagttcctggaaatcatcagtggaatctctgagtcaggatgtaatgcggagtttcaccaacttcagaaatggcaccagtatcattcagggagcgctgacccagccgatccagctctatcatcgcttccaccgggtgctgtcccagccgcagctccgagccctccctgcccgggctgagctcatcaacattcaccaccttatggtggagctcaagaagcataagcccaacttctgatgtgccagaaaccgccctgagatctgccggtcatctccatggacttctgcaccccattccatacccttcttcacctggggtaccccttccagttttccccttgcttcccaggcccttgacatggcttacctgccttcactcccagcaccttgcccaacaggataagctggatccccttggccttctgaatatcccagtgtcttcaggtttcccaagaccacttccctgtgggcttccaaaatggcctttatcatttctccagtctgtcaccctcctttcctgctcccatacacccaaggcttgtttcttcccctgtaaaaaccactgcctcaatctctggttcactcaactagtcaccatgtcctgaggcatgaagcctcctcagctcttggaattgctggcaaggggtgactgcctctgagtcattgtgtttttcaaagtgatttcttttctgtagctttttgacctaagatctcagcaatttgaacactaacctctcccctcctggctcaagaattactccgaagtcagtctgcagaaaataaatatttagtatgacatg

SEQ ID NO: 12296 - protein, 534 aa, Homo sapiens [sequence omitted]

SEQ ID NO: 12297 - DNA, 2536 bp, Homo sapiens
  CDS (1085)..(2128)
cgattccagccaatgaagctgtttgctatatgcctgaatcaaagtatgctgttgtgaaatgttctaagtctggagacctctacgtactggcggcagataaagtagcatctgttgcttctactttggaaacaacatttgagactatttcaacactttcaggtgtagatttggaaaatggtacttgcagtcatccattaattcctgataaagcctctcctcttttacctgcaaatcatgtgaccatggcaaaaggaacgggattggttcacacagccccagctcatggtatggaagactacggtgtagcgtctcagcacaacctgcccatggattgtctagtggacgaagatggagttttcacagatgttgcaggtcctgaacttcaaaacaaggctgtccttgaagagggaactgatgtggttataaagatgcttcagactgcaaagaatttgttgaaagaggagaaattggtgcatagctatccgtatgactggaggaccaagaaacctgtggttattcgtgccagcaagcagtggtttataaacatcacggatattaagactgcagccaaggaattgttaaaaaaggtgaaatttattcctggatcagcactgaatggcatggttgaaatgatggacaggcggcatattggtgtatatcaaggcaaagagtttggggtgttccaattcctgtgtttcatcataagaccaaggatgaatacttgatcaacagccaaaccactgagcatattgttaaactagtggaacaacacggcagtgatatctggtggactcttccccctgaacaacttcttccaaaagaagtcttatctgaggttggtggccctgatgccttggaatatgtgccaggtcaggatattttggacatctggtttgatagcggaacttcatggtcttatgttcttccaggtcctgaccaaagagcagatttgtacttggaaggaaaagaccagctcgggggttggtttcagtcatccttattaacaagtgtggcagcaaggaagagagcaccttataagacagtgattgttcatggatttacccttggagaaaagggagaaaagatgtccaagtctcttgggaatgtcattcatcctgatgttgtcgttaatggaggacaagatcaaagcaaagagcctccgtatggtgctgatgtccttcgctggtgggtagctgattccaatgtcttcaccgaagttgcaattggcccatccgtgctcaatgctgccagagatgatattagcaagcttaggaatacacttcgctttcttttgggaaatgtggctgatttcaacccagaaacagattccatccctgtaaacgatatgtatgtcatagaccagtacatgctacacttactgcaggatttggcaaacaagattaccgaattatacaaacaatatgattttggaaaagttgttcggctgttacggacgttttataccagagagctctctaacttttatttcagtataatcaaagataggctctattgtgaaaaggaaaatgaccccaaacgacgctcttgtcagactgcattagttgaaattttggatgtaatagttcgttcttttgctcccattcttcctcacctggctgaagaggtgttccagcacataccttatattaaagagcccaagagtgttttccgtactgggtggattagtactagttctatctggaaaaagcccgggttggaagaagctgtggagagtgcgtgtgcaatgcgagactcatttcttggaagcatccctggcaaaaatgcagctgagtacaaggttatcactgtgatagaacctggactgctttttgagataatagagatgctgcagtctgaagagacttccagcacctctcagttgaatgaattaatgatggcttctgagtcaactttactggctcaggaaccacgagagatgactgcagatgtaatcgagcttaaagggaaattcctcatcaacttagaaggtggtgatattcgtgaagagtcttcctataaagtaattgtcatgccgactacgaaagaaaaatgcccccgttgttggaagtatacagcggagtcttcagatacactgtgtcctcgatgtgcagaagttgtcagtggaaaatagtattaacagctcactcgagcaagaaccctcctgacagtactggctagaagtttggatggattatttacaatataggaaagaaagccaagatttaggtaatgagtggatgagtaaatggtggaggatgggagtcaaaatcagaattatagaagaagtatttcctgtaactatagaaagaattatgtatatatacatgcagaaatatatatgtgtgtgtgtatctgtggatggatatatgtatatctcttcctatatatatccatagtggacttattcagaacatagatatgtattcagcttgtcttcaaatacggccaagcagaaaatgttttatattttataaatcatcttttgactctgtatttaaattctatgatactgaaaataaaggcattctggaaaaat

SEQ ID NO: 12298 - protein, 348 aa, Homo sapiens [sequence omitted]

SEQ ID NO: 12299 - DNA, 2368 bp, Homo sapiens
  CDS (1028)..(2164)
aaatgtctgatgctcagggcagctacaaactggatgaagctcaggctgtcttgagagaaacaaaagccatcaaaaaggctattacctgtggggaaaaggaaaagcaagatctcattaagagccttgccatgttgaaggacggcttccgcactgacagggggtctcactcagacctgtggtccagcagcagctctccggagagttcgagtttcccgctaccgaaacagtacctggatgtgagctcccagacagacatctcgggaagcttcggcatcaacagcaacaatcagttggcagagaaggtcagattgcgccttcgatatgaagaggctaagagaaggatcgccaacctgaagatccagctggccaagcttgacagtgaggcctggcctggggtgctggactcagagagggaccggctgatccttatcaacgagaaggaggagctgctgaaggagatgcgcttcatcagcccccgcaagtggaccccctcctggctggtgatgccttcctcaactccttggagtttgaagacccggagctgagtgccactctttgtgaactgagccttggtaacagcgcccaggaaagataccggctggaggaaccaggaacggagggcaagcagctgggccaagctgtgaatacggcccaggggtgtggcctgaaagtggcctgtgtctcagccgccgtatcggacgagtcagtggctggagacagtggtgtgtacgaggcttccgtgcagagactgggtgcttcagaagctgctgcatttgacagtgacgaatcggaagcagtgggtgcgacccgaattcagattgccctgaagtatgatgagaagaataagcaatttgcaatattaatcatccagctgagtaacctttctgctctgttgcagcaacaagaccagaaagtgaatatccgcgtggctgtccttccttgctctgaaagcacaacctgcctgttccggacccggcctctggacgcctcagacactctagtgttcaatgaggtgttctgggtatccatgtcctatccagcccttcaccagaagaccttaagagtcgatgtctgtaccaccgacaggagccatctggaagagtgcctgggaggcgcccagatcagcctggcggaggtctgccggtctggggagaggtcgactcgctggtacaaccttctcagctacaaatacttgaagaaacagagcagggagctcaagccagtgggagtcatggcccctgcctcagggcctgccagcacggacgctgtgtctgctctgttggaacagacagcagtggagctggagaagaggcaggagggcaggagcagcacacagacactggaagacagctggaggtatgaggagaccagtgagaatgaggcagtagccgaggaagaggaggaggaggtggaggaggaggagggagaagaggatgttttcaccgagaaagcctcacctgatatggatgggtacccagcattaaaggtggacaaagagaccaacacggagaccccggccccatcccccacagtggtgcgacctaaggaccggagagtgggcaccccgtcccaggggccatttcttcgagggagcaccatcatccgctctaagaccttctccccaggaccccagagccagtacgtgtgccggctgaatcggagtgatagtgacagctccactctgtccaaaaagccaccttttgttcgaaactccctggagcgacgcagcgtccggatgaagcggccttcctcggtcaagtcgctgcgctccgagcgtctgatccgtacctcgctggacctggagttagacctgcaggcgacaagaacctggcacagccaactgacccaggagatctcggtgctgaaggagctcaaggagcagctggaacaagccaagagccacggggagaaggagctgccacagtggttgcgtgaggacgagcgtttccgcctgctgctgaggatgctggagaagcggatggaccgagcggagcacaagggtgagcttcagacagacaagatgatgagggcagctgccaaggatgtgcacaggctccgaggccagagctgtaaggaacccccagaagttcagtctttcagggagaagatggcatttttcacccggcctcggatgaatatcccagctctctctgcagatgacgtctaatcgccagaaaagtatttcctttgttccactgaccaggctgtgaacattgactgtggctaaagttatttatgtggtgttatatgaaggtactgagtcacaagtcctctagtgctcttgttggtttgaagatgaaccgactttttagtttgggtcctactgttgttattaaaaacagaacaaaaacaaaacacacacacacac

SEQ ID NO: 12300 - protein, 379 aa, Homo sapiens
MSYPALHQKTLRVDVCTTDRSHLEECLGGAQISLAEVCRSGERSTRWYNLLSYKYLKKQSRELKPVGVMAPASGPASTDAVSALLEQTAVELEKRQEGRSSTQTLEDSWRYEETSENEAVAEEEEEEVEEEEGEEDVFTEKASPDMDGYPALKVDKETNTETPAPSPTVVRPKDRRVGTPSQGPFLRGSTIIRSKTFSPGPQSQYVCRLNRSDSDSSTLSKKPPFVRNSLERRSVRMKRPSSVKSLRSERLIRTSLDLELDLQATRTWHSQLTQEISVLKELKEQLEQAKSHGEKELPQWLREDERFRLLLRMLEKRMDRAEHKGELQTDKMMRAAAKDVHRLRGQSCKEPPEVQSFREKMAFFTRPRMNIPALSADDV

SEQ ID NO: 12301 - DNA, 3151 bp, Homo sapiens
  CDS (377)..(1798)
gtgaggccgtcgtcgccgcacgggctggttggggctgtgtctgtgggaggcgccggggtgatggcggtggagactctgtccccggactgggagtttgaccgcgttgacgacggctcgcagaaaattcatgccgaagtccaacttaagaattatgggaaatttcttgaggagtatacctctcaactgagaagaattgaggacgctctggatgactcaattggagatgtttgggatttcaatcttgatcctatagcattaaagcttttgccttatgaacagtcctctcttttggaactcataaagactgaaaacaaggtcttaaacaaagtcatcactgtttatgctgcactttgttgtgaaatcaagaaattaaaatatgaggctgaaactaaattttacaatggtctcttgttttatggagaaggagctacagatgccagcatggtggaaggtgattgccaaattcaaatggggagatttatttcattcttacaggaactgtcttgctttgttacatgaagtggtgatgaacgtagtccaccagttggctgccctctatatcagtaacaagattgcacccaaaattatagagacaactggagttcattttcagactatgtatgagcacttgggagaactgctaacagttttgctcaccctggatgaaattattgataatcatatcacactgaaagaccactggactatgtacaaaaggttactgaaatctgtccatcacaatccttcaaaatttggaattcaggaagaaaaattaaagccatttgaaaagttcttgctgaagctagaagggcaattactggatggaatgatattccaggcctgtatagaacaacaatttgattctctcaatggaggagtatctgtgtcaaaaaatagtacttttgctgaggaatttgcacatagtattcagtcaatttttgcaaatgtagaagccaaacttggagaaccttctgaaattgaccagagagacaagtatgttggaatttgtggactctttgtattgcactttcagatttttcgaactattgataaaaagttttataagtctttattggacatttgtaagaaggtaccagccatcactctaactgctaatattatttggtttcctgataattttctgatccagaaaataccagcagctgccaaactgctagacagaaaaagtcttcaagccattaaaatacacagggatacttttctacaacagaaagctcaatcacttaccaaagatgtacagtcttactacgtctttgtgagctcatggatgatgaaaatggaatctattttgtctaaagagcagagaatggataaatttgctgaggatctcaccaatagatgtaatgtttttatacagggcttcttgtatgcatatagtattagtgccattattaaaaccacaatgaatctctacatgtccatgcaaaagccaatgaccaaaacctcagttaaggcattgtgcaggcttgttgaacttctcaaggcaatagagcatatgttctacaggagaagcatggttgtggctgattcagtttcacatataacacagcaccttcaacatcagtctcttcattctatttctgtggccaagaaaagagtgatttctgacaaaaaatacagcgaacagcgtcttgatgtgctctctgctctagttttggctgaaaacactctaaatggaccaagcacaaagcaacggcgacttattgtttctttggcactaagtgttggcacacaaatgaaaaaacatttaaagatgaagaactctttccacttcaagtagtcatgaaaaaactggatcttattagtgaacttagagaacgagtccaaacacaatgtgactgttgttttttatactggcatcgagctgtcttcccaatttatttagatgatgtatatgaaaatgctgttgatgcagccagattacattacatgttcagtgctttgcgcgactgtgtacctgctatgatgcatgcaaggcatttagagtcctatgagatacttctggattgctatgacaaggaaattatggaaattttaaatgagcatttgctggacaaattatgcaaagaaatagagaaagatctgcgactttctgtgcatactcatttaaagctggatgaccgaaaccctttcaaagttggcatgaaagacctggctctttttttctctctgaatccaattcggtttttcaatcgtttcattgacattcgggcttacgtaactcactacctagacaagactttctacaatctaacaactgtagcccttcatgactgggccacttatagtgagatgagaaacttagctaatcagcgttatggactggttatgacagaggcacatcttcccagtcagactttggaacagggccttgatgttttagaaattatgagaaacattcatatatttgtgtcccgatacctctataatctcaacaatcagatttttattgaacgaacaagcaataacaagcatttgaatactattaatattcggcatattgctaattcaattcgaacacatggcacgggaattatgaatacaactgttaatttcacctaccagtttttgaaaaagaagttctatatatttagccaatttatgtatgatgaacacatcaaatccagattgattaaagatattcgatttttcagggaaattaaggaccaaaatgatcataagtatccttttgatagagcagaaaaattcaatcgaggcatcagaaaacttggaataacacctgagggacagagctaccttgatcaattcaggcaactcatcagccagattggtaatgctatgggctatgtacgaatgataagatctggtggtcttcattgtagcagcaatgccattagatttgttcctgatcttgaagatattgtaaattttgaagaactagtaaaagaagaaggtcttgcagaagaaacattaaaagcagcaaggcatttggattcagtcctcagtgatcacacacgaaattctgccgaaggcacagaatatttcaaaatgcttgtagacgtttttgctccagaatttcgaaggccaaagaatatacatctccgaaatttctatataattgttccccctctgaccctcaactttgtagagcattccattagttgcaagg

SEQ ID NO: 12302 - protein, 474 aa, Homo sapiens
MRLKLNFTMVSCFMEKELQMPAWWKVIAKFKWGDLFHSYRNCLALLHEVVMNVVHQLAALYISNKIAPKIIETTGVHFQTMYEHLGELLTVLLTLDEIIDNHITLKDHWTMYKRLLKSVHHNPSKFGIQEEKLKPFEKFLLKLEGQLLDGMIFQACIEQQFDSLNGGVSVSKNSTFAEEFAHSIQSIFANVEAKLGEPSEIDQRDKYVGICGLFVLHFQIFRTIDKKFYKSLLDICKKVPAITLTANIIWFPDNFLIQKIPAAAKLLDRKSLQAIKIHRDTFLQQKAQSLTKDVQSYYVFVSSWMMKMESILSKEQRMDKFAEDLTNRCNVFIQGFLYAYSISAIIKTTMNLYMSMQKPMTKTSVKALCRLVELLKAIEHMFYRRSMVVADSVSHITQHLQHQSLHSISVAKKRVISDKKYSEQRLDVLSALVLAENTLNGPSTKQRRLIVSLALSVGTQMKKHLKMKNSFHFK

SEQ ID NO: 12303 - DNA, 2747 bp, Homo sapiens
  CDS (4)..(2709)
aatatgtatcgtctccctgccacccaggaggtggtgacgcagctgcagagccagatcttggagctgcagggggagctgaaggagtttaaaacttgtaataagcaacttcaccaaaagttaattctggctgaggcagtgatggaggggaggccaacgcccgacaaaacgttgctgaatgactctgagatttgcccacctgatgaccttgccagcttgccatcatgcaaagaaaatcctgaagatgttctgagcccaacttcagtagctacttacctgagttccaagagtcagccttctgctaaagtcagtgtgatggggactgatcagtcagagagcattaatacctcaaatgagacagaatacttaaaacagaaaatccatgacttggaaactgagctggaaggctaccagaatttcatatttcagcttcaaaagcactcccagtgcagtgaggccataattacagttttgtgtgggacagaaggggcccaggatggcttgagcaagcccaagaatggttctgatggggaagaaatgaccttttcaagtttgcaccaagtgcgatatgtgaaacacgtgaaaatcctcggtccgctggccccagagatgattgacagcagggtgctggagaacctcaaacagcagctggaggaacaggaatacaagctgcagaaggagcagaatttgaacatgcaacttttcagtgagatccataatctgcagaataagttcagagatctctcacctcccagatacgattcattagttcagtcccaagccagggagctctcccttcaacggcagcagattaaggatggccatggcatctgtgtcatctcccgtcaacacatgaacaccatgattaaggcatttgaggagttgctgcaggccagtgatgtggattactgtgtggccgagggtttccaggaacagctgaatcaatgtgctgagctgctggagaaattggaaaagctatttctcaacggaaaatcagttggagtggaaatgaacacccagaatgaactgatggagaggattgaggaagacaacttaacctaccaacatcttctgcctgaatctcctgagccttcagcctctcatgcgctctctgattatgaaacatctgaaaagtccttcttctcacgagaccagaagcaagataatgagacagagaagacttcagttatggtgaacagtttttctcaagacttactaatggaacacatacaggaaattcgaactttgagaaagcgtttagaagaatctattaaaacaaatgagaagctacggaaacagttggaacggcaaggatctgaatttgttcaaggttctacaagcatttttgcttctggttcagagcttcatagttctctaacatcagaaattcatttcttgaggaagcggaaccaggccctcaatgcaatgctcattaaaggatccagagataaacagaaggagaatgacaaattacgagagtccctctccaggaagaccgtgagcctggagcaccttcagcgggagtatgccagcgtgaaggaagaaaatgaaaggctgcagaaagaaggcagcgagaaggagagacacaaccagcagctgatccaggaggtccgctgcagcggccaggagctgagcagggtgcaggaggagctgaagttgaggcagcagctgctctcacagaatgacaagctattgcagtctctccgagtggagctgaaggcgtatgagaagctggatgaagagcacaggagactgagagaggcgtcgggagaaggctggaaggggcaggatcctttcagggacctgcacagcctcctgatggagatccaggctctgcgcttgcaactagaaaggagcatcgaaaccagcagcactctgcagagcaggctcaaggaacagctggcaaggggggcagagaaggcacaggaaggagccctcactctggctgtccaagccgtgtccatccctgaggtgccccttcagcctgacaaacacgatggtgacaaatatcccatggaaagtgataattcatttgatctgtttgattcctcccaggcagtgacaccaaaatcagtttcagagactcctccactctctgggaatgacacggactccctctcctgcgacagtggcagttcggcaactagcactccgtgtgtgtcccgcctggtcactggccaccacctgtgggccagcaagaatggccgccatgtcctgggcctgattgaggactatgaggccctgctcaaacagatcagccagggacagaggctccttgctgaaatggacattcaaacccaagaggctcccagctccacaagtcaagagctgggaacaaagggtccacacccagcaccactgagcaagtttgtgagcagtgtgagcacggccaagctgaccctggaagaggcctacaggcggctgaagcttctctggagagtctcactccccgaggatggccagtgcccccttcactgtgagcagattggagaaatgaaggcagaggtcaccaaactacataaaaaattgtttgaacaagaaaagaggttgcaaaacaccatgaagcttttgcagctgagcaagcgccaggaaaaagtcatctttgatcagttggtcgtaacccacaaaatccttcggaaggccagaggaaacctggagcttaggcctgggggagcccatccaggaacatgcagtcccagcagaccaggctcctgagaagaactttcagccaataaagcttgtgcttcccc

SEQ ID NO: 12304 - protein, 902 aa, Homo sapiens
MYRLPATQEVVTQLQSQILELQGELKEFKTCNKQLHQKLILAEAVMEGRPTPDKTLLNDSEICPPDDLASLPSCKENPEDVLSPTSVATYLSSKSQPSAKVSVMGTDQSESINTSNETEYLKQKIHDLETELEGYQNFIFQLQKHSQCSEAIITVLCGTEGAQDGLSKPKNGSDGEEMTFSSLHQVRYVKHVKILGPLAPEMIDSRVLENLKQQLEEQEYKLQKEQNLNMQLFSEIHNLQNKFRDLSPPRYDSLVQSQARELSLQRQQIKDGHGICVISRQHMNTMIKAFEELLQASDVDYCVAEGFQEQLNQCAELLEKLEKLFLNGKSVGVEMNTQNELMERIEEDNLTYQHLLPESPEPSASHALSDYETSEKSFFSRDQKQDNETEKTSVMVNSFSQDLLMEHIQEIRTLRKRLEESIKTNEKLRKQLERQGSEFVQGSTSIFASGSELHSSLTSEIHFLRKRNQALNAMLIKGSRDKQKENDKLRESLSRKTVSLEHLQREYASVKEENERLQKEGSEKERHNQQLIQEVRCSGQELSRVQEELKLRQQLLSQNDKLLQSLRVELKAYEKLDEEHRRLREASGEGWKGQDPFRDLHSLLMEIQALRLQLERSIETSSTLQSRLKEQLARGAEKAQEGALTLAVQAVSIPEVPLQPDKHDGDKYPMESDNSFDLFDSSQAVTPKSVSETPPLSGNDTDSLSCDSGSSATSTPCVSRLVTGHHLWASKNGRHVLGLIEDYEALLKQISQGQRLLAEMDIQTQEAPSSTSQELGTKGPHPAPLSKFVSSVSTAKLTLEEAYRRLKLLWRVSLPEDGQCPLHCEQIGEMKAEVTKLHKKLFEQEKRLQNTMKLLQLSKRQEKVIFDQLVVTHKILRKARGNLELRPGGAHPGTCSPSRPGS

SEQ ID NO: 12305 - DNA, 3024 bp, Homo sapiens
  CDS (334)..(2655)
caagttgtggaagcccttgggtcctctctagagaatccagaaccccgaactcgggcacgaggaatccagcttttgtcacaggtgctactccactgtcacaccttgctcctggagaaggaagtggtacacctgatactgttctatgagaaccggctgaaggaccatcatcttgtgatcccatctgtcctgcagggtttgaaggcacttagcctgtgtgtggccctgcccccagggctggctgtttctgtgcttaaagccatcttccaggaagtgcatgtacagtccctgccacaggtggaccgacacacagtctacaatatcatcaccaattttatgcgaacccgggaagaagagctaaagagcctaggagctgacttcacctttggcttcatccaggtgatggatggggaaaaggatccccgtaatcttctggtggccttccgcatcgtccatgacctcatctccagggactatagcctgggaccctttgtggaggagttgtttgaagtgacatcctgttatttccctatcgattttacccctccacctaatgatccccatggtatccagagagaagacctcatcctgagtcttcgcgctgtgctggcttctacaccacgatttgctgagtttctgctgcccctgttgattgagaaagtggattctgaggttctgagtgccaagttggattctctacagactctgaatgcttgctgtgctgtgtatggacagaaggaactgaaggacttcctccccagcctttgggcttctatccgcagagagagcagccagcggcggacaatccttgaaatgctcctgggtttcttgaagctgcagcagaaatggagctatgaagacaaagatcaaaggcctctgaatggcttcaaggaccagctgtgctcactggtattcatggctctaacagaccccagcacccagcttcagcttgttggcatccgtacactgacagtcttgggtgcccagccagatctcctatcttatgaggacttggagctggcagtgggtcacctgtacagactgagcttcctgaaggaggattcccagagttgcagggtggcagcactggaagcatcaggaaccctggctgctctctaccctgtggccttcagcagccacctcgtacccaagctcgctgaggagctgcgtgtaggggagtcaaatttgactaacggagatgagcccacccaatgctcccggcatctgtgctgtctgcaagccttgtcagctgtatcaacacatcccagcatcgtcaaggagacactgcctctgctgctgcagcatctctggcaagtgaacagagggaatatggttgcacaatccagtgacgttattgctgtctgtcagagcctcagacagatggcagaaaaatgtcagcaggaccctgagagttgctggtatttccaccagacagctataccttgcctgcttgccttggctgtgcaggcctctatgccagagaaggggccctcagttctgagaaaagtactattggaggatgaggtgttggctgccatggtgtctgtcattggcactgctacaacccacctgagccctgagttagctgcccagagtgtgacacacattgtgcccctcttcttggatggcaacgtgtcctttctgcctgaaaacagcttcccgagcagattccagccattccaggatggctcctcagggcagaggcggctgattgcactgcttatggcctttgtctgctccctgcctcgaaatgtggaaatccctcagctgaaccaactcatgcgggagcttttggaactgagctgctgccacagctgccccttttcttccaccgctgctgccaagtgctttgcaggactcctcaacaagcaccctgcagggcagcagctggatgaattcctacagctagctgtggacaaagtggaggctggcctggactctgggccctgtcgtagtcaggccttcactcttcttctctgggtaacaaaggccctagtgctcagataccatcctctcagctcctgccttacagcccggctcatgggcctcctgagtgacccagaattaggtccagcagcagctgatggcttctctctgctcatgtctgactgcactgatgtgctgactcgtgctggccatgccgaagtgcggatcatgttccgccagcggttcttcacagataatgtgcctgctttggtccagggcttccatgctgctccccaagatgtgaagccaaactacttgaagggtctttctcatgtacttaacaggctgcccaagcctgtactcttgccagagctgcccacgcttctttccttgctgctggaggccctgtcctgccctgactgtgtggtgcagctctccaccctcagctgccttcagcctcttctactggaagcaccccaagtcatgagtcttcacgtggacaccctcgtcaccaagtttctgaacctcagctctagcccttccatggctgtccggatcgccgcactgcagtgcatgcatgctctcactcgcctgcccacccctgtgctgctgccgtacaaaccacaggtgattcgggccttagccaaacccctggatgacaagaagagactggtgcgcaaggaagcagtgtcagccagaggggagtggtttctgttggggagccctggcagctgagccctcagtcctggcctagactgttctgacaatctaacctgggattactaactgttgagccatcttccccaaagcagggaaaccactggtctctgactgcctttcccacagacacagcacaaatgctaggcctctgttgcatggctgtacaaagaacataagagtccatatttctagtggatttgtaaaataagtgtgtgtgagacacttgcgtttgaagaaagatctagggtcctgggtctcttgcatttatatgtcagaaaaggggcgatatgctgctgaggggtgagtgcatatgagtgtggccctgaggaccagggctggcagatgttgtctacctgctgaagaataaagatttcttttggt

SEQ ID NO: 12306 - protein, 774 aa, Homo sapiens [sequence omitted]

SEQ ID NO: 12307 - DNA, 632 bp, Homo sapiens
  CDS (65)..(538)
gtaatgctgggaaaccccggctgacgcgcccctcccccgcccgcagtgcggctcggcggagtacatggccccggaggtagtggaggccttcagcgaggaggctagcatctacgacaagcgctgcgacctgtggagcctgggcgtcatcttgtatatcctactcagcggctacccgcccttcgtgggccgctgtggcagcgactgcggctgggaccgcggcgaggcctgccctgcctgccagaacatgctgtttgagagcatccaggagggcaagtacgagttccccgacaaggactgggcccacatctcctgcgctgccaaagacctcatctccaagctgctggtccgtgacgccaagcagaggctgagtgccgcccaagtcctgcagcacccctgggttcaggggtgcgccccggagaacaccttgcccactcccatggtcctgcagaggtgggacagtcacttcctcctccctccccacccctgtcgcatccacgtgcgacctggaggactggtcagaaccgttactgtgaatgagtgaagatcctggaggaccctgggccccaggccagctcccatcgctgggggacggtgaacggccatgtgttaatgttacgatgtttttaaaagac

SEQ ID NO: 12308 - protein, 158 aa, Homo sapiens
MAPEVVEAFSEEASIYDKRCDLWSLGVILYILLSGYPPFVGRCGSDCGWDRGEACPACQNMLFESIQEGKYEFPDKDWAHISCAAKDLISKLLVRDAKQRLSAAQVLQHPWVQGCAPENTLPTPMVLQRWDSHFLLPPHPCRIHVRPGGLVRTVTVNE

SEQ ID NO: 12309 - DNA, 3174 bp, Homo sapiens
  CDS (234)..(536)
acagtcttccagctccacatcctgagaggacgcttctggagccgcgactgcccggggttgtgccggccgccgctgccgcccaggccgcctcagctctcctctgcgccggcccgctcactccgcccggccccagccctagcgctggccgcgaccccggcgcctttgaaacttctgctggtgtgagtgccctcgggggttccccaggaatatcgatacaacaccaacaggagatcatgaatcagacagataaaaatcaacaagaaatcccatcataccttaatgatgaaccaccagaaggttcaatgaaagatcacccacagcagcagccaggcatgttgtcccgtgtgactgggggtatcttcagtgttacaaagggagctgttggtgccaccattggtggtgtggcttggattggtggaaagagtctggaagtgaccaaaacagctgttacaactgtgccttccatgggaatagggctggtgaaagggggtgtctctgctgtggctggaggtgtacagctgttgggtctgctgttgtaaacaaagtgcccttaacaggaaagaagaaagacaaatctgactgaaatatagagatacacttgcgctccacagcactgtaatgccagtggcattgaattgctaaattatggactacaaccaagtcaactgttttggacgtttatcttctaaactgctgtgttgaaagtattgatgactggctttcatctaaaaagaagagaccaatacgagcacagtatatgaaggtttctcatacttaagttccaggtttttatctggtaaaatgttacacttactcggttgtaactgaagatatggtatgtttgaatatttactataagtctttcagtttgactaaaaatgtgaaagttgaatttagtagatgatcttcacagttccatatgtataatgtgccaggtaactcacctgccccttaagaagggaaccttgaattacataagccgtacctttgatgtgcctaatagtttcagatgtcttagttttttataaccatagttgattaggccaagaggcattcatttcttatttaagctggcaaaattagcaggaattagagaagtttaaaaagataaatggttttatgataatgttaaccatcttttgttagtaaatatgcgttctattattttaatcattgatgccttacaaaagaaaacatcttttctaataccctgaatatgtgctgttcttagaatcatctatggattcttttaaaggttgtttgtgaaattagttttccctttttagaatctcaggagtagtggggtaaagacatttcctgctgtcagtggataagacagagcttgttaactgttttggcagtagttaaaatcaaattgtacacttctcagcctgggttcatgcttcatcattaatacacctcacagtgcctaaggaacatttacttactggtcagaaggtattttggaagagtttcatattaaggaggaacaaataataattttaagttcttaaaaattacctaaaacaccccaaatataaaaagaagccttcacacctattctgtctttaggatgtcttaaattattagcagtactcctttttttaaaaacactgtaaaagtaaccacaaatatgtgaggacttactattttaaatggaatggaatgagctccatagattagttttgaatataaagtatataaaagtgcatcagtggtttatataggctttaaaaacatgttatcttacagtcctttaaagcagccatagagtttgtatcatttttcaagccaatttcagtcagggatttgaattgtttgattatggatgataaatgtgtcatatcttattaatatgtctcatgtctcgttccttcttaatatgatttagctggaattcattttcttttcgtttcatgtttaatttcataaaacgtttaacaattggcatatatacttggcattcctgtccaccaaggattgtaatccaagcctgggaaaatcttaaatttctttttacttaaatctggaaatttgtctccattctgccacctttttttttttttttttttatagtggaggggaggaaaggggggtgataccttgcagtaagtaagtcgaaatagcatgcctgaaaatttgaaacagaccattctaacacccgaggcttgtttataaaatacttgagaattacattaatgtggaatcaacagatgcagaagaatataacataacttttaaaagctttcataaataccagcagcaattgtaagcaaatctacaaaggttcttgaacctttctattatatacaaaactgaaaagtcattaaggagttcaactaatcaggaattaaatggtcatttatttcatgcagtatgatttaaggtatttcttgagattctggtcaaatgtcataatcagcaaacgggattaaaaaaaaaactccaaaatcactaaataattatctaaataatggtattggagaacttgtttcctgctatttggaagagattgttgcttcattgctagtttgtatttctaacttctacagttatagactccactgtgctttgtgtctgaatttctcagtatagacattttgtttactgtatgcttgcatatttattttcaactttgtttgtctttaaaattgcttgaggaaagatggttgtaattaatttctgctacagaaaagccacctggtacgttttgtctcatcaggattgttttaaattctaaactataagtttgttcagaggggcttttgcaatgatagcagaaaactgtacaaatgtacagttagttatagaggttcttgttgaaatgaacttaccatctgatgatatgtatgtacagctgtgtacttgagtcttttttagtttacttagaaagactagcagtttgacctgttaaacaggactagttcaagtcaagaaactaaggttgttgtatacacctggaggcatctgttattcagcttatcctttgagtgggaatttggcacaatgaggataaacttatgtgacccacttgaatggctgatctaataatgttgacattatgcattctgtacttagtgaaatgtcagatgaaaataactgatgaataatttttttgtattaaagggatgggaaaagaacacatgaatttgttaataaagcactatgatctgc

SEQ ID NO: 12310 - protein, 101 aa, Homo sapiens
MNQTDKNQQEIPSYLNDEPPEGSMKDHPQQQPGMLSRVTGGIFSVTKGAVGATIGGVAWIGGKSLEVTKTAVTTVPSMGIGLVKGGVSAVAGGVQLLGLLL

SEQ ID NO: 12311 - DNA, 2280 bp, Homo sapiens
  CDS (123)..(470)
tctactcctctgattatttgaaatgctgaggaaaatgtccctcccatagtaaaacttgtaaataaggaactatatcatattcagtagctgtgttctgttccatctttttttttttttttgagatggagttttgcttgttgcccaggctggagtgcagcggcacgatcttggttcactgcaacctccgcctcccaggttcaagcgattctcttgcctcagcctcccgagtagctggggactacaggtgtgcgacaccatgcctggctaatttttttgtatttttagtagagatggggtttcaccatgttggccaggctggtctcaaactcctgacctcaaaggatccacccgccttggcctcccaaagtgctgggatcacaggcgtgagccaccatgcccggcccatctttttttttttttttttttttaaagatgttaataaactttatacctttctggagactttgttctaaaatgtacataaatgctcatctagttaacatatttacttagaatgtgggaggaggagtcacattattatccctgaatctcaagtacagcagaagtgaattcctgggatagtaggatagactaacatgtaaaaaggccaggtgatgcataggttctcatttcactgccctcagccttcctctccttctgagctgtgccttctcacatgttcagtcaactccagggaatattgtctccatcttctggatagaactagttgcaggatccgttacaagaattcagagttttggcatctcccctttgtatgttgtaggagaaggtttggcattgaaaatgtgctgttgttccaaagaaaaattagcaaaggacttgagatttagaaaagtctcctttgtaatgtgcatcattaccagttatctaaagaaaaacatgtaaaagccaacaaaacccttgaaaatattttgcatatggatgtctgtttcacgtttcaactgaagatgtatagagcacctctgatgatgaggaagataccatgctaggcagtactttcaagaacgtgagttcttatttctgcaggccttttgtgcccccttttaaatgttagcatttattaggtacaaactagtggggaaggtttttttaaaaagttttgcagtcttgtaatttacctttttaaaaaatttattttatttttctgagatggagtcttgctctgttgcccaggctggagtgcagtggtgccatctcagctaactgcaacttccacttcccaggttcaagcgattctcctgccttagcctcccaagtagctgggactacaggcgcatgccagcatgcctggctaatttttgtatttttagtagagcgggggttttgccatgttggccaggctggtcttgaactcctgacctcaggtgatccgcctgccctggcctcccaaagtgctgggattacaggcatgagccactgcgcccagccttgtaatttacctttgatggtgacctgaaatgcagtatgatcctatatgtggcacgtagtaatgttcagtgtttgctgaattaattctgggcagcactaagaaatccctctttcccagtcatattctataacacatttcccatttgccacaaaacctgcagctttttggtccaggtaatgacatttgctgccattttgatgatttaaaaatggtcgtgggagttgaacatagtcatgaattcaggattcctgagcatgtagacagtcatcccagtggaaagacacgttcacttaagagaagtttaagttagaggaaacagtttatgctaaaaaaatttttagaaaagtccttgagaatttttgatttagtcttgacctcatgaagctggtagttatgatgtgcatagtttgtatcaccgtttatgaagatggagaatctagtcagcacgtgttggtttattctaggaatttttagggaacacttctgttgctggcaccaggtgatgaatatggttaaaaaaagactcgtttctgcctaaacatagggaagaagagcaaattaaaaggagtaattaaaactgataaaagctcaagttacctttgtgatgatgaggcgggcagttaacgcgaaagggttgggaaaggcttcctggagggactagggggcggtctaagcacagggaacctaaccggggactccagtgtggcacagcggcaaggtatgtgctgggcaaaatgataggtgtcttgggagaccaggcaaagagagctggattaggagccgttaagtatatatttttcttctttttaaataaaataatgcactgggtg

SEQ ID NO: 12312 - protein, 116 aa, Homo sapiens
MEFCLLPRLECSGTILVHCNLRLPGSSDSLASASRVAGDYRCATPCLANFFVFLVEMGFHHVGQAGLKLLTSKDPPALASQSAGITGVSHHARPIFFFFFFFKDVNKLYTFLETLF

SEQ ID NO: 12313 - DNA, 2540 bp, Homo sapiens
  CDS (81)..(2054)
aggtggcggagattgcaccggaagacgcttcctgggtttgaggagttcagtgactgctattgaaccaccaaaagtccattatgaaactgtattgcctgtcagggcacccaaccttaccatgcaatgtgctcaaattcaaatcaaccaccattatgttggactgcggactggacatgacttctaccctcaatttccttcctttgccacttgttcaaagtcccaggctgtccaatcttcctggctggtccctgaaggatggaaatgctttcttggacaaggagctaaaggagtgctcgggtcatgtatttgtggattctgtgccggaattctgtttaccagagacggagctaatagatctgtctacagtagatgtgattctcatctctaactatcactgtatgatggcgctgccatacatcaccgagcacaccggcttcacaggcacagtgtatgccacggaacccaccgtccagatcggcaggcttctcatggaagagctggtgaatttcattgaaagagtgccaaaggctcagtctgcctccttgtggaagaataaggacattcagaggctgttaccttctcctctcaaggatgcagtggaagtctcaacctggagaagatgctatacaatgcaagaggtgaactctgcccttagtaaaatccagctggtgggatattctcagaaaattgagctttttggtgcggtccaggtgactcctctgagctctggctatgcccttgggagctccaactggatcatccagtctcattacgagaaagtgtcttatgtctctggatcctccttgcttaccacacacccccagcccatggaccaagcttctctcaaaaacagcgatgttcttgttctgacagggcttacccagatccccactgcaaacccagatggaatggtgggagagttctgcagcaacctagctctgacagtccggaatggaggaaacgtgttggttccctgctacccttctggagtgatctatgacctcctggagtgcctatatcagtacatcgactcagccgggctttccagcgcccccctctacttcatctcccctgtggccaacagttcactggagttttcccagatctttgctgagtggctttgtcacaacaaacagagtaaggtgtatcttccagaaccaccttttcctcatgcagagctcattcagaccaataagctgaagcactaccccagcatccacggagacttcagcaacgactttagacagccctgtgtggtgttcaccgggcacccttccctccgcttcggggacgtggtccacttcatggagctctggggaaaatctagtctcaataccgtcatattcacggaaccagacttctcctacctggaagccctggctccttaccagccgctggccatgaaatgcatctactgccccatcgacacccggctgaacttcatccaggtgtcaaagctgcttaaagaagtgcagcccctgcacgtggtgtgtcctgagcagtacactcagccgcccccagcccagtcccacaggatggacctcatgatcgactgccagccccccgccatgtcctatcggcgggctgaggttctcgccctgcccttcaaacgtcggtacgagaagatcgagatcatgccagagctcgcagattcactggtgcccatggagatcaagcctggcatctccttggcaactgtctcggccgtgctgcacaccaaagataacaagcacttgcttcagccccctcctcggcccgcccagcccacgagcgggaagaagagaaagcgggtgagcgatgacgtaccagactgcaaagtcctgaagcctttgttgagcggttccatccctgtggagcagttcgtgcagaccctggagaagcatggcttcagtgatattaaggtggaggacacagccaagggccatatcgtcctgctccaggaggctgagacgctcatccagattgaagaagactcgacccatatcatctgcgacaatgacgagatgctcagagtgcgactgcgggaccttgtcctcaaattcttacagaagttctgagtgggccatctgagctacttccctgaaatcctgcagtccctcactggctgccctcacaagccacctgaggagtggcatgagaggccattaactgtgtctttgtggtgtcctctggcttaaggagtgaagaggtggctcttgagggaaatggtctggacttattcccagcactgtttcaggcaagaactttccctttcaacttcaggctcattttcttctcaactctggctctctcaaggagctggagggtgacagaagtgggacaggagaagttttccaagaggttcatgggaggcggaggtgactggctggctgtcttgcatcagtcccaggcctcggccaggggagccagcctttggtttcgtttacttgcctacagtgctgtacgcaataagatgatgatcccaaaatatggtaaagtgaacccatctgtctgcattttctactctgagcccatttgttaataaacacttatttttatat

SEQ ID NO: 12314 - protein, 658 aa, Homo sapiens
MKLYCLSGHPTLPCNVLKFKSTTIMLDCGLDMTSTLNFLPLPLVQSPRLSNLPGWSLKDGNAFLDKELKECSGHVFVDSVPEFCLPETELIDLSTVDVILISNYHCMMALPYITEHTGFTGTVYATEPTVQIGRLLMEELVNFIERVPKAQSASLWKNKDIQRLLPSPLKDAVEVSTWRRCYTMQEVNSALSKIQLVGYSQKIELFGAVQVTPLSSGYALGSSNWIIQSHYEKVSYVSGSSLLTTHPQPMDQASLKNSDVLVLTGLTQIPTANPDGMVGEFCSNLALTVRNGGNVLVPCYPSGVIYDLLECLYQYIDSAGLSSAPLYFISPVANSSLEFSQIFAEWLCHNKQSKVYLPEPPFPHAELIQTNKLKHYPSIHGDFSNDFRQPCVVFTGHPSLRFGDVVHFMELWGKSSLNTVIFTEPDFSYLEALAPYQPLAMKCIYCPIDTRLNFIQVSKLLKEVQPLHVVCPEQYTQPPPAQSHRMDLMIDCQPPAMSYRRAEVLALPFKRRYEKIEIMPELADSLVPMEIKPGISLATVSAVLHTKDNKHLLQPPPRPAQPTSGKKRKRVSDDVPDCKVLKPLLSGSIPVEQFVQTLEKHGFSDIKVEDTAKGHIVLLQEAETLIQIEEDSTHIICDNDEMLRVRLRDLVLKFLQKF

SEQ ID NO: 12315 - DNA, 3115 bp, Homo sapiens
  CDS (8)..(1852)
agaaaagatggcgaaagtcaacataactagagacctcatccgtaggcagatcaaggagcggggtgccctgagctttgagcggcgctaccatgtcactgacccctttatccggcggctgggcctggaagcagagctgcagggtcactcaggatgtgtcaactgtctggagtggaatgagaaaggagacttgctggcctctggttccgatgaccagcacacgattgtgtgggacccgctgcaccacaagaagctgctctccatgcacacgggacacaccgcaaatatcttctctgtcaagttcctgcctcacgctggggaccgcatcttgatcacgggggcagccgactctaaggtgcatgtgcacgacctgacagtaaaggagaccatccacatgtttggagaccacacaaaccgggtgaagcgcatcgccacagcgcccatgtggcccaacacattctggagtgctgctgaggatgggcttatccgccagtatgaccttcgagagaacagcaaacactcggaggtgctgattgacctgacagagtactgtggccagctggtggaggccaagtgcctcactgtcaacccccaggacaacaactgcctggcagttggggccagcgggcccttcgtgaggctctatgacatccgcatgatccataaccacagaaagagcatgaagcagagcccttcagcgggtgtgcacaccttctgtgaccggcagaaaccccttccggacggtgcagcccagtattacgtagcaggtcacctgccagtgaagcttcctgactacaacaaccgtttgagagtgctggttgccacctatgtgaccttcagccccaatggcacagagctactagtcaacatggggggggaacaggtctatttgtttgacttgacttacaagcagcggccgtacaccttcctcttgcctagaaaatgccactcctcgggggaagtccagaatggcaagatgtccaccaacggtgtgtccaacggtgtgtccaatggcctgcaccttcatagcaatggcttccggctgccggagagtaggggacatgtcagcccccaagtagagctaccaccatacctggagcgtgtgaaacagcaagccaatgaggcttttgcctgccagcagtggacccaagccattcagctttacagcaaggctgtgcagagggcccctcacaatgccatgctttatggaaaccgagcagcagcctacatgaagcgcaagtgggatggtgaccactatgatgccctgagggactgcctcaaggccatctccctaaacccatgccacctgaaggcacactttcgcctggcccgctgcctctttgagctcaagtatgtggctgaagccctggagtgcccggacgacttcaaagggaaatttccggagcaggcccacagcagcgcttgtgatgcattgggccgcgacatcacagctgccctcttctctaaaaatgatggtgaggagaagaagggacctggtggcggcgccccagtccgcctccgcagcacgagccgcaaggactccatctcagaggatgaaatggtgctgcgggagcgaagctacgactatcagttccgctactgcggccactgcaacaccaccacggatatcaaagaggccaatttctttggcaggagaccaccaacctggtccgtgtgctccaaggggatgagtccattgtcaactgcctgcagccacaccccagctactgcttcctggccaccagtggcatcgatcctgttgtgcggctctggaacccccgaccagagagtgaagacctcacaggccgagtcgtggaagatatggagggtgcttcacaggccaaccagcggcgcatgaatgcagacccgttggaggtgatgctgctcaacatgggctaccggatcacgggcctgagcagtgggggtgccggggcctctgatgatgaggacagctctgagggccaggtgcagtgccggcccagctagaccctccagccctggtccccagcccctgctactggctggaccctctgccctgggcaggaggtcaggggattctgttttggtttgtcttccccaccacccttttttttcatttcccctgttttgtttgttagtttggcgttaggggtggaggttgctacaacttgctggctttcggactctgggctgattgtcccctgactatccccagccctgaaaaaaagagcaggaggggacacccctccatatgcccccccccatctcctgctttcatgtccctggagggctctggcctgcctcaaaaccccttctgcctcaggtggggaggaacaagctgaactgtcttcagggactgtcctgccctttagctggcagcagcaggaggagtgggattcccaattggtaagggctcgccttggcctgttgccactcttgctccctagcctgcaaggctagctcccctgtggtcttcaggaaaggttttgaaaaaggatgggtcccaccctccctccagagccaccagtgttagagcggagcccaaaggaaggatgggagccctggagtgggcaagaccaggccacctgctgaggtcgctgtggagcaccctcgctcctctcctggctactagctctggccctgcacctactctcactggccacctctggaggctctgcctttcccaagggccctggcagagggtggggcactgcaccttaccccacccatccatgccagcacttctgcactacggccattctcctcttgggcgctcctcagcctcactgtgacctttctgccagagctcccagccaggcctactctgctgaggtggcgcttcctgctaagggcccttctctgccctttctgccctccttcccatcccacatgctgagccgccacaaagaccaaagaagtgatggcttttctctgtcccctgctgctctgaggggagaggggtgggtctcctgagccactcagatgggaaagtcccttactcggcccctccctccccagcagccccaagctttacactggatgcagcgatcaacccaccactcaccaggagccgagcctttttgttgctccgctcccaggagagtgagggtgacgcaattgattaaaaccattttgttct

SEQ ID NO: 12316 - protein, 615 aa, Homo sapiens
MAKVNITRDLIRRQIKERGALSFERRYHVTDPFIRRLGLEAELQGHSGCVNCLEWNEKGDLLASGSDDQHTIVWDPLHHKKLLSMHTGHTANIFSVKFLPHAGDRILITGAADSKVHVHDLTVKETIHMFGDHTNRVKRIATAPMWPNTFWSAAEDGLIRQYDLRENSKHSEVLIDLTEYCGQLVEAKCLTVNPQDNNCLAVGASGPFVRLYDIRMIHNHRKSMKQSPSAGVHTFCDRQKPLPDGAAQYYVAGHLPVKLPDYNNRLRVLVATYVTFSPNGTELLVNMGGEQVYLFDLTYKQRPYTFLLPRKCHSSGEVQNGKMSTNGVSNGVSNGLHLHSNGFRLPESRGHVSPQVELPPYLERVKQQANEAFACQQWTQAIQLYSKAVQRAPHNAMLYGNRAAAYMKRKWDGDHYDALRDCLKAISLNPCHLKAHFRLARCLFELKYVAEALECPDDFKGKFPEQAHSSACDALGRDITAALFSKNDGEEKKGPGGGAPVRLRSTSRKDSISEDEMVLRERSYDYQFRYCGHCNTTTDIKEANFFGRRPPTWSVCSKGMSPLSTACSHTPATASWPPVASILLCGSGTPDQRVKTSQAESWKIWRVLHRPTSGA

SEQ ID NO: 12317 - DNA, 3649 bp, Homo sapiens
  CDS (96)..(3647)
gtgggcagccgcgcagcgggaagagccggccgaagcgtggcggccacagactgtgggtaccgggtccgagggactcgcgcttttctctccgtgccatggcgccagcgaaagccacgaacgtggtgcggctgctactaggctccacagcgctgtggctttcgcagctcggctccgggacggtcgccgcgtccaagtcggtgactgcccacttggccgcgaagtggcccgagaccccgctgctgctggaggcaagtgaatttatggcggaagaaagtaatgaaaaattttggcagtttttggaaactgtgcaagaattagcaatttataagcaaacagaatcagattattcttattacaacttaatcctgaagaaagctggacagtttctagacaatttacacatcaaccttttaaagtttgctttctctataagggcatactccccagctattcagatgtttcagcagattgcagctgatgagccaccaccagatggttgtaatgcatttgtggttattcataagaagcacacctgtaaaattaatgagattaaaaagctgctgaagaaagctgcttcaaggactagaccttatctatttaaaggagatcacaaatttcctacaaacaaagagaacttaccagtggtgattctctatgccgaaatgggtactagaacatttagtgcatttcacaaagtattgtctgaaaaagctcaaaatgaggaaattctgtatgttcttcgccattatattcagaaaccaagctcacggaaaatgtacttatctgggtatggtgtggagctagcaattaagagtacagaatacaaagcactggatgatacccaagttaaaactgtgactaatactactgtagaggatgagactgaaacaaatgaagttcaaggatttctctttgggaaactaaaagaaatatattcagatcttagagataatctgacagcattccaaaaatacctgattgagagtaacaaacaaatgatgcctttgaaagtctgggaactacaagatcttagttttcaagcagcttctcaaataatgtccgctccagtttatgatgccattaaattaatgaaagacatttcacagaacttccccataaaagccagatctctaaccagaattgctgtaaatcaacatatgagagaagaaataaaggaaaatcaaaaggatcttcaagttagatttaaaattcagccaggcgatgctcgtctatttataaatggccttcgtgttgatatggatgtttatgacgcttttagtattttggatatgctgaaattagaaggaaaaatgatgaatggccttcgcaatcttgggatcaatggggaagatatgagcaaatttttaaaattaaattcacacatttgggaatatacttatgtattagatattcgacattcttctataatgtggattaatgacttagaaaatgatgatttgtatattacatggcctacaagttgccagaaacttctgaagccagtatttcctggaagtgtaccttccataaggcgcaattttcataatttggttctgtttattgatccggcccaagaatataccttggattttataaaacttgctgatgttttctattctcacgaagttcctcttagaattggttttgtgttcattcttaatacagatgatgaagttgatggagcaaatgatgctggagttgctctctggcgagctttcaactatattgcagaagaatttgatatatcagaagcatttatttctatagtacacatgtaccaaaaagtgaagaaggatcaaaatatactcactgtggacaatgtgaagagtgttctccaaaatacatttcctcatgctaatatttgggatattttgggaattcattctaaatatgatgaagaaagaaaggctggagcaagcttttataagatgactggcctgggtcctttgcctcaagctctttataatggtgaaccctttaaacatgaagagatgaatattaaagaactaaaaatggctgttcttcaaagaatgatggatgcatctgtatatttacaaagagaagtttttttgggcacattaaatgatcgcacgaatgcaattgattttctaatggataggaataatgttgtaccccgtataaatactttgattttgcgtactaaccagcagtacctcaatttaatatctacatcagtaactgctgatgttgaagatttctctactttctttttcttggattcacaagataagagtgctgtaattgcaaagaacatgtattatttaacccaagacgatgagagtataatttctgcagtcactctctggattattgcagattttgataagccttctgggagaaaacttctttttaatgcattaaagcacatgaaaacaagtgttcatagtcggttggggattatttataatcctacatcaaaaataaatgaagagaacacagctatttctagaggaattttggcagcttttcttacacagaagaacatgtttttgagaagctttcttgggcaactggcaaaggaagaaattgctacagctatttactctggagataaaattaaaacattccttattgaggggatggataagaatgcttttgagaaaaaatataatactgttggagtgaatatttttcgaactcaccagttgttctgtcaagatgtacttaaattacgtcctggagaaatgggtattgtcagcaatgggagattcttaggacctttagatgaagatttttatgcagaagatttttacttgttggaaaagataacatttagtaatttaggagagaaaattaaaggcattgttgaaaatatgggaatcaacgcaaataacatgagtgactttattatgaaagttgatgcccttatgtcctctgtgcctaagcgtgcatctcgatatgatgtcacatttcttagggagaatcacagtgttataaagacgaatcctcaagagaatgatatgttcttcaatgtcattgctattgttgatccattaacaagagaagcacagaaaatggcacagttgttggttgtacttggcaagattatcaacctgaagataaagttgttcatgaactgtaggggcaggctttcagaagcccctttagaaagcttttaccgttttgttctggaaccagaactgatgtcaggggctaatgacgtttcttctcttggaccagtggcaaaatttttggatattcctgaatcacccctcctaatcctcaacatgattactccagaaggctggttggttgaaacagtgcacagcaactgtgaccttgataatattcacttaaaggatactgagaaaactgttacagcagaatatgaactagaatacttactactggaaggacaatgctttgataaagtgacagaacagcctcctcggggtctgcagttcacactaggcacaaaaaataaacctgctgtggttgatacaatagtgatggcacatcatgggtattttcaattaaaagcaaacccaggtgcttggatactgaggttacaccaaggaaaatctgaagatatttatcaaatagttgggcatgaaggaactgactctcaagcagacctagaagatatcattgttgtattaaacagcttcaaaagcaagatactcaaagt

SEQ ID NO: 12318 - protein, 1184 aa, Homo sapiens
MAPAKATNVVRLLLGSTALWLSQLGSGTVAASKSVTAHLAAKWPETPLLLEASEFMAEESNEKFWQFLETVQELAIYKQTESDYSYYNLILKKAGQFLDNLHINLLKFAFSIRAYSPAIQMFQQIAADEPPPDGCNAFVVIHKKHTCKINEIKKLLKKAASRTRPYLFKGDHKFPTNKENLPVVILYAEMGTRTFSAFHKVLSEKAQNEEILYVLRHYIQKPSSRKMYLSGYGVELAIKSTEYKALDDTQVKTVTNTTVEDETETNEVQGFLFGKLKEIYSDLRDNLTAFQKYLIESNKQMMPLKVWELQDLSFQAASQIMSAPVYDAIKLMKDISQNFPIKARSLTRIAVNQHMREEIKENQKDLQVRFKIQPGDARLFINGLRVDMDVYDAFSILDMLKLEGKMMNGLRNLGINGEDMSKFLKLNSHIWEYTYVLDIRHSSIMWINDLENDDLYITWPTSCQKLLKPVFPGSVPSIRRNFHNLVLFIDPAQEYTLDFIKLADVFYSHEVPLRIGFVFILNTDDEVDGANDAGVALWRAFNYIAEEFDISEAFISIVHMYQKVKKDQNILTVDNVKSVLQNTFPHANIWDILGIHSKYDEERKAGASFYKMTGLGPLPQALYNGEPFKHEEMNIKELKMAVLQRMMDASVYLQREVFLGTLNDRTNAIDFLMDRNNVVPRINTLILRTNQQYLNLISTSVTADVEDFSTFFFLDSQDKSAVIAKNMYYLTQDDESIISAVTLWIIADFDKPSGRKLLFNALKHMKTSVHSRLGIIYNPTSKINEENTAISRGILAAFLTQKNMFLRSFLGQLAKEEIATAIYSGDKIKTFLIEGMDKNAFEKKYNTVGVNIFRTHQLFCQDVLKLRPGEMGIVSNGRFLGPLDEDFYAEDFYLLEKITFSNLGEKIKGIVENMGINANNMSDFIMKVDALMSSVPKRASRYDVTFLRENHSVIKTNPQENDMFFNVIAIVDPLTREAQKMAQLLVVLGKIINLKIKLFMNCRGRLSEAPLESFYRFVLEPELMSGANDVSSLGPVAKFLDIPESPLLILNMITPEGWLVETVHSNCDLDNIHLKDTEKTVTAEYELEYLLLEGQCFDKVTEQPPRGLQFTLGTKNKPAVVDTIVMAHHGYFQLKANPGAWILRLHQGKSEDIYQIVGHEGTDSQADLEDIIVVLNSFKSKILK

SEQ ID NO: 12319 - DNA, 2736 bp, Homo sapiens
  CDS (93)..(1271)
gcgttttccggccgtgcgtttgtggccgtccggcctccctgacatgcagccctctggaccccgaggttggaccctactgtgacacacctaccatgcggacactcttcaacctcctctggcttgccctggcctgcagccctgttcacactaccctgtcaaagtcagatgccaaaaaagccgcctcaaagacgctgctggagaagagtcagttttcagataagccggtgcaagaccggggtttggtggtgacggacctcaaagctgagagtgtggttcttgagcatcgcagctactgctcggcaaaggcccgggacagacactttgctggggatgtactgggctatgtcactccatggaacagccatggctacgatgtcaccaaggtctttgggagcaagttcacacagatctcacccgtctggctgcagctgaagagacgtggccgtgagatgtttgaggtcacgggcctccacgacgtggaccaagggtggatgcgagctgtcaggaagcatgccaagggcctgcacatagtgcctcggctcctgtttgaggactggacttacgatgatttccggaacgtcttagacagtgaggatgagatagaggagctgagcaagaccgtggtccaggtggcaaagaaccagcatttcgatggcttcgtggtggaggtctggaaccagctgctaagccagaagcgcgtgggcctcatccacatgctcacccacttggccgaggctctgcaccaggcccggctgctggccctcctggtcatcccgcctgccatcacccccgggaccgaccagctgggcatgttcacgcacaaggagtttgagcagctggcccccgtgctggatggtttcagcctcatgacctacgactactctacagcgcatcagcctggccctaatgcacccctgtcctgggttcgagcctgcgtccaggtcctggacccgaagtccaagtggcgaagcaaaatcctcctggggctcaacttctatggtatggactacgcgacctccaaggatgcccgtgagcctgttgtcggggccaggtacatccagacactgaaggaccacaggccccggatggtgtggggcagccaggcctcagagcacttcttcgagtacaagaagagccgcagtgggaggcacgtcgtcttctacccaaccctgaagtccctgcaggtgcggctggagctggcccgggagctgggcgttggggtctctatctgggagctgggccagggcctggactacttctacgacctgctctaggtgggcattgcggcctccgcggtggacgtgttcttttctaagccatggagtgagtgagcaggtgtgaaatacaggcctccactccgtttgctgtgacgggtctgctgcagtcctcagtcgggggtcctgggcaccatgtgactccccatcctcccatgaggggtccctgccctggatgagtcctagctgggggacaccctgagagctcgagcccctcccacccgggcatccgctggctgcctcctgtcagctgggcaggcggggcccacagtacctgccccaccaggacagcctggctcaggcctttctgggctgcttctcacatcctgggctggatgtgggtttggaagctctggaaccatcccggactcgcccactcctggattcgagggccctcgcagggacagctctgcccagcatcaccccagggcctggcagtgatagagctgagagctccacccccacatacctgccacccacctggccagccacagcacgtgtgtcacctgcagagagccacccagacgtccccaccgagcccagcacggcaagggtgcaggggctgccctagaaatggactcagaggagcctggcccaccctcttgaaactggtcctggaccttggctcagctctgccgcctcaggtagcacgacccccaggccagcctggacacatcagggagcatggtgaggggcaacggcaggacccgtgggccatatcgggacaggcatttccagcgaggggtggggcagaggacatgtggctggcaggctacacccaccctgccatgcagcggtgtccaggctctggggaggccctggggaatttggaggcatcatgagccaaggcctggtggccctcgttcccctgcccctcgtcaccatcctgtccttggctggccgtgaggactcccctcctcaccactgggtcccacagggctgaggtgggcagtagagggcataggtgggtacatgtcccgggcaaggtctctcggggggacagaagtgagtccagggagtgggtgggcctgggcgtccctcactcagaatgccgtggggtgaggacggtgaggacagggtgggcactgggttctggtttagagtcagtaatgttagggcgcagtgggcagggggtcaggacatctccagccggtggtgaggaagcatggtggggtctcctccacaggacgggagctggggagggggtcctgggtcggacccaaggcacccacacttgagaaagcctccgcctggacgtcagggaggcctgcgagctgccacagtgcaggtgcagccgttcccaccgccctgctgctgcttgacacgggcataggagatacaagtggtgtgtgcggcggttcatgcctgtaatcccagtactttggaaagccgtggcgggaggaacgctgggcaacatggtgaaaccccgtctctaccccctaaaaatagaaagattagcaag

SEQ ID NO: 12320 - protein, 393 aa, Homo sapiens
MRTLFNLLWLALACSPVHTTLSKSDAKKAASKTLLEKSQFSDKPVQDRGLVVTDLKAESVVLEHRSYCSAKARDRHFAGDVLGYVTPWNSHGYDVTKVFGSKFTQISPVWLQLKRRGREMFEVTGLHDVDQGWMRAVRKHAKGLHIVPRLLFEDWTYDDFRNVLDSEDEIEELSKTVVQVAKNQHFDGFVVEVWNQLLSQKRVGLIHMLTHLAEALHQARLLALLVIPPAITPGTDQLGMFTHKEFEQLAPVLDGFSLMTYDYSTAHQPGPNAPLSWVRACVQVLDPKSKWRSKILLGLNFYGMDYATSKDAREPVVGARYIQTLKDHRPRMVWGSQASEHFFEYKKSRSGRHVVFYPTLKSLQVRLELARELGVGVSIWELGQGLDYFYDLL

SEQ ID NO: 12321 - DNA, 3614 bp, Homo sapiens
  CDS (834)..(3023)
atacgtagcggccgccattgttccgcgccgatggcgagatccttgttcctcagatagcgttcatcgcccgtcgtggtcaacgggccagccgagtctggagtggttgcgaacccttctggctgcagatctggaggtggaggcagtaccctggactctattctgctgccccttcagggtttggaggagccggagcatccctcgcgtcctgtcacttccagcgaggcacacaaaactgaccgtagggatggccaccagggtccggacagcttctatttgggtcccacctctccaagaacgaaacagttcatgggataggatcagaaagctccaaggtcaggaatccatcttgggccaagggactcctggtctgcaacctctccctggaacacccaggcagaagcagaagagtcgcagaatagagaaagtcctagagtggctgtttatttcccaagagcagccaaaaatcaccaagtcctggggacctttgtcattcatggatgtgtttgtggattttacctgggaggagtggcagctgctagacccagcacagaagtgcctgtacaggagtgtgatgttggagaactatagcaacctggtgtccctagggtaccaacacaccaaacctgatatcatcttcaagttggaacaaggagaagagctgtgtttggcgcaggcccaagttccaaatcagacctgtccaattttgaaggctggaaagtccaaagccaaggtgctggcaggtttggtgtctggtgagggcctgctctgtgcttccaagatgacgccttgttgctgcatcctctggagacacagtctggaaaattgatgatcttatggattggcatcaggaaaataaagacaagctgggaagtacggcaaaaagctttgaatgcactacatttggaaaactatgtcttcttagtacaaagtatctttcaagacaaaaacctcataaatgtggcacgcatggaaagagtttgaaatatatagatttcactagtgattatgctagaaataatcctaatgggtttcaggtacatggaaaatcattcttccattctaaacatgagcaaactgttattggaataaaatactgtgaaagtattgaatctggaggaaccgtcaataagaaatcgcaacttatgtgccaacaaatgtatatgggcgaaaaaccctttggatgcagctgttgtgagaaagccttcagcagcaagtcataccttctagtgcatcagcaaactcatgccgaagagaaaccctatggttgtaatgaatgtgggaaagacttcagtagtaaatcatacctcattgtacatcagagaattcatacaggagagaaactacatgaatgcagtgaatgcaggaaaacattcagtttccattcacagcttgttatacatcagagaattcacacaggtgagaatccctatgagtgctgtgaatgtgggaaagtcttcagtaggaaagaccagcttgtttcacaccagaaaactcattcaggacagaaaccatatgtgtgtaatgaatgtgggaaagcttttggtttaaaatcacagctcattatacatgaaagaattcatacaggagagaaaccatatgaatgcaatgaatgtcagaaagcctttaatacaaagtcaaaccttatggtacatcagagaacccatacaggggagaaaccttatgtttgtagtgattgtggaaaagcctttacattcaagtcacagctcattgtacatcaggggattcacacaggagtaaagccctatgggtgtattcagtgtggtaaaggattcagtttgaaatcacagctcattgtacatcagagaagtcacacaggagtgaaaccttatgtatgcaatgaatgtggcaaagccttcaggagcaagtcataccttattatacatacaaggactcatacaggagaaaaactccatgaatgcaacaattgtgggaaagccttcagttttaaatcacagctcattatacatcagaggattcatacaggagagaacccctatgaatgccatgaatgtgggaaagccttcagtcggaaataccagcttatttcacaccagagaactcatgcaggagagaagccttatgaatgcaccgactgtggaaaggcttttggtttaaagtcacagcttattatacaccagagaactcatacaggggagaaaccatttgaatgtagtgagtgtcagaaagcctttaatacaaagtcaaacctgattgtacatcagagaactcatacaggagagaaaccctatagttgtaatgaatgtggaaaagcctttacgttcaaatcacagctcattgtacataaaggagtgcacactggagtaaaaccctatggatgcagtcaatgtgcaaaaacctttagtttgaagtcccagctcattgtacatcagagaagtcacacaggagtaaaaccatatggatgcagtgagtgtgggaaagccttcaggagcaagtcataccttattatacatatgagaactcatacaggagagaaaccacatgagtgcagggaatgcgggaaatcctttagtttcaattcacaactcattgtgcatcagagaattcacacaggagaaaatccctatgaatgcagtgaatgtgggaaagcctttaataggaaagaccagctcatttcacatcagcgaactcatgcaggggaaaagccttatgggtgcagtgaatgtgggaaagcttttagcagcaagtcatacctaattatacacatgagaactcattcaggtgaaaaaccatatgaatgtaatgaatgtgggaaagccttcatttggaaatcactactcattgtacatgagcgaactcatgcaggggtcaacccttataaatgcagtcaatgtgagaaatccttcagtgggaaattacgccttcttgtacaccagagaatgcacacaacagagaaaccatatgaatgcagtgagtgtggaaaagccttttgttggaagtcacagctcattatgcatcagagaactcatgtagatgacaaacattgataattttacgaaactctgaaaagtggattcacaagagatagaaacaatcatatataaagagaaactctgtaagtggaatcatcttgtcatcttccagaaaactcatactgaatagaactttatgaatgcacagcatatggaaaggcatccacagaaagctgttctttacatgcaaaaagatagtagacaatacacaggaaaactgaatttagtaaccactctgaaaatttttagcagcaagtcatacctttttttaaaaagttcatacaggtgaggaaccatgttaaacgttgtaaagtcattttactaacataagattcacaaagaggaaacttcatgaaccagatgaatatagaatagacttctttgaaattcatagtttacagaattttaatgagagaaattattgagctaatgaatggcagaattaacaaaattacaaacattttatgtatcggaagcatataccttggagggaccatgctatgagggaaagtgtaaatctagaaatgagaaacccctagggaaaaaatatatataggagtgaacatcttatgaatgtaccaaataaaccacagctggactgtt

SEQ ID NO: 12322 - protein, 730 aa, Homo sapiens
MDWHQENKDKLGSTAKSFECTTFGKLCLLSTKYLSRQKPHKCGTHGKSLKYIDFTSDYARNNPNGFQVHGKSFFHSKHEQTVIGIKYCESIESGGTVNKKSQLMCQQMYMGEKPFGCSCCEKAFSSKSYLLVHQQTHAEEKPYGCNECGKDFSSKSYLIVHQRIHTGEKLHECSECRKTFSFHSQLVIHQRIHTGENPYECCECGKVFSRKDQLVSHQKTHSGQKPYVCNECGKAFGLKSQLIIHERIHTGEKPYECNECQKAFNTKSNLMVHQRTHTGEKPYVCSDCGKAFTFKSQLIVHQGIHTGVKPYGCIQCGKGFSLKSQLIVHQRSHTGVKPYVCNECGKAFRSKSYLIIHTRTHTGEKLHECNNCGKAFSFKSQLIIHQRIHTGENPYECHECGKAFSRKYQLISHQRTHAGEKPYECTDCGKAFGLKSQLIIHQRTHTGEKPFECSECQKAFNTKSNLIVHQRTHTGEKPYSCNECGKAFTFKSQLIVHKGVHTGVKPYGCSQCAKTFSLKSQLIVHQRSHTGVKPYGCSECGKAFRSKSYLIIHMRTHTGEKPHECRECGKSFSFNSQLIVHQRIHTGENPYECSECGKAFNRKDQLISHQRTHAGEKPYGCSECGKAFSSKSYLIIHMRTHSGEKPYECNECGKAFIWKSLLIVHERTHAGVNPYKCSQCEKSFSGKLRLLVHQRMHTTEKPYECSECGKAFCWKSQLIMHQRTHVDDKH

SEQ ID NO: 12323 - DNA, 2840 bp, Homo sapiens
  CDS (525)..(1601)
gtcgtttaaaagaaacacttgctcagctttcaagagagacagacgtgtcaccatttccaccccgtaagcgcccatcagctgagcattccctttccatagggtcactcctagatatctccaacacaccagagtctagcattaactatggagacaccccaaagtcttgtactaagtcttctaaaagctccactccagttccttcaaagcagtcagcaaggtggcaagttgcaaaagagctttatcaaactgaaagtaattatgttaatatattggcaacaattattcagttatttcaagtaccattggaagaggaaggacaacgtggtggacctatccttgcaccagaggagattaagactatttttggtagcatcccagatatctttgatgtacacactaagataaaggatgatcttgaagaccttatagttaattgggatgagagcaaaagcattggtgacatttttctgaaatattcaaaagatttggtaaaaacctaccctccctttgtaaacttctttgaaatgagcaaggaaacaattattaaatgtgaaaaacagaaaccaagatttcatgcttttctcaagataaaccaagcaaaaccagaatgtggacggcagagccttgttgaacttcttatccgaccagtacagaggttacccagtgttgcattacttttaaatgatcttaagaagcatacagctgatgaaaatccagacaaaagcactttagaaaaagctattggatcactgaaggaagtaatgacgcatattaatgaggataagagaaaaacagaagctcaaaagcaaatttttgatgttgtttatgaagtagatggatgcccagctaatcttttatcttctcaccgaagcttagtacagcgggttgaaacaatttctctaggtgagcacccctgtgacagaggagaacaagtaactctcttcctcttcaatgattgcctagagatagcaagaaaacggcacaaggttattggcacttttaggagtcctcatggccaaacccgacccccagcttctcttaagcatattcacctaatgcctctttctcagattaagaaggtattggacataagagagacagaagattgccataatgcttttgccttgcttgtgaggccaccaacagagcaggcaaatgtgctactcagtttccagatgacatcagatgaacttccaaaagaaaactggctaaagatgctgtgtcgacatgtagctaacaccatttgtaaagcagatgctgagaatcttatttatactgctgatccagaatcctttgaagtaaatacaaaagatatggacagtacattgagtagagcatcaagagcaataaaaaagacttcaaaaaaggttacaagagcattctctttctccaaaactccaaaaagagctcttcgaagggctcttatgacatcccacggctcagtggagggaagaagtccttccagcaatgataagcatgtaatgagtcgtctttctagcacatcatcattagcaggtatcccttctccctcccttgtcagccttccttccttctttgaaaggagaagtcatacgttaagtagatctacaactcatttgatatgaagcgttaccaaaatcttaaattatagaaatgtatagacacctcatactcaaataagaaactgacttaaatggtacttgtaattagcacttggtgaaagctggaaggaagataaataacactaaactatgctatttgatttttcttcttgaaagagtaaggtttacctgttacattttcaagttaattcatgtaaaaaatgatagtgattttgatgtaatttatctcttgtttgaatctgtcattcaaaggccaataatttaagttgctatcagctgatattagtagctttgcaaccctgatagagtaaataaattttatgggcgggtgccaaatactgctgtgaatctatttgtatagtatccatgaatgaatttatggaaatagatatttgtgcagctcaatttatgcagagattaaatgacatcataatactggatgaaaacttgcatagaattctgattaaatagtgggtctgtttcacatgtgcagtttgaagtatttaaataaccactcctttcacagtttattttcttctcaagcgttttcaagatctagcatgtggattttaaaagatttgccctcattaacaagaataacatttaaaggagattgtttcaaaatatttttgcaaattgagataaggacagaaagattgagaaacattgtatattttgcaaaaacaagatgtttgtagctgtttcagagagagtacggtatatttatggtaattttatccactagcaaatcttgatttagtttgatagtgtgtggaattttattttgaaggataagaccatgggaaaattgtggtaaagactgtttgtacccttcatgaaataattctgaagttgccatcagttttactaatcttctgtgaaatgcatagatatgcgcatgttcaactttttattgtggtcttataattaaatgtaaaattgaaaattcatttgctgtttcaaagtgtgatatctttcacaatagcctttttatagtcagtaattcagaataatcaagttcatatggataaatgcatttttatttcctatttctttagggagtgctacaaacgtttgtcacttaaatttcaagtttctgttttaatagttaactgactatagattgttttctatgccatgtatgtgccacttctgagagtagtaaatgactctttgctacattttaaaagcaattgtattagtaagaactttgtaaataaatacctaaaacccaagtgt

SEQ ID NO: 12324 - protein, 359 aa, Homo sapiens
MSKETIIKCEKQKPRFHAFLKINQAKPECGRQSLVELLIRPVQRLPSVALLLNDLKKHTADENPDKSTLEKAIGSLKEVMTHINEDKRKTEAQKQIFDVVYEVDGCPANLLSSHRSLVQRVETISLGEHPCDRGEQVTLFLFNDCLEIARKRHKVIGTFRSPHGQTRPPASLKHIHLMPLSQIKKVLDIRETEDCHNAFALLVRPPTEQANVLLSFQMTSDELPKENWLKMLCRHVANTICKADAENLIYTADPESFEVNTKDMDSTLSRASRAIKKTSKKVTRAFSFSKTPKRALRRALMTSHGSVEGRSPSSNDKHVMSRLSSTSSLAGIPSPSLVSLPSFFERRSHTLSRSTTHLI

SEQ ID NO: 12325 - DNA, 3172 bp, Homo sapiens
  CDS (221)..(2737)
gggctgtttgaatggctttgggatggagcaggggagagagtggctccgtttgcctccccgctttggtgatgctgtgcgagcggcttcgggggccctggagacgtccgagtcactgagggtgggctgggactcggggcccgcgtcccatctccccgccgattggtccgccccccgtgcgagtgtaacacagccagcctcgaagacttccctctgagttggaatgataatgaccggatcccgagaagttatagacttagaccccccagctgagacttcccaggagcaggaagaccttttcatagtgaaggtggaagaagaagactgcacctggatgcaggagtacaacccgccaacgtttgagactttttaccagcgcttcaggcacttccagtaccatgaggcttcaggaccccgggaggctctcagccaactccgggtgctctgctgtgagtggctgaggcccgagctgcacacgaaggagcagatcctggagctgctggtgctggagcagttcctgaccatcctgcctgaagagttccagccctgggtgagggaacatcaccctgaaagtggagaagaggcggtggccgtgatagaaaatatacagcgagaacttgaggaacgcagacagcagattgttgcctgccctgatgtgcttcctcggaagatggcaacacctggagcagtgcaggagtcctgcagcccccatcccctgaccgtggacacccagcctgagcaagcgccacagaagcctcgtctcctggaggaaaatgcccttcctgttctccaagttccttcccttcccctgaaggacagccaggagctgacagcttcacttctctcaactgggtcccagaagttggtgaaaattgaagaggtggctgatgtggctgtatccttcatcctggaggaatgggggcatttggaccagtcccagaagtccctttatagggatgacaggaaggagaactatgggagtattacttccatgggttatgagtccagggacaatatggagctcatagtgaagcagatttctgatgactctgaatcacactgggtggcgccagaacacaccgaaaggagcgttcctcaggatccagactttgcagaagtcagtgaccttaaaggcatggtacaaaggtggcaggtcaaccccactgtggggaaatcaaggcagaatccttcccagaaaagggatctggatgcaatcacagacatcagccctaagcaaagcacacatggcgagagagggcacagatgcagcgattgtggcaaattcttcctccaagcctcaaactttattcagcatcggcgcatccacactggagaaaaaccgtttaagtgcggagaatgtgggaagagctacaatcagcgggtgcacctcacccagcaccagcgcgtccacacaggggagaaaccctacaaatgtcaggtgtgcggaaaggctttccgggtgagttcccacctggttcagcaccacagtgtccacagcggagagaggccctatggctgcaatgagtgtgggaagaacttcggtcgccattcgcatctgatcgaacacctaaaacgccacttcagggagaaatcccagagatgcagtgacaaaagaggtaagaacacaaaattaagtgttaagaagaaaatttcagaatattcagaagcagacatggaactatctggaaaaacccaaagaaatgtttctcaagttcaagattttggagaaggctgtgagtttcaaggcaagctggatagaaagcagggaattcccatgaaagagatactaggacaaccatcttcaaagaggatgaactacagtgaagtcccatatgtccacaaaaaatcctccactggagagagaccacataaatgtaacgagtgtgggaaaagcttcattcagagtgcacatcttattcaacatcaaagaatacacactggggagaaaccattcaggtgtgaggaatgtgggaaaagctacaaccaacgcgtgcacctaactcagcatcagcgcgtccacacaggtgagaagccctacacctgtcccttatgtgggaaagccttcagagtgaggtcccaccttgttcagcatcagagcgtgcacagtggggagagacccttcaagtgtaacgaatgtgggaaaggctttgggaggcgttcccacctggctggacatcttcgactccactcccgagagaaatcccatcagtgtcgtgaatgtggggaaatcttttttcagtacgttagcctaattgaacatcaggtgctccacatgggtcagaaaaatgaaaaaaatggcatctgtgaggaagcatatagttggaacttgacagtgattgaagacaagaagattgagttacaagagcagccttatcagtgtgatatctgtggaaaagcctttggttatagctcagacctcattcagcattacagaactcatacagcagagaagccctatcaatgtgatatatgtagagaaaatgttggccagtgttcccacaccaaacaacatcaaaaaatctactccagcacaaaatcccatcaatgtcatgaatgtggcagaggcttcactctgaagtcacatcttaatcaacatcagagaatccatactggtgagaaaccttttcaatgtaaagaatgtggaatgaatttcagctggagttgtagcctctttaaacacctgagaagccatgagaggacagatcccataaataccttaagtgtagaggggtctctgttgtagaatagctcttaattttagagaaaccttcctggagggaaaccatactcctataatgagcaaagtaacaacttcaagcatttttccagcgttaccatcaaactcacaaataggttgaaatcctttagttataactcagcctttaggaacaccggagaacccacaataatagaaatcttttcgtgttccccattgagaaatgctttagttagcatcttcatgcttggaaatctagacaagaagagaatccatggatggacatggtcgaggaattcggaaagcctgcagttgacattcagtcttcacttgaaactcaaaactgacactaggaacagcttcatgagttcagtagaagtaagctttatttgtagcttctgccttgtttgacggcgtatctattcagggaagcgcacagtaaaagaattccttagcatg

SEQ ID NO: 12326 - protein, 839 aa, Homo sapiens [sequence omitted]

SEQ ID NO: 12327 - DNA, 2475 bp, Homo sapiens
  CDS (139)..(1188)
acgcctggtctctgggacgcccctccggacccgtttcgcctcgcggagccggtaggtccaggtgcagcggccgcagtgctgcgtccgtgcgccgcgggctggggcggtctcaggtgtgccgaagctctggtcagtgccatgatccggcaggagcgctccacatcctaccaggagctgagtgaggagttggtccaggtggttgagagctcagagctggcagacgagcaggacaaggagacggtcagagtccaaggtccgggtatcttaccaggcctggacagcgagtccgcctccagcagcatccgcttcagcaaggcctgcctgaagaacgtcttctcggtcctactcatcttcatctacctgctgctcatggctgtggccgtcttcctggtctaccggaccatcacagactttcgtgagaaactcaagcaccctgtcatgtctgtgtcttacaaggaagtggatcgctatgatgccccaggtattgccttgtaccccggtcaggcccagttgctcagctgtaagcaccattacgaggtcattcctcctctgacaagccctggccagccgggtgacatgaattgcaccacccagaggatcaactacacggaccccttctccaatcagactgtgaaatctgccctgattgtccaggggccccgggaagtgaaaaagcgggagctggtcttcctccagttccgcctgaacaagagtagtgaggacttcagcgccattgattacctcctcttctcttctttccaggagttcctgcaaagcccaaacagggtaggcttcatgcaggcctgtgagagtgcctgttccagctggaagttctctgggggcttccgcacctgggtcaagatgtcactggtaaagaccaaggaggaggatgggcgggaagcagtggagttccggcaggagacaagtgtggttaactacattgaccagaggccagctgccaaaaaaagtgctcaattgttttttgtggtctttgaatggaaagatcctttcatccagaaagtccaagatatagtcactgccaatccttggaacacaattgctcttctctgtggcgccttcttggcattatttaaagcagcagagtttgccaaactgagtataaaatggatgatcaaaattagaaagagataccttaaaagaagaggtcaggcaacgagccacataagctgaagtcacctcgcgttgtttagagaactgtccacatcaatgggagctgtcatcacttccactttgtaaacggagctatcaacaatcctgtactcacttgaagaaatggggccttgctgggaggaacagcatgtaaaactggaacttctaaccccgtcccaaaagaggcggtgtagagcctaatagaagagactaatggataaacctacaagttatttaaatatttaaattattaataaactttttaaagagctggccaatgacttttgaatagggtttgtagaagatgcctttcttcctgtttggttcattgtattgtattaggttaagctctactagggtaatgaaggctctacttttcactttttaaaagtggacaaaagagtgtgattttctttttccaaaaattcctgagtatcaagacgtgcaggtcatgctttggagcctatgcactgtacacaatggcaaaaccctatgactttggcatcatctgccattgatgtccagcctctgacatgctctttgatttgttaaatgttaaatgagactttaaggctactagaaactagtaattaagtttcttaatggactgagtagccacctacttgtccggctagaatgtttgttgatgtatgagtttagattaacactcaaaagcactaggacagatgtacatagaaggtgcctactcattgtattttgatgatttcattaacaggtaaataaaagttaatacaaaaggaacgagtgtgacaatatgaatatctgctcaatcatcgggcacaattactttcatttggtgacttccaaggacaaaaaggtagtatgagtctggactcccaagatggatctaactctcaaggtatgttctaactgcttccagggaagggtttgttaggcatggcaactgatggcaggtgtccagaaagagtgacctggtgtccccgaggaagctgggttaactctttactgtgtccacaaaactacccatcatatgaggaaggggtatacgcagtgtgaccctcaaaaagcttttagcctagcctttgacagaaatgagtatgcattaaaaaaaagtctatttttcacattaaggttctaaaaattgtttccagagttttaaattatttatgtgcctgttgcttcaaagaggacttggtagcatttcctaaattttgtaatctggcttccgataatccaaagggaataactcaaatgtatgaataggcattttaaatgggaagaaactgttttttggatgaatgattaaaagtgaactgtataaag

SEQ ID NO: 12328 - protein, 350 aa, Homo sapiens
MIRQERSTSYQELSEELVQVVESSELADEQDKETVRVQGPGILPGLDSESASSSIRFSKACLKNVFSVLLIFIYLLLMAVAVFLVYRTITDFREKLKHPVMSVSYKEVDRYDAPGIALYPGQAQLLSCKHHYEVIPPLTSPGQPGDMNCTTQRINYTDPFSNQTVKSALIVQGPREVKKRELVFLQFRLNKSSEDFSAIDYLLFSSFQEFLQSPNRVGFMQACESACSSWKFSGGFRTWVKMSLVKTKEEDGREAVEFRQETSVVNYIDQRPAAKKSAQLFFVVFEWKDPFIQKVQDIVTANPWNTIALLCGAFLALFKAAEFAKLSIKWMIKIRKRYLKRRGQATSHIS

SEQ ID NO: 12329 - DNA, 2942 bp, Homo sapiens
  CDS (49)..(792)
ataatccttttgcaaacatctcaacgctggctctccaggtggagcaccatggaaggcgactgtctgagctgcatgaagtatctgatgtttgtattcaatttcttcatatttctgggcggggcctgcctgctggccatcggcatctgggtcatggtggaccccaccggcttccgggagatcgtggctgccaatcctctgctcctcacgggcgcctacatcctcctggccatggggggcctgctctttctgctcggcttcctgggctgctgcggggccgtccgtgagaacaagtgtctgctgctatttttcttcctgttcatcctgatcatcttcctggcagagctctcagcagccatcctggccttcatcttcagggaaaatctcacccgagaattcttcaccaaggagctcaccaagcactaccagggcaataacgacacagacgtcttctctgccacctggaactcggtcatgatcacatttggttgctgcggggtcaacgggcctgaagactttaagtttgcatctgtgtttcgactcctgaccctggatagtgaagaggtgccggaggcctgctgccggagggaaccccaaagtcgggacggggtcctgctgagccgggaggagtgcctcctgggaaggagcctattcctaaacaagcagggctgttacacggtgatcctcaacaccttcgagacctacgtctacttggccggagcccttgccatcggggtactggccatcgagcttttcgccatgatctttgccatgtgcctcttccggggcatccagtagagggtatggcctgaagcctgaagactcgccccacccaccactgcccagcacccaatgtcctcccgtgcccctccccgctgtcctcttggccccaggggagaagatgaggccatcagagatggccaggagaagggccaggggaatagagctatttttttaacaaaacaaaatgaggacaaaaatatggactgatgtatcctcgcctggactcagggcaggtgccgtgggttctccagagaccccagcacctggcccaggatgcaggctgctctagagaccaaaggaacaccaggcccagcgccctctttggtccagccagaccctgggccctctctcctcactgcaccaggacctgatgccaagaaagtgaggatttaggcaacaaggaggcaaaagcaaatctcagagaagtcatcaaagcccaggggctgcacggagattcagctgccatgtctttgaggactcggaacccacagcgcaatccctggtccactggaggatggactgttccccccttcaggccggggccaagagtgagctgctaacacggcatccaagaatggcccagctggtaggatccttgctttccccatctgttggaccaaataatctcaaaggcccagagaggacagtgaccatccacagacacgcagcacaggcgtgacagttctgaaaagaagctgagtcgtctccaggctgctgtcactgcatccaggactctgtcagctctgctgcccacatgcacccctggcctcagcatcccggttcccccagacaagagagggcaagtcagccaggaactgcctcctccctgctctacagctaagaaaacaccattccatgacttcccaccgcgccctcgctcctacctccccacacctctctctcagtccccaggaacacacagaggtgcacatcacattcccttgtccacactgcccgcctctcccacatgccacccccttccctgtccttccccaactccccagctccaagagtggaagaaatccccaagatcatctgggtctccctctccacacccagaactgaggcttggatatcttcttcaacatccttgccaagacttctccaccctcttgcatacctccagggacagagagcttactacctcccaaggcagcctcctgcctttggactgctctgactttagcatcagcttaatacacagaagaggtttctgtttttctgtggctctgtccatggcatcccacttgcccactctccttcctggagtgttgaggtcacacattgactcccctgagccctcttctctccaggctaaagaatcccgaaggcatcgaggccatttctgctgcaacaaggtttcctgtctcttcactgtccgcacatttcttagtattccctccaggcttgggcagggagactcgcagatgcacacccacaagtattcagttctcaaactctagacgagtgttggcaactggattgcaagatgctcctaccctgatagatcaggggtggctgctggaggctgtgctggggatctgaggtttggtctgggctcagtgggagatggcagtgcaatcctaatgagtgatgtctgccaggcaccgtaagtttgattagtgatgtctgccacgggcagggatggaaggagcagtgtgatgtctgctctcttctctcccctctgtccctcttcaggaagaaagagctcattctgtctcacaagccaccggcatcctgtatcagcttccagcctcccctcaggctttccagtcaccagggacactcggagccacagcctagagccccgtgttccctggcctgtgcgtctgcccccttctgagatgcagccagaagctctgtgcctgctgcaaagattcaggtggaccctcctctaatctcctcctgctgtgcccgccagtccttgccctcccaccaggtctctgagctcagtcttaccaaattcgccctttaacagcttgctctggcaaccccataaatgacacctgagctccgtagaagctaagctcctgagacccagggggacctgccactggtaccgcggcccagcctggggcctgggggctgcccctcttgaaccacccacatgcttagccccagctttttggaagaggcaaatggctggtctgaggatgacacac

SEQ ID NO: 12330 - protein, 248 aa, Homo sapiens
MEGDCLSCMKYLMFVFNFFIFLGGACLLAIGIWVMVDPTGFREIVAANPLLLTGAYILLAMGGLLFLLGFLGCCGAVRENKCLLLFFFLFILIIFLAELSAAILAFIFRENLTREFFTKELTKHYQGNNDTDVFSATWNSVMITFGCCGVNGPEDFKFASVFRLLTLDSEEVPEACCRREPQSRDGVLLSREECLLGRSLFLNKQGCYTVILNTFETYVYLAGALAIGVLAIELFAMIFAMCLFRGIQ

SEQ ID NO: 12331 - DNA, 2438 bp, Homo sapiens
  CDS (336)..(929)
tcaccggtgccgtgctcttcctgaaccacgcccacgcgccgggcacggcgcccccacctgtcgtcagcactggggctgccagcgccaacagcgccctggtcactgtggaaagggcggacagctcgcacctcagcatcctcattgacccgcgctgccccgacctcaccgacagcttcgcacgcctggagagcgcccaggcctcggtgctgcaggcgctgacagagcaccaggcccagccacggctggtgggcgaccaggagcaggagctgctggacacgctggccgaccagctgccccggctgctggcccgagcctcagagctgcagacggagtgcatggggctgcggaaggggcatggcacgctgggccagggcctcagcgccctgcagagtgagcagggccgcctcatccagcttctctctgagagccagggccacatggctcacctggtgaactccgtcagcgacatcctggatgccctgcagagggaccgggggctgggccggccccgcaacaaggccgaccttcagagagcgcctgcccggggaacccggccccggggctgtgccactggctcccggccccgagactgtctggacgtcctcctaagcggacagcaggacgatggcgtctactctgtctttcccacccactacccggccggcttccaggtgtactgtgacatgcgcacggacggcggcggctggacggtgtttcagcgccgggaggacggctccgtgaacttcttccggggctgggatgcgtaccgagacggctttggcaggctcaccggggagcactggctaggaccgctagaccggtgcaccttgtccttggccctgctggtccctgtcgccccatccccgaccccacctcactctttcgtgaatgttctccacccacctgtgcctggcggacccactctccagtagggaggggccgggccatccctgacacgaagctccctgggccggtgaagtcacacatcgccttctcgccgtccccaccccctccatttggcagctcactgatctcttgcctctgctgatgggggctggcaaacttgacgaccccaactcctgcctgcccccaccgtgactccggtgctgtttgccgtcccctggccaggatggtggagtctgccccaggcaccctctgccctgcccggccaaatacccggcattatggggacagagagcagggggcagacagcacccctggagtcctcctagcagatcgtggggaacgtcaggtctctctgaggtcaggtctgaggccagtatcctccagccctcccaatgccaacccccaccccgtttccctggtgcccagagaacccacctctcccccaagggcctcagcctggctgtgggctgggtggccccatcctaccaggccctgaggtcaggatggggagctgctgcctttggggacccacgctccaaggctgagaccagttccctggaggccacccaccctgtgccccggcaggcctggggtctgcagtcctcttacctgctgtgcccacctgctctctgtctcaaatgaggcccaacccatcccccacccagctcccggccgtcctcctacctggggcagctggggctgccatcccatttctcctgcctctggaaggtgggtggggccctgcaccgtggggctggactgcgctaatgggaagctcttggttttctgggctggggcctaggcagggctgggatgaggcttgtacaacccccaccaccaatttcccagggactccagggtcctgaggcctcccaggagggccttgggggtgatgaccccttccctgaggtggctgtctccatgaggaggccaacccttgccattgaccgtggccacctggacccaggccaggcccggcccggcgagtggtcaagggacagggaccacctcaccgggcaaatggggtcggggggactggggcaccagaccaggcaccacctggacactttcttgttgaatcctcccaacacccagcacgctgtcatccccactccttgtgtgcacacatgcagaggtgagacccgcaggctcccaggaccagcagccacaagggcagggctggagccgggtcctcagctgtctgctcagcagccctggacccgcgtgcgttacgtcaggcccaaatgcagggcggcttttccaaggcctcctgatggggggcctccgaaagggctggagtcagccttggggagctgcctagcagcctctcctcgggcaggaggggaggtggcttcctccaaaggacaaccgatggcaggtgcctagggggtgtggggttccgttctcccttcccctcccactgaagtttgtgtttaaaaaacaataaatttgacttggcaccactgggggttggtgggagaggccgtgtgacctggctctctgtcccagtgccaccaggtcatccacatgcg

SEQ ID NO: 12332 - protein, 198 aa, Homo sapiens
MGLRKGHGTLGQGLSALQSEQGRLIQLLSESQGHMAHLVNSVSDILDALQRDRGLGRPRNKADLQRAPARGTRPRGCATGSRPRDCLDVLLSGQQDDGVYSVFPTHYPAGFQVYCDMRTDGGGWTVFQRREDGSVNFFRGWDAYRDGFGRLTGEHWLGPLDRCTLSLALLVPVAPSPTPPHSFVNVLHPPVPGGPTLQ

SEQ ID NO: 12333 - DNA, 2237 bp, Homo sapiens
  CDS (101)..(2035)
caaacagcagaaggaggtagagaaggttaaaccccagtgtaaggaagttcatcagaccctgattctggacccagcacaaaggaagagactccagcagcagatgcagcagcatgttcagctcttgacacaaatccaccttcttgccacctgcaaccccaatctcaatccggaggccagtagcaccaggatatgtcttaaagagctgggaacctttgctcaaagctccatcgcccttcaccatcagtacaaccccaagtttcagaccctgttccaaccctgtaacttgatgggagctatgcagctgattgaagacttcagcacacatgtcagcattgactgcagccctcataaaactgtcaagaagactgccaatgaatttccctgtttgccaaagcaagtggcttggatcctggccacaagcaaggttttcatgtatccagagttacttccagtgtgttccctgaaggcaaagaatccccaggataagatcctcttcaccaaggctgaggacaatttgttagctttaggactgaagcattttgaagggactgagtttcttaaccctctaatcagcaagtaccttctaacctgcaagactgcccgccaactgacagtgagaatcaagaacctcaacatgaacagagctcctgacaacatcattaaattttataagaagaccaaacagctgccagtcctaggaaaatgctgtgaagagatccagccacatcagtggaagccacctatagagagagaagaacaccggctcccattctggttaaaggccagtctgccatccatccaggaagaactgcggcacatggctgatggtgctagagaggtaggaaatatgactggaaccactgagatcaactcagatcaaggcctagaaaaagacaactcagagttggggagtgaaactcggtacccactgctattgcctaagggtgtagtcctgaaactgaagccagttgccgaccgtttccccaagaaggcttggagacagaagcgttcatcagtcctgaaacccctccttatccaacccagcccctctctccagcccagcttcaaccctgggaaaacaccagcccaatcaactcattcagaagcccctccgagcaaaatggtgctccggattcctcacccaatacagccagccactgttttacagacagttccaggtgtccctccactgggggtcagtggaggtgagagttttgagtctcctgcagcactgcctgctatgccccctgaggccaggacaagcttccctctgtctgagtcccagactttgctctcttctgcccctgtgcccaaggtaatgatgccctcccctgcctcttccatgtttcgaaagccatatgtgagacggagaccctcaaaaagaaggggagccagggcctttcgctgtatcaaacctgcccctgttatccaccctgcatctgttatcttcactgttcctgctaccactgtgaagattgtgagccttggcggtggctgtaacatgatccagcctgtcaatgcggctgtggcccagagtccccagactattcccatcgccaccctcttggttaaccctacttccttcccctgtccattgaaccagccccttgtggcctcctctgtctcacccttaattgtttctggcaattctgtgaatcttcctataccatccacccctgaagataaggcccacatgaatgtggacattgcttgtgctgtggctgatggggaaaatgcctttcagggcctagaacccaaattagagccccaggaactatctcctctctctgctactgttttccccaaagtggaacatagcccagggcctccaccagtcgataaacagtgccaagaaggattgtcagagaacagtgcctatcgctggaccgttgtgaaaacagaggagggaaggcaagctctggagccgctccctcagggcatccaggagtctctaaacaactcttcccctggggatttagaggaagttgtcaagatggaacctgaagatgctacagaggaaatcagtggatttctttgagctaggagaataagagtctggagactgggagccttcacttcggcctccgattggtggcgcatagggtgtaaccaataggaaacccctaaagggtacttaaaccccagattttgcaactggggctcttgagcagcttgctttagcctgctcccactctgtggaatatacttttgcttcaataaatctgtgcttttattgc

SEQ ID NO: 12334 - protein, 645 aa, Homo sapiens
MQQHVQLLTQIHLLATCNPNLNPEASSTRICLKELGTFAQSSIALHHQYNPKFQTLFQPCNLMGAMQLIEDFSTHVSIDCSPHKTVKKTANEFPCLPKQVAWILATSKVFMYPELLPVCSLKAKNPQDKILFTKAEDNLLALGLKHFEGTEFLNPLISKYLLTCKTARQLTVRIKNLNMNRAPDNIIKFYKKTKQLPVLGKCCEEIQPHQWKPPIEREEHRLPFWLKASLPSIQEELRHMADGAREVGNMTGTTEINSDQGLEKDNSELGSETRYPLLLPKGVVLKLKPVADRFPKKAWRQKRSSVLKPLLIQPSPSLQPSFNPGKTPAQSTHSEAPPSKMVLRIPHPIQPATVLQTVPGVPPLGVSGGESFESPAALPAMPPEARTSFPLSESQTLLSSAPVPKVMMPSPASSMFRKPYVRRRPSKRRGARAFRCIKPAPVIHPASVIFTVPATTVKIVSLGGGCNMIQPVNAAVAQSPQTIPIATLLVNPTSFPCPLNQPLVASSVSPLIVSGNSVNLPIPSTPEDKAHMNVDIACAVADGENAFQGLEPKLEPQELSPLSATVFPKVEHSPGPPPVDKQCQEGLSENSAYRWTVVKTEEGRQALEPLPQGIQESLNNSSPGDLEEVVKMEPEDATEEISGFL

SEQ ID NO: 12335 - DNA, 2447 bp, Homo sapiens
  CDS (142)..(1626)
gagttgatatcttcccatccacccgccgcttctttcctccatctagcgatttttattttttaagtgtctcttcctttttctttcttttcttcttttttattttttatatatattttttggcattgctttgcagatgttgggatgagagtcggagccgaataccaagctcggatccctgaatttgatccaggtgctacaaagtacacagataaagacaatggagggatgcttgtatggtctccatatcacagtatcccagatgccaaattggatgaatacattgcaattgcaaaggaaaagcatggctacaatgtggaacaggcacttggcatgttgttctggcataaacataacattgagaagtcccttgctgatctccctaatttcactccctttccggatgagtggacagtggaagataaagtcctatttgaacaagcctttagttttcatggaaagagctttcacaggattcagcaaatgcttccagataagacaattgcaagccttgtaaaatattactattcttggaaaaaaactcgctctaggacaagtttgatggatcgccaggctcgtaaactagctaatagacataatcagggtgacagtgatgatgatgtagaagaaacacatccaatggatgggaatgatagtgattatgatcccaaaaaagaagccaaaaaagagggtaatactgaacaacctgtccaaactagcaagattggacttggaagaagagagtatcagagtttacaacatcgccatcattctcagcgttctaagtgccgtccacctaagggcatgtatttaacccaggaagatgtggtagcagtttcctgtagtcccaatgcagccaacaccatcctgaggcaactggacatggagttgatctctctaaaacgtcaggttcagaatgctaagcaagtaaacagtgcacttaaacagaaaatggaaggtggaattgaagaattcaaacctcctgagtcaaatcagaaaattaatgcccgttggaccacagaggagcagcttctagcagtgcaaggtgtccgcaaatatggtaaagattttcaagctattgcagatgtaattggcaacaagactgttggccaagtgaagaacttctttgtaaactacaggcgtcggtttaacttagaggaggtattgcaggagtgggaagcagaacaaggaacccaggcttctaatggtgatgcttctactttaggggaggagacaaaaagtgcttctaatgtgccatcagggaagagcactgatgaagaagaggaggcacagaccccacaggctcctcggacactgggtccatcacctcctgccccatcatccactccaacaccaacagcccctattgccactctgaaccagcctccaccacttcttcgtccaacactgcctgctgccccggctcttcaccggcagcctcctccactccagcagcaggctcggttcatccagccccggccaactttaaatcagcctccaccacctcttattcgccctgctaattccatgccaccccgtctaaacccaagaccggtgttgtccacggttggtggtcaacagccaccatcacttattggaattcagacagattcacagtcctcactgcactaaaaattaaattggacacagctgcagtaacttttcaccccatcattataccagtgctcatctgactgatgaaaaagaggaaagaataatcatttctagatactgaggctgcgaactagttctgtggcagtggactagcataagtggatgtctaagaaatttttcagttcactagactaaaatgttttacaacaaaaagcctccagttagcctcctttctagagtatatgttcagcaatgttgatctcataaaaggaaaaacaaaagatttaagtattctatataccaagtttttgttttgtttttactgtatttattttattgaggttctttatattcctgcctcttcatagtcaaggctcttagtacaggaatattgacttaggaattgtgaaaactccttaagtttcttaagttaaggatgtttggcttttttctttaattttttaaaaaccattttcctatgttaggagtgcaagaatagccagcatttccgattttgacatatgttcattttatgcatatttaagaaattatagctgcatatcccttctttcaaaaaatgttgctttttttttaaaggaattttaatatattcctttaaaagaaagcaatttaatcaattgcaaagcaattatataaaaccacaaagaatgtactgaacctactaaccctttaacatacagtttagggtcctagcgcagagtccttgtttaaaggtcattgactcatcatctgtcagtaatgagaggattggaagaataattttgcatacaaatgaggacttaatttgttgaaatataatctctttaagttccttg

SEQ ID NO: 12336 - protein, 495 aa, Homo sapiens
MRVGAEYQARIPEFDPGATKYTDKDNGGMLVWSPYHSIPDAKLDEYIAIAKEKHGYNVEQALGMLFWHKHNIEKSLADLPNFTPFPDEWTVEDKVLFEQAFSFHGKSFHRIQQMLPDKTIASLVKYYYSWKKTRSRTSLMDRQARKLANRHNQGDSDDDVEETHPMDGNDSDYDPKKEAKKEGNTEQPVQTSKIGLGRREYQSLQHRHHSQRSKCRPPKGMYLTQEDVVAVSCSPNAANTILRQLDMELISLKRQVQNAKQVNSALKQKMEGGIEEFKPPESNQKINARWTTEEQLLAVQGVRKYGKDFQAIADVIGNKTVGQVKNFFVNYRRRFNLEEVLQEWEAEQGTQASNGDASTLGEETKSASNVPSGKSTDEEEEAQTPQAPRTLGPSPPAPSSTPTPTAPIATLNQPPPLLRPTLPAAPALHRQPPPLQQQARFIQPRPTLNQPPPPLIRPANSMPPRLNPRPVLSTVGGQQPPSLIGIQTDSQSSLH

SEQ ID NO: 12337 - DNA, 3612 bp, Homo sapiens
  CDS (312)..(3611)
atcttgtgttgttgaggctgaggactgactggggttctgagactccctgtcccggaccgcagattatagtgggaccagtctcattaggttgaatctacagcctatgttggtgttaacccaggtctcttagagcgttaaaaggatctgaacaaagtctgctcaaatctcctgctgtgaaccagcagaatttttgaacagagaccacgtctccacctcctgggctccaacgattctcccatcttggcctcccaaagcgctggatttacaggtttcttcacatataaaaatctattgtaaaaatacggaacagaatggcagcggaaacgcagacactgaactttgggcctgaatggctccgagctctgtccagtggtgggagtattacatcccctcctctttctccagcattgccgaagtataaattagcagattatcgttacggcagagaagaaatgttagcacttttccttaaagacaacaagataccttcagaccttctggataaagaatttctgcctatcctccaggaggaaccccttccaccattggctctggtaccctttacagaagaagaacagagaaacttttccatgtctgtaaatagtgctgctgtcctgcgattgacaggacgaggaggaggaggaacagtggtgggggctcctagaggtcgaagttcttcaagagggcgaggcagaggcagaggtgaatgtggtttctaccaaagaagttttgatgaagtagagggtgtttttggtcgaggaggtggcagagaaatgcatagatcgcagagctgggaggaaaggggtgacagacgttttgaaaaaccaggacgaaaagatgtagggagaccaaattttgaggaaggtggaccaacatcagtagggagaaagcatgaatttatacgctcagaaagtgaaaattggcgcatctttagagaggaacaaaatggagaagatgaagatggaggttggcgactagctggatcaaggagggatggagagaggtggcgacctcacagtcctgatggccctcgttctgcaggctggcgggaacacatggaacgacgtcggaggtttgagtttgattttcgagatagagatgatgaacggggttaccgaagggttcgctctggcagtgggagcatagatgatgacagggatagcttgcccgaatggtgcttagaggatgctgaagaagaaatgggtacatttgactcatctggagcattcctttctctaaaaaaagtacagaaagagcctattccagaagagcaggagatggacttccggcctgtggacgaaggggaggagtgctctgactctgagggtagccataatgaagaggccaaagaacccgataagacaaataagaaagaaggagagaaaacagatagagtaggagttgaagctagtgaggaaactccccagacctcatcatcatctgctagaccaggtactccttcagaccatcagtctcaggaagcatcacagtttgagaggaaagatgaaccaaaaactgagcaaacggaaaaagctgaagaggagactcggatggaaaatagtctaccagccaaagtgcccagcagaggggatgaaatggttgctgatgtccagcagcccctgtcgcagattccttcagatacagcctctcctcttctcatacttccacctcctgttcccaatcctagtcctactctccggccagttgaaacaccagttgtaggtgctcctggtatgggcagtgtttccacagaacctgatgatgaagaaggtctcaaacatttggagcagcaagctgagaaaatggtggcttatctccaagacagtgcactagatgatgaaagattggcatcaaaactgcaagagcacagagctaaaggagtgtcgattccattgatgcatgaagcaatgcagaagtggtattacaaagatcctcagggagaaattcaaggtcccttcaataatcaggagatggcagaatggtttcaggcgggctattttactatgtctttattggtgaagagagcgtgtgatgaaagcttccaacctcttggcgatatcatgaaaatgtggggaagggttcccttttctccaggtccagctccccctcctcatatgggagagctggaccaggaacgactgaccaggcagcaagaactcacagccttataccagatgcagcacctgcagtaccagcagtttttaatacaacaacaatatgcacaggttttggcccaacagcagaaagcagcactgtcttcccagcagcagcagcagttggcacttcttcttcaacagtttcagaccttgaagatgagaatatctgatcagaacatcattccctcagtaactaggtctgtgtccgtgccagatactggctctatctgggagcttcagccaacagcttcacagcctacagtttgggaaggtggtagtgtatgggatcttcctctggacaccacgacaccaggccctgccctggaacagcttcagcagctagagaaggccaaagctgcaaagctagagcaagagagaagagaggcagaaatgagggcaaaacgggaagaggaagagcgaaagaggcaggaagaactccgaagacaacaggaggaaattcttcggcgacagcaggaagaagaaaggaaaaggcgagaggaagaagaacttgcccgaaggaaacaggaagaggctctgcgtcgccagcgggagcaagaaattgcattaaggcgacagcgagaagaggaagaaagacagcagcaagaagaagctcttagaagactggaagagaggagaagagaagaggaagaaaggcggaagcaggaagaattgttacgcaaacaggaagaggaggctgcaaaatgggcccgggaagaagaagaagcccagcgtcgattagaggagaaccggctgcggatggaagaggaggcagccagactccggcatgaggaagaagaacggaagagaaaggagctggaggtccagcggcagaaggagttaatgcgccagaggcaacagcagcaagaggctctccggaggttgcagcagcagcagcagcaacaacagctggcgcagatgaagcttccttcttcttcaacgtggggccagcagtccaatacaacagcatgtcagtcccaggccacgctgtcgttggctgaaatccaaaaactagaggaagaacgagaacggcagcttcgagaagagcaaaggcgccagcagagggagttgatgaaagctcttcagcagcagcagcaacagcaacagcagaaactctcaggttgggggaatgtcagcaaaccttcaggtaccacgaaatctcttctggagatccagcaggaagaggccaggcaaatgcaaaagcagcagcagcagcagcagcaacaccagcaaccaaacagagctcgtaacaatacgcattccaacctgcacaccagcattgggaattctgtttggggctctataaatactggtcctcctaaccagtgggcatctgacctagtcagtagtatttggagtaatgctgacactaaaaactccaacatgggattctgggatgatgcagtgaaagaggtgggacctaggaattcaacaaataaaaataaaaaagaacttaaat

SEQ ID NO: 12338 - protein, 1100 aa, Homo sapiens
MAAETQTLNFGPEWLRALSSGGSITSPPLSPALPKYKLADYRYGREEMLALFLKDNKIPSDLLDKEFLPILQEEPLPPLALVPFTEEEQRNFSMSVNSAAVLRLTGRGGGGTVVGAPRGRSSSRGRGRGRGECGFYQRSFDEVEGVFGRGGGREMHRSQSWEERGDRRFEKPGRKDVGRPNFEEGGPTSVGRKHEFIRSESENWRIFREEQNGEDEDGGWRLAGSRRDGERWRPHSPDGPRSAGWREHMERRRRFEFDFRDRDDERGYRRVRSGSGSIDDDRDSLPEWCLEDAEEEMGTFDSSGAFLSLKKVQKEPIPEEQEMDFRPVDEGEECSDSEGSHNEEAKEPDKTNKKEGEKTDRVGVEASEETPQTSSSSARPGTPSDHQSQEASQFERKDEPKTEQTEKAEEETRMENSLPAKVPSRGDEMVADVQQPLSQIPSDTASPLLILPPPVPNPSPTLRPVETPVVGAPGMGSVSTEPDDEEGLKHLEQQAEKMVAYLQDSALDDERLASKLQEHRAKGVSIPLMHEAMQKWYYKDPQGEIQGPFNNQEMAEWFQAGYFTMSLLVKRACDESFQPLGDIMKMWGRVPFSPGPAPPPHMGELDQERLTRQQELTALYQMQHLQYQQFLIQQQYAQVLAQQQKAALSSQQQQQLALLLQQFQTLKMRISDQNIIPSVTRSVSVPDTGSIWELQPTASQPTVWEGGSVWDLPLDTTTPGPALEQLQQLEKAKAAKLEQERREAEMRAKREEEERKRQEELRRQQEEILRRQQEEERKRREEEELARRKQEEALRRQREQEIALRRQREEEERQQQEEALRRLEERRREEEERRKQEELLRKQEEEAAKWAREEEEAQRRLEENRLRMEEEAARLRHEEEERKRKELEVQRQKELMRQRQQQQEALRRLQQQQQQQQLAQMKLPSSSTWGQQSNTTACQSQATLSLAEIQKLEEERERQLREEQRRQQRELMKALQQQQQQQQQKLSGWGNVSKPSGTTKSLLEIQQEEARQMQKQQQQQQQHQQPNRARNNTHSNLHTSIGNSVWGSINTGPPNQWASDLVSSIWSNADTKNSNMGFWDDAVKEVGPRNSTNKNKKELK

SEQ ID NO: 12339 - DNA, 2599 bp, Homo sapiens
  CDS (183)..(1205)
cgagctcgcccgctgtccgccagcccgcgggagggaggagagaagcgaagcgtttccgcggttggctactcagtgtcttggtctcaagttgcctcattgcggctggcgttcccaatacagacgcatcgtttcttttttaatactccctaagaaagggaataaccttcaagctggcgggagcaatggttcacataaagaaaggcgagctgacccaggaggagaaggagctactggaagtcatcgggaaaggtactgtccaagaagctggaacattattatccagcaagaatgttcgtgtcaactgtttggacgagaatggaatgactcctctaatgcatgcagcatataaaggaaaactcgatatgtgcaaattactactgcgacatggagccgatgtaaattgtcatcagcatgaacatggatacacagccctcatgtttgctgcactttctggtaataaagacatcacatgggtaatgttagaagctggtgctgagacagatgttgtcaactctgtgggaagaacagcagctcagatggcagcctttgtgggtcaacatgattgtgtgaccataatcaacaatttctttcctcgagagagactggattattacactaagccccagggactgggtaaagagccaaaactgcccccaaagttggcaggcccgctgcacaaaattatcaccacaacgaatcttcatcctgtcaagatcgtgatgcttgtaaatgagaatcctctgctgacagaagaagcagccctgaataaatgctacagagtgatggatttgatttgtgagaaatgtatgaagcaaagagacatgaatgaagtattggctatgaagatgcattacataagctgtatctttcagaaatgcattaacttcttaaaagatggagagaataaactggacaccttgatcaaaagcttgttaaaaggccgagcttctgatggctttccagtgtatcaagaaaagatcattagagaaagtatcagaaaatttccttactgtgaagctacactcctccagcagctggttcgaagcattgctcctgttgaaattggttctgatcccactgcattctccgtccttacccaagccatcactggccaggtgggttttgtggatgtggaactttgcactacctgtggagaaaagggagcaagtaaaagatgttcagtttgcaaaatgtgcagagaactttgaaatcatgtgagaaagtgtatgaatgcaaggatgaatgaagaattggggccaataatacaatatatgtataagggcctaccacagtgcttggcatacagtaatatattgtgatcaaacctgccagaaaacacactggtttactcataagaaaatctgtaagaatctgaaggacatttacgaaaagcaacagttggaggctgccaaagaaaagagacaagaggaaaaccacggcaaacttgatgtcaattctaactgtgttaatgaagagcaaccagaggctgaagtaggtatctctcaaaaggattccaatcctgaagattccggggaaggaaagaaagaatctcttgaaagcgaagctgagttggaaggcttacaggatgctcctgcagggccacaggtgtctgaggagtaaaagccagagcaagtgccagtgtggatggtcctcaccctgcaagaagctggaaaactcctaggaatgcattgtcctcaccttgttatacctgcgtggcaccatggcaggattccacatttcatagaatacaggttttcaagcaaacccctgttgaccatgccctaatctcctattgatttctgttgtataattgaatggatattcctatggaaaattttttgtttcaaaatacaggaaaaacattcctattacctttctgaggctggctttccagcaattgtttcaaaggaaaatagatccccttaaagaaaaaatacaggctttagggaacaaagggacaagcagaacaggtgtggaagagagattttcaggaagggaaaaatttatagctacagagggtagttagaaaaatcataacttgtatgtgaataaaatacatataagcagcatttacggtagtggcattctacttattaagatgcaatgaaatgaagaaaggctttatgttcaaggacctttgccatagttcagctaattgtagttttatatagaaatgatcctgaacactctgaacttgacgtagtcctgcggtgatattctatctgcagtatttgtacctccagaatggcagatccctcagcaggaacaaaggcatattgacggttctctcagcgtatgcattaaaaaaggtacttcctgaaacttttgattcaataatgactaaacatactatgtacacaattactgtaaggctaattcacgtgccatacgccacctgaaagcctgagttatcttgctataagcttttcatggagcacttcctttccagaaactgatttgtaactcatttagagaatgtcctggcgtcggtttttagcatatgtggtatttaaacagagctagaatgtgatgtctgaagataatgctgcatttctgggtttcttgtgtggattttaaaataaattgtgcctacaaatat

SEQ ID NO: 12340 - protein, 341 aa, Homo sapiens
MVHIKKGELTQEEKELLEVIGKGTVQEAGTLLSSKNVRVNCLDENGMTPLMHAAYKGKLDMCKLLLRHGADVNCHQHEHGYTALMFAALSGNKDITWVMLEAGAETDVVNSVGRTAAQMAAFVGQHDCVTIINNFFPRERLDYYTKPQGLGKEPKLPPKLAGPLHKIITTTNLHPVKIVMLVNENPLLTEEAALNKCYRVMDLICEKCMKQRDMNEVLAMKMHYISCIFQKCINFLKDGENKLDTLIKSLLKGRASDGFPVYQEKIIRESIRKFPYCEATLLQQLVRSIAPVEIGSDPTAFSVLTQAITGQVGFVDVELCTTCGEKGASKRCSVCKMCREL

SEQ ID NO: 12341 - DNA, 2494 bp, Homo sapiens
  CDS (11)..(2488)
agttggcgacatggtggcacccgtgctggagacttctcacgtgttttgctgcccaaaccgggtgcggggagtcctgaactggagctctgggcccagaggacttctggcctttggcacgtcctgctccgtggtgctctatgaccccctgaaaagggttgttgttaccaacttgaatggtcacaccgcccgagtcaattgcatacagtggatttgtaaacaggatggctccccttctactgaattagtttctggaggatctgataatcaagtgattcactgggaaatagaggataatcagcttttaaaagcagtgcatcttcaaggccatgaaggacctgtttatgcggtgcatgctgtttaccagaggaggacatcagatcctgcattatgtacactgatcgtttctgcagctgcagattctgctgttcgactctggtctaaaaagggtccagaagtaatgtgccttcagactttaaactttggaaatggatttgctttggctctctgcttatcttttttgccaaatactgatgtaccaatattagcatgtggcaatgatgattgcagaattcacatatttgctcaacaaaatgatcagtttcagaaagtgctttctctctgtggacatgaggattggattagaggagtggaatgggcagcctttggtagagatcttttcctagcaagctgttcacaagattgcctgataagaatatggaagctgtatataaagtcaacatctttagaaactcaggatgacgataacataagactgaaagaaaatacttttaccatagaaaatgaaagtgttaaaatagcatttgctgttactctggagacagtgctagccggtcatgaaaactgggtaaatgcagttcactggcaacctgtgttttacaaagatggtgtcctacagcagccagtgagattattatctgcttccatggataaaaccatgattctctgggctccagatgaagagtcaggagtttggctagaacaggttcgagtaggtgaagtaggtgggaatactttgggattttatgattgccagttcaatgaagatggctccatgatcattgctcatgctttccacggagcgttgcacctttggaaacagaatacagttaacccaagagagtggactccagagattgtcatttcaggacactttgatggtgtccaagacctagtctgggatccagaaggagaatttattatcactgttggtactgatcagacaactagactttttgctccatggaagagaaaagaccaatcacaggtgacttggcatgaaattgcaaggcctcagatacatgggtatgacctgaaatgtttggcaatgattaatcggtttcagtttgtatctggagcagatgaaaaagttcttcgggttttttctgcacctcggaattttgtggaaaatttttgtgccattacaggacaatcactgaatcatgtgctctgtaatcaagatagtgatcttccagaaggagccactgtccctgcattgggattatcaaataaagctgtctttcagggagatatagcttctcagccttctgatgaagaggagctgttaactagtactggttttgagtatcagcaggtggcctttcagccctccatacttactgagcctcccactgaggatcatcttctgcagaatactttgtggcctgaagttcaaaaactatatgggcacggttatgaaatattttgtgttacttgtaacagttcaaagactctgcttgcctcagcttgtaaggcagctaagaaagagcatgcagctatcattctttggaacactacatcttggaaacaggtgcagaatttagttttccacagtttgacagtcacgcagatggccttctcacctaatgagaagttcttactagctgtttccagagatcgaacctggtcattgtggaaaaagcaggatacaatctcacctgagttcgagccagtttttagtctttttgccttcaccaacaaaattacttctgtgcacagtagaattatttggtcttgtgattggagtcctgacagcaagtatttcttcactgggagtcgagacaaaaaggtggttgtctggggtgagtgcgactccactgatgactgtattgagcacaacattggcccctgctcctcagtcctggacgtgggtggggctgtgacagctgtcagcgtctgcccagtgctccacccttctcaacgatacgtggttgcagtaggattggagtgtggaaagatttgcttatatacctggaaaaagactgatcaagttccagaaataaatgactggacccactgtgtagaaacaagtcaaagccaaagtcatacactggctatcagaaaattatgctggaagaattgcagtggaaaaactgaacagaaggaagcagaaggtgctgagtggttacactttgcaagctgtggtgaagatcacactgtgaagatacacagagtcaataaatgtgcactgtaatgg

SEQ ID NO: 12342 - protein, 826 aa, Homo sapiens
MVAPVLETSHVFCCPNRVRGVLNWSSGPRGLLAFGTSCSVVLYDPLKRVVVTNLNGHTARVNCIQWICKQDGSPSTELVSGGSDNQVIHWEIEDNQLLKAVHLQGHEGPVYAVHAVYQRRTSDPALCTLIVSAAADSAVRLWSKKGPEVMCLQTLNFGNGFALALCLSFLPNTDVPILACGNDDCRIHIFAQQNDQFQKVLSLCGHEDWIRGVEWAAFGRDLFLASCSQDCLIRIWKLYIKSTSLETQDDDNIRLKENTFTIENESVKIAFAVTLETVLAGHENWVNAVHWQPVFYKDGVLQQPVRLLSASMDKTMILWAPDEESGVWLEQVRVGEVGGNTLGFYDCQFNEDGSMIIAHAFHGALHLWKQNTVNPREWTPEIVISGHFDGVQDLVWDPEGEFIITVGTDQTTRLFAPWKRKDQSQVTWHEIARPQIHGYDLKCLAMINRFQFVSGADEKVLRVFSAPRNFVENFCAITGQSLNHVLCNQDSDLPEGATVPALGLSNKAVFQGDIASQPSDEEELLTSTGFEYQQVAFQPSILTEPPTEDHLLQNTLWPEVQKLYGHGYEIFCVTCNSSKTLLASACKAAKKEHAAIILWNTTSWKQVQNLVFHSLTVTQMAFSPNEKFLLAVSRDRTWSLWKKQDTISPEFEPVFSLFAFTNKITSVHSRIIWSCDWSPDSKYFFTGSRDKKVVVWGECDSTDDCIEHNIGPCSSVLDVGGAVTAVSVCPVLHPSQRYVVAVGLECGKICLYTWKKTDQVPEINDWTHCVETSQSQSHTLAIRKLCWKNCSGKTEQKEAEGAEWLHFASCGEDHTVKIHRVNKCAL

SEQ ID NO: 12343 - DNA, 2835 bp, Homo sapiens
  CDS (723)..(1022)
aaaagaagaaacgcaggcggggcagaaaagaggagcccgaaggtggtagcaggccggcgtgtgggggagctggcacccaggggcctgtgcagctggtcaaggaggtggtggccgaggatggcaccgtggtcaccattaagcaggtgctcaccgcgccaggctcggcggggcagccccggtctgaggacgaagacagccttgaggaggccggcagccccgcacctgggccgtgtccacgctccaacgccatgctggctgtgaagcatggggtgctctacgtctatgggggcatgtttgaggccggcgaccgccaggtcaccctcagcgacctgcactgcctggacctgcacaggatggaggcgtggaaggccttggtggagatggacccagaaactcaggagtggctggaggagacggactcggaagaggacagtgaggaggttgagggcgccgagggtggggtcgacgacgaagacagcggagaggagagcggtgcggaggactgaggctgtgacaaaccctgtgcccacgctgcctccactgccgggagactcagggctgggggagacatgccctggtcaccactgcggagactcagggctgggggagacatgccctggccaccagtggtgagccagcgagacaggaccccacgcgcgctgacccggggacgccatggaactcactcgcgactcctgcacgcgcgctgacccggggacgccatggaactcactcgcgattcctgctcacagcacgtttcctgctcggaaaccaggagagcctccacgtgccgactagctctgtccacacatccattccgctgtctcctgcagagcgtctgtcgcacgtatgaggtgaaatccgcactgtcccatgaagactgtgaggggagttgccacccgcacacggcccaggagcgccagcagcttggggaccaccacaggcctcagggtctcttcagtccgacgggtccagctgtcgataaaacctcccggggaaggagtaaaggacaaccaagaacctgaactgcaaaagtatgaaaaacatttcatttccctcgagttctccacactttaggtctgcagcgccttgggggtgactgatggccctccgtgagacgcggtggccatgtgcttctacaagtgaaaaggagcaagtgtggttagagcctggagtatggacgtcccggggaccgctgcccatggcctggcttggggccttacaggggagcgagctgagtgaatgcaggggagggcccgtctttctacagtgtgtatcctgtttttgagacagactcactctgtcgtccaggctggagtgcagtggcgcgatctgtgctcactgcaacctctgcctcccgggttcaagcgattctcctgcctcagcctcctcagtagctgggattacaggcacctgccaccacgcctggctaatttttgtattttttttttagtagagatggggtttcactatgttggtcaggctggcctcgagctcctgacctcaggtgatccacctgccttggcctcccaaagtgctgggattacaggcatgagccaccgcgcccggccctgccctgcttttctacatcaccactgtcttgtcagttagctcggctcaggcattgcatgcctgatctgtatctttgggaatcctgtgaggtaatggttctagatccaaaagaatggataaagagactgtttcagttcccgaaattatcgaggcacattctgtgcgctactgaacttcagaaagcaccagtccatccagtgtgcagaggctggtaagtaaaacaggccagccgtgggcacagacagtttcaccagaggccccggggcagagggtcttctccagctcttccagggcggggctcatctgttcctgggccagaggtggacctgtctgcaggcttgtaagggtggggagacgccagcctggcccatgggctgtccacacccaccccccgcagaccgcgctgctgtctgcaggggatgccaccacttcctcctggcctcgggtgcacaggtgaaacatgaagaagctattggggcggaaaatggctctcaccaggctgctctcgggttaatgaaaactcgtcaaattctccatgcagcagcagccagccgggcacatgctgtcctgccctgcccgactgtgtgcagggaagcaggtcccctgggcctgggcggagggactgcgtgcctgtcagggaaggccgaggctccggacaggcgggaagcagccttctccttaatcaccccatgtggaaaccaattaaagattcgattctctcagacccggggcattttagccttggttgaatcctcctggaattcacagggaagtggctttgccctctgccctcgctgctggaaggcaaggggccgttctcgccttggttttctaggttgtgttgcggcaggagctgactgcccctaggcctagatctctgcacaacttcgctcagggacacctgcctctgtgcatgtctcatggtgtgaatgtgtttcctgctcacaggtaccgttttgtgtcatgcagttactggaatgtacaaaagcagctgtgatctttgtgagagctgcacagagcaggagtctgagagctgcacagagcaggagtctttatttggttcacttctggtctgcagcaaccacttgctactaaaagatggaaaagatgtacaaaaatgtcacagccctttagaaagcgacattatcagaaatgtatgaccttcagtcctccctccctctcctatgcccccaccagaccaggcggcgagaaggaacagggagtgaacatgtaacggaaaacaataaaactgaatttaactgg

SEQ ID NO: 12344 - protein, 100 aa, Homo sapiens [sequence omitted]

SEQ ID NO: 12345 - DNA, 1707 bp, Homo sapiens
  CDS (188)..(1456)
aacctcgtgctttctgcagaggagaccggagggcagaaggcagagtccaggcttagactgcagttcctcgcttacctgtgcagtctaattttgagctgcctctttgtagtcttaaaaggcaggagcttcgtgttgtgggtctgctaacccgtacgtttccgtgggcaagtcgtgtgtactcctcgccatggctcagctccaaacacgcttctacactgataacaagaaatatgccgtagatgatgttcccttctcaatccctgctgcctctgaaattgccgaccttagtaacatcatcaataaactactaaaggacaaaaatgagttccacaaacatgtggagtttgatttccttattaagggccagtttctgcgaatgcccttggacaaacacatggaaatggagaacgtctcatcagaagaagttgtggaaatagaatacgtggagaagtatactgcaccccagccagagcaatgcatgttccatgatgactggatcagttcaattaaaggggcagaggaatggatcttgactggttcttatgataagacttctcggatctggtccttggaaggaaagtcaataatgacaattgtgggacatacggatgttgtaaaagatgtggcctgggtgaaaaaagatagtttgtcctgcttattattgagtgcttctatggatcagactattctcttatgggagtggaatgtagagagaaacaaagtgaaagccctacactgctgtagaggtcatgctggaagtgtagattctatagctgttgatggctcaggaactaaattttgcagtggctcctgggataagatgctaaagatctggtctacagtccctacagatgaagaagatgaaatggaggagtccacaaatcgaccaagaaagaaacagaagacagaacagttgggactaacaaggactcccatagtgaccctctctggccacatggaggcagtttcctcagttctgtggtcagatgctgaagaaatctgcagtgcatcttgggaccatacaattagagtgtgggatgttgagtctggcagtcttaagtcaactttgacaggaaataaagtgtttaattgtatttcctattctccactttgtaaacgtttagcatctggaagcacagataggcatatcagactgtgggatccccgaactaaagatggttctttggtgtcgctgtccctaacgtcacatactggttgggtgacatcagtaaaatggtctcctacccatgaacagcagctgatttcaggatctttagataacattgttaagctgtgggatacaagaagttgtaaggctcctctctatgatctggctgctcatgaagacaaagttctgagtgtagactggacagacacagggctacttctgagtggaggagcagacaataaattgtattcctacagatattcacctaccacttcccatgttggggcatgaaagtgaacaataatttgactatagagattatttctgtaaatgaaattggtagagaaccatgaaattacatagatgcagatgcagaaagcagccttttgaggtttatataatgttttcacccttcataacagctaacgtatcactttttcttattttgtatttataataagataggttgtgtttataaaatacaaactgtggcatacattctctatacaaacttgaaattaaactgagttttacatttc

SEQ ID NO: 12346 - protein, 423 aa, Homo sapiens
MAQLQTRFYTDNKKYAVDDVPFSIPAASEIADLSNIINKLLKDKNEFHKHVEFDFLIKGQFLRMPLDKHMEMENVSSEEVVEIEYVEKYTAPQPEQCMFHDDWISSIKGAEEWILTGSYDKTSRIWSLEGKSIMTIVGHTDVVKDVAWVKKDSLSCLLLSASMDQTILLWEWNVERNKVKALHCCRGHAGSVDSIAVDGSGTKFCSGSWDKMLKIWSTVPTDEEDEMEESTNRPRKKQKTEQLGLTRTPIVTLSGHMEAVSSVLWSDAEEICSASWDHTIRVWDVESGSLKSTLTGNKVFNCISYSPLCKRLASGSTDRHIRLWDPRTKDGSLVSLSLTSHTGWVTSVKWSPTHEQQLISGSLDNIVKLWDTRSCKAPLYDLAAHEDKVLSVDWTDTGLLLSGGADNKLYSYRYSPTTSHVGA

SEQ ID NO: 12347 - DNA, 2543 bp, Homo sapiens
  CDS (77)..(1957)
aaagtccttgcaccatgtagatcagcgtcccccactttggcatcccggccggccggggacctcccagtctgcggccatgaacgcgagcagcgagggcgagagcttcgcgggctcggtgcaaattccaggtggcacaacggtgctggtggagctgactcccgacatccatatctgcggcatctgcaagcagcagtttaacaacctggatgcctttgtagctcacaagcaaagtggctgccagctgacaggcacatccgcagcagcccccagcacggtccagtttgtatcggaggaaacagtgcctgccacccagactcagaccaccaccagaaccatcacctcggagacccagacaatcacaggttgccaattcaagactgcttatggcatgaaggacatggagcggcatttaaaaattcacacgggagacaaaccccataagtgtgaagtctgtggcaagtgctttagccggaaagacaagctgaaaactcacatgcggtgccacacgggcgtgaagccctacaagtgtaagacgtgtgactacgccgctgccgacagcagcagcctcaacaagcacctgaggatccactcggacgagcggcccttcaaatgccagatctgcccctacgccagccgcaactccagccagctcactgtccacctgcgatcccacacgggggacgcccccttccagtgctggctctgtagcgccaagttcaaaatcagctcggacttgaaaaggcacatgcgggtgcactcgggggagaagcctttcaagtgcgagttctgcaatgtccgctgcaccatgaaggggaacctcaagtcgcacatccgtatcaagcacagcgggaataacttcaagtgtcctcattgcgacttcctgggtgacagcaaagccaccctccggaagcacagccgcgtgcaccagtcggagcatcctgagaagtgctcggaatgcagctactcctgctccagcaaggccgccctgcgcatccacgagcgtatccactgcaccgaccgccctttcaagtgcaactactgcagcttcgacaccaaacagcccagcaacctgagcaagcacatgaagaagttccatggggacatggttaagactgaggctctagagaggaaggacaccggcaggcagagcagccggcaggtggccaagctggatgccaagaagagtttccactgcgatatatgcgatgcctccttcatgcgggaggactcgctccgcagccacaagagacagcacagtgagtacagtgagagtaagaactcggacgtgaccgttctccagtttcagatcgaccccagcaagcagcccgccacgcccctcactgtgggacacctccaggtgcccctccagcccagccaagtgccccagttcagcgagggaagagtcaaaatcatcgttgggcatcaggtgccccaggcgaacaccatcgtccaggctgccgccgctgcagtgaacatcgtcccgcctgccttggtggcccagaacccagaggaactcccagggaacagccggctgcagatcctgcgccaggtcagtctgatcgccccccctcagtcctcgcggtgtccgagcgaggcgggcgcaatgacccagccggctgtcctgctgaccacccacgagcagacggacggagccactctgcaccagactctcatccccacggcctcaggtggcccccaggaaggctctggcaatcaaactttcattaccagttcgggtattacttgcactgactttgaaggcctaaacgccttgattcaggaggggacagcagaagtgacagtggtgagcgatggaggccagaacatcgcagtggccaccacagcgccaccggtcttctcctcctcttcccagcaagaactacccaagcagacctactccatcattcaaggggcagcccatccagctttgctctgtcccgccgactccattccagattagtgcttaaaaaaacaaaaggagtgggggaaaggaattgagaaaaagaaatcttaagtagaattctctaaaaggtttgctcttaatgttttctttgttttgttttgtttttgagacggagtctcgctctgtttcccaggctggagtgcagtggcgctatcttggctcactgcaacgtccgcctcccaggttcaagcgattctcatgcctcagccctccgagtagctgggaccacaggtgtacgacatcatgactggctaatttttgtatatttagtagagacggggtttcatcatgttgaactcctgacctcaagtgatctgcccacctcagcctcccaaagtgctgggattacaggtgtgagccaccatgcctggccgtggtttgctcttaatgtttttaaggatggttgtgaatccccctggccccataataaattgtaattttatactgcttactataatttttttaacactgtaacaactttgagaccacctctgaatcgtcgcattataactgttgtagaatcttaaatgttaccaagatgattccaatgaggggttggaattaaatgcattaagtagtg

SEQ ID NO: 12348 - protein, 627 aa, Homo sapiens
MNASSEGESFAGSVQIPGGTTVLVELTPDIHICGICKQQFNNLDAFVAHKQSGCQLTGTSAAAPSTVQFVSEETVPATQTQTTTRTITSETQTITGCQFKTAYGMKDMERHLKIHTGDKPHKCEVCGKCFSRKDKLKTHMRCHTGVKPYKCKTCDYAAADSSSLNKHLRIHSDERPFKCQICPYASRNSSQLTVHLRSHTGDAPFQCWLCSAKFKISSDLKRHMRVHSGEKPFKCEFCNVRCTMKGNLKSHIRIKHSGNNFKCPHCDFLGDSKATLRKHSRVHQSEHPEKCSECSYSCSSKAALRIHERIHCTDRPFKCNYCSFDTKQPSNLSKHMKKFHGDMVKTEALERKDTGRQSSRQVAKLDAKKSFHCDICDASFMREDSLRSHKRQHSEYSESKNSDVTVLQFQIDPSKQPATPLTVGHLQVPLQPSQVPQFSEGRVKIIVGHQVPQANTIVQAAAAAVNIVPPALVAQNPEELPGNSRLQILRQVSLIAPPQSSRCPSEAGAMTQPAVLLTTHEQTDGATLHQTLIPTASGGPQEGSGNQTFITSSGITCTDFEGLNALIQEGTAEVTVVSDGGQNIAVATTAPPVFSSSSQQELPKQTYSIIQGAAHPALLCPADSIPD

SEQ ID NO: 12349 - DNA, 3655 bp, Homo sapiens
  CDS (128)..(1210)
gttggagcggcgctgctcggccgcggacacacgagggacgcgcccgaggagctgcaggtggcagcccaggcggtccgaacccgtcggccggccgagcctggagtattgcctaagtgtaatcttgaacatgggcggtgctgtgagtgctggtgaagacaatgaagagctgatagataatttgaaagaagcacagtatatccggactgagctggtagagcaggctttcagagctatcgatcgtgcagactattatcttgaagaatttaaagaaaatgcttataaagacttggcatggaagcatggaaacattcacctctcagccccgtgcatctactcggaggtgatggaagccctagatctgcagcctggactctcgtttctgaacctgggcagtggcactgggtatctcagctccatggtgggcctcattctaggtccttttggtgtgaaccatggggtggaacttcactcagatgtgatagagtatgcaaagcagaaactggacttcttcatcagaacaagtgatagttttgacaagtttgacttctgtgaaccttcctttgttactgggaattgcctggagatttctccggattgttctcagtatgatcgtgtatactgtggggctggcgtgcagaaagagcatgaagagtacatgaagaatcttctcaaagtgggagggatccttgtcatgccactggaagagaagttgactaagataacacgcacaggtccttcagcttgggaaaccaaaaagattcttgctgtttcttttgctcctctgatccagccctgccattcagagtcaggaaaatcaagacttgtccagttaccaccagtggcagttcgcagcctccaggacttggctcgcatcgccatccggggcaccattaaaaagattattcatcaggaaactgtgagcaaaaacggaaacggactaaagaacacccccaggtttaaacgaaggagagttcgccgccgtcgaatggaaacgattgtctttttggacaaagaagtctttgccagtcggatttccaacccctcagatgacaacagctgtgaagacttggaagaggaacggagggaagaagaagagaagaccccgccggaaacaaagccagaccccccagtgaacttcctacgccagaaggtcctgagcctccctctgccagatcccctgaaatactacttgctttattacagagaaaaataagtctcctgtttgaaagggggaaataggaagagcagattgctgagtgtgaagttcgtgctgcctgtgtgctgttgaagggtcacctggaggcagacgttgtggggaagggaactgctgggctcatccacaccatggttttcttctagttcctgattgacctctaaaattctattcagttgtatgatttgtttacatagttccacaagaccttcattgcatagaagattgttttcccaaagtggagagaatcttcatagagaaaaagagaaggctgtttctttttcggctctgacgaaacactgaagtctgcgtaagagagactgtttgatgaccgtccctcatgcaacatgcacggtactcactaaaaatgaaaactgaagtggaaactaacctgtgttgcttataaagtgtgaaagcacaagcttataaatgtataaaatcttttctgggtgtgacgcacctgcgtccaagtttgaatttttatgatatgtaccacttaattactggcactgagtatcactgaatttcttagttttctagtggggaaacattattgagaagccctcccttattttaagtaagttgattaaatcttatgtgagttgccagttgtaatttttcaaaggaaaaattttgatggggtggaggaatgaattgccagataatctttctggaattccgagagaattccaaagagggtttttttttttttttttttaggacatcttttgatacctttaaaagaaccactgtcaagtaatccttaaaaaaatatcttggaaaaggaaacagattttttcctgtgtgtaagcaataagtgaagttacatttgccctaaccctagggatgattctttacccagttttaaagcccatcatggtattctaaggtgttgacaccctccatcctcagagcaggtcgaaaatattaaatagactggggactctatgatgggcagcctgtgctttttgacttcagtttgctatttttctgtgatcacattagtactgattcatagattctatcttttataattctggagaaaaagatttgttagttttgtaatttttttgtaagaccaaatgtatgtattttagtagctccattgcatgagaagagtgtaactcacactgacttgtgatatcagccttctctgggccttgtgtgtggagagctttctatcttaccaagtggtagggctaaaagaacaacagcctttttggtagtcacatagcagaatgatcagagttacattgcttattccaaaacattggttctttttaaaacatttttttttacccaaagaaaagaataatagaaattactaacaataaatataaattcagagtgttgatataggattcagtatccagagtttatttttaatcttaatcctcagcttcttgggagttgctgggcttcagtgtctctgtggtttcaccagcttagcttgagctctggttattttggatcttttctgctttttttaagtaactgagtcatttttaccacacagtccagtttgcatgtatagctaggaaacatgtattgctctagattgggcagtttaagtcattttaaagaaagttagttcatagttgttgccttttaactcatagtcaagcttcagtctttcaaagagaaatgtgtgattttcatttacttgctgatattttgtagtttggagatccttgtgggcattattctaactgatacgtagacacttacttggaaatttttggacattatattaaatgagtgctatctgtgaaattggttatattaggtggcttgactaatgttttttctataattgtatatggactgcatttttaaaaaaaccgcatttgcctttatgctagattgtaaaaaattatattagaatgcataagacatgtttttccttcatatgctagacttttcctagcatttcgtatttctgtgttgtcagtgtgtgatttttaaaccggaatttggtttaaaaaaaatctggtggtaatatatgtgagaaatactttggtgtttaccttatgaaaataaaggattgtaagtaaagtttcctgcgcaccttataccagaattcagtataatacactactttctgttttcaaacagataaatcataatatagtctgtattatctgtaagatctgtcttgtaaaccacattcttgacaactatttgcttttgagtagtttgtattttaatatgtgacttttgtcttgaaaagtagtaaagccatagacttgtgcaaaacaagtttcaagtttatagatattaagtttgtaatgtgagcatcaaatgtgtatgtaaaaatactttttaccagtctggaacttgggaaaatccagggaatttgaaacatagattttaatgagctggtaaacacaaatcatgtcaataaaggtagtcaggatattttatccttagcattgcttctgc

SEQ ID NO: 12350 - protein, 361 aa, Homo sapiens
MGGAVSAGEDNEELIDNLKEAQYIRTELVEQAFRAIDRADYYLEEFKENAYKDLAWKHGNIHLSAPCIYSEVMEALDLQPGLSFLNLGSGTGYLSSMVGLILGPFGVNHGVELHSDVIEYAKQKLDFFIRTSDSFDKFDFCEPSFVTGNCLEISPDCSQYDRVYCGAGVQKEHEEYMKNLLKVGGILVMPLEEKLTKITRTGPSAWETKKILAVSFAPLIQPCHSESGKSRLVQLPPVAVRSLQDLARIAIRGTIKKIIHQETVSKNGNGLKNTPRFKRRRVRRRRMETIVFLDKEVFASRISNPSDDNSCEDLEEERREEEEKTPPETKPDPPVNFLRQKVLSLPLPDPLKYYLLYYREK

SEQ ID NO: 12351 - DNA, 2465 bp, Homo sapiens
  CDS (36)..(1355)
agcaaataatcaatttagcattacaaaaaacagggatggtagggaaaatagaaggagaaaactctaaaataggtgatgataatgaaaatttaacctttaaattagaagtaaatgagctgagtggtaaattagacaacactaacgaatacaatagtaatgatggtaagaaattaccccagggtgaatcacgaagttacgaagtcatgggaagtatggaagaaaccttatgcaatatagatgacagagatggaaatcgcaatgtccatttagaatttacagaaagagagagtaggaaggatggagaggatgaatttgtcaaagaaatgagagaggaaagaaaatttcagaaattgaagaataaagaggaggttttaaaagcctccagagaagaaaaagtgttgatggatgaaggagcagtacttaccctggcagccgacctttcatcagcaacactggatattagtaagcaatggagtaatgtcttcaacattctgagagaaaatgattttgaacctaaatttctgtgtgaagttaaattagcatttaaatgtgatggtgaaataaagacattttcagatctgcaaagccttagaaaatttgccagccaaaaatcttctatgaaagaattactgaaagatgtactcccacaaaaggaagaaataaatcaaggaggaagaaaatatggaattcaagaaaaaagggataaaaccctaatagactcaaagcatagagctggagaaataaccagtgatggcttgagcttcctatttcttaaagaagtaaaagttgctaagccagaggagatgaaaaacttagagactcaagaggaagagttttccgagctagaggagctggatgaagaggcctcagggatggaggatgatgaagatacctcagggctggaggaggaggaggaagagccctcagggctggaggaggaagaagaagaagaggcttcagggttggaggaggatgaggcctcagggctagaggaggaagaggaacagacttcagaacaggactcaacctttcagggtcatactttggtagatgcaaagcatgaagttgagataaccagtgatggcatggaaactactttcattgactctgtagaggattctgaatcagaggaggaagaagaaggaaagagctctgaaacaggaaaggtaaagactacctccctgactgagaaaaaagcctcacgtagacaaaaagaaattccctttagttatttggttggggactctgggaagaaaaagttggtgaaacaccaggtggtgcacaaaacccaggaggaagaggaaacagctgtgcccacaagtcaaggaactggcacaccctgtctgaccttatgttaggcctctccctcaaagtcactagagatgagtcatgatgagcataaaaagcattcacatacaaatttgagtatttcaacaggagtcaccaaacttaagaaaacagaagaaaagaaacacagaactctgcacacagaagaactaacatccaaagaagcagacttaacagaggaaacagaagaaaacttgagaagtagtgtgattaatagcatcagagagataaaagaggagattggaaatttgaaaagttcccattcaggtgtcttggaaattgaaaattcagtagatgatctgagtagcagaatggacatacttgaagaaagaatagacagtctagaagatcaaattgaagaattctctaaggatacaatgcaaatgaccaaacagataattagtaaagaaaggcaaagagatatagaggagagatctagaagttgcaacattcgtttgataggaattccagaaaaggagagttatgagaatagggcagaggacataattaaagaaataattgatgaaaactttgcagaactaaagaaaggttcaagtcttgagattgtcagtgcttgtcgagtacctagtaaaattgatgaaaagagactgactcctagacacatcttggtgaaattttggaattctagtgataaagagaaaataataagggcttctagagagagaagagaaattacctaccaaggaacaagaatcaggttgacagcagacttatcactggacacactggatgctagaagtaaatggagcaatgtcttcaaagttctgctggaaaaaggctttaatcctagaatcctatatccagccaaaatggcatttgattttaggggtaaaacaaaggtatttcttagtattgaagaatttagagattatgttttgcatatgcccaccttgagagaattactggggaataatataccttagcacgccagggtgactacaaacaatatgctttcctcccccagcatgcatccaaaaatcaacaagtaaaacgaaaatacacttctacccagaaggatggacagctaatagcgtacttggggatgaggagcaaggaatattacagatattacctagatgttaataaagggtatgttt

SEQ ID NO: 12352 - protein, 440 aa, Homo sapiens [sequence omitted]

SEQ ID NO: 12353 - DNA, 3229 bp, Homo sapiens
agcaaccattgctagtaattctttaatgtgtataaattcaatttcaggtataacaaatgtgatcatgacatgaaaatattctagaatagatactgtattaaatattgccatgtttacaatatgtaatatgtttttagccgatggatttaaacatgtagattcaactagaatccatttgtgatatttgtaaataaaggtagaaatattagatccatttctgcagaacttactgtacagtttagttggagtgtagcactgaagaactgtcagctcagcgttgactgaggagatagtgaaaatagcctatacacagcatcttgtgaaaagtactggcagccgtggttgcagcaaataatagggcaaaaaaaataataatagggtggtcggttccctttcatctccctcttctgaaaggaaaaaattgaattggaacgttcaagtccagtttgtgttcagtcataaaactgggccagttgttaaccttacagaatgagtcatgtggccagaccttcaagtccaaggccttcagacactaaggatgggaaaatgggtatttttctttggagaaaagctggaaatataaacatggcatttttaggtaaagtttcttccactagttgaattttcatgcagatatttttccttaacgttggtgccagtcaagcaaagagtattatgatggaaaagaccagtccaagccccatcgctccggagtgggagccagtgttcttgctaattgtttctttctgcactaaccactcagatgtctaatttaattgttttgcagtcaaatactggatttgtaaccttcagggctgacatgctgcccagtttgcttcatcgggagaatagcaacaggtagacacatctcaaggctaaatctgctcatgtcgccactgctctcataatgacacacatgcagtaagaagacttttgtaaggggatttgagtacacccaaatgaaattgtgacaggatgtttgtatggttaacatctgatatcagaatgttaaaagtgccttctgtcttaaatctcaaaccaaatattttgtgtgttgaccttgggcagaagaagtgtccttccctcctttcttcaccgtcaggtagaaaacctgcactctgcagaagggtcctgtgtgatcacttaatcctctggttgagaagcagcagtaatgtttttgcttccaacctgattaatcattttatgttgaaaatagtcaatgagaccagtatctcttgagtgctttatttgccttctctttgaagggaggggacgggctctgctctgtaaactcaaatgtgtagagtcagcaacaattccgtagcttccaactgactcagaattgatgcaacgtaggtcttctggcccgaggcaggtatcaagtccaaatcataatgaacttttcaccagtttcaaccagtttcttaaaagagagcttaagtcaagatttcatcaagacttgtgttttcccatgaatgtgaatctttcaatggctgttggagtatgtatgtactgttcttgcattctgaagtagttaaagaactctagaaagtactgattggccatctggtgtctatggagaaagaagtcctcacgtttgagggctgtacagtgaggccatcttgtagcagcgcatccagctctaccaaggcagtcctctggttcttttttctaagctacagtggaaatggcctaatggttaaaactgtggtatacatgacatcggttgtgctaaacaagttcctcgtgtcccaatatccaatggtttttcatcctattttgtatcaatcaacagagtatagttaaagcttgtcttgatgttgcattcttgcaaatgtcttcaactcttacctgagaaaacatggcaaaatggtcagccagacccttccagtttttcctttgcttttctaagcctcggggaaaccactgtttcagttgtataaaaacttttgccacattcctatggcccagtcgaattaataccctttttctcactgagagaggaacacgtactgcctgtcataacagcattgtaatgccagtgtctcagtaacagaatcctggtgggtgttaattgggtgttttttgccctggagaattcagattcctttctatacctccgattctgcccagaagagggggggaatcaccagtgttacaaaattagaagattgttttgcctgttttagactgaatatttgaacactgcagcattactagccaccagtgttaaaggacagatgaggggaaacatttgtttttagcagtaattccatgcctcatcttttttaagtgatttgttccaaatgaagccatttattgacttgatgttcacaaatatcatttgaagaaataacaggaattggggttagatgataaattctagggaatctaggtgatttggaggatttcatttgttttgcattacagctagttgctctcactaaaggtaaatttccggtgaaataactcaggtttaactagctgtgtgcccagaatcactgttccttcatacatgtgtcctctccttaaattcattactttcaaatgatgttcaaagcattgactattttcattcaaagaaactacattcggccgggcacggtggatcacgcctataatcccagcactttgggaggccgaggcgggtggattacctaaggtcaggagttcaagaccagcctggccagcatagtgaaaccccatctctactaaaaatacaaaaattagccaggcgcagtggcacacccctgtaatcccagctactcgggaggctgagggaggagaattgcttgagcccgggagacagaggttgcagtgagtcaagatcatgccactgcactccagcctggccaacagagcgagactgtccccccccccaaaaaaaaagagagagactgcattcaaagaggaccaagactacagtgaaattaaaactgtttgctggctgggcatggtggctcacacctgtaatcccagcactttgggaggccgaggcggttggatcacctgaggtcagaagttcgagatcagcctgaccgacatagtggaaccctgtctttactaaaaatacaaaaattagctgggcatggtggcggcacctgtaatgccagctcctccagaggctgaggcaggagaattgcttgaacccagtaggtggaggttgcagtgagccacagttgcgccattgcaccccagcctgggcaatgagtgaaactctgtctcaaat

SEQ ID NO: 12354 - DNA, 3270 bp, Homo sapiens
  CDS (48)..(2939)
cgcacgttctggctggcaccgctaatccgacggttgccaaaagaaacatgactttgcctggcgagaacggtcaaaacttggtggaatggagattccgaaaagagcaagcccaagggaaagtcaatgtctttggccgcaagctcagggttaatggcagaaacctcctttcagttgactttgatcgaacaacaaagacagaaaagatctatgacgaccaccgtaaatttctactgaggatcgcctacgacacgtctgggcacccgactctctggctgccaagcagcaagctgatggccgtcaatgtcacctattcatccacaggtcaaattgccagcatccagcgaggcaccactagcgagaaagtagattatgacggacaggggaggatcgtgtctcgggtctttgctgatggtaaaacatggagttacacatatttagaaaagtccatggttcttctgcttcatagccagcggcagtacatcttcgaatacgatatgtgggaccgcctgtctgccatcaccatgcccagtgtggctcgccacaccatgcagaccatccgatccattggctactaccgcaacatatacaaccccccggaaagcaacgcctccatcatcacggactacaacgaggaagggctgcttctacaaacagctttcttgggtacaagtcggagggtcttattcaaatacagaaggcagactaggctctcagaaattttatatgatagcacaagagtcagttttacctatgatgaaacagcaggagtcctaaagacagtaaacctccagagtgatggttttatttgcaccattagatacaggcaaattggtcccctgattgacaggcagattttccgctttagtgaagatgggatggtaaatgcaagatttgactatagctatgacaacagctttcgagtgaccagcatgcagggtgtgatcaatgaaacgccactgcctattgatctgtatcagtttgatgacatttctggcaaagttgagcagtttggaaagtttggagttatatattatgatattaaccagatcatttctacagctgtaatgacctatacgaagcactttgatgctcatggccgtatcaaggagattcaatatgagatattcaggtcgctcatgtactggattacaattcagtatgataacatgggtcgggtaaccaagagagagattaaaatagggccctttgccaacaccaccaaatatgcttatgaatatgatgttgatggacagctccaaacagtttacctcaatgaaaagataatgtggcggtacaactacgatctgaatggaaacctccatttactgaacccaagtaacagtgcgcgtctgacaccccttcgctatgacctgcgagacagaatcactcgactgggtgatgttcaatatcggttggatgaagatggtttcctacgtcaaaggggcacggaaatctttgaatatagctccaaggggcttctaactcgagtttacagtaaaggcagtggctggacagtgatctaccgttatgacggcctgggaaggcgtgtttctagcaaaaccagtctaggacagcacctgcagtttttttatgctgacttaacttatcccactaggattactcatgtctacaaccattcgagttcagaaattacctccctgtattatgatctccaaggacatctttttgccatggaaatcagcagtggggatgaattctatattgcatcggataacacagggacaccactggctgtgttcagtagcaatgggcttatgctgaaacagattcagtacactgcatatggggaaatctattttgactctaatattgactttcaactggtaattggatttcatggtggcctgtatgacccactcaccaaattaatccactttggagaaagagattatgacattttggcaggacggtggacaacacctgacatagaaatctggaaaagaattgggaaggacccagctccttttaacttgtacatgtttaggaataacaaccctgcaagcaaaatccatgacgtgaaagattacatcacagatgttaacagctggctggtgacatttggtttccatctgcacaatgctattcctggattccctgttcccaaatttgatttaacagaaccttcttacgaacttgtgaagagtcagcagtgggatgatataccgcccatcttcggagtccagcagcaagtggcgcggcaggccaaggccttcctgtcgctggggaagatggccgaggtgcaggtgagccggcgccgggccggcggcgcgcagtcctggctgtggttcgccacggtcaagtcgctgatcggcaagggcgtcatgctggccgtcagccagggccgcgtgcagaccaacgtgctcaacatcgccaacgaggactgcatcaaggtggcggccgtgctcaacaacgccttctacctggagaacctgcacttcaccatcgagggcaaggacacgcactacttcatcaagaccaccacgcccgagagcgacctgggcacgctgcggttgaccagcggccgcaaggcgctggagaacggcatcaacgtgacggtgtcgcagtccaccacggtggtgaacggcaggacgcgcaggttcgcggacgtggagatgcagttcggcgcgctggcgctgcacgtgcgctacggcatgaccctggacgaggagaaggcgcgcatcctggagcaggcgcggcagcgcgcgctcgcccgggcctgggcgcgcgagcagcagcgcgtgcgcgacggcgaggagggcgcgcgcctctggacggagggcgagaagcggcagctgctgagcgccggcaaggtgcagggctacgacgggtactacgtactctcggtggagcagtaccccgagctggccgacagcgccaacaacatccagttcctgcggcagagcgagatcggcaggaggtaacgcccgggccgcgcccgccgagccgctcacgccctgcccacattgtcctgtggcacaacccgagtgggactctccaacgcccaagagccttcctcccgggggaatgagactgctgttacgacccacacccacaccgcgaaaacaaggaccgcttttttccgaatgaccttaaaggtgatcggctttaacgaatatgtttacatatgcatagcgctgcactcagtcggactgaacgtagccagaggaaaaaaaaatcatcaaggacaaaggcctcgacctgttgcgctgggccgtctgttccttctaggcactgtatttaactaacttt

SEQ ID NO: 12355 - protein, 964 aa, Homo sapiens
MTLPGENGQNLVEWRFRKEQAQGKVNVFGRKLRVNGRNLLSVDFDRTTKTEKIYDDHRKFLLRIAYDTSGHPTLWLPSSKLMAVNVTYSSTGQIASIQRGTTSEKVDYDGQGRIVSRVFADGKTWSYTYLEKSMVLLLHSQRQYIFEYDMWDRLSAITMPSVARHTMQTIRSIGYYRNIYNPPESNASIITDYNEEGLLLQTAFLGTSRRVLFKYRRQTRLSEILYDSTRVSFTYDETAGVLKTVNLQSDGFICTIRYRQIGPLIDRQIFRFSEDGMVNARFDYSYDNSFRVTSMQGVINETPLPIDLYQFDDISGKVEQFGKFGVIYYDINQIISTAVMTYTKHFDAHGRIKEIQYEIFRSLMYWITIQYDNMGRVTKREIKIGPFANTTKYAYEYDVDGQLQTVYLNEKIMWRYNYDLNGNLHLLNPSNSARLTPLRYDLRDRITRLGDVQYRLDEDGFLRQRGTEIFEYSSKGLLTRVYSKGSGWTVIYRYDGLGRRVSSKTSLGQHLQFFYADLTYPTRITHVYNHSSSEITSLYYDLQGHLFAMEISSGDEFYIASDNTGTPLAVFSSNGLMLKQIQYTAYGEIYFDSNIDFQLVIGFHGGLYDPLTKLIHFGERDYDILAGRWTTPDIEIWKRIGKDPAPFNLYMFRNNNPASKIHDVKDYITDVNSWLVTFGFHLHNAIPGFPVPKFDLTEPSYELVKSQQWDDIPPIFGVQQQVARQAKAFLSLGKMAEVQVSRRRAGGAQSWLWFATVKSLIGKGVMLAVSQGRVQTNVLNIANEDCIKVAAVLNNAFYLENLHFTIEGKDTHYFIKTTTPESDLGTLRLTSGRKALENGINVTVSQSTTVVNGRTRRFADVEMQFGALALHVRYGMTLDEEKARILEQARQRALARAWAREQQRVRDGEEGARLWTEGEKRQLLSAGKVQGYDGYYVLSVEQYPELADSANNIQFLRQSEIGRR

SEQ ID NO: 12356 - DNA, 3045 bp, Homo sapiens
  CDS (170)..(1372)
ggagacgcggcggcgctggacgcggaggcgctgggcgcacggcgcggagccggccggagctcgaggccggcggcggcgggagagcgacccgggcggcctcgtagcggggccccggatccccgagtggcggccggagcctcgaaaagagattctcagcgctgattttgagatgatgggcttgggaaacgggcgtcgcagcatgaagtcgccgcccctcgtgctggccgccctggtggcctgcatcatcgtcttgggcttcaactactggattgcgagctcccggagcgtggacctccagacacggatcatggagctggaaggcagggtccgcagggcggctgcagagagaggcgccgtggagctgaagaagaacgagttccagggagagctggagaagcagcgggagcagcttgacaaaatccagtccagccacaacttccagctggagagcgtcaacaagctgtaccaggacgaaaaggcggttttggtgaataacatcaccacaggtgagaggctcatccgagtgctgcaagaccagttaaagaccctgcagaggaattacggcaggctgcagcaggatgtcctccagtttcagaagaaccagaccaacctggagaggaagttctcctacgacctgagccagtgcatcaatcagatgaaggaggtgaaggaacagtgtgaggagcgaatagaagaggtcaccaaaaaggggaatgaagctgtagcttccagagacctgagtgaaaacaacgaccagagacagcagctccaagccctcagtgagcctcagcccaggctgcaggcagcaggcctgccacacacagaggtgccacaagggaagggaaacgtgcttggtaacagcaagtcccagacaccagcccccagttccgaagtggttttggattcaaagagacaagttgagaaagaggaaaccaatgagatccaggtggtgaatgaggagcctcagagggacaggctgccgcaggagccaggccgggagcaggtggtggaagacagacctgtaggtggaagaggcttcgggggagccggagaactgggccagaccccacaggtgcaggctgccctgtcagtgagccaggaaaatccagagatggagggccctgagcgagaccagcttgtcatccccgacggacaggaggaggagcaggaagctgccggggaagggagaaaccagcagaaactgagaggagaagatgactacaacatggatgaaaatgaagcagaatctgagacagacaagcaagcagccctggcagggaatgacagaaacatagatgtttttaatgttgaagatcagaaaagagacaccataaatttacttgatcagcgtgaaaagcggaatcatacactctgaattgaactggaatcacatatttcacaacagggccgaagagatgactataaaatgctcatgagggactgaatactgaaaactgtgaaatgtactaaataaaatgtacatctgaagatgattattgtgaaattttagtatgcactttgtgtaggaaaaaatggaatggtcttttaaacagcttttggggggtactttggaagtgtctaataaggtgtcacaatttttggtagtaggtatttcgtgagaagttcaacaccaaaactggaacatagttctccttcaagtgttggcgacagcggggcttcctgattctggaatataactttgtgtaaattaacagccacctatagaagagtccatctgctgtgaaggagagacagagaactctgggttccgtcgtcctgtccacgtgctgtaccaagtgctggtgccagcctgttacctgttctcactgaaaagtctggctaatgctcttgtgtagtcacttctgattctgacaatcaatcaatcaatggcctagagcactgactgttaacacaaacgtcactagcaaagtagcaacagctttaagtctaaatacaaagctgttctgtgtgagaattttttaaaaggctacttgtataataacccttgtcatttttaatgtacaaaacgctattaagtggcttagaatttgaacatttgtggtctttatttactttgcttcgtgtgtgggcaaagcaacatcttccctaaatatatattaccaagaaaagcaagaagcagattaggtttttgacaaaacaaacaggccaaaagggggctgacctggagcagagcatggtgagaggcaaggcatgagagggcaagtttgttgtggacagatctgtgcctactttattactggagtaaaagaaaacaaagttcattgatgtcgaaggatatatacagtgttagaaattaggactgtttagaaaaacaggaatacaatggttgtttttatcatagtgtacacatttagcttgtggtaaatgactcacaaaactgattttaaaatcaagttaatgtgaattttgaaaattactacttaatcctaattcacaataacaatggcattaaggtttgacttgagttggttcttagtattatttatggtaaataggctcttaccacttgcaaataactggccacatcattaatgactgacttcccagtaaggctctctaaggggtaagtaggaggatccacaggatttgagatgctaaggccccagagatcgtttgatccaaccctcttattttcagaggggaaaatggggcctagaagttacagagcatctagctggtgcgctggcacccctggcctcacacagactcccgagtagctgggactacaggcacacagtcactgaagcaggccctgtttgcaattcacgttgccacctccaacttaaacattcttcatatgtgatgtccttagtcactaaggttaaactttcccacccagaaaaggcaacttagataaaatcttagagtactttcatactcttctaagtcctcttccagcctcactttgagtcctccttggggttgataggaattttctcttgctttctcaataaagtctctattcatctcatgtttaatttgtacgcatagaattgctgagaaataaaatgttctgttcaactt

SEQ ID NO: 12357 - protein, 401 aa, Homo sapiens
MMGLGNGRRSMKSPPLVLAALVACIIVLGFNYWIASSRSVDLQTRIMELEGRVRRAAAERGAVELKKNEFQGELEKQREQLDKIQSSHNFQLESVNKLYQDEKAVLVNNITTGERLIRVLQDQLKTLQRNYGRLQQDVLQFQKNQTNLERKFSYDLSQCINQMKEVKEQCEERIEEVTKKGNEAVASRDLSENNDQRQQLQALSEPQPRLQAAGLPHTEVPQGKGNVLGNSKSQTPAPSSEVVLDSKRQVEKEETNEIQVVNEEPQRDRLPQEPGREQVVEDRPVGGRGFGGAGELGQTPQVQAALSVSQENPEMEGPERDQLVIPDGQEEEQEAAGEGRNQQKLRGEDDYNMDENEAESETDKQAALAGNDRNIDVFNVEDQKRDTINLLDQREKRNHTL

SEQ ID NO: 12358 - DNA, 2442 bp, Homo sapiens
  CDS (154)..(1707)
gtgaaaggagggaacgcaggtgagaaagcgagacaggcaggtagggaaatcgtgaggtgagcgtgatcctagctccttgtggcagagcctagagagaaggcgaggacgctgaagaaccaggcggacagctggcagagagagaagttggctagcatggaatcaccagaggagcctggagcatccatggatgagaactactttgtgaactacactttcaaagatcggtcacattcaggccgtgtggctcaaggcatcatgaaactgtgtctagaggaggagctctttgctgatgtcaccatttcggtggaaggccgggagtttcagctccatcggctggtcctctcagctcagagctgcttcttccgatccatgttcacttccaacctgaaggaggcccacaaccgggtgattgtgctgcaggatgtcagcgagtctgttttccagctcctggttgattatatctaccatgggactgtgaaacttcgagctgaggagttgcaggaaatttatgaggtgtcagacatgtatcagctgacatctctctttgaggaatgctctcggtttttggcccgcacagtgcaagtgggaaactgccttcaggtgatgtggctggcagatcggcacagtgatcctgagctctatacggctgccaagcactgtgccaagacccacctggcccagctgcagaatacagaggaatttctccacttgccccaccgcttactcacagatatcatctcggatggagttccgtgttctcagaacccaacagaggcaatagaagcctggatcaactttaataaagaggaaagagaggcttttgcagagtcactcaggacaagcttgaaggaaattggggagaatgtgcacatttacctgattgggaaagagtcatctcgtacccactcgttggctgtgtccttgcactgtgcagaagatgactccatcagtgtaagtggccaaaacagtttgtgccaccagatcactgcggcctgcaagcatggtggagacttgtatgtggtgggagggtccatcccacggcgcatgtggaagtgcaacaatgccaccgttgactgggagtggtgtgctcctttgcctcgggaccggctccagcacaccctggtgtctgtgcccgggaaagatgccatatattcactgggtggcaagacactgcaagataccctctccaacgcagtcatttattatcgcgtaggtgataatgtgtggacagagacaactcagctagaggtggctgtgtcaggggctgctggtgccaacctcaacgggatcatctacttactagggggggaggagaatgatctggacttctttaccaaaccttcccgactcatccagtgctttgacacagagacagacaaatgccatgtgaagccctatgtgctgccctttgcaggccgcatgcacgcagctgtgcataaagatctggtgttcatcgtggctgaaggggactccctggtgtgctacaatcccttgctagacagcttcacccggctttgccttcctgaggcctggagctctgccccatccctctggaagattgccagctgtaacgggagcatctatgtcttccgggaccgatataaaaagggggatgccaacacctacaagcttgaccctgccacttcagccataactgtcacaagaggtattaaggtgctgcttaccaatttgcagtttgtgttggcctaaggctgtggggaggggaggagaactgctcactccttttccctccccatacaaactcaaagtcccctgggccccaattcagagttatgttttttttggcacatactagaaaggcagtgcctcagcccttccctgaatccatggaggtgttctgtttggggctttttagactgctgctgctcagctggttgcttgaactgacagtaggccagcctgttctctgccattccctagtcatcctgtgcctcaccacagcttgcttagagcaagccttttctcagaccttaggcacagcctctcctctttacctgatcaatgttaaatgtaagcacccctgatcccaggacataaggaaagatgcccaattgtacttttgttctatagcctgtgaaatggctagttgatcatttttccacaaagaattaggtgttaagagttttccttcaggctttacttaggagaatggactaagctgaaggtgtacttcaccagcaagagtcaactctagaattcaggatgttccttctattgttttcttagccatctgtcaggaaatgtaactttggttttatttttggcttattccaaggggtaagccagaaaatagaaatgattatttctgattaatagcagaaactttttcaatctcaaatatataaggtgtctgctcttttaaaagctctaagctaagtcaagagctaggaactgttgatacaaataaaagtttttgaaggg

SEQ ID NO: 12359 - protein, 518 aa, Homo sapiens
MESPEEPGASMDENYFVNYTFKDRSHSGRVAQGIMKLCLEEELFADVTISVEGREFQLHRLVLSAQSCFFRSMFTSNLKEAHNRVIVLQDVSESVFQLLVDYIYHGTVKLRAEELQEIYEVSDMYQLTSLFEECSRFLARTVQVGNCLQVMWLADRHSDPELYTAAKHCAKTHLAQLQNTEEFLHLPHRLLTDIISDGVPCSQNPTEAIEAWINFNKEEREAFAESLRTSLKEIGENVHIYLIGKESSRTHSLAVSLHCAEDDSISVSGQNSLCHQITAACKHGGDLYVVGGSIPRRMWKCNNATVDWEWCAPLPRDRLQHTLVSVPGKDAIYSLGGKTLQDTLSNAVIYYRVGDNVWTETTQLEVAVSGAAGANLNGIIYLLGGEENDLDFFTKPSRLIQCFDTETDKCHVKPYVLPFAGRMHAAVHKDLVFIVAEGDSLVCYNPLLDSFTRLCLPEAWSSAPSLWKIASCNGSIYVFRDRYKKGDANTYKLDPATSAITVTRGIKVLLTNLQFVLA

SEQ ID NO: 12360 - DNA, 3323 bp, Homo sapiens
  CDS (145)..(1740)
ttggatattgaatctgtaattaccttttattgtaaatcacgtaacattaaatatagcacatcccttagctggatacatctactgaaaccattggtgcatcttcaactgccacgcagcgatttatacaactgcttttatgccataatgaataagtacattcccagggattgttcccagaaagggagaccatttcatctcttcaggttgctcatccaataccatgagcctgagctttgttcttatcttgatacaaagaaaattactccagactcctatgcactcaactggcttggaagtctttttgcatgttactgttccactgaagtcactcaggcaatatgggatggatatctacaacaagcagatccattttttatttatttcttaatgttaattatccttgttaatgcaaaagaagttattttaacacaagagtcagacagcaaagaagaagttatcaagttcttggaaaatactccatccagtctgaatatagaagatatagaagaccttttctctctggctcagtattattgcagcaaaacaccggcttcttttaggaaggataatcaccatctctttggtagtactttgttgggaattaaggatgatgatgcagatctgagtcaggctctttgtctggccatctccgtgtcagagatccttcaagcgaatcagctacaaggggaaggagtccggttctttgtggtggattgccgtcctgcagaacaatataatgctgggcatttatcaactgctttccacttagattcagacctgatgcttcagaatccatctgagtttgcacagtcagtaaaatccttgctggaagcacagaagcagtccattgagtctggctccatagctggtggggagcacctctgttttatgggcagtggcagggaggaagaagacatgtatatgaacatggtcctggcacactttttacagaaaaacaaagaatatgtgagtattgccagtggaggatttatggcactgcagcagcacctggcagacattaatgtggatggaccagaaaatggatatggccattggattgctagtacctcaggctcaaggagcagtatcaattctgttgatggtgaatctcctaatggctcaagtgatagaggaatgaaatcactagtaaataaaatgactgtggctttgaagacaaaatccgttaatgtcagggaaaaagttatcagttttatagagaatacatcaactcctgtggatcggcatgtgagcagcagtgacagagtgggcaagccttaccgtggcgtaaagcctgttttcagcattggggatgaagaagaatacgacacagatgaaattgacagttcttcaatgtcagatgatgatagaaaagaggttgtaaacattcagacttggataaacaaaccagatgtcaaacatcattttccttgtaaagaagtaaaagaaagtggacacatgtttcccagtcatctgttggttactgcaacacatatgtactgtttaagggagattgtttcacggaaaggattggcttatatacagtctcgacaagcgctgaattctgtagttaaaattacatccaaaaaaaaacatcctgaactcattaccttcaagtatggaaatagcagtgcttcaggaatagaaatcttggcaatcgaaaggtatttgattccaaatgcaggggatgcaactaaagccataaaacagcagatcatgaaagttttggatgctttggaaagttaatataaaagaaaattatataaaaagaaattaagacaaccaagagaaacatggacatatacctcctgactgaatactaactggagacctttcatttgctcatggggctgcttaaatagcaggtctaagaaagtgtaaattattataatcaatctgtggacagtaaactttttaaaaatttttcttctgcattttggttttataaaatgatgtattataaaggtcagttattaaattactttgaagtaactgaccctgtgcccttatggactaagtaagggtacagaatgcagttctgttttgaagagctgttttaagggaacatgcatcactttcgggttcaaaaacaactgtacacatacatatctgcagtgtcttcactgaaaattagagatagaattagttgaagagacttccttaattgctacattgttttactcactgagcaatatcagaaactaaaacatagattaataattcactcactgtttctattcttcttaaaaagagtgaaatctttttaatggaatggttgaagattcctgccaactcaaaatacagtacagctagtaaaatgttgaaacatcagtttctaaatcacctttgctccattagctaattttttggacactaaatgcttcaaagataagaaacttcatcctaatgatttctaaagagcagttaaaagcattaaaataagtaggtaggctgttaagattaaaattaacattttggggacagaattgtgtctgtaaaaatgtcattggttttattacaagtggattattttattcatattttaaaacaaatgtttaagccacattgatttatcctcattgaggattatggtctgtgaccacagtaatatccacttatataaatgccaaataatcagagagcttataaagtacaattgtttttgtcatcattttctgaatttctttctcttcttttggttttgtcctctcattgaagttccagtggtttgaaattagttttggacacattgtcttaatgtactgaaaattgctctgctgtattttgcagcgttcttcatttaatttataatggtccatattagacacatttggtaagagaagtccaggaacacatttagggccatggaatagtattttgtaaaatccatttgggaagttgcaatacccacaatctgacatgtcctaaaatgtaagggattatctctaaggggttgatgggagaaatatttagatgtaccctgttaacagccagtcattttgatttacttatggaaatcaagtgaataaaaggcaacataatttgggaaattttattctaatatctaataaaaacagtttgagtggttgaagacatctgcatgaaattgcacctaggtgcattacttgatataactctcccctaaaactgttgtaattgcattttttcccttttcttggcacccctttagaaatgtactgaagtctcatttttcacccatttcagccatgggacatttttcataatattaatgtaaagatgtttgtgttactgtttataaattacaattgtaaataaattactagtttgcccaaaactttgttctt

SEQ ID NO: 12361 - protein, 532 aa, Homo sapiens
MNKYIPRDCSQKGRPFHLFRLLIQYHEPELCSYLDTKKITPDSYALNWLGSLFACYCSTEVTQAIWDGYLQQADPFFIYFLMLIILVNAKEVILTQESDSKEEVIKFLENTPSSLNIEDIEDLFSLAQYYCSKTPASFRKDNHHLFGSTLLGIKDDDADLSQALCLAISVSEILQANQLQGEGVRFFVVDCRPAEQYNAGHLSTAFHLDSDLMLQNPSEFAQSVKSLLEAQKQSIESGSIAGGEHLCFMGSGREEEDMYMNMVLAHFLQKNKEYVSIASGGFMALQQHLADINVDGPENGYGHWIASTSGSRSSINSVDGESPNGSSDRGMKSLVNKMTVALKTKSVNVREKVISFIENTSTPVDRHVSSSDRVGKPYRGVKPVFSIGDEEEYDTDEIDSSSMSDDDRKEVVNIQTWINKPDVKHHFPCKEVKESGHMFPSHLLVTATHMYCLREIVSRKGLAYIQSRQALNSVVKITSKKKHPELITFKYGNSSASGIEILAIERYLIPNAGDATKAIKQQIMKVLDALES

SEQ ID NO: 12362 - DNA, 3043 bp, Homo sapiens
  CDS (465)..(2693)
ggattttttctgaaccagccaggaaataccggaacccaccaaactttaaacaccagcctaaattattcctgttcttttaagcaggcagcagaaatgacagaaacccgttaacagaaaaaaaaaaaataatgcttttcatttgaactcctgtgcattttctttttaacttatatgtgttcctaattttccttactctttttgtttgtttgtttcttagtgtggtttattgacaatcatttacaatgccgaagagtgctgtagtgagccagcacagtgggtaacacagcaacggagaacagatgcaggtttgaggaatttaacttgctaaaaccttgaactgaagtcttagagattggaacatacgggtttgtataaataggcttttaagccctgtttgcaatgggttactgataggagaaacttgcttgtggaatgtcagctgcgtgagctcactgtcagacaagatggaagaagaagggctggagtgtccaaactcttcctctgaaaaacgctattttcctgaatccctggattccagcgatggggatgaggaagaggttttggcctgtgaggatttggaacttaacccctttgatggattgccatattcatcacgttattataaacttctgaaagaaagagaagatcttcctatatggaaagaaaaatactcctttatggagaacctgcttcaaaatcaaatcgtgattgtttcaggagatgctaaatgtggtaagagcgctcaggttcctcagtggtgtgctgaatattgtctttccatccactaccagcacgggggcgtgatatgcacacaggtccacaagcagactatggtccagctcgccctgcgggtggcggatgaaatggatgttaacattggtcatgaggttggctacgtgatccctttcgagaactgctgtaccaacgaaacaatcctgaggtattgtactgatgatatgctgcaaagagaaatgatgtccaatccttttttgggtagctatggggtcatcatcttagatgatattcatgaaagaagcattgcaaccgatgtgttacttggacttcttaaagatgttttactagcaagaccagaactgaagctcataattaactcctcacctcacctgatcagcaaactcaattcttattatggaaacgtgcctgtcatagaagtgaaaaataaacaccctgtggaggttgtgtaccttagtgaggctcaaaaggattcttttgagtctattttacgccttatctttgaaattcaccactcgggtgagaaaggtgacattgtagtctttctggcctgtgaacaagatattgagaaagtctgtgaaactgtctatcaaggatctaacctaaacccagatcttggagaactggtggttgttcctttgtatccaaaagagaaatgttcattgttcaagccactcgatgaaacagaaaaaagatgccaagtttatcaaagaagagtggtgttaactactagctctggagagtttttgatctggagcaactcagtcagatttgttatcgatgtgggtgtggaaagaagaaaggtgtacaacccgagaataagagcaaactcgctcgtcatgcagcccatcagccagagccaggcagagatacgcaagcagattcttggctcatcttcttcaggaaaatttttctgcctgtacactgaagaatttgcctccaaagacatgacgccactgaagccagcagaaatgcaggaagccaacctaacaagcatggtgctttttatgaagaggatagacattgcgggcctaggccactgtgacttcatgaacagaccagcaccagaaagtttgatgcaggcatcggaagacttagattatctggcagcactggataatgatggaaatctttctgaatttggaatcatcatgtcagagtttcctcttgatccacaactctcgaagtctatcttagggtcctgtgaatttgactgtgtggatgaagtgctaacaatcgcggccatggtaacagctccaaattgcttttcacatgtgccacatggagctgaagaggctgccttgacttgttggaagacatttttacatcccgaaggagatcactttaccctcatcagcatttacaaggcttaccaagacacaactctgaattctagcagtgagtactgtgtggaaaagtggtgtcgtgattacttcctcaactgttcagcactcagaatggcagatgttattcgagctgaactcttagaaattatcaagcgaatcgagcttccctatgcagaacctgcttttggctccaaggaaaacactctaaacataaagaaagctcttctgtccggttactttatgcagattgctcgggatgttgatggatcaggtaactacttaatgctgacacataagcaggttgctcagctgcatcccctgtctggttactcaatcaccaagaagatgccagagtgggtcctcttccataaattcagcatttctgagaacaactacatcaggattacctcagaaatctctcttgaactatttatgcagctggtaccacaatactatttcagtaatctgcctcctagtgaaagtaaggacattctacagcaagtagtggatcacctatcccctgtgtcaacaatgaataaggaacagcaaatgtgtgagacgtgccctgaaactgaacagagatgcactctccagtgactccccagcaaacacaaggtgcagcagggtcccaaaggtagctggatggctgaactgctggatatgggagatacatgacgcgaagacggatttcacatccacaggacggtcttgaagaaaataacactgtgtatattattttaaaataaaaaatagaagtttttattgagttctttaaattacgactccatgcttttcttcttcttggaaaagtttttaaatcaaccactcataatttgaccaaaattttaaaaaactggtattttgtaaatgtgtcagagacacatgggacagaaccctactttttgtagaggaacttaatctgaataaagtctgagtttttcagt

SEQ ID NO: 12363 - protein, 743 aa, Homo sapiens [sequence omitted]

SEQ ID NO: 12364 - DNA, 3444 bp, Homo sapiens
  CDS (24)..(2891)
agcggcccggccgggggggcaagatggcggcggcagtaggggttcgtggccggtacgagctgccgccttgctccggcccaggctggctcctcagcctttccgccttgctgagtgtggcggcacgaggggccttcgccaccacgcactgggtcgtcacggaggacgggaaaatccagcagcaggtggattcaccaatgaacttgaagcatcctcatgacctagtcatattaatgagacaagaagcaacagttaactacctcaaagaattagagaaacaattagttgctcaaaaaattcacatagaagagaatgaggacagagacacaggactggaacagagacataataaagaagacccagactgcatcaaagccaaggtgcccttaggggacctggatctatatgatggcacatacataactttggagagcaaagacatcagtcctgaagattatatagacacagaatctcctgtccctccagacccagagcaacctgattgtactaaaattctagaacttccatgtagtatacatgcttttcagcacttgagaggtgtacaggagagagttaatctttctgcacctctgctacctaaagaagacccaatcttcacatatttatctaaacggttaggaaggagtatagatgacataggtcacctcattcatgaaggcctacagaagaacacttcctcgtgggtactgtataacatggcttcattttactggagaattaagaatgagccatatcaggtagtagaatgtgccatgcgagcacttcacttctcttccaggcacaataaagacattgccctggtcaacctggcaaacgttctacacagagcacacttctctgctgatgctgctgtcgtggtccatgcagctctggatgacagtgacttcttcaccagctattacactttggggaatatatatgcaatgcttggggaatataaccactcagtgctctgttatgaccacgctttgcaggccagacctgggtttgagcaagctataaagaggaagcatgctgtcctatgtcagcaaaaactggagcagaaattggaggctcagcatagatctctccagcgaacactgaatgagttaaaagagtatcaaaagcagcatgaccactacctgagacagcaggaaatcctagaaaaacataaactgattcaggaggagcaaatcttaagaaatatcattcatgagactcagatggcaaaagaggcacaattaggaaatcatcagatatgccgactggtcaaccagcagcatagtttacattgccggtgggaccagcctgtacgctatcatcgtggagatatctttgaaaatgtggactatgttcagtttggtgaggattcatcaacctccagtatgatgtctgtgaactttgatgttcaatcaaatcagagtgatatcaatgattcggtcaagtcttctcccgtagcccattctattctctggatttggggcagggactctgatgcatatagggacaaacagcatattctatggcctaaaagagcagattgtacagaaagctaccctagagtccctgttggtggggaattgccaacgtattttctgcctccggaaaacaaaggactcaggatccacgaactcagcagtgatgattattctacagaagaagaggcccaaacccctgactgttccataactgacttcagaaaaagccacactctgtcctacttagtcaaagaattagaggttcgcatggatctgaaagccaaaatgccagatgaccatgcacgaaaaattttgctttcccgtattaataactatactatcccagaagaagaaattgggtctttcttatttcatgctattaataagccaaatgctcctatctggctcatactcaatgaagctggactatactggagagcagtaggaaatagcacttttgctattgcctgtcttcagagggctttgaatttagctccacttcaataccaagatgttcctcttgtcaacttggccaaccttttgattcattacggccttcatcttgatgccactaagctgctacttcaagctttggccatcaatagctctgagcctctgacctttttgagcctgggaaatgcttaccttgctctgaagaatatcagtggggcacttgaggcctttagacaggccttgaaattaaccaccaaatgtccagagtgtgaaaacagcctgaagttgatccgctgtatgcagttttatccttttctgtacaacatcacttcttctgtttgcagtggtaattgtcatgagaaaaccctggacaacagccgtgacaaacagaaatattttgacaactcacagtcactggatgctgctgaagaagagccctctgagagaggaacagaggaggaccctgtattctctgttgagaattcagggagggactcagatgcccttagacttgaaagtacggtggttgaggagagcaatggttctgatgagatggagaattcagatgaaaccaaaatgtcagaagaaatactggctttggtggatgaatttcaacaggcatggcctttggaaggctttgggggtgcactagagatgaaagggcggcgtctagacttacaaggaatacgggtgctgaagaaaggtccccaggatggagtggccagaagctcttgctatggagactgcagaagtgaagatgatgaagcaacagaatggattacattccaggtcaaacgtgtaaagaaacccaaaggagatcataagaaaactcctggaaaaaaagtagaaacaggtcagatagaaaatggacatcgttaccaagcaaacctagagatcactggccccaaggtggcatctcctgggccacaagggctactagactggaagaccaggaaagtgccatagacataatgtaactggatttcagcaaggcatttaacagagcctcttatgatatccttgtgaaccagatggagagatgtgggcttgaagccttcccattgcctacaggataaaattcaaacttcctagtgtggtgtacaagaccctttacagcccgcctctgtgtacccttcaacaccattctctgaaccaaccatgctcatgtttttacctcagtgcctttgcacatgctattccctctgcctggaatgccctgtgccccctctgccctctgccgtgctaaaatatcactcatccttaaacttcaaaatcaagtgccatctcttccttgttaccttcaggcagaattagttactctttcctctgtgcaattgttctatatcttcgctctagctcttttcctgttgtattgtaatgatttgtttatgtttaccttccttactagactgtgagctcaagagcaggccgtcttaattattcctttctgtacccctagtgtcttttatggttctcagccccttataacaggtgctcaataaatatttttcaaatg

SEQ ID NO: 12365 - protein, 956 aa, Homo sapiens
MAAAVGVRGRYELPPCSGPGWLLSLSALLSVAARGAFATTHWVVTEDGKIQQQVDSPMNLKHPHDLVILMRQEATVNYLKELEKQLVAQKIHIEENEDRDTGLEQRHNKEDPDCIKAKVPLGDLDLYDGTYITLESKDISPEDYIDTESPVPPDPEQPDCTKILELPCSIHAFQHLRGVQERVNLSAPLLPKEDPIFTYLSKRLGRSIDDIGHLIHEGLQKNTSSWVLYNMASFYWRIKNEPYQVVECAMRALHFSSRHNKDIALVNLANVLHRAHFSADAAVVVHAALDDSDFFTSYYTLGNIYAMLGEYNHSVLCYDHALQARPGFEQAIKRKHAVLCQQKLEQKLEAQHRSLQRTLNELKEYQKQHDHYLRQQEILEKHKLIQEEQILRNIIHETQMAKEAQLGNHQICRLVNQQHSLHCRWDQPVRYHRGDIFENVDYVQFGEDSSTSSMMSVNFDVQSNQSDINDSVKSSPVAHSILWIWGRDSDAYRDKQHILWPKRADCTESYPRVPVGGELPTYFLPPENKGLRIHELSSDDYSTEEEAQTPDCSITDFRKSHTLSYLVKELEVRMDLKAKMPDDHARKILLSRINNYTIPEEEIGSFLFHAINKPNAPIWLILNEAGLYWRAVGNSTFAIACLQRALNLAPLQYQDVPLVNLANLLIHYGLHLDATKLLLQALAINSSEPLTFLSLGNAYLALKNISGALEAFRQALKLTTKCPECENSLKLIRCMQFYPFLYNITSSVCSGNCHEKTLDNSRDKQKYFDNSQSLDAAEEEPSERGTEEDPVFSVENSGRDSDALRLESTVVEESNGSDEMENSDETKMSEEILALVDEFQQAWPLEGFGGALEMKGRRLDLQGIRVLKKGPQDGVARSSCYGDCRSEDDEATEWITFQVKRVKKPKGDHKKTPGKKVETGQIENGHRYQANLEITGPKVASPGPQGLLDWKTRKVP

SEQ ID NO: 12366 - DNA, 2864 bp, Homo sapiens
  CDS (128)..(1522)
acacatccgcgcagaccaggaagcggatcccgtggattgaaggtcgcaccgcggcggattgacttctaaagacttggtacgtgaggaaaaaacacggaagaggaagaggaaagcaaaggagtcagggatggctcttcctcagggtctactgacattcagggatgtggccatagaattctctcaggaggagtggaaatgcctggaccctgctcagaggactctatacagagacgtgatgctggagaattataggaacctggtctccctggatacctcttccaaatgcatgatgaagatgttctcatcaacaggacaaggcaatacagaagtggtccacacagggacattgcaaatacatgcaagtcatcacattggagatacttgcttccaggaaattgagaaagatattcatgactttgtgtttcagtggcaagaaaatgaaacaaatggccatgaagcactcatgacaaaaatcaaaaagttgatgagtagtacagagcgacatgatcaaaggcatgctggaaacaaacctattaaaaatgagcttggatcaagctttcattcgcatctgcctgaagtgcacatatttcaccccgaagggaaaattggtaatcaagttgagaaggccatcaacgatgctttctcagtttcagcatcccaacgaatttcctgtaggccaaaaactcgtatttctaataagtataggaataatttcctccagtcttcattactcacacaaaaacgggaagtacacacaagagaaaaatctttccaacgtaatgagagtggcaaagcctttaatggtagctcactcttaaaaaaacatcagataatccatttaggagacaaacagtataaatgtgatgtatgcggcaaggactttcatcagaagcgataccttgcatgccatagatgtcacactggtgagaatccttacaagtgtaatgagtgtggcaagacattcagtcacaattcagccctgttagttcacaaggcaattcatactggagagaaaccttacaagtgtaatgaatgtggcaaggtttttaatcaacaatcaaaccttgcacgtcatcatagagttcatactggagagaaaccttacaaatgtgaagaatgtgacaaagttttcagtcgcaaatcacaccttgaaagacataggagaattcacactggagagaaaccatacaaatgtaaggtttgtgacaaggctttcagacgtgattcacacctggcacaacatactgtaattcacactggagagaaaccttacaagtgtaatgagtgtggcaagacctttgttcaaaattcatctcttgtaatgcataaggtcattcatactggagagaaacgttacaagtgtaatgaatgtggcaaggtttttaatcacaaatcaaaccttgcatgtcatcatagacttcatactggagagaaaccttacaagtgtaatgaatgtggcaaggtttttaatcgaaaatcaaaccttgaacgtcatcatagacttcatactggaaagaaatcttagaagtgtaaatttgcaaggtttttaggcaacagtcaaaccttgcatgtcatcatagactttatactggagagaaaccttacaaatgtgaagaatgtgacaaaagttttcaatttcaaatcactccttgaaatacataggagagttcatactggagagaaaccatacaaatgtaaggtttgtgacaaggatttcgggtgtgattcacacctggcccaacatactggaattcacactggaaaggaactgtacaagtgtaatgagtgtggcagagcctttggtggtcagtcaacacttactcaccatcaagcaatccatggtatagggaaacttgactaatgtaatgattgtcacaaagtcttcagtaatattacagccattgcaaaacattggagaatccataatgaaggaggtcttacaagtgtaataaatgtggcaagtttttcagacatcattcataacttgcagttcattggcgatcttatacaggagagaaatcttacaaatgtgatgattgtggcaaggtcttcagtcaagcttcatcttttgcaaaacgggagaattcatacaggagagaaacctcacaagtgtgatgattgtgagcaaagcctttacttcacgttcacaccacattagatatcagaggatccatactggacagaaatcttacaaacgtcctatgtgtggcaaggtcttcagtccgaggttactccttgcagaatatcataacgttcatttttgaggtaatagttacaaatgcggtgagcacagcaaaccatcaaggattgacagtagagtcaattcagaattgacttgagtttgagttgacttaaaacattcagttgaagcattaattgacattaaagtgtttatgttaagaggattgggccaggcgtgtggctcacgcctgtaaacccagcactttaggagcccaaggtggatagatcacttgaggtcatgagtttgagatcagcctggccaacagacgtgagtcacttttcccagcctgctttttgtttctttaacaaaaaccaataggggtttttataggtattgtgttgaatctgaatcacattggcttatataataacaatattgatttttccaaaccatcaatgtgggttgtatatatatgtttttaatcattttggttaatgtttgtagatttcaaggtgtgaaattctcagtttttttatgtttattcctaagtatttcttactttaagatctctagcaaatggaagtgttttttaattttcgtttaaattttttattgtttatggaaattcaattaatttttggtgctgctattgcattgtgcaaatccactgaatgtgttgatt

SEQ ID NO: 12367 - protein, 465 aa, Homo sapiens
MALPQGLLTFRDVAIEFSQEEWKCLDPAQRTLYRDVMLENYRNLVSLDTSSKCMMKMFSSTGQGNTEVVHTGTLQIHASHHIGDTCFQEIEKDIHDFVFQWQENETNGHEALMTKIKKLMSSTERHDQRHAGNKPIKNELGSSFHSHLPEVHIFHPEGKIGNQVEKAINDAFSVSASQRISCRPKTRISNKYRNNFLQSSLLTQKREVHTREKSFQRNESGKAFNGSSLLKKHQIIHLGDKQYKCDVCGKDFHQKRYLACHRCHTGENPYKCNECGKTFSHNSALLVHKAIHTGEKPYKCNECGKVFNQQSNLARHHRVHTGEKPYKCEECDKVFSRKSHLERHRRIHTGEKPYKCKVCDKAFRRDSHLAQHTVIHTGEKPYKCNECGKTFVQNSSLVMHKVIHTGEKRYKCNECGKVFNHKSNLACHHRLHTGEKPYKCNECGKVFNRKSNLERHHRLHTGKKS

SEQ ID NO: 12368 - DNA, 2636 bp, Homo sapiens
  CDS (116)..(2635)
aaatccagcagctcttccagctggtcagacagttcagctaactggacaacctaacataactccatcttcttcaccatcacctgtcccagctactaataaccaagtccctactgccatgtcgtcgtcctctacccctcaatcacagggaccacctcctactgtcagtcaaatgttatctgtgaaaaggcagcaacagcagcaacattcaccagcacccccaccacagcaggtacaagtacaagttcagcagccccaacgagtacagatgcaagttcaacctcaacagtcgaatgcaggagttggtcagcctgcctctggtgagtcgagtctgattaaacagcttctgcttccgaaacgtggtccttcaacaccaggtggtaagcttattctcccagctccacagattcctccccctaataatgcaagagctcctagccctcaggtggtctatcaggtggccagtaaccaagccgcaggttttggagtgcaggggcaaactccagctcagcagctattggttgggcagcaaaatgttcagttggtcccaagtgcaatgccaccctcagggggagtacaaactgtgcccatttcgaacttacaaatattgccaggtccactgatctcaaatagcccagcaaccattttccaagggacttctggcaaccaggtaaccataacagttgtgccaaatacgagttttgcacctgcaactgtgagtcagggaaatgcaactcagctcattgctccagcaggaattaccatgagcggaacgcagacaggagttggacttccagtacaaacgcttccagccactcaagcatctcctgctggacaatcatcatgtactactgctactcccccattcaaaggtgataaaataatttgccaaaaggaggaggaagcaaaggaagcaacaggtttacatgttcatgaacgtaaaattgaagtcatggagaacccgtcctgccgacgaggagccacaaacaccagcaatggggatacaaaggaaaatgaaatgcatgtgggaagtcttttaaatgggagaaagtacagtgactcaagtctacctccttcaaactcagggaaaattcaaagtgagactaatcagtgctcactaatcagtaatgggccatcattggaattaggtgagaatggagcatctgggaaacagaactcagaacaaatagacatgcaagatatcaaaagtgatttgagaaaaccgctagttaatggaatctgtgattttgataaaggagatggttctcatttaagcaaaaacattccaaatcataaaacttccaatcatgtaggaaatggtgagatatctccaatggaaccacaagggactttagatatcactcagcaagatactgccaaaggtgatcaactagaaagaatttctaatggacctgtattaactttgggtggttcatctgtgagcagtatacaggaggcttcaaatgcggcaacacagcaatttagtggtactgatttgcttaatggacctctagcttcaagtttgaattcagatgtgcctcagcaacgcccaagtgtagttgtctcaccacattctacaacctctgttatacagggacatcaaatcatagcagttcccgactcaggatcaaaagtatcccattctcctgccctatcatctgacgttcggtctacaaatggcacagcagaatgcaaaactgtaaagaggccagcagaggatactgatagggaaacagtcgcaggaattccaaataaagtaggagttagaattgttacaatcagtgaccccaacaatgctggctgcagcgcaacaatggttgctgtgccagcaggagcagatccaagcactgtagctaaagtagcaatagaaagtgctgttcagcaaaagcaacagcatccaccaacatatgtacagaatgtggtcccgcagaacactcctatgccaccttcaccagctgtacaagtgcagggccagcctaacagttctcagccttctccattcagtggatccagtcagcctggagatccaatgagaaaacctggacagaacttcatgtgtctgtggcagtcttgtaaaaagtggtttcagacaccctcacaggttttctaccatgcagcaactgaacatggaggaaaagatgtatatccagggcagtgtctttgggaaggttgtgagccttttcagcgacagcggttttcttttattacccacttgcaggataagcactgttcaaaggatgccctacttgcaggattaaaacaagatgaaccaggacaagcaggaagtcagaagtcttctaccaagcagccaactgtagggggcacaagctcaactcctagagcacaaaaggccattgtgaatcatcccagtgctgcacttatggctctgaggagaggatcaagaaaccttgtctttcgagattttacagatgaaaaagagggaccaataactaaacacatccgactaacagctgccttaatattaaaaaatattggtaaatattcagaatgtggtcgcagattgttaaagagacatgaaaataacttatcagtgctagccattagtaacatggaagcttcctccacccttgccaaatgcctttatgaacttaattttacagttcagagtaaggaacaag

SEQ ID NO: 12369 - protein, 840 aa, Homo sapiens
MSSSSTPQSQGPPPTVSQMLSVKRQQQQQHSPAPPPQQVQVQVQQPQRVQMQVQPQQSNAGVGQPASGESSLIKQLLLPKRGPSTPGGKLILPAPQIPPPNNARAPSPQVVYQVASNQAAGFGVQGQTPAQQLLVGQQNVQLVPSAMPPSGGVQTVPISNLQILPGPLISNSPATIFQGTSGNQVTITVVPNTSFAPATVSQGNATQLIAPAGITMSGTQTGVGLPVQTLPATQASPAGQSSCTTATPPFKGDKIICQKEEEAKEATGLHVHERKIEVMENPSCRRGATNTSNGDTKENEMHVGSLLNGRKYSDSSLPPSNSGKIQSETNQCSLISNGPSLELGENGASGKQNSEQIDMQDIKSDLRKPLVNGICDFDKGDGSHLSKNIPNHKTSNHVGNGEISPMEPQGTLDITQQDTAKGDQLERISNGPVLTLGGSSVSSIQEASNAATQQFSGTDLLNGPLASSLNSDVPQQRPSVVVSPHSTTSVIQGHQIIAVPDSGSKVSHSPALSSDVRSTNGTAECKTVKRPAEDTDRETVAGIPNKVGVRIVTISDPNNAGCSATMVAVPAGADPSTVAKVAIESAVQQKQQHPPTYVQNVVPQNTPMPPSPAVQVQGQPNSSQPSPFSGSSQPGDPMRKPGQNFMCLWQSCKKWFQTPSQVFYHAATEHGGKDVYPGQCLWEGCEPFQRQRFSFITHLQDKHCSKDALLAGLKQDEPGQAGSQKSSTKQPTVGGTSSTPRAQKAIVNHPSAALMALRRGSRNLVFRDFTDEKEGPITKHIRLTAALILKNIGKYSECGRRLLKRHENNLSVLAISNMEASSTLAKCLYELNFTVQSKEQ

SEQ ID NO: 12370 - DNA, 3030 bp, Homo sapiens
  CDS (74)..(2398)
agcatggcactcagcagacaatccatgtctcatctattactctctgataacaatagaagataatggttgccaaatgtcagatgcagttactgtagaagtcactcaatataatccaccttttcagtctgaagacctgattttgtgtcagttgacggtcccaaacttttcaaaccagactgcctatctgtataacgaaagtgctgtctatgtgtgctccacaggaactgggaaattttctcttccccaggagaaaattgtctttaatgcacaaggagatagtgttttaggtgctggtgcctgtggtggtgttcctatcattttttctagaaacagtggactggtgtctattacttcaagggaaaatgtgtctatattggcagaagacttggaagggtctttagcatcttcagttgctggaccaaacagtgagagtatgatttttgagaccactacaaagaatgaaactatagcccaggaagataaaatcaagttgctgaaagctgcctttctgcaatactgcagaaaagatttaggtcatgctcaaatggtggttgatgagctcttttcctctcactctgatttggattctgattctgaactagacagggcagttacccaaatcagtgtagacctgatggatgactacccagcatctgacccacggtgggctgagtctgtccctgaggaagcacctgggttcagcaatacgtcactgattatccttcaccagctagaagacaagatgaaagctcactcttttcttatggactttattcatcaagttggcttatttggacgtctaggcagttttccagttagagggacaccgatggccactcgactgttgctctgtgagcatgccgaaaagctgtcagccgccattgttctcaagaaccaccactcccggctttctgaccttgtcaacacagccatattgattgctttgaacaagagggagtatgaaatcccatccaacctgactcctgcagatgtctttttcagggaggtatcccaagtagataccatctgtgagtgcttactggagcatgaggagcaagtcttgagggatgcacctatggattccatcgaatgggctgaagtggtgatcaatgtgaacaatattctcaaggatatgctgcaggctgctagtcattatcgccaaaatagaaactctttgtatagaagagaagaatcactagaaaaagaacctgaatatgttccatggacggcaacaagtggtcctggtggcatccgaacggtaataatacgccagcatgagattgtcctgaaggtggcttatccacaggcagacagcaacctccgaaacatcgtgactgagcagctggtagccctgatcgattgcttcctggatggttatgtttctcagcttaagtctgtggataaatccagtaatcgggaaagatatgacaatctggagatggaatacctacagaaaagatcagatctcttatctcctcttctttcactaggccagtacctgtgggctgcttctctagcagagaaatactgtgactttgatatattggtacaaatgtgtgagcagactgacaaccagagccgactccagcgctacatgacccagtttgctgatcagaatttttcagactttctcttccgttggtatctggagaaaggaaagcgaggcaaattattatctcagcccatttctcagcatggacagttggcaaatcttttgcaagctcatgaacatctcagctggttacatgaaattaatagccaagaattagaaaaggctcatgcaacacttctgggtttggcaaatatggaaactcgttactttgcaaagaagaaaacccttcttggcttgagtaaattggctgcattagcttcagacttttcagaggatatgctacaagaaaaaattgaagaaatggctgagcaggagcgctttctactgcatcaggagaccctacctgaacagctgctggcggagaaacagctaaatctcagtgcgatgccagtattgactgcaccacaactcattggtctatatatctgtgaagaaaatagaagagctaatgaatatgatttcaagaaagctttggacttgttggaatatattgatgaggaagaagatataaatataaatgatctaaaactggaaatcctttgcaaagctcttcagagagataactggtccagttctgatggcaaagatgatccaattgaagtatctaaagacagtatatttgtgaagatcttacagaaacttttaaaagatggcattcagctcagtgagtacttaccggaggtgaaagacctgctacaagcggatcagcttggaagcttaaagtccaatccttacttcgagtttgttttgaaagcaaattatgaatattatgttcagggacaaatataactttttctaaaaatggccattgtttatgaaatctgtataagtgtgtccttatacaaattttaggccataaacaagtgtaagtttgtacaatttcataacatgtatagctgagtttttatactttatatgtaggaagctaatataaaatagttatgtaactgtgattttggttttcagttatgtgacttgttttttccacctgaaatgtgtcagttgttgttcctgtactcggtgccctttctttttactctcacgtggtcccaggttctggagttcttgtcctggttctagctgctcacatgtacaaatcacttctaggcctcagtttctgcgactatgaaaattactagattgcactagcttgtctctaaaattgctgtgactccagatactttgcactgaagagaatctagggtgtttgatatctgtttcagttagggctaatgggaaatgtctagtaagataaatgtcaacttttgctgacttattatgagatgaaaaaccaaaggagagtgggcctaactcatgtgagcttgataactgatgaactcattgggagcattttaaacttttctacataaataataaatgagcactaatgaaagtattttagtgaatgaaacgttaac

SEQ ID NO: 12371 - protein, 775 aa, Homo sapiens [sequence omitted]

SEQ ID NO: 12372 - DNA, 3084 bp, Homo sapiens
  CDS (65)..(2698)
agttggcgggaatggctgctcgcggaggggcagtgtacgcggggccgctgtaggctgtccagcgatggatcccaccgcgggaagcaagaaggagcctggaggaggcgcggcgactgaggagggcgtgaataggatcgcagtgccaaagccgccctccattgaggaattcagcatagtgaagcccattagccggggcgccttcgggaaagtgtatctggggcagaaaggcggcaaattgtatgcagtaaaggttgttaaaaaagcagacatgatcaacaaaaatatgactcatcaggtccaagctgagagagatgcactggcactaagcaaaagcccattcattgtccatttgtattattcactgcagtctgcaaacaatgtctacttggtaatggaatatcttattgggggagatgtcaagtctctcctacatatatatggttattttgatgaagagatggctgtgaaatatatttctgaagtagcactggctctagactaccttcacagacatggaatcatccacagggacttgaaaccggacaatatgcttatttctaatgagggtcatattaaactgacggattttggcctttcaaaagttactttgaatagagatattaatatgatggatatccttacaacaccatcaatggcaaaacctagacaagattattcaagaaccccaggacaagtgttatcgcttatcagctcgttgggatttaacacaccaattgcagaaaaaaatcaagaccctgcaaacatcctttcagcctgtctgtctgaaacatcacagctttctcaaggactcgtatgccctatgtctgtagatcaaaaggacactacgccttattctagcaaattactaaaatcatgtcttgaaacagttgcctccaacccaggaatgcctgtgaagtgtctaacttctaatttactccagtctaggaaaaggctggccacatccagtgccagtagtcaatcccacaccttcatatccagtgtggaatcagaatgccacagcagtcccaaatgggaaaaagattgccaggaaagtgatgaagcattgggcccaacaatgatgagttggaatgcagttgaaaagttatgcgcaaaatctgcaaatgccattgagacgaaaggtttcaataaaaaggatctggagttagctctttctcccattcataacagcagtgcccttcccaccactggacgctcttgtgtaaaccttgctaaaaaatgcttctctggggaagtttcttgggaagcagtagaactggatgtaaataatataaatatggacactgacacaagtcagttaggtttccatcagtcaaatcagtgggctgtggattctggtgggatatctgaagagcaccttgggaaaagaagtttaaaaagaaattttgagttggttgactccagtccttgtaaaaaaattatacagaataaaaaaacttgtgtagagtataagcataacgaaatgacaaattgttatacaaatcaaaatacaggcttaacagttgaagtgcaggaccttaagctatcagtgcacaaaagtcaacaaaatgactgtgctaataaggagaacattgtcaattcttttactgataaacaacaaacaccagaaaaattacctataccaatgatagcaaaaaaccttatgtgtgaactcgatgaagactgtgaaaagaatagtaagagggactacttaagttctagttttctatgttctgatgatgatagagcttctaaaaatatttctatgaactctgattcatcttttcctggaatttctataatggaaagtccattagaaagtcagcccttagattcagatagaagcattaaagaatcctcttttgaagaatcaaatattgaagatccacttattgtaacaccagattgccaagaaaagacctcaccaaaaggtgtcgagaaccctgctgtacaagagagtaaccaaaaaatgttaggtcctcctttggaggtgctgaaaacgttagcctctaaaagaaatgctgttgcttttcgaagttttaacagtcatattaatgcatccaataactcagaaccatccagaatgaacatgacttctttagatgcaatggatatttcgcgtgcctacagtggttcatatcccatggctataacccctactcaaaaaagaagatcctgtatgccacatcagaccccaaatcagatcaagtcgggaactccataccgaactccgaagagtgtgagaagaggggtggcccccgttgatgatgggcgaattctaggaaccccagactaccttgcacctgagctgttactaggcagggcccatggtcctgcggtagactggtgggcacttggagtttgcttgtttgaatttctaacaggaattccccctttcaatgatgaaacaccacaacaagtattccagaatattctgaaaagagatatcccttggccagaaggtgaagaaaagttatctgataatgctcaaagtgcagtagaaatacttttaaccattgatgatacaaagagagctggaatgaaagagctaaaacgtcatcctctcttcagtgatgtggactgggaaaatctgcagcatcagactatgcctttcatcccccagccagatgatgaaacagatacctcctattttgaaaccaggaatactgctcagcacctgaccgtatctggatttagtctgtagcacaaaaattttccttttagtctagcctcgtgttatagaatgaacttgcataattatatactccttaatactagattgatctaagggggaaagatcattatttaacctagttcaatgtgcttttaatgtacgttacagctttcacagagttaaaaggctgaaaggaatatagtcagtaatttatcttaacctcaaaactgtatataaatcttcaaagcttttttcatctatttattttgtttattgcactttatgaaaactgaagcatcaataaaattagaggacactattgagagtgagccactagcttgattttctttctcctctgatttcagttcactgttcagtttagcattaaaataataaaataatcatacagttcc

SEQ ID NO: 12373 - protein, 878 aa, Homo sapiens
MDPTAGSKKEPGGGAATEEGVNRIAVPKPPSIEEFSIVKPISRGAFGKVYLGQKGGKLYAVKVVKKADMINKNMTHQVQAERDALALSKSPFIVHLYYSLQSANNVYLVMEYLIGGDVKSLLHIYGYFDEEMAVKYISEVALALDYLHRHGIIHRDLKPDNMLISNEGHIKLTDFGLSKVTLNRDINMMDILTTPSMAKPRQDYSRTPGQVLSLISSLGFNTPIAEKNQDPANILSACLSETSQLSQGLVCPMSVDQKDTTPYSSKLLKSCLETVASNPGMPVKCLTSNLLQSRKRLATSSASSQSHTFISSVESECHSSPKWEKDCQESDEALGPTMMSWNAVEKLCAKSANAIETKGFNKKDLELALSPIHNSSALPTTGRSCVNLAKKCFSGEVSWEAVELDVNNINMDTDTSQLGFHQSNQWAVDSGGISEEHLGKRSLKRNFELVDSSPCKKIIQNKKTCVEYKHNEMTNCYTNQNTGLTVEVQDLKLSVHKSQQNDCANKENIVNSFTDKQQTPEKLPIPMIAKNLMCELDEDCEKNSKRDYLSSSFLCSDDDRASKNISMNSDSSFPGISIMESPLESQPLDSDRSIKESSFEESNIEDPLIVTPDCQEKTSPKGVENPAVQESNQKMLGPPLEVLKTLASKRNAVAFRSFNSHINASNNSEPSRMNMTSLDAMDISRAYSGSYPMAITPTQKRRSCMPHQTPNQIKSGTPYRTPKSVRRGVAPVDDGRILGTPDYLAPELLLGRAHGPAVDWWALGVCLFEFLTGIPPFNDETPQQVFQNILKRDIPWPEGEEKLSDNAQSAVEILLTIDDTKRAGMKELKRHPLFSDVDWENLQHQTMPFIPQPDDETDTSYFETRNTAQHLTVSGFSL

SEQ ID NO: 12374 - DNA, 3314 bp, Homo sapiens
  CDS (101)..(2782)
atttattgaggggcgtatcctagtggcccccatccggtctccgttttggaagacccgcctcggcacagccaggctcagtccggccttgcgctgagaaaagatgacagcaatcaagcatgcattacaaagagacatttttacaccaaatgatgaacgcctgctgagcattgtgaatgtctgcaaagcaggaaaaaagaaaaagaactgttttttatgtgccacagtgacaactgaacgccctgtgcaggttaaggtggtcaaagtcaagaaatccgataagggagatttctacaaaaggcagattgcatgggcccttcgagatcttgctgtggtagatgccaaagatgctatcaaagaaaatcctgaatttgatttacactttgaaaaaatatataaatgggttgccagcagcactgctgaaaagaatgcatttatctcatgcatttggaaattgaatcagcgatatctccggaagaaaattgattttgtcaatgttagctcacagcttttggaagaatctgttccaagtggagaaaatcagagtgtgacaggaggtgatgaagaagtagtagatgaataccaagagttaaatgcaagagaagaacaggatatcgaaataatgatggaaggctgtgaatatgcaatctcgaatgcggaagcctttgcagaaaaattgtccagagagctgcaggtgctagatggggctaacatccagtcaatcatggcatctgaaaaacaagtcaacatcctgatgaaattgctagatgaggctctaaaggaggtagatcagattgaattgaaactgagcagttatgaggaaatgctccaaagtgtaaaagaacaaatggatcagatctctgaaagcaaccacctaattcatcttagtaacactaataatgtaaaactcctatctgagatagagctccttgtgaaccacatggacttggccaaaggtcatataaaggcccttcaggaaggagatcttgcttcttccagaggcattgaggcctgcaccaatgctgctgatgcccttctgcagtgcatgaatgtagctcttcgaccaggccatgacttgcttctggcagtcaaacagcaacagcagcgattcagtgatttgcgagagctttttgcccggagactggccagtcacctcaacaatgtttttgttcaacagggtcatgatcagagttcgactcttgcccaacactctgttgaactgactttacccaatcatcatccatttcatagagatttgctccgatatgccaagctgatggagtggctaaagagtacagattatggaaaatatgaaggactaacaaagaattacatggattatttatcccgactatatgaaagagaaatcaaagatttctttgaagttgcaaagatcaagatgactggcacaactaaagaaagcaagaagtttgctacactgcctcgaaaagaaagtgctgtcaaacaggaaacagagagtcttcatggaagttcggggaaattaactggatctacttctagtctaaataagctcagtgttcagagttcagggaatcgcagatctcagtcatcttccctgttggatatgggaaacatgtctgcctctgatctcgatgttgctgacaggaccaaatttgataagatctttgaacaggtactaagtgaactggagcccctatgtctggcagaacaggacttcataagtaaatttttcaaactacagcaacatcaaagtatgcctggaactatggctgaagcagaggacctggatggaggaacattatcacggcaacataattgtggcacaccactgcctgtttcatctgagaaagatatgatccgccaaatgatgattaaaatatttcgctgcattgagccagagctgaacaacctaattgcattaggagacaaaattgatagctttaactctctttatatgttagtcaaaatgagtcatcatgtgtggactgcacaaaatgtggaccctgcttctttcctaagtactacattgggaaatgttttggtgactgtcaaaaggaactttgacaaatgcattagtaaccaaataaggcaaatggaagaagtaaagatctcaaaaaagagtaaagttggaattcttccatttgttgctgaatttgaagaatttgctggacttgcagaatcaatcttcaaaaatgctgagcgtcgtggagacctggataaagcatacaccaaacttatcagaggagtatttgttaatgtggagaaagtagcaaatgaaagccagaagacccccagggatgtggttatgatggaaaactttcaccatatttttgcaactctttctcgattgaaaatctcatgtctagaagcagaaaaaaaagaagccaaacaaaaatacacagatcaccttcagtcttatgtcatttactctttaggacaacctcttgaaaaactaaatcatttctttgaaggtgttgaagctcgcgtggcacagggcataagggaggaggaagtaagttaccgacttgcatttaacaaacaagaacttcgtaaagtcattaaggagtaccctggaaaggaagtaaaaaaaggtctagataacctctacaagaaagttgataaacatttatgtgaagaagagaacttacttcaggtggtgtggcactccatgcaagatgaatttatacgccagtataagcactttgaaggtttgatagctcgctgttatcctggatctggtgttacaatggaattcactattcaggacattctggattattgttccagcattgcacagtcccactaaaccttgtgaaagaagaaaagataactgaatgaagcatttgagtataacagacactataccaaaataccaagcaactgttttgagaacccagacttaaaattttatgtattattaaatgttagataaatgggtagtaccatactacaaatatttaaatgcaaaattaccaacctatatagcagttttatttgccctataggttgcatactaacttaagcattcatgtcaccataaaatgcctttagcatttctcaatgactggatgggaaattttcctttattgcctagctgcttgtgtttgagtggttgtcctatgagcaatgcatttggagttcttcagctttcactacttctctgttgcttgctaatcatgtaactactaaaatactgtacaaaattgttttttcacactaacaaatgtgtatatggagaagagggctcatgtgatgatcatttgtgaacttagatttttgaggattatgtgactagtaataaatgtgaaataaattttcaaaaaagttgaaaaagg

SEQ ID NO: 12375 - protein, 894 aa, Homo sapiens [sequence omitted]

SEQ ID NO: 12376 - DNA, 2886 bp, Homo sapiens
  CDS (1320)..(1727)
gtgctggcatcaagtaagccgactacctcggcaaaggcttagggacaagagaccagcagcctgaactggctggggcatccggaaggcttagatcttgtggccaagagttcagaccgtggcgaagtggagagtgacatgcagttggatggcggtgactgcgtggtatggaagaaaattcagctgaaatttgctagaaaatgagttgttttggaaagagactgtagagaaaggcaaatggaagaagaaagcttctgtgcccccacagataccgactgaaaagtgttagcatgagcaaaagttcctatctaatattatatgctttcctttgctcccaggtcttgcaaccctggttccagtctggcaagcattgtagacctggctgctgaagactgacggggcccagggtccgctgcccccaccgccatcaccacctcggaacccagggtaacgctgtcagtctttggaccaacctcgctgtgcctaacaagaattccagaagtcacccatccgaaaggcactggcccatgacactctccacttccaatcttaaatcttttacttcataccttgtctcagatctctcctggtaccccttccccacgcccttagataatccatctcaatccctcatgctaattgaggagctatggctgcaaggcaccttccaggatttcacacctacacaaatctcctttttctccttttgccttctctgcttatgggatattctgagtccccacccccaatcactgacagctgggcccccttcatcagcctcacacaccacgtattaagtcagtcacaatctcccctctcctctaactgctggatttgtctttctacacacacccaatgattcacggctcttccggctgacctacttacatggacacagtccaacgtgagcttacacatttcttacttggctataccattcttggctgattcattcctgaaaccggttcataacctggaaactcagctaaacacctttccttcaaactcagctctctcagcatggtttcaggtagggctgttgccctccttcacctaatagcttctggactaacatccatacaaaccaacacagcatcatctaaaccaccaatatgggggtaccatttctactcaaacttccttcatatccccaccccccttatgtctcagccgaacctaccctaatccagcccacgccacaatggtgggacaggttccccagtccctatgtggtcttatttttacccttgcactccctgtagaccatcaattctacaccctaattacaaaatcatatccacctctgcctggcagaaggtgttatgcttttctggctcgcctaccatccacacatccctacacctcaccaccggatcctcttttctttccttccatccaattcctggcttccccgctgccaactctgctctctatgtctccagtttaaaggtgccccctggaaaaaatgtaacaattccctcacctgtgactggtacctgacagccaccacaccggggcagcaatggctaacggttgacaaagacaatttctttctctctccaaaaccaaacagccttcatcaactccctagccaagactccctatcaggcccttacaggtgccgctctggctggcagttacccaatttgggaaaacgaaaataccctatcatggctacctaccttcacctacaacttctgcctgtccacccccagtctcttctttttgtgtgatacaaactgatatctttgcctaccagccaactggtcaggaacttgcaccctggtctttcaggctccaaccatcaacatcctaccccctaaccaaactattctaatttctgtagaagcctctatctcctcttcacccataagaaataaatgggctctacatctcatcaccctgctaacaggattaggcatcactgctgcacttggcactggaatagcaggcataaccacctcaatcacctcataccaaacactattcacaaccctttctaacaccgtagaagatatgcacacttccattaccagtctccaacgacaattagacttcctcgtgggagtcatccttcaaaactggagagtcctggacctcctaaccactgagaaagggggtacctgcatatacctccaggaagaatgctgtttctgtgttaatgaatctggcattgttcatatcgcagttcgtaggcttcatgacagggctgcagagctttgacatcaagtcgctgactcctggtggcaaggatcatcccttctaagatggataccctgggttgcccccttcctaggacccctgatcttcctcttcctgttactaatgattgggccatgcatatttaaccttgtatcccgcttcatttcccaaaggctgaattgttttatccaggcaagcatgcaaaaacacattgataatatatttcacctttgccacgtctaataccagagcctacgaggaaaccattcggaagctccagaacccaggccctaatcacaacgcccctatccagcaggaagcagccagatgatcaacgacgccctttttcctttttatactaaagtaagaaataagaatgttagcccaaactgcactattttgcagacccctaccattttacaaactggtcagagtggaaaattccaccagggcctgagctgtgagaaacatcctgtcaggcaggtcccaggcctaacccctggctgcactaaattccttcattatcagcagccaaacacaccgcccccaccccattttcacaacaatcccagacctctcctgcccgggactgtaactggtccagcctgtaagcgggaagggggctctggcactagctggtaccccctctccgcaggtctttctcccaataaatctgtgttgccattg

SEQ ID NO: 12377 - protein, 136 aa, Homo sapiens
MLFWLAYHPHIPTPHHRILFSFLPSNSWLPRCQLCSLCLQFKGAPWKKCNNSLTCDWYLTATTPGQQWLTVDKDNFFLSPKPNSLHQLPSQDSLSGPYRCRSGWQLPNLGKRKYPIMATYLHLQLLPVHPQSLLFV

SEQ ID NO: 12378 - DNA, 3361 bp, Homo sapiens
  CDS (10)..(735)
ttgctacatatggaactattattattagaaacctttcagtggaacctctgccttccaacagccgcccatttcattgagtattatctctctgaagcagtacacgaaacagatcttcatgacggctggccaatgatttgcttggaaaagactaaactctacatggccaaatatgcagattacttcctggaagtatctttgcaagctgctgcatgtgtggcttcttcgaggattatacttcgtctttctccaacgtggcctacaagactacatcgtcttactgcctactcttgggatttcttagtgcagtgtattgaacgactgttgatcgctcatgataatgatgtgaaagaagcaaacaaacagagagggcaagcaggacctcagtcagcgcaactaagtgtattccagacagcctcccagccatcacggccagttcactttcagcaacctcagtatctccatcagacacatcagacctcactgcagtatcgccatcctacgtcagaacaaccaagctgtcagcagattgtatcgaccacacacacctcatcttacacactacagacatgtcctgctggcttccaaactagtgttcagggccttgggcacatgcagactggtgttgggatgtcactggcaataccagtagaagttaagccctgtctgagtgtttcttacaaccggagttatcagataaatgaacattacccttgtattactccatgttttgaaaggtgattatttgtgaagctgataaccgacccagactgctttgtgacatgaagctatgggtaagcgttttgtaaacttctgttcaaaaggaaagggatctaaatgacatcagaactcttcaggtaccagcaccaggaagactgaatatcctttttaatgcaccatgaatcctgggagactaagcaaattaacagtatgtcaaattctgttacaacaaatccctgtatgacaaaaatgttcaagtcctggctgatggtccaaatttttcaaaaatattcagtacaacagaaaatttggacagacttcaatttgccattttgagatttgacctgtggtagcatctgggcctaatgttggcttctaagtcaaagactaaatgtttatctcatctatggacttgccaaacagtcttttatgaaggaaagttacagtattaatttttgaaaaggttttttttattctgcaattttttatttttgttctacacatgaatttttgactaagtttaaactcatgaattgttatgctataccaatctgcagtaaaaaaaatttttttagatgattctatataacttcgtctcacaaatagtgtaggtatctgggtttatatactaaaattaagggtggagaagatcttattttttaaatcatggtcataatttttctttttttccctaagtgatcaacatcaaatttttagaattaaaatacatttaactcagggaatttgtactacttggaaacacttaactgtaatgcaacatgccttgggaatgttatagtgtgaactacctttataacataggttaaaatacgcttgctagggtgtgttttcaaatgagaacataatatagctcagaatgaagtggtagttcctgtgattcataatacatatgtaggttttgcatatctcagtgcaatccatgatttatactcagaatcgacattcttaaaaagttatttcaagggatggcataactgtaagaggtcagtgctagaataaagtcctgtaggtttattttggaagggactgtggccagggtagttctcaggttgtgctagagcagcactttgttatgtggaagacaggttttttaagcaacctttgaatccagctctagtcagtctaagcaggcaaaggtaactgatgactaaatttcagtagctactttcattggattgaccctacaactgccctgggacatttcactgtaccagtattaactgcaaacagcaataattgtcattacagcaagggcagtttgggggtaaagcattttggaggaataaccttaaaaagttaaaaagtcattgtaataactgataaactgtatacattgtgctcctttctgggggaagaaagatttggtggagggaagctttctggtttaaaaattagtaaggtgtgtctttttgttttttttaagatagcacttgaatagaagggaaaactgcatggcagatacgtgactgccacaatatgcatcgaagacaaacttactataaagatgttgtgggtatgcagcaggagtctcagtaatcaagccaatggcctttgtcaggaagggaaggggctcaacacagtgatggactgatccagatggctcccggggatgaatgtgggtgggtagcttctgtcagtatcaatgcttagagaaatatcctttccttaaaaagaaaataacttttatatttagagtacatagggcatgatgtggatttattagtctggtagataaaatgaaaaaccactcaggtaagaacactcactcatggcagtttttaagcatgaaaattgttttctgaaagtatcatcacttttcctttttaaagaaggctgctaattggattttggtagttcttacctcaagaaaacttgaattatttgggggaaagtaggctcaaaagagaatatatctttcacattcacattcagaacccagcaacctggagtccaattttcagtattttaactacctcaataatgctatgaatgtaagatattgggatagagatcccaacttgaaacaacagccagtgcctgtggtaacttaatgtcttgtcaaatacttttattgattggtttatatgccattcttgttatagaagaatatgccttttaaaaaagcttattaataacactttcccaatttatattttaaaaagctaaagaacactggattaataatcttttgggagggtagaataaaataattgattactattgctgcatacccggggtgggatggggtggttggagaaccagaactatttttaaaacattaggtttcaatataaatacaactcacaactgctagctttggggggtgggggaacattgtttgggttttgttttgtttaatttattgattagtctttaaagtaggcttttttttttttttttgagaatactggaccatcattaaatgtgtactgtgaagagattaatatgtatgaagggctttaccaaagtccactaaataaacactactcaagtacagactgcaaaccaaaatgtatctgtgttacgacattaattgcaaatagcaagtatggtgctaaagtctacaccaatggaattagatgagtgctatgcacttaattttaaaataaaactagttttcagt

SEQ ID NO: 12379 - protein, 242 aa, Homo sapiens
MELLLLETFQWNLCLPTAAHFIEYYLSEAVHETDLHDGWPMICLEKTKLYMAKYADYFLEVSLQAAACVASSRIILRLSPTWPTRLHRLTAYSWDFLVQCIERLLIAHDNDVKEANKQRGQAGPQSAQLSVFQTASQPSRPVHFQQPQYLHQTHQTSLQYRHPTSEQPSCQQIVSTTHTSSYTLQTCPAGFQTSVQGLGHMQTGVGMSLAIPVEVKPCLSVSYNRSYQINEHYPCITPCFER

SEQ ID NO: 12380 - DNA, 3522 bp, Homo sapiens
  CDS (1510)..(3522)
actagtgagaggaagatggcggccgcggctgtggtggttcccgcagagtggataaagaactgggagaaatcagggagaggcgaatttttgcatttatgtcggatcctcagtgaaaataaaagccatgatagttcaacatacagagatttccagcaagctctctatgagttgtcatatcatgtaattaaaggaaatctaaagcatgaacaggcatctaatgttcttagtgacattagtgaatttcgtgaggatatgccctccattcttgctgatgtattctgcatattagacattgagacaaattgtttagaagaaaaaagcaagagagactattttacacagttggtattagcatgtttgtttcagacacagttctaaaggaacgcctggatccagaaacactggaatcattagggcttatcaaacaatcacagcagttcaatcaaaagtcagttaaaatcaagacaaaactcttttataagcagcaaaaattcaatttgttaagagaagagaatgaaggttatgccaagctgattgctgaattggggcaagatttatctggaagtattactagtgatttaatcttagaaaatatcaaatctttaataggatgctttaatctggatcccaatagagttttggatgtcattttagaagtgtttgaatgcaggccagaacacgatgacttctttatatctttgttagaatcttacatgagtatgtgtgaaccgcaaacactgtgtcatattcttgggttcaaattcaagttttaccaggaaccaaatggcgagacaccatcatctttatacagagttgcagcagtacttctacaatttaatcttattgatttagatgatctttatgtacatcttcttccggctgataattgcattatggatgaacacaaacgagaaattgcggaagctaagcaaattgttagaaagcttacgatggttgtgttgtcttctgaaaaaatggatgagcgagagaaagaaaaggaaaaagaagaggagaaagtagagaaaccacctgataaccaaaaacttggcttgttggaagccttattaaagattggtgattggcaacatgcacagaacattatggatcagatgcctccatactatgcagcttcacacaagctaatagcccttgctatttgcaagctcattcatataactattgagcctctctaccgaagagttggagttcctaaaggtgctaaaggctcacctgttaatgctttgcaaaacaagagagcaccaaaacaagctgagagctttgaagatttgaggagagacgtgttcaatatgttctgttaccttggtcctcacctttctcacgatcccattttatttgcaaaagtggtgcgcataggcaagtcatttatgaaggagtttcagtctgatggaagcaaacaagaagataaagaaaaaacggaagttatccttagctgtttgcttagcattactgaccaggtactacttccatctctttctttgatggactgcaatgcttgtatgtctgaggaactatggggaatgtttaaaacatttccatatcagcatagatatcgtctgtatggccagtggaagaatgaaacatgatgacacgaccatctcaagctggcttcagagtctggctagtttctgtggtgcagtttttcgtaaatatccaattgatcttgctggtcttcttcagtatgttgccaatcagctaaaggcgggcaaaagttttgacctgcttatattgaaagaagtggtacaaaaaatggcaggaatagaaattacagaggaaatgacaatggagcaactagaggctatgactggtggagagcagctaaaagctgagggtggttattttggtcagatcagaaacactaaaaaatcctctcagagattaaaggatgctctattggaccatgatcttgcccttcctctctgtctgcttatggctcagcagagaaatggggtaatctttcaggaaggtggagagaaacatttgaaacttgtgggaaagctctatgaccagtgtcatgataccctggtgcagtttggtgggtttttagcatctaatctgagcacagaagattatataaagcgagtgccttcaattgatgtactctgtaatgaatttcatacaccccatgatgcagcatttttcctgtctaggccaatgtatgcccatcatatttcgtcaaagtatgatgaacttaaaaaatcagaaaagggaagtaaacagcaacataaagttcataagtacattacatcatgtgagatggtgatggcgcctgtccatgaagcagtggtctccttacatgtttccaaagtctgggatgacatcagccctcaattctatgctacattctggtcattgacaatgtatgaccttgcagttccacacaccagctatgaacgagaagtcaataaacttaaagtccagatgaaagcaattgatgacaatcaggaaatgcccccaaataaaaagaaaaaagagaaggagcgctgtactgcccttcaggacaagcttcttgaagaagaaaagaaacagatggaacatgtacagagagttctacagagattgaaactggaaaaggacaactggcttttagcaaaatctaccaaaaatgagaccatcacaaaatttctacagctgtgtatatttcctcgatgtattttttcagcaattggtgctgtttactgtgctcgttttgttgaattggtacatcaacagaaaactccaaatttttccacacttctttgctatgatcgagttttctctgacataatttacacagttgcaagctgtactgaaaatgaagccagtcgatacggaaggtttctttgctgcatgttagagactgtgaccaggtggcatagtgatagagccacatatgaaaaggaatgtggaaactatccaggattccttaccatattacgggcaactggatttgatggtggaaataaggctgatcaattagactatgaaaattttcgacatgttgtacataaatggcattacaaactaaccaaggcatcggtacattgccttgaaacaggcgaatatactcacatcaggaatatcttgattgtgctaacaaaaatacttccttggtacccaaaagttttgaatctgggtcaagctttggaaagaagagtacacaaaatctgccaagaagaaaaagagaagaggccagatctatatgcattggctatgggctactctgggcagttgaaaagtagaaagtcatacatgatacctgaaaatgagtttcatcacaaagacccccctccgaggaatgcagttgccagtgtgcaaaatgggcctggtggtgggccttcttcatcatcaataggaagtgcatctaaatcggatgaaagcagtactgaggagactgataaatcaagggagagatctcagtgtggtgtgaaagctgttaataaagcttctagtaccacacctaaagggaattcaagcaatggaaatagtggctctaacagcaacaaagctgttaaagaaaatgac

SEQ ID NO: 12381 - protein, 671 aa, Homo sapiens
MLVCLRNYGECLKHFHISIDIVCMASGRMKHDDTTISSWLQSLASFCGAVFRKYPIDLAGLLQYVANQLKAGKSFDLLILKEVVQKMAGIEITEEMTMEQLEAMTGGEQLKAEGGYFGQIRNTKKSSQRLKDALLDHDLALPLCLLMAQQRNGVIFQEGGEKHLKLVGKLYDQCHDTLVQFGGFLASNLSTEDYIKRVPSIDVLCNEFHTPHDAAFFLSRPMYAHHISSKYDELKKSEKGSKQQHKVHKYITSCEMVMAPVHEAVVSLHVSKVWDDISPQFYATFWSLTMYDLAVPHTSYEREVNKLKVQMKAIDDNQEMPPNKKKKEKERCTALQDKLLEEEKKQMEHVQRVLQRLKLEKDNWLLAKSTKNETITKFLQLCIFPRCIFSAIGAVYCARFVELVHQQKTPNFSTLLCYDRVFSDIIYTVASCTENEASRYGRFLCCMLETVTRWHSDRATYEKECGNYPGFLTILRATGFDGGNKADQLDYENFRHVVHKWHYKLTKASVHCLETGEYTHIRNILIVLTKILPWYPKVLNLGQALERRVHKICQEEKEKRPDLYALAMGYSGQLKSRKSYMIPENEFHHKDPPPRNAVASVQNGPGGGPSSSSIGSASKSDESSTEETDKSRERSQCGVKAVNKASSTTPKGNSSNGNSGSNSNKAVKEND

SEQ ID NO: 12382 - DNA, 3739 bp, Homo sapiens
  CDS (109)..(3087)
aaacgcaggtagccaaagtggcttgtggagtggcgaccgttagtgaggcggttgctgagacagacgctgaggcgggtaggaggagcccgagccgtaagggaagccgtgatgagggccgtgttgacgtggagagataaagccgagcactgtataaatgacatcgcatttaagcctgatggaactcaactgattttggctgccggaagcagattactggtttatgacacctctgatggcaccttacttcagcccctcaagggacacaaagacactgtgtactgtgtggcatatgcgaaggatggcaagcgctttgcttctggatcagctgacaaaagcgttattatctggacatcaaaactggaaggcattctgaagtacacgcacaatgatgctatacaatgtgtctcctacaatcctattactcatcaactggcatcttgttcctccagtgactttgggttgtggtctcctgaacagaagtctgtctccaaacacaaatcaagcagcaagatcatctgctgcagctggacaaatgatggtcagtacctggcgctggggatgttcaatgggatcatcagcatacggaacaaaaatggcgaggagaaagtaaagatcgagcggccggggggctccctctcgccaatatggtccatctgctggaacccttcaagagaggaacgtaatgacatcctggctgtggctgactggggacagaaagtttccttctaccagctgagtggaaaacagattggaaaggatcgggcactgaactttgacccctgctgcatcagctactttactaaaggcgagtacattttgctggggggttcagacaagcaagtatctcttttcaccaaggatggagtgcggcttgggactgttggggagcagaactcctgggtgtggacgtgtcaagcgaaaccggattccaactatgtggtggtcggctgccaggacggcaccatttccttctaccagcttattttcagcacagtccatgggctttacaaggaccgctatgcctacagggatagcatgactgacgtcattgtgcagcacctgatcactgagcagaaagttcggattaaatgcaaagagcttgtcaagaagattgccatctacagaaatcgattggctatccaactgccagagaaaatcctcatctatgagttgtattcagaggacttatcagacatgcattaccgggtaaaggagaagattatcaagaagtttgagtgcaacctcctggtggtgtgtgccaatcacatcatcctgtgccaggagaaacggctgcagtgcctgtccttcagcggagtgaaggagcgggagtggcagatggagtctctcattcgttacatcaaggtgatcggtggccctcctggaagagaaggcctcttagtggggctgaagaatggacagatcctgaagatcttcgtggacaatctctttgctatcgtcctgctgaagcaggccacagctgtgcgctgcttggacatgagtgcctcccgtaagaagctggccgtggtagatgaaaatgacacttgcctggtgtatgacatcgacaccaaggagctgctttttcaggaaccaaacgccaacagtgtagcttggaacacccagtgtgaggacatgctctgcttctcgggaggaggctacctcaacatcaaagccagcaccttccctgtgcaccggcagaagctgcagggctttgtggtcggctacaatggctccaagatcttctgcctccatgtcttctccatttctgccgtggaggtgccgcagtccgctcccatgtaccagtacctggataggaaactgttcaaggaagcctaccagattgcttgcttgggtgtcacagacactgattggcgtgaactggccatggaagcgctagaaggtttagattttgaaacagcaaagaaggccttcatcagagtacaagacctccgatatttagagctcatcagcagcattgaggagaggaagaagcggggagagaccaacaatgacctgtttctggcagatgtgttttcctaccaggggaagttccatgaggccgccaaactgtacaagaggagtgggcacgagaacctcgcgcttgaaatgtacaccgacctctgcatgtttgagtatgccaaggatttccttggatctggagaccccaaagaaacaaagatgctaatcaccaaacaggctgactgggccagaaatatcaaggagcccaaagccgccgtggagatgtacatctcagcaggagagcacgtcaaggccatcgagatctgtggtgaccatggctgggttgacatgttgatcgacatcgcccgcaaactggacaaggctgagcgcgagcccctgctgctgtgcgctacctacctcaagaagctggacagccctggctatgctgctgagacctacctgaagatgggtgacctcaagtccctggtgcagctgcacgtggagacccagcgctgggatgaggcctttgctttgggtgagaagcatcctgagtttaaggatgacatctacatgccgtatgctcagtggctagcagagaacgatcgctttgaggaagcccagaaagcgttccacaaggctgggcgacagagagaagcggtccaggtgctggagcagctcacaaacaatgccgtggcggagagcaggtttaatgatgctgcctattattactggatgctgtccacgcagtgcctcgatatagctcaagatcctgcccagaaggacacaatgcttggcaagttctaccacttccagcgtttggcagagctgtaccatggttaccatgccatccatcgccacacggaagatccgttcagtgtccatcgtcctgaaactcttttcaacatctccaggttcctgctgcacagcctgcccaaggacaccccctcgggcatctctaaagtgaaaatactcttcaccttggccaagcagagcaaggccctcggtgcctacaggctggcccggcacgcctatgacaagctgcgtggcctgtacatccctgccagattccaaaagtccattgagctgggtaccctgaccatccgcgccaagcccttccacgacagtgaggagtaggtgcccttgtgctaccgctgctccaccaacaacccgctgctcaacaacctgggcaacgtctgcatcaactgccgccagcccttcatcttctccgcctcttcctacgacgtgctacacctggttgagttctacctggaggaagggatcactgatgaagaagccatctccctcatcgacctggaggtgctgagacccaagcgggatgacagacagctagagattgcaaacaacagctcccagattctgcggctagtggagaccaaggactccatcggagatgaggacccgttcacagctaagctgagctttgagcaaggtggctcagagttcgtgccagtggtggtgagccggctggtgctgcgctccatgagccgccgggatgtcctcatcaagcgatggcccccacccctgaggtggcaatacttccgctcactgctgcctgacgcctccattaccatgtgcccctcctgcttccagatgttccattctgaggactatgagttgctggtgcttcagcatggctgctgcccctactgccgcaggtgcaaggatgaccctggcccatgaccagcatcctggggacggcctgcaccctctgcccgccttggggtctgctgggctgtgaaggagaataaagagttaaactgtc

SEQ ID NO: 12383 - protein, 993 aa, Homo sapiens [sequence omitted]

SEQ ID NO: 12384 - DNA, 4281 bp, Homo sapiens
  CDS (137)..(1639)
tttattgaccacagccactttagaaaagcttcctgtaccccaggtcagtgcaactacagcacctgctggatcagctccaccctcgagcactttgccagcagcttctagccttaaaaccccaggaacttctttaaacatgaatggacccactttaagaccaacctctagtatccctgctaataatcctttagtgactcagctgcttcaaggcaaagatgttcccatggagcaaattctgcctaaacctctcaccaaagttgaaatgaaaacggttccactgactgcaaaagaggaaagggggatgggagcgctcatagctaccaacacaacagaaaatagcaccagagaggaagttaatgagagacagtcccatccagctacgcagcagcagctgggcaaaaccttgcaaagtaagcagctcccccaggttccaaggccccttcagctcttttcagctaaggagctgagggactccagcattgacacacaccaataccacgaaggactaagtaaagcaacccaagatcagatccttcagactctcattcagagggttcggaggcagaatcttctctcagttgtgccgccctcacagttcaacttcgctcactcaggtttccagctggaagacatctccacaagccagaggttcatgctgggttttgctggcagaaggacatccaaacctgcaatggcagggcactacttactgaatatttctacctacggccggggctcagagagctttaggaggacccattctgtaaaccctgaagatcgtttttgtctaagcagccccactgaagccttgaaaatgggatatacagactgtaaaaatgcaacaggagagagtagcagcagcaaagaagatgacactgatgaggaaagtactggtgatgagcaggaatctgtcacagtgaaagaggagccccaggtttcccagagtgctggcaagggtgacacaagttcaggacctcacagcagggaaactctatctaccagtgattgcttagctagcaagaatgtgaaggctgagataccattgaatgagcaaaccactttaagtaaggagaattacctgttcactagaggccaaacatttgatgaaaagaccctagccagagatttaattcaggcagcacagaagcagatggctcatgcagtgagaggtaaggcaatccgtagcagccccgagcttttcagttctactgttcttcctctgcctgcagacagccccacccaccagcccctactccttccacccctgcaaaccccgaagttgtatggaagccccacccagatagggccaagctatagaggcatgatcaatgtccccacctcatctgacatggaccataactctgctgtaccaggtagccaggtatctagcaatgtaggtgatgtcatgtcattttcagtgactgtcactaccatccctgctagccaagctatgaatcccagcagccatggccagaccattcctgttcaggcgttctccgaagagaacagcatagagggcacgccttcgaaatgttactgccgcttgaaagccatgatcatgtgcaaaggctgtggcgctttctgccatgatgattgcatcggcccctccaaactgtgcgtctcctgccttgtcgttcggtaatgagactagaaagagatacactgtaaaggagggggaagggaagggttgaccagttgggtttttttgcgtccttttggaatcacagaaataaacaagtaggtttcagttgtcttcagagacaaatgttacttaatcaggaatacaaagtacagattttttacattttagaggaagagcaccttgtatagtaagtctaagtcaagcaagactttgtgaatttgtgacaagtttgcacttacaaaatcatgtaaatatgtcacattttgtttaacattatttttccaagtgtttaggtaataatgtattactttgaattcagattaatgttctactacttgtgactgagaaaagtttaatgccggcatggtaaaaggaagctgtctcccttctgacatttcctaggaagctaggaaaaggaaagtgaaggaatggtctaaagaaatgaccattcacactgattttgtctggacagtctggccgcaggttattcatagattattcagtctttgcaggacttggattcagggttttactcagtccctttaccttaggtggaatcttcttaaattgaaatttttggtaaggaattcatttcacaggtagtgtttcagactctgaaagccctgacttggttcttggcttctactgtactagttactagttactggtactgttgccaagcaatctgcttggaatttgtggatccctgctgttccctaatcccaccccctgccctgagacagtgaatgtagtccgtgaagggagtgcctctctgggaccccctgtgttgttacaggctgtgcagtgcaacaattccagcaaaaataccctatccccgcacttagtcattcgtggtaactaacaattttgaaatactcatataaaatgaacaggaaagtgttagtgattgggtgatttgagctacatcttgttgagcaaggggagtgaaaccacagaaactgttaaattgaacgtaaataactttggaaaacagttttgacactagaacaaggtcgcttctcttttcctcttctctcccaacctgttaacctagtgctagatagtcagctgctgttgcaggtagaaaagctcaccaatgccacatttgttcattctgttcaacctgttttgacctcccaggcatctgaacaggatgacatcatcttattatatcttactttacacatacgtgtatgtacacacacacacacaatacaagacatttttcctgttttagaaaatatagcccttgtttggattactgctgtctgagcactagaaatttctaatggaaagaggcctctgaatggctaagggaacatctggaaaggaaggaaaatgagccctaaaggttttttggttgcttgtttttgtttctttttctttcttgtttccttttttgtttttaaatccttctctagtgactgaagaaattgtgagtacataatatttaggtcatggttaaggaacattaaaataaacctgcagtttaacagaattttgtattaaatgggggagtgtcaatttgcatcatttgcatattgatttcaagtctcctaatttggaatgggtaaagtacaaatgttaatgcaacatagtacagttgaatttgtccttcatattcaggatgtgatatttacaaaatgcagaacagtttaaacttgttaagtcacattccagattaggagaaaatgggcaataatcatctctgttttgcccccattctactacccaccactgcccaccccacccccacatcacacactcttcgatgctttcccacagcccctgctccgctcctctccgtaagaaactcacttcactgtttttcacttttcacttctggcttttttgtggcccaaggccaatataggattaatatctgtgttccagcttcagccagaacgatatgtctgtccatctttctcctttcttccagcacacacagctaagagataagaaggctgcaaggattggggataaggagtatattttcaagccaagaaccagtagaaaacagaaataatggtgctcccaaatattcagtaccttgggcaatccaggaagggtttaaagagacctgttgctgcatagaactctccctgccctaccccttaactccaccttagtgccagggccgagggctggtctgcatgctggaagaggttgagagttttggaattgattccatgctaaatgtcagttaccagtttggattgatgaaagtgatttttctgctttacctttttcctgtcagaaaggttttcctctgtgctacccttaacttagggatgaacagactataactaggaaaggaggaaaggtatcagggatttttaagtccgtttagagagcaaaccatattgtgcctcttcatcttgacccaggctcttatagataggtcctaaacattgctgttcactagattatcttaacaaataatactcagccaaatatttgcatttaggaatactcctaaaacagatattgccaactagatacactgcctcaatcttgaccagacaagagaacagttgagttctctcagttgggtagtaacttgaataccagtctatttatcagttggtttcaacacagaggtttcaagtggaaagccattcatcttaaaagctgaacag

SEQ ID NO: 12385 - protein, 501 aa, Homo sapiens [sequence omitted]

SEQ ID NO: 12386 - DNA, 2564 bp, Homo sapiens
  CDS (131)..(1507)
actgttccgcgggcaccggcagcgcagcgtctccgatagtaagtcgggctgccggccggctcattcccccagggtaactctgagcccccggctccgagctccctcgaggccgcctaccggcgtcgggaacatggatgagaaatccaacaagctgctgctagctttggtgatgctcttcctatttgccgtgatcgtcctccaatacgtgtgccccggcacagaatgccagctcctccgcctgcaggcgttcagctccccggtgccggacccgtaccgctcggaggatgagagctccgccaggttcgtgccccgctacaatttcacccgcggcgacctcctgcgcaaggtagacttcgacatcaagggcgatgacctgatcgtgttcctgcacatccagaagaccgggggcaccactttcggccgccacttggtgcgtaacatccagctggagcagccgtgcgagtgccgcgtgggtcagaagaaatgcacttgccaccggccgggtaagcgggaaacctggctcttctccaggttctccacgggctggagctgcgggttgcacgccgactggaccgagctcaccagctgtgtgccctccgtggtggacggcaagcgcgacgccaggctgagaccgtccaggaacttccactacatcaccatcctccgagacccagtgtcccggtacttgagtgagtggaggcatgtccagagaggggcaacatggaaagcatccctgcatgtctgcgatggaaggcctccaacctccgaagagctgcccagctgctacactggcgatgactggtctggctgccccctcaaagagtttatggactgtccctacaatctagccaacaaccgccaggtgcgcatgctctccgacctgaccctggtaggctgctacaacctctctgtcatgcctgaaaagcaaagaaacaaggtccttctggaaagtgccaagtcaaatctgaagcacatggcgttcttcggcctcactgagtttcagcggaagacccaatatctgtttgagaaaaccttcaacatgaactttatttcgccatttacccagtataataccactagggcctctagtgtagagatcaatgaggaaattcaaaagcgtattgagggactgaattttctggatatggagttgtacagctatgccaaagacctttttttgcagaggtaccagtttatgaggcagaaagagcatcaggaggccaggcgaaagcgtcaggaacaacgcaaatttctgaagggaaggctccttcagacccatttccagagccagggtcagggccagagccagaatccgaatcagaatcagagtcagaacccaaatccgaatgccaatcagaacctgactcagaatctgatgcagaatctgactcagagtttgagccagaaggagaaccgggaaagcccgaagcagaactcaggcaaggagcagaatgataacaccagcaatggcaccaacgactacataggcagtgtagagaaatggcgttaaatggctcaaaaaggcctgtacatacttctcccaaagcgccactgaaaagatggcatagcttaaaagatgaaagtgtccaaacacatcctgcttccttcattggggaagttttaaaaaaaagtttagatgttgcctttacagttgcctttcaattcagtgttatactgtgtgtaggtaaaacaaatctcaatatggaattaaattgtctttttggggttggactaaatatgaaatccgaaagccaaaccagactcaccagaaattgctgtttagatattttaagaagttcttaaattagttatggagacaaagtgaaaacataaaatgtgaccatttaacttatggctaagaaatggactttaaattattcatgatacactgttaaaacccaatcttggaatcaaatattttttccaggggtgagaataagtataaacataaagcaactaaaatgaaacataaaaccttttattttcttctgattttaacaaggaatctatttaaatagaataacaactgatggtgaatcttaccgagctgtagaaaataaaaaattcctctccaaacatgggtagttttatgtcaaaatattggcttttcaagaacaggactcatatcttgatatttaagagatgtttaaaattttaaactttttctaccttctactgtttaaaggttttacacagggtgtatctcacattaaacaaaacacctttttttcaattttctttagttttaattgaaaatgtttgcttttaaaactgataggtattgttggaaagcaggatgaagcctgagccagtggaaaagcttgttacagaaaaaacattttgtgttattgctgtggtgtgcatgatttgcaaagattaagtgcattttctctgtctatactgattattgtatatagaggatgttataaatatacatatacatttttgccattatgtaaatcccatgatttcaactgtaaacatctgtccattggtgtagctttacaaaccattcactgattttgtgtaatttaacaatagatatgaaataaagtttaaattac

SEQ ID NO: 12387 - protein, 459 aa, Homo sapiens
MDEKSNKLLLALVMLFLFAVIVLQYVCPGTECQLLRLQAFSSPVPDPYRSEDESSARFVPRYNFTRGDLLRKVDFDIKGDDLIVFLHIQKTGGTTFGRHLVRNIQLEQPCECRVGQKKCTCHRPGKRETWLFSRFSTGWSCGLHADWTELTSCVPSVVDGKRDARLRPSRNFHYITILRDPVSRYLSEWRHVQRGATWKASLHVCDGRPPTSEELPSCYTGDDWSGCPLKEFMDCPYNLANNRQVRMLSDLTLVGCYNLSVMPEKQRNKVLLESAKSNLKHMAFFGLTEFQRKTQYLFEKTFNMNFISPFTQYNTTRASSVEINEEIQKRIEGLNFLDMELYSYAKDLFLQRYQFMRQKEHQEARRKRQEQRKFLKGRLLQTHFQSQGQGQSQNPNQNQSQNPNPNANQNLTQNLMQNLTQSLSQKENRESPKQNSGKEQNDNTSNGTNDYIGSVEKWR

SEQ ID NO: 12388 - DNA, 2446 bp, Homo sapiens
  CDS (254)..(1324)
ataacagcatgaagtgccgtggaactggaataggcgtgtcctctccctcgaccctccccctccttgtccctctgctcacccctcgctcgttccctccctccggcgagggccgcctttataacaactgctcagagtgcgagggcgggatagctgtccaaggtctcccccagcactgaggagctcgcctgctgccctcttgcgcgcgggaagcagcaccaagttcacggccaacgccttggcactagggtccagaatggctacaacagtccctgatggttgccgcaatggcctgaaatccaagtactacagactttgtgataaggctgaagcttggggcatcgtcctagaaacggtggccacagccggggttgtgacctcggtggccttcatgctcactctcccgatcctcgtctgcaaggtgcaggactccaacaggcgaaaaatgctgcctactcagtttctcttcctcctgggtgtgttgggcatctttggcctcaccttcgccttcatcatcggactggacgggagcacagggcccacacgcttcttcctctttgggatcctcttttccatctgcttctcctgcctgctggctcatgctgtcagtctgaccaagctcgtccgggggaggaagcccctttccctgttggtgattctgggtctggccgtgggcttcagcctagtccaggatgttatcgctattgaatatattgtcctgaccatgaataggaccaacgtcaatgtcttttctgagctttccgctcctcgtcgcaatgaagactttgtcctcctgctcacctacgtcctcttcttgatggcgctgaccttcctcatgtcctccttcaccttctgtggttccttcacgggctggaagagacatggggcccacatctacctcacgatgctcctctccattgccatctgggtggcctggatcaccctgctcatgcttcctgactttgaccgcaggtgggatgacaccatcctcagctccgccttggctgccaatggctgggtgttcctgttggcttatgttagtcccgagttttggctgctcacaaagcaacgaaaccccatggattatcctgttgaggatgctttctgtaaacctcaactcgtgaagaagagctatggtgtggagaacagagcctactctcaagaggaaatcactcaaggttttgaagagacaggggacacgctctatgccccctattccacacattttcagctgcagaaccagcctccccaaaaggaattctccatcccacgggcccacgcttggccgagcccttacaaagactatgaagtaaagaaagagggcagctaactctgtcctgaagagtgggacaaatgcagccgggcggcagatctagcgggagctcaaagggatgtgggcgaaatcttgagtcttctgagaaaactgtacaagacactacgggaacagtttgcctccctcccagcctcaaccacaattcttccatgctggggctgatgtgggctagtaagactccagttcttagaggcgctgtagtatttttttttttttgtctcatccttaggatacttcttttaagtgggagtctcaggcaactcaagtttagacccttactctttttgtttgttttttgaaacaggatcttgctctgtcacccaggcttgagtgcagtggtgcgatcacagcccagtgcagcctcgaccacctgtgctcaagcaatcctcccatctccatctcccaaagtgctgggatgacaggcgtgagccacagctcccagcctaggcccttaatcttgctgttattttccatggactaaaggtctggtcatctgagctcacgctggctcacacagctctaggggcctgctcctctaactcacagtgggttttgtgaggctctgtggcccagagcagacctgcatatctgagcaaaaatagcaaaagcctctctcagcccactggcctgaatctacactggaagccaacttgctggcacccccgctccccaacccttcttgcctgggtaggagaggctaaagatcaccctaaatttactcatctctctagtgctgcctcacactgggcctcagcagctccccagcaccaattcacaggtcacccctctcttcttgcactgtccccaaacttgctgtcaattccgagatctaatctccccctacgctctgccaggaattctttcagacctcactagcacaagcccggttgctccttgtcaggagaatttgtagatcattctcacttcaaattcctggggctgatacttctctcatcttgcaccccaacctctgtaaatagatttaccgcatttacggctgcattctgtaagtgggcatggtctcctaatggaggagtgttcattgtataataagttattcacctgagtatgcaataaagatgtggtggccactctttcatggtggtggcagcagtt

SEQ ID NO: 12389 - protein, 357 aa, Homo sapiens
MATTVPDGCRNGLKSKYYRLCDKAEAWGIVLETVATAGVVTSVAFMLTLPILVCKVQDSNRRKMLPTQFLFLLGVLGIFGLTFAFIIGLDGSTGPTRFFLFGILFSICFSCLLAHAVSLTKLVRGRKPLSLLVILGLAVGFSLVQDVIAIEYIVLTMNRTNVNVFSELSAPRRNEDFVLLLTYVLFLMALTFLMSSFTFCGSFTGWKRHGAHIYLTMLLSIAIWVAWITLLMLPDFDRRWDDTILSSALAANGWVFLLAYVSPEFWLLTKQRNPMDYPVEDAFCKPQLVKKSYGVENRAYSQEEITQGFEETGDTLYAPYSTHFQLQNQPPQKEFSIPRAHAWPSPYKDYEVKKEGS

SEQ ID NO: 12390 - DNA, 3324 bp, Homo sapiens
  CDS (142)..(2337)
agtgtcatggctgcccacaggtctgcaggcactcggtacgccgctaacgcggcgaggtagctcggtgcgtctcgcggtaccagtgcgaatcatcgggctatccaggtccgagatcctagtctcctgtcggctctgaggaggatggatccttctgcggatacatgggacctcttctcacctttaatatcattatggataaacaggttttacatttatttgggctttgctgttagcattagcctttggatttgtgtccagattgtcatcaagacgcagggcaagaacttacaggaaaaatctgttccaaaagcagctcaggatttgatgacaaatggttatgtctcccttcaagagaaagacatctttgtgtctggagtgaagattttttatggttctcagactggaacagcaaagggattcgcaacagttcttgctgaagcagttacatccctggatctgcctgtggccattattaatctaaaagaatatgatccagatgatcatctgatagaagaggtgactagtaaaaatgtctgtgtcttcctggttgcgacatacactgacggcctaccaactgaaagtgcagagtggttctgcaaatggttagaggaagcatccattgattttcgatttggcaaaacttacctgaagggtatgagatatgcggtatttggcctgggaaattctgcctatgctagccacttcaacaaggttggcaaaaatgttgacaagtggctctggatgcttggcgcgcatcgtgtgatgagtcgaggggagggcgactgcgacgtggttaaaagcaagcacggcagcattgaggccgacttcagagcatggaagaccaagttcatctcccagctgcaggcacttcagaaaggggagagaaagaagtcctgtggcggccactgcaagaaaggcaaatgtgaatctcaccaacatggctcagaggagagggaggaaggatctcatgagcaggatgaattgcatcatagagacaccgaggaggaagaaccctttgagagctccagtgaagaagagtttggtggtgaggaccatcagagcctaaattccattgttgatgttgaagatttgggcaaaattatggatcatgtgaagaaagaaaagagagaaaaggaacagcaggaagagaagtctggtttgttcaggaacatggggaggaatgaagatggtgaaagaagagctatgataactcctgctctccgagaagcccttactaaacaaggttatcagttgattgggagccactcgggggtgaagctttgcaggtggacaaagtccatgctccgagggagaggaggttgttacaaacacacattctatggaattgagagccatcgctgcatggaaaccaccccgagcttggcgtgtgctaataaatgtgtcttctgttggcggcaccacaccaaccccgtgggcactgagtggcggtggaagatggaccagcctgaaatgatcttgaaggaagccattgaaaaccatcagaacatgattaagcagtttaaaggagtaccgggcgtcaaagcagaacgctttgaagaaggaatgacggtaaagcactgtgcattgtccctcgtgggagaaccaataatgtacccagagatcaacaggtttttgaagctactccaccagtgtaaaatttccagcttcctggtcacaaacgcacaatttcctgcggaaatcaggaacctcgagccggttactcagctgtatgtcagtgtggatgccagtaccaaagacagcctgaagaaaatcgaccgcccactcttcaaggatttctggcagagattccttgacagtttaaaagccttggcagtcaagcaacaacgaactgtctacagactgacgctcgtgaaagcatggaatgtggacgagctccaggcctacgcgcagctcgtgtccctgggaaatcctgacttcatcgaagtgaagggcgttacctactgcggagaaagttcagcaagcagtcttaccatggcccacgtgccctggcatgaggaagtggtacagtttgtccgcgagctggtggatctgatccccgaatatgaaattgcatgtgaacacgaacactctaattgcctcctgatagcacacagaaagtttaaaattggtggtgaatggtggacatggatcaattataaccgcttccaggagctcatccaggaatatgaagatagtggtggatcaaaaacgttcagcgcaaaggattatatggccagaactcctcactgggcattatttggtgccagtgaaagaggctttgatcccaaggacacaagacatcagagaaagaacaaatcaaaggctatttctggatgttgagattatctgatttcaaggtactgaaggacaaaaacttggatggcctcaaaaggttcttgaacaccactgtgattctccaaggacgaattacgtaaattatactttcatacaaaggagacaataaggcagtaaacacagggacacgggggacagcgtccacactcagagggcctgggccacagccccgatgtttcttttcagaactcagcccctttcctgattttacttctaagaggaaaattattttggggaggaactacacagtcgtgattagaatttatctgatggttttgtattataacttgtaagacctgccagaatgctagtcccgagagtgtcagacaaggaagaaatccctgggcctcttccccttacccggcccttagatttcatggagcagccacttagcattgaattgcactaccctgagctaaacgtgtctgtgctttctaagataagagcttgatccctttcttctatcttaagacagcacctcctgaaaagaatcgaagttgtcacaactctcacttattttttaaatactgcatagatagagttttggtttattaccaacccttcccagaattgcgttggatctaaaactactagatctcatcccattcccatgtaaattaccacagaccgcagtaccggggctggagcggagtgaagctgtctgctgtgagaggagtggccatgtgagggcatggagtcattagtctcacaaacacactttggactgaagaggatcatttctttttgttcgtgaggtcactgtccaggcctctcatatcatgaccagacggcgggtctccatcttctttcactcctgtggccctggctgctttacacaatctgttctataaggttcaggtgttttcaagttggaacgatcataaatactcaaaattgttttcaagttagcaagttcttttaacagtcttttatgcaaaaattgaattaataaaataatcttttgtaaag

SEQ ID NO: 12391 - protein, 732 aa, Homo sapiens
MDPSADTWDLFSPLISLWINRFYIYLGFAVSISLWICVQIVIKTQGKNLQEKSVPKAAQDLMTNGYVSLQEKDIFVSGVKIFYGSQTGTAKGFATVLAEAVTSLDLPVAIINLKEYDPDDHLIEEVTSKNVCVFLVATYTDGLPTESAEWFCKWLEEASIDFRFGKTYLKGMRYAVFGLGNSAYASHFNKVGKNVDKWLWMLGAHRVMSRGEGDCDVVKSKHGSIEADFRAWKTKFISQLQALQKGERKKSCGGHCKKGKCESHQHGSEEREEGSHEQDELHHRDTEEEEPFESSSEEEFGGEDHQSLNSIVDVEDLGKIMDHVKKEKREKEQQEEKSGLFRNMGRNEDGERRAMITPALREALTKQGYQLIGSHSGVKLCRWTKSMLRGRGGCYKHTFYGIESHRCMETTPSLACANKCVFCWRHHTNPVGTEWRWKMDQPEMILKEAIENHQNMIKQFKGVPGVKAERFEEGMTVKHCALSLVGEPIMYPEINRFLKLLHQCKISSFLVTNAQFPAEIRNLEPVTQLYVSVDASTKDSLKKIDRPLFKDFWQRFLDSLKALAVKQQRTVYRLTLVKAWNVDELQAYAQLVSLGNPDFIEVKGVTYCGESSASSLTMAHVPWHEEVVQFVRELVDLIPEYEIACEHEHSNCLLIAHRKFKIGGEWWTWINYNRFQELIQEYEDSGGSKTFSAKDYMARTPHWALFGASERGFDPKDTRHQRKNKSKAISGC

SEQ ID NO: 12392 - DNA, 4098 bp, Homo sapiens
  CDS (1)..(1989)
atgctgcaaatgccgaagttaaatgaaatacctccggggagggcaggccgcagggaggctcggggggagggaagatggcctggacaaacaggtcctgaagctgcgaggctggagtggagggcgcaggggcaggcgggcggcgccagagctccatgggacagctggggaagctccaggctacctacacaacctggcccaggctggtcacggtgtcccccctccctgctctgtgccctctccttccagaaatccaccatggagagtaaggatgaggtcagcgacaccgacagtggcatcatcctgcagtctggccccgacagcccggtctccccaatgaaggagctgacccatgcagtgcacaagcagcagagggccctggaagcgaggctggaggcctgcctggaggagctgaggagactctgccttcgggaagcggagctgacgggcaccttgccagcggagtatcccctcaaaccaggggaaaaggcccccaaggttcgccgcaggatcggagcggcttacaaactggatgactgggccttgcacagagaggaccccctaagcagcctggagcgccagctggccctgcagctgcagatcacagaggcagcccgtcggctgtgcctggaggagaacctcagcaggcaggctcggcggcagcggaagcactccatgctgcaggaggagaagaagctgcaggagctccagcgctgcctggtcgagcggcggcgcaatagcgagccacctccggctgctgctctccccctgggccgagagctcagtgcctctgatgacagctccctgtcagatgggctcctcctggaggaagaggaatcccaagtgccaaaacctcctccagagtctccagccccaccttctcggcctctcccaccccaaacccttgagggtctgcagccaacaggacctgaggctgggagcccagaacgggctccagtccagaacagcccctggaaggaaaccagcctggaccacccctatgagaagcccaggaagtcttctgagccctggagcgagtccagcagcccagccaccacaccacaggatgggcccagtgcctccagcctgtggcttctggagcctgcctcctaccacgtggttcccatccgtggtgttcctggccagtggcagggccgcaccagtgccccagccacccctgagatacaggggaggaggggccagtcgcagtctctgagggtggattccttccgggcgggtcctgagggccgaggtcgcagcgcctttccccgccgccgccccactcactacacggtgacagtgccagattcctgctttcccgcgaccaagcccccgctgccccacgccgcctgccactcctgctcagaagacagtggctctgacgtctccagcatctcccaccccacttcgccgggcagcagcagccccgacatctcctttctgcagcctctctcccctcccaagacccatcgtcaccgcggggcctgggtcccagccggcagcagagagctggtcgcccaccaccccaagctactgctgccgcctggctatttcccggcggggcggtacgtggtggtggctgagagccccctgccgcctggcgagtgggagctgtgccgcgcagccccgggccctgcttacgaggaggagggcactcccctgcgctaccagcgtctggtgccctcccgcagccgcatcgtgcggacgccctccctgaaggacagcccggcaggccgggggctcagcaaggccgccgtgtccgaggagctcaagtggtggcacgagcgtgcacgcctccggagcacccgaccccactcactggaccgccaaggagctttccgggtcaggagcctgccccttgggagagagggcttcggacgagccctgggaccccgggcacaggtgcccacagtttgtgtgctgtggagatcgcctgatggggcccctgtgcaagtctttgtacctgaaaaaggagagatcatcagccaggtgtaactctgcgccccacgctggaaaaaactgtttcatagaggggctgggctgagacccccccacccctgagtgcctctttcagctcccccatccccatcgcaggccgatgacctggagctaagaccttttattattttttttttacacgacttttttcagaagccctgacctaaggatttatatatgtggattgtcctcaatacccctgtgatatgattatgttttatcccccagagtttggcctactggacttaaggccttgcctgtctgactgacagcctctatctccttatataagacaagtggcaggggacgagtgaagcagagtgagccaccttgggagttctccaacgctctgtgctctggttctaagaaattccctggggaactgcccctggccctcctgtcccactattgctggaggctggacatggtacatactcatgcacatgactctcccccatttcccaggtctctgggtaccccagcctgggctgggggagaatctcttcccccttttctaatgtgctctgtgatgcacacaccaagtggtaggtcaaaggtcagtatatcccggtggtgtattgtcttgctagaccctgctattttcctgaccccctaaatcctctttagggacccagtcactataccctgtctatgccctgtgggctcccagacccctgagctttgagtcagtggcatcacagtttgtagcctcagggggtctggctgggggctggtccatgcttgtggttagtggacagcagccaccctttgacagctacctctggacatctcaagggcttgcagccccactgctccttctaacattttgtttgtttttgagatggagtctcgctctgtcgcccaggctggaatgctgtagcaagatttcggctcactgcaacccccgtctcccgggttcaagcgaatctcctgcctcagccttctgagtagctgggattacaggcaagcaccaccatgcctgctaattttttatttttagtagagatggggtttcatcatgttggccaggctggtctcgaactcctgacctcaagtgatccacctgccttggcctttcaaagtgctgggattacaggcatgagccaccgcacctggcccttctaacgttttttcatcatagtcccaaaaaccaatactttacaagtggtttttgaaaggcaccacttttgtggcatgttctggttgggagagggagtcacagttcctactccccccaccagctatgcttctgctctgagaaggtggttatttatacaaacatggacatactcactcccaagggctgatgagatgctgaattttctttgggggcattcattaattgtcccagctgcagcgactggagcaagtctggaagctgcctgtgctaagaccacccagctgtccctgggttctcatcctagggccttctttgcttccaggtcaggggacctgcttcaatgagaaagcaactgaattgaggctaggagaggtagggagagctgagttctgacttcacctgtgcagaactctctgcccccatgttacctggactggaacagactgtgaatatagcagaaggttccaagaactctggtgtctgacctagaagaggcacagttctctctactggaaagaaaacgatgtagccgattgcacaagggtgccaagggaagacccaggatggcccatcaaaggaacctgggggaggatgcaggaggctgaagggatgcacctggcatttctctcactgtgctcttaccgcatcagcaacccccaacttttgggcctactctgccccccatgcgtgaataccctgcttggatgctgtgcttttccggtttgtctctaagcccctttctccagggcatgttggtttccctggcctctcagtgtcctaactggagcccagagtgccttgttctgagccaggagacggctgagcactggccctccacacctaagcgtcctttacattaacttattggtcttgtataacacctggtgccattgccaagtggctgtgtcctcagctacagagctggaattgtgtggggtttagtgctaaatacttcaataaagtctgttttttgtgattggctg

SEQ ID NO: 12393 - protein, 663 aa, Homo sapiens
MLQMPKLNEIPPGRAGRREARGEGRWPGQTGPEAARLEWRAQGQAGGARAPWDSWGSSRLPTQPGPGWSRCPPSLLCALSFQKSTMESKDEVSDTDSGIILQSGPDSPVSPMKELTHAVHKQQRALEARLEACLEELRRLCLREAELTGTLPAEYPLKPGEKAPKVRRRIGAAYKLDDWALHREDPLSSLERQLALQLQITEAARRLCLEENLSRQARRQRKHSMLQEEKKLQELQRCLVERRRNSEPPPAAALPLGRELSASDDSSLSDGLLLEEEESQVPKPPPESPAPPSRPLPPQTLEGLQPTGPEAGSPERAPVQNSPWKETSLDHPYEKPRKSSEPWSESSSPATTPQDGPSASSLWLLEPASYHVVPIRGVPGQWQGRTSAPATPEIQGRRGQSQSLRVDSFRAGPEGRGRSAFPRRRPTHYTVTVPDSCFPATKPPLPHAACHSCSEDSGSDVSSISHPTSPGSSSPDISFLQPLSPPKTHRHRGAWVPAGSRELVAHHPKLLLPPGYFPAGRYVVVAESPLPPGEWELCRAAPGPAYEEEGTPLRYQRLVPSRSRIVRTPSLKDSPAGRGLSKAAVSEELKWWHERARLRSTRPHSLDRQGAFRVRSLPLGREGFGRALGPRAQVPTVCVLWRSPDGAPVQVFVPEKGEIISQV

SEQ ID NO: 12394 - DNA, 2957 bp, Homo sapiens
  CDS (364)..(1827)
acgtctgctcagctccgcggtaatggaggctagggatgggtgctgaagtatcaggctctggctctagctttagctctggcactggaactgcgtcggagtctgggtctgagtctggcagcccgaagcctggacaccttttcttgattctctaggcgggggctgcctgcgtccaagcagctggtttgcagcgttccaacgctgggagggagttcccttacctggggtccagtctgtaaagttgtcgccgctttctagggaccccgccccaccggctgggactcttccatgcagttgaaactggttgacaaccattaacctgggttgcaactacaggtggcactggaagcagactggttcctggacatgcccggtggaaggaggggccctagtcggcaacagctaagccgttcagctttaccttctttgcagactttggttggtggaggctgtggcaatggaacaggcttgagaaacaggaatggtagtgctattggccttccagtcccacctatcacagccttaatcaccccaggtcctgttcgtcattgccaaattcctgacttgcctgtggatgggagcctactctttgaattcctttttttcatctacctgttggttgctcttttcattcagtacatcaacatttataaaacagtgtggtggtatccttacaatcatcctgcttcttgtacatcactgaattttcatctcattgattatcatctggcagcattcatcacagtgatgcttgcgaggaggcttgtatgggctctcatctcagaggctactaaggcaggtgcagcatcaatgattcactacatggttctgatatcagctcgcttggtactactcactttgtgtggatgggtactttgttggaccctcgtcaatctctttcgaagccattcagtcctcaatctccttttccttggctacccgtttggtgtttatgttcctctttgctgttttcatcaagatagtagagcacatcttcttctcacagactacaactatgtggttcagcacgaggcagtagaggaaagtgcctcgactgtgggaggcttggccaaatccaaagactttctctccttgttgctggagtcgctaaaagaacagtttaataatgccacacccatccccacccacagttgtcccctatctccagacctcattcgcaatgaagtagaatgtctgaaagcagatttcaaccacagaatcaaggaggttctcttcaactccctcttcagtgcctactatgttgcatttctccccctgtgttttgtgaagagtacccagtactatgacatgcgctggtcatgtgagcacctcattatggtgtggatcaatgcttttgtcatgctcaccacgcaactgttgccatccaaatactgtgatttgctacataaatcagctgctcacctgggcaagtggcagaagttggaacatgggtcctacagcaatgctccacagcacatttggtcagaaaatacaatatggcctcaaggggtgctggtgcggcacagcagatgtttatatagagccatggggccttacaacgtggcagtgccttcagatgtatctcatgcccgcttttatttcttatttcatcgaccattaaggctgttaaatctgctcatccttattgagggcagtgtcgtcttctatcagctctattccttgctgcggtcggagaagtggaaccacacactttccatggctctcatcctcttctgcaactactatgttttatttaaacttctccgggacagaatagtattaggcagggcatactcctacccactcaacagttatgagctcaaggcaaactaagctgcctctcaacaatgagggagaactcagataaaaatattttcatacgttctatttttttcttgtgatttttataaatatttaagatattttatattttgtatactattatgttttgaaagtcgggaagagtaagggatattaaatgtatccgtaaacaaggtgatgtgatctttcatgtgttagtatattcgaataatatacatatgagaggtatgcctgtccagtaaagagattgatttgtttgtatggctctggaataactcattcgtttatgaacacatctcatgtattacttgacacagtacctttggtatgtctgcttttctttcaatcctcattatctttagccctcagctggccagtacttattgctaaagaaagggagatcaatggagttgcctaccagcacccattctcttttagttcagctggctaatagtattggaatacattgggaaaagagtgggttaaagtcctaggtggggttctctttgttgcctaccaggagaaagcagtaggcttcctttctaagatacggactcagctggtctattttaccctgtgacatttaaatatacttttgaataagctactatcctgaggctgagggttttgctgccacttttcctgtgtttccacttctgcttccaaagattttcctcttagttgtttgaaataatactttgccagacaggaagtctttagactgcccacattcatgaagaagatgatgtgtggctggatcagtaggagaagctgagtgcaaatgccatgtgggctagagtatgggaaggttgaaaattccaagtaactgggagagtgggcaagtcctcagctgaacaatcttggatgtagtctagcagcaacccacctacaatggcgttatgtttggagttatgaggggaagtgaaagataagaattacctacagctttgtactcagataatttatatccaaaatttgtgttttaaatttcatactccagaactttcatgtttatgagtattagccttttaagttatgggaggtgatatacttagtccattgatgttgtcacttgtcatctaaacttatgagaccttgtcttagagaatctaaaatatattgtcatatgttttctgtgc

SEQ ID NO: 12395 - protein, 488 aa, Homo sapiens
MPGGRRGPSRQQLSRSALPSLQTLVGGGCGNGTGLRNRNGSAIGLPVPPITALITPGPVRHCQIPDLPVDGSLLFEFLFFIYLLVALFIQYINIYKTVWWYPYNHPASCTSLNFHLIDYHLAAFITVMLARRLVWALISEATKAGAASMIHYMVLISARLVLLTLCGWVLCWTLVNLFRSHSVLNLLFLGYPFGVYVPLCCFHQDSRAHLLLTDYNYVVQHEAVEESASTVGGLAKSKDFLSLLLESLKEQFNNATPIPTHSCPLSPDLIRNEVECLKADFNHRIKEVLFNSLFSAYYVAFLPLCFVKSTQYYDMRWSCEHLIMVWINAFVMLTTQLLPSKYCDLLHKSAAHLGKWQKLEHGSYSNAPQHIWSENTIWPQGVLVRHSRCLYRAMGPYNVAVPSDVSHARFYFLFHRPLRLLNLLILIEGSVVFYQLYSLLRSEKWNHTLSMALILFCNYYVLFKLLRDRIVLGRAYSYPLNSYELKAN

SEQ ID NO: 12396 - DNA, 2210 bp, Homo sapiens
  CDS (67)..(519)
gcattccggtaccggacgccgagagcggtttgtctccgtctctggagttgtaggcgagaggtgatcatgtccggtcgcgggaaacagggcggcaaagtgcgagcaaaggccaaatcccgctcctcccgcgcgggcctgcagttcccggtgggccgagtgcacagactgctgcgcaaagggaactacgcggagcgagtgggcgccggggcgccggtgtacctggcggcggtgttggagtaccttacggcggagatcctggagctggctggcaacgccgcgcgtgacaacaagaagaccaggataattccccgccacctgcagctcgccatccgcaacgacgaggagttaaacaagctgctgggcaaagtgaccatcgctcagggcggcgtcctgcccaacatccaggccgtgctgctgccagtttgtgagcactcaggaccaagttctgggaagataccgtcggatcgagctgagctcggggcaggaagtgtctgcggccatatttttcaaaaagtggagtaactttccgtcttggaagggtggctctgatggcacgatgtcaacttgagattcttcctagcctagtagctgctgtgctttcatgctttggatatcagatatctttatatagcacttttatgttcatattttttttttaatgaaggaaacgttcaataagtgagtcatgaggttggaaattcgttcccctgacagtcatattgcataacattgcagcgcctttagtcgtgggttacatatgcttgagcttttaaagtgatgttgtcaagtttctagcttcataatgatcctgtcttcatcatatcatattcactttgagaatcggtttgactttgctttcaaacaaaacaaaaacctcttgcttttaggggttcttacccaacaaataacctgtttgaactctcttatattctcccactagcctgaagcaatgacctcattccagtaatgtctttgggagttgcattgcctaatggcacaatattgctttaataaacatgtaaggaaagataggaccaaatatgtaagtgcagggggaaacacatttcagaccaggaatccacattgaaaagttaacactagtaatcatcttctgcccttaattgacactcctatttatttcatcctcagcaaatttcatcctggctcacagaccccacaaaaaagatcccagtacagatttcacatctttggattcatctttcctgtgagtcggaattgaagtcttccccaaaaatatatgtatatattgtatgtcttcatccttggtagcggctggcccattttcccacatggactttattttgtccccagtatttattgaacagctgtctatgccaggctctgtacaaagtgataggagtagagctgtgaatgaggccaaccagatttccactctctcggagctcactttatttttattggttcctgaagacgggacaaggaacaaatacatacgttaatatgagagatcagcttctgttagtacttgtacctctctgctgtgtgtggatgaatgatggaattacttctcccatgttgccatttttgaggtgtacaaaggtcaggccgtacacacctctgttaggaggcaaattattgggcaggttcgagatgttctgctatttactctgtggttttgtcatatgtaaaagtcataacacctgttttaaggattgagattgttcatttactgtgtgccacatattagacaataaatggaaaaaagtaccatgttcaatgggggtatgggtttatccttataggttaaattataggtaaacattaataggactttttaaaaaatgcctcattgttagaactactactcacagttaccacttggggtcagtggaacaaaatgcatatatggttttgacatttgagtctaaaatgggcataatagtttacctcatagagtttggggagaattgagtgaattaatgtgtgtgaggacactaagattcccatatagaaataggctcaatgaatagtagctgtttttatttctatgtaaagtgagtagcggtagttgatgggagctgttgaaacaggtaaacagcattctagcaatccttcgacttttgtgatagcaaaccataaaaacaattttagtggctgttttactaattaaaggacatccacaattcaatgtataacagaaaaagtaatgattaaagcttgtgaatctg

SEQ ID NO: 12397 - protein, 151 aa, Homo sapiens
MSGRGKQGGKVRAKAKSRSSRAGLQFPVGRVHRLLRKGNYAERVGAGAPVYLAAVLEYLTAEILELAGNAARDNKKTRIIPRHLQLAIRNDEELNKLLGKVTIAQGGVLPNIQAVLLPVCEHSGPSSGKIPSDRAELGAGSVCGHIFQKVE

SEQ ID NO: 12398 - DNA, 2536 bp, Homo sapiens
  CDS (267)..(1643)
gcaatcgccgcagccgcccccgccgtcggccgccgcaccccaagcgactgcccaaactaagcctccgtggctgggtacgggagcgctttggggacaaaaattctccctcaactgtggtctgcattccttcggcccgtgggctgatctggggcgggaagtattagcgtctcagttgcgctgcagccggggaggaaggaggaggccgagcctggggcggagtttgggctgactggggctggaccgggcaagacgccgccgctgcccggatgttgcgatggctgatcgggggaggccgagaaccgcagggactggccgagaaatctcctttacagacaataggtgaagaacaaacccagaatccctacactgaactgctagtactgaaggctcatcatgatattgtacgatttctggtacagttagatgactacagatttgcatctgctggtgatgatggaattgtagttgtgtggaatgcccagacaggggaaaaacttttagaactgaatggacacactcaaaagataacagctattattacatttccttccttggaatcttgtgaagagaaaaatcaactcatcttgacagcctctgctgatagaacagttattgtgtgggatggtgatactaccagacaagttcagagaatatcatgcttccagtctactgtaaagtgtttaactgttcttcagagactagatgtttggctttctggtgggaatgacctgtgtgtgtggaaccgaaaattagatctcctgtgtaagactagccacctttctgatacaggtattagtgctttggttgaaatacctaagaactgtgttgtggcagcagttggcaaagaactgataattttcaggttggtagcacccacagaaggatcactagaatgggatattcttgaagttaagcgcctccttgatcaccaggataatattctctcattgattaatgtcaatgatttgagttttgtcaccggctcccacgtcggagagctgatcatctgggatgccctggactggaccatgcaggcctatgaacgcaacttctgggacccatctccacaactggacacccaacaagaaataaaactctgtcaaaaatcaaatgacatttctattcatcatttcacatgtgatgaagagaatgtatttgctgcagttggaaggggtttatacgtgtatagccttcaaatgaagcgtgtgattgcctgccagaaaactgcacatgactccaatgtcctgcacattgccagacttccaaacaggcagttaatctcatgctcagaagatggcagtgtacgcatttgggagttaagagaaaaacagcagcttgcagctgagcctgtaccaacaggtttttttaacatgtggggatttggaagagtcagcaaacaagccagccaacctgttaaaaagcagcaagaaaatgctacttcatgttcactggagcttattggagatttgattggacactcatcatctgtggagatgtttctatactttgaagatcatggactagtgacgtgctccgctgatcatctcattattttgtggaaaaatggagagcgagaatctggattgcgcagtttaagattatttcaaaaattagaggagaatggtgacttataccttgctgtctagtttaaggaattaaaaatacacatgcatgaaccttgaacatcaaatatcgggtactactctgaaaaccattaatatattgatcacttaaattggtaattttttttgtcagtccataaaattctacatgtttaaattttttgtggacctaccaaccaggaacatgttgcttctcaggtcctagtatatcctccaaagaatataccacaagtttttccatttgactttgagctgctgttgaagtggtgagtgctgtgttttgagcttattttgaacctagatccttgtgaaaggtacaaatagaggtaatagttaagttatggcatttattagaagttttattatttggcttcctttagaattattgtgaagtttaaaaatagcctttctcctgcaaattttcctagtctttagtaactgttagtgttctatatagcacaaacttgaatctctcagccaaaaaagggaacatatatactgtttaagtatggcaagttttctttggtaccaatttgtttagataattttaaaaatgttttttagttctagctactaaaacctgtatgaactcaaatggataggcatcttgtgagggtgtgtttttcccagtgtgaattggcttgaagagccatgggctaaatgggtactagaacaacaactgcccctcatgtacgccaaggatgagctctagatcatttgagaggcacagtgtttccggagtcagggactgcagctgagcgcaactgccccatctgaccactgactcaaatacgaactgcttgagacagacttcttttatgtagttctttgcagtgtccattgagacactataaccagccttgtaacaatatgttttctccttttggtgctaaaaaataaaaatattagaaagt

SEQ ID NO: 12399 - protein, 459 aa, Homo sapiens
MLRWLIGGGREPQGLAEKSPLQTIGEEQTQNPYTELLVLKAHHDIVRFLVQLDDYRFASAGDDGIVVVWNAQTGEKLLELNGHTQKITAIITFPSLESCEEKNQLILTASADRTVIVWDGDTTRQVQRISCFQSTVKCLTVLQRLDVWLSGGNDLCVWNRKLDLLCKTSHLSDTGISALVEIPKNCVVAAVGKELIIFRLVAPTEGSLEWDILEVKRLLDHQDNILSLINVNDLSFVTGSHVGELIIWDALDWTMQAYERNFWDPSPQLDTQQEIKLCQKSNDISIHHFTCDEENVFAAVGRGLYVYSLQMKRVIACQKTAHDSNVLHIARLPNRQLISCSEDGSVRIWELREKQQLAAEPVPTGFFNMWGFGRVSKQASQPVKKQQENATSCSLELIGDLIGHSSSVEMFLYFEDHGLVTCSADHLIILWKNGERESGLRSLRLFQKLEENGDLYLAV

SEQ ID NO: 12400 - DNA, 2541 bp, Homo sapiens
  CDS (127)..(1458)
gcaaagattctcaacctgaagctgcgggaagcagagcagcagcgcgtgaagcaagcagaacaggagcggcttcggaaggaagaaggccaggtccgcctgcgggccctctatgctctgcaggaggagatgctgcagctcagccagcagctggatgcctctgagcagcacaaagccctgcttaaggtcgacctggctgccttccagacccgaggcaaccagctgtgcagcctcatctcagggatcatccgggcctcttcagagagcagctatcccacagcagagagtcaagctgaggctgagcgagctctgcgggaaatgcgggacctcctgatgaacttggggcaggagatcaccagagcctgcgaagacaagaggaggcaggatgaagaagaggcccaggtaaagctgcaagaggcacagatgcagcagggaccagaggcccacaaagagcccccagctcccagccagggcccaggagggaaacagaatgaagacctccaggtgaaggtacaagacattacaatgcagtggtaccagcagctgcaggatgcttccatgcagtgtgtgttgacctttgagggcctgaccaacagcaaggacagtcaggccaaaaagataaagatggacctccagaaggctgctaccatcccagtgagccaaatctctaccattgcaggctcaaaactgaaggagatctttgacaagatccacagcctgctctctggaaaacctgttcaatctggtgggcgctctgtgtctgtcacacttaacccacaggggctggactttgttcaatacaaactggcagagaaatttgtgaaacaaggcgaggaggaagtggcctctcaccatgaagcagcattccccattgcagttgtggcatccgggatctgggagctccaccccagagtgggggacctcattcttgctcatctacataagaagtgtccttactctgttcctttctatcccactttcaaggagggaatggctttggaagactatcagaggatgcttggttaccaagtaaaggattccaaagtggagcagcaagacaactttctaaaacgcatgtcagggatgatccgtctctacgctgctatcatccagctccggtggccatatggaaaccgacaggagattcaccctcatggcttaaatcatggatggcgctggttggcacagatcttaaacatggagcccttgtcagatgtgacggccaccctcctctttgacttcctggaggtgtgtgggaatgccctcatgaagcaataccaggttcagttctggaagatgctaattctcatcaaagaggactactttcccagaattgaagctatcacaagctcaggacagatgggctccttcatacgcctcaagcagttcttggagaaatgtttgcaacacaaggacattcctgtccccaagggctttctgacttcctccttctggcgctcctgatgtcactccatcacccaccatcaccgctgctgcaaagaggcaataataaaggaactgaagacagctgtatttaggagaagtcatgtcagattcagaaatttgccattatgtatttttatgtatttatgccttgtgactaggagaggagattttcatgggtcacaaaattcttggaggtcccttagtagatttggtagttccttaagagatccacgtgataaaataaatggagttggcctttcttgttttttgcaaaagtgataaaaggtctttagcacttggtctcctcccttgtctctagtgtctttcagaaagttggcaataccttaacaaatgcactctgagctggagggagcccaccatttgcacccacctacccaccctcacccctgttcagatgaatttccagaaagagctaaggctcataaggttcccttttaagtattatttaatagttgaggccagatacttacatgcaagtctgggttatggttgttttgcctttctcagcttgtgaagtcattctaaagctagaggaagtatgtgatatacacatggactaaggctcaggtgacactatggctagattaacatctgggattaggactggaaacacatgtcattttgaactaagggaaactctttgtcatcctaatttggaatttggtccctggatggctagggatccatgaaccaggcaggtacctttttgtttttgttttgttttgtttcttttctgtttgaattaagatgggctaagatggggcttgcaacattaaacatgagctgagcatccataagcattgaattgggattaaataaagatgttgggcaggaactgaacactgctaatatgatgataaatatgcctgactaaagccactacagaaatccagagattggctgttaaaatctgttttgtggaaagactaattctctttgatactgcagaggcagtggccatggatctgttcctctgtgctaaatgtcttgtggcagggtgtgtttgtgggggagtgttcactggtactcttgagtggcctgaagtgacccattctatgaattgttaattaaggtgcc

SEQ ID NO: 12401 - protein, 444 aa, Homo sapiens
MLQLSQQLDASEQHKALLKVDLAAFQTRGNQLCSLISGIIRASSESSYPTAESQAEAERALREMRDLLMNLGQEITRACEDKRRQDEEEAQVKLQEAQMQQGPEAHKEPPAPSQGPGGKQNEDLQVKVQDITMQWYQQLQDASMQCVLTFEGLTNSKDSQAKKIKMDLQKAATIPVSQISTIAGSKLKEIFDKIHSLLSGKPVQSGGRSVSVTLNPQGLDFVQYKLAEKFVKQGEEEVASHHEAAFPIAVVASGIWELHPRVGDLILAHLHKKCPYSVPFYPTFKEGMALEDYQRMLGYQVKDSKVEQQDNFLKRMSGMIRLYAAIIQLRWPYGNRQEIHPHGLNHGWRWLAQILNMEPLSDVTATLLFDFLEVCGNALMKQYQVQFWKMLILIKEDYFPRIEAITSSGQMGSFIRLKQFLEKCLQHKDIPVPKGFLTSSFWRS

SEQ ID NO: 12402 - DNA, 2239 bp, Homo sapiens
tttttccggtcggcgtggtcttgcgagtggagtgtccgctgtgcccgggcctgcaccatgagcgtcccggccttcatcgacatcagtgaagaagatcaggttagaaaatggatttctgactggaatctcaccactgaaaaaaagcacacccttttaagactactttatgaggcacttgtggattgtaagaagagtgatgctgcttcaaaagtcatggtggaattgctcggaagttacacagaggacaatgcttcccaggctcgagttgatgcccacaggtaatgttaaacgttactctgatgagggtttgacagcgatgtagaggtaagctacaatattaaattaagtaactgaaatcatgtttgcaactaccagtgatccagagccatttgatagtgtgtatttcctggtgattctaatgtagatactaaaattcaaggtttgatattggaagaactgtggattgaatatgaagtagctgcatggcgtttacctggcgggggggggtattgctggtatggggatgatgatcccaacccaagaattagaacctaatcttgggccaattgaccctaattttaaggttataggtggaaagttgatggcttgccaaaaattaacccattgctaatgagtataagggcttttaacagtcttagatctaactggtaacaagaatagaatcagttttctaaatctatgtaataaggattatgaaacttctttttttggtcattgctttgtgtggacctctacatgataggagttggtaaaaagggaagttggtggtaaagatccttgactttgaggtcaggctgcctccattcacattcttactccacctcttaatgagcacttctgaactgcttcatagttgataaagggggcagagtaatactgtttgtctcctaggttgttgtgaggaataaatgagatgtaaggcaagtgaagcacttagtgtcttggcatgtggttctgctgctgcttactatttgattaccttggtgctttctctccagctatgtttttatctacaattaatatatttcattttgttaaaacagatgaacctgataaatgtgttggcctgtcttaacccaatcctgtagcttttttaatgttgtttatatgttttggactgttagatattttgccgaattaagtatattttatgatctgcaaaaactcaatgaaaagccaggatttcaaaaccctgagcttacatttttgttctctaattaaggtgtattgtacgagcattgaaagatccaaatgcatttctttttgaccaccttcttactttaaaaccagtcaagtttttggaaggcgagcttattcatgatcttttaaccatttttgtgagtgctaaattggcatcatatgtcaagttttatcagaataataaagacttcattgattcacttggcctgttacatgaacagaatatggcaaaaatgagactacttacttttatgggaatggcagtagaaaataaggaaatttcttttgacacaatgcagcaagaacttcagattggagctgatgatgttgaagcatttgttattgacggtaaggcagacagaacattttcatttatttctagaatttctcatctactacatggatcatagtaagatttttatctggaaactgagccttacacaacaaagatttgtttatagcagatgtgtatttagtagattagtggatatatttgttgtagggtgaaaatttagtagaaatataaactgctatattctatcccttgaaatcacgtagaacaaagacgtttaggcaatacaccactgtggttaagagcacagattttagtattagatgtggatttaagaccaggcccttcctttgtgaaacaggaatgtaggggttcatttgtggttgtaagaattaaatgaattaatacaggtaaagcacagtgcctggcacatagtaagtgatctttcaagtgttaaccattaccagtttttttatgattagcctagaaacaagaacttcttccccaacaattagattataaagcaacttaactgctcaggaattttttctgagctttttaaatttgaaagttgggattatgcaattaagattaataaaaggtacagaactattgaccttttttcccctaatgctctaagttttctatgaagaagtaataacttagtaggaaattagtttattcccctatatgagatggtaggggaagaacacctagcattctttt

SEQ ID NO: 12403 - DNA, 2445 bp, Homo sapiens
  CDS (320)..(694)
aggaatgttggtgctcccagcacctagcaccgggagactggagaggtttccaggagagtgacccgagtaggtcccctcctaattctggagccgtccctcgggctgcgcagtggagcgccgaggtggcgggaggctgcggggagcctgcgcggccaagcaccatctgcagtcaggagctcccgggcagcttgcagggcgcagtttttgaaagcgggtgctgcgtgcggaccgcgggcctgcagggatcttttgccagaaatgagggcatactggcctgacgtaattcactcgtttcccaatcgcagccgcttctggaagcatgagtgggaaaagcatgggacctgcgccgcccaggtggatgcgctcaactcccagaagaagtactttggcagaagcctggaactctacagggagctggacctcaacaggtgggtgcgcccttcccccggctgcacttcccagtggggatctctgctgtcgcccaagcctgacagctggatccaggggagtgggtgtagacctcactgccctccagcagcttctgcatgtgcactattcgactactgggatcattcctgaggaatgttctgagcctaccaagcctttccagatcattctacatcacgatcacacagagtgggtgcagagtattgggatgcccatctgggcaccatctcatcatcagagtcggccatagggaaaacgatgactccaaccagcatgtgccgaactctgtggccaagacagtctgacaataagttattgcccacagaggatgtctaagtctttgtgtccactctgtgatcgtgatctagaattttctaccaaggcttgatggggaactaggatattcttctgcaatgattcagaattttacagtgtacctttatactttaataagtgaattctatatatggtagtttggtaggattctgtgtagaagtgctttaggaggtgattgaaagctgtagggacttaccatacggttatgtattgcttggtgatggggtataaaattgtcatgtgaacatcttggagtgcacttacttagctgatacagcccacgacacacatatgctttgtggtatagcctgttgcttcgaggctacaaacctgtacagtgtgtgactctactgagtactgtaggcacctgtatgtaacacaatggtaaggatttgtgtatctaaacatatctcaacatagaaaaggcacagtagaaatgtggtcatatgggaccgccctcgtacatgcaggccttcactgactgaatgtcgtaatgtggcgcatgactgtgtttaaagatttgtccaaatgcagtttaccaggataagcctggaatccgatttcaattgctgtcttttaaagcaggtgtggcaaacgggtggtgatgtgtgtgccagctccactcggtggtggccccagcgctcccatgctccgaaggagtcaggaactggaaagggtacctgcctggagcagtttgtgtgtgtgctaaggggtggggaaggcggggactgggaaccatgtatttgcagtccatgttgacacatttgttgcataaagtcatagaaaacactttcctttaagagtgtcttaatttttaccatgaaatatgatacctgaaaagaacaagaaagcaaagtggaccttcattatacagctaacttttttaaatttaaattttagtgtgcttctaaaattggggataaaaccatccatcaattactaccaagtaagtcttgcttttgcttcttttctcgtgtgtctctcccggggacctccagtagggccgtttcagcctctgagtcaatgggctgtaaattgccccagtgcaaacccccttcctacttaaatgttatcatgtgaacagattttatttgcattttattttcctgcgcatgttgagtaggagctgaaggctgcttagaccagtgatttggaagcacagatttcatggctccctttgtgagaagtgtgtgctccagggtccggcagagcaggtggaatctgcagtttgaagagtcacattcacttttataacgtagtcttatatttgtttgtggtttgttttcatgataaaattgtgatttgttttatgataaaagaaactatagatatttaagcatgacaagatgttattagctggtaagcatatacaaaaagttgctttttgccaggtgtggtgactcacgcctataaatcccaggaccttgggaggctcaggctggaggattgcttgtggctagaatttcgagaccagcctgggcagcagagtgagacctctagaaagaagtaaaagtagctgagcatgatagtatgtgtctgtggtctcagctattcaggaagctaaggtcagaggattgcctgcgcccaggaatttgaggctgcagtgagccatggtcgccccactgcactccagtctgggcgacagccagatcacgtctcttt

SEQ ID NO: 12404 - protein, 125 aa, Homo sapiens
MSGKSMGPAPPRWMRSTPRRSTLAEAWNSTGSWTSTGGCALPPAALPSGDLCCRPSLTAGSRGVGVDLTALQQLLHVHYSTTGIIPEECSEPTKPFQIILHHDHTEWVQSIGMPIWAPSHHQSRP

SEQ ID NO: 12405 - DNA, 1767 bp, Homo sapiens
  CDS (100)..(1767)
ttcccttaggccgatgcgtggagaccattgtttctgccatcaaggaaaacttccaattcaagaaggatggacactgcttgaaagaaatctaccttgtggatgtatctgagaagactgttgaggcctttgcagatgctgttggtgaaagagggtgtgcagaatgctaagaccgatgttgttgtcaactccgttcccttggatctcgtgcttagtagagggcctctttctaagtccctcttggaaaaagctggaccagagctccaggaggaattggacacagttggacaaggggtggctgtcagcatgggcacagtgctcaaaaccagcagctggaatctggactgtcgctatgtgcttcacgtggtagctccggagtggagaaatggtagcacatcttcactcaagataatggaagacataatcagagaatgtatggagatcactgagagcttgtccttaaaatcaattgcatttccagcaataggaacaggaaacttgggatttcctaaaaacatattcgctgaattaatcatttcagaggtgttcaaatttagtagcaagaatcagctgaaaactttacaagaggttcactttctgctgcacccgagtgatcatgaaaatattcaggcattttcagatgaatttgccagaagggctaatggaaatctcgtcagtgacaaaattccgaaggctaaagatacacaaggtttttatgggactgtttctagccctgattcaggtgtgtatgaaatgaagattggctccatcatcttccaggtggcttctggagatatcacgaaaggagaggcagatgtgattgtaaattcaacatcaaactcattcaatctcaaagcaggggtctccaaagcaattttagaatgtgctggacaaaatgtagaaagggaatgttctcagcaagctcagcagcgcaaaaatgattatataatcaccggaggtggatttttgaggtgcaagaatatcattcatgtaattggtggaaatgatgtcaagagttcagtttcctctgttttgcaggagtgtgaaaaaaaaaattactcatccatttgcctcccagccattgggacaggaaatgccaaacaacacccagataaggttgctgaagccataattgatgccattgaagactttgtccagaaaggatcagcccagtctgtgaaaaaagttaaagttgttatctttctgcctcaagtactggatgtgttttatgccaacatgaagaaaagagaagggactcagctttcttcccaacagtctgtgatgtctaaacttgcatcatttttgggcttttcaaagcaatctccccaaaaaaagaatcatttggttttggaaaagaaaacagaatcagcaacttttcgggtgtgtggtgaaaatgtcacgtgtgtggaatacgctatctcctggctacaagacctgattgaaaaagaacagtgtccttacaccagtgaagatgagtgcatcaaagactttgatgaaaaggagtatcaggagttgaatgagctgcagaagaagttaaatattaacatttccctggaccataagagacctttgattaaggttttgggaattagcagagatgtgatgcaggctagagatgaaattgaggcgatgatcaagagagttcgattggccaaagaacaggaatcccgggcagattgtatcagtgagtttatagaatggcagtataatgacaataacacttctcattgttttaacaaaatgaccaatctgaaattagaggatgcaagg

SEQ ID NO: 12406 - protein, 556 aa, Homo sapiens
MYLRRLLRPLQMLLVKEGVQNAKTDVVVNSVPLDLVLSRGPLSKSLLEKAGPELQEELDTVGQGVAVSMGTVLKTSSWNLDCRYVLHVVAPEWRNGSTSSLKIMEDIIRECMEITESLSLKSIAFPAIGTGNLGFPKNIFAELIISEVFKFSSKNQLKTLQEVHFLLHPSDHENIQAFSDEFARRANGNLVSDKIPKAKDTQGFYGTVSSPDSGVYEMKIGSIIFQVASGDITKGEADVIVNSTSNSFNLKAGVSKAILECAGQNVERECSQQAQQRKNDYIITGGGFLRCKNIIHVIGGNDVKSSVSSVLQECEKKNYSSICLPAIGTGNAKQHPDKVAEAIIDAIEDFVQKGSAQSVKKVKVVIFLPQVLDVFYANMKKREGTQLSSQQSVMSKLASFLGFSKQSPQKKNHLVLEKKTESATFRVCGENVTCVEYAISWLQDLIEKEQCPYTSEDECIKDFDEKEYQELNELQKKLNINISLDHKRPLIKVLGISRDVMQARDEIEAMIKRVRLAKEQESRADCISEFIEWQYNDNNTSHCFNKMTNLKLEDAR

SEQ ID NO: 12407 - DNA, 1721 bp, Homo sapiens
  CDS (317)..(1534)
agacgggctgcaagagggagccggcccgacgcggaccgcttccctgcagtgccccgagtcccgggcccgcgccgccgccgcccggctccgctcgcggcccctctgtctgcaggcgtgccccggcggcggcggagagccgtcctcggccgaggaggctgggaaacgcgagcgcaggcggcagagaggcctcaacgccgtccctttcgccaccgccttttccttgcctcgcgccgctgtgcatttctctccttttcctttgtttttttggcccctcgcgggtgtgggcattgttggttagcaaaagtgcagcctcaagatggctgatggcaacgaggatctgcgggctgacgacttgcctgggccagccttcgagagctatgagtccatggagcttgcctgccccgctgagcgcagcggccacgtagccgtcagcgacgggcgccacatgttcgtctggggcggctacaagagtaatcaagtcagaggattatatgacttttatctgcctagagaagaactatggatctacaacatggagactggaagatggaaaaaaatcaacactgaaggtgatgttcctccttctatgtcaggaagctgtgctgtgtgtgtagacagggtgctgtacttgtttggaggacaccattcaagaggcaataccaataagttctacatgctggattcaaggtctacagacagagtgttacagtgggaaagaattgattgccaaggaattcctccatcatcaaaggacaaacttggtgtctgggtatataaaaacaagttaatattttttggagggtatggatatttgcctgaagataaagtattgggaacttttgaattcgatgaaacatctttttggaattcaagtcatccaagaggatggaatgatcatgtacatattttagatactgaaacatttacctggagccagcctataactactggtaaagcaccttcacctcgtgctgcccatgcctgtgcaactgtcggaaatagaggcttcgtgtttggaggcaggtatcgagatgctagaatgaatgatcttcactatcttaatctggatacatgggagtggaatgaattaattccacaaggcatatgcccagttggtcgatcttggcactcactaacaccagtttcttcagatcatctttttctctttggaggatttaccactgataaacagccactaagtgatgcctggacttactgcatcagtaaaaatgaatggatacaatttaatcatccatataccgaaaaaccaaggttatggcacacagcttgtgccagcgatgaaggagaagtaattgtttttggtggatgtgccaacaacttgcttgtccatcacagagctgcacacagtaatgaaatactaatattttcagttcaaccaaaatctcttgtacggctaagcttagaagcagtcatttgctttaaagaaatgttagccaactcatggaactgccttccaaaacacttacttcacagtgttaatcagaggtttggtagtaacaacacttctggatcttaaggcttcataaataatgcctatgatcaccttgcatggacagcaatcctgtaaacatcacagagtggcatcatttgtataattatatgcattgttgtagtttgcacctgttggttttaatgtgcatgtgaatggcctagagaacctatttttgtgtctaaagtttacaataaatgtatttaacacc

SEQ ID NO: 12408 - protein, 406 aa, Homo sapiens
MADGNEDLRADDLPGPAFESYESMELACPAERSGHVAVSDGRHMFVWGGYKSNQVRGLYDFYLPREELWIYNMETGRWKKINTEGDVPPSMSGSCAVCVDRVLYLFGGHHSRGNTNKFYMLDSRSTDRVLQWERIDCQGIPPSSKDKLGVWVYKNKLIFFGGYGYLPEDKVLGTFEFDETSFWNSSHPRGWNDHVHILDTETFTWSQPITTGKAPSPRAAHACATVGNRGFVFGGRYRDARMNDLHYLNLDTWEWNELIPQGICPVGRSWHSLTPVSSDHLFLFGGFTTDKQPLSDAWTYCISKNEWIQFNHPYTEKPRLWHTACASDEGEVIVFGGCANNLLVHHRAAHSNEILIFSVQPKSLVRLSLEAVICFKEMLANSWNCLPKHLLHSVNQRFGSNNTSGS

SEQ ID NO: 12409 - DNA, 1805 bp, Homo sapiens
gtaagtatgcacggatgaagatggaactaagccgagtaagaagacatacaaaagcctcttctgaaggaaaagacagtgtagtcctgcaaaacattttgaggtacattgttttgtctcagctattttgtagcagactcgtgcccccattagtgtgcctctttggaaattatcgcccacatttgtaatatagtcgccattgaaaagttaattatcctttttttagggattttgatgtcatttcttttttttttttaataaaaaggttgaactgttttttttttttttctttttggtattaagtccatcttgtgttggtacattggcagagacatatgctttaaaaacttaaatatttcggaggcacatgttggactactttgttttaattaaactgctagtatttctttgtcaaggatgtttctagttttttgctttattgccttgcattctaatgcagtttgttctgtaactcgagagccagtagcattggattgatggaagtgtagggtttatgaattattgcagctgactaccatacctcacacagcgttggtgttgtgagcggcccatgaaaagccaaattaaaaatcaaggattcagtcaaactaagcaggtactcatgccaggtactcctttctctacccacatccatgtttgaatgctattgcctgtgatctttacgcttaactgttgtgtatcttttttgttctttacaagaagtgcagaggggttttttgtgtattgcgtgaaaacttataaaacaaatgttaacagaatggaattttttttcaactgtatgtagggctgcagtggtggccagaattagatatctttaaagaattttaaatacaataaacacttcatattattcgccttgttacactcaatgcaattctcaagtctataagaggtatgtgcttaatatttcctactgtgtaggagaatttgcagtcagccataggtatgtaggaatagtcactcactggctgatacatttaaagcagcagtgtgaatagcaaggacagacaccttcaatttgtgaaatcaaagaactgatgcactatatagaacgaatttgggtttttaaagaaatattaaaagttaggtactgtaagtgttcttaaaacctgtaaacttcattctgtgggctagtggtgtgggacaaaatattcctaatgaaaggaagtaccaattagttgatttgttggtggcattccccttttgggaaagcaatgtaaggttatgtctgtgtatgtcattcacacttaggcaagcatacacaggcacatggctttaagaaccacactgatgccttgataattaaaaagaatacaagcattccatgtacacatgttaattagcagttagtgactgggccaacactttctcataaaaattggccttttacatgttgtctaattatcatttttccccaaactttgcgttgtaggactactgttcgaagatttttggaagaatactgagaacggcataaagtgaagatcgacatttaaaaaatgaggtgaaagaaagctatagtggcatagaaaaagtataaagctcagttagtttttttattattattattattaaaagttaattcaggactgatgtgacctaccagatttcagaacatgtgttaatagtatatatgccactgaaaacttaggtcctgtatcatacttttttctttaagactttttaagaaatattacttaaacatgtggcttgctcagtgtttaattgcaagttttcaatcttggactttgaaaacaggattaaacgttagtattcgtgtgaatcag

SEQ ID NO: 12410 - DNA, 1562 bp, Homo sapiens
  CDS (205)..(1092)
attgcaaacttggacaagcaagccaaattgtcccgggcatatgatggtaccacttacctgccgggtattgtgggactgaataacataaaggccaatgattatgccaacgctgtccttcaggctctatctaatgttcctcctctccggaactactttctggaagaagacaattataagaacatcaaacgtcctccaggggatatcatgttcttgttggtccagcgttttggagagctgatgagaaagctctggaaccctcgaaatttcagggcacatgtgtctccccatgagatgcttcaggcagttgtactttgcagtaagaagacttttcagatcaccaaacaaggagatggcgttgactttctgtcttggtttctgaatgctctgcactcagctctggggggcacaaagaagaaaaagaagactattgtgactgatgttttccaggggtccatgaggatcttcactaaaaagcttccccatcctgatctgccagcagaagaaaaagagcagttgctccataatgacgagtaccaggagacaatggtggagtccacttttatgtacctgacgctggaccttcctactgcccccctctacaaggacgagaaggagcagctcatcattccccaagtgccactcttcaacatcctggctaagttcaatggcatcactgagaaggaatataagacttacaaggagaactttctgaagcgcttccagcttaccaagttgcctccatatctaatcttttgtatcaagagattcactaagaacaacttctttgttgagaagaatccaactattgtcaatttccctattacaaatgtggatctgagagaatacttgtctgaagaagtacaagcagtacacaagaataccacctatgacctcattgccaacatcgtgcatgacggcaagccctccgagggctcctaccggatccacgtgcttcatcatgggacaggcaaatggtatgaattacaagacctccaggtgactgacatccttccccagatgatcacactgtcagaggcttacattcagatttggaagaggcgagataatgatgaaaccaaccagcagggggcttgaaggaggcgtctagggctttgctcccaagggctgtggctgatgatggtaaataagaacacagaagctgtagctgaacacgggctggctggtgggcttcctaggccagcccagcttgtatgggttctggctacaccagagcaccaagagcccacttgcctgggatggccccacactgtcactcagctgttccttgatcatttttttctagattgatgctcctttctcccatgcattgagctcccatctagcttcagcagggcagaacccttctccagatgtgtgtaacttatgtctgagtatctgggagtagttgaagaacagataattccttccaaacatcaagccttgggattcttggagcaagcagaagccagtaacttcgctctgttagaggtggaggattttcctatggttccccccatttcctgatttgtatttttagatggattaaatagtctcctgttttt

SEQ ID NO: 12411 - protein, 296 aa, Homo sapiens [sequence omitted]

SEQ ID NO: 12412 - DNA, 2402 bp, Homo sapiens
  CDS (6)..(1325)
taaatatggatatgaacagtattaaagagccacagtcaagactaaggaagtggacgacagtggacagcatttctgtgaacacatctttggatcaaaactccagcaaacatggtgctatttcaagtggtttcaggctggaagagtctccatttgttccctatgactttatgaacagcagtacttcaccagccagtcctccaggttcaataggagatggctggccacgtgccaaatcgcctaacggctctagcagtgttaattggccaccagaatttcgtcctggtgagccatggaaaggttatccaaacattgaccctgaaactgacccttacgtcactcctggcagtgtcataaacaatctttcaattaatactgtgcgggaagttgaccacctcagggacaggaacagtgggtcatcctcatccttgaacaccacgctgccttcaactagtgcctggtcatccattcgtgcctccaactacaacgttcccctcagcagtacagcacaaagcacttcagccagaaatagtgattccaaattgacatggtttcctggttcagttacaaacacctctctggctcatgagctgtggaaggtccctttgccacctaaaaacatcactgctccgtcccgcccacctccgggactgactggtcagaagccacccttgtctacgtgggataattctccccttcgtataggtggaggatggggaaattctgacgccagatataccccaggttccagctggggtgagagcagctcagggagaataacaaattggcttgttctaaaaaaccttacacctcagatcgatggctcaactctgcgcactctgtgcatgcagcacggcccgctgatcacattccacctgaacctccctcacggaaatgctctggtccgctacagttcaaaagaagaggtagtgaaggcacaaaagtctctgcacatgtgtgtactggggaacactactattcttgctgagtttgccagtgaagaggagatcagtcgtttctttgcacaaagccagtctctgaccccttctcccggctggcagtctctcgggtccagccagagccggctgggctccctcgactgttcccactcattctccagccggaccgatctcaatcactggaatggtgctgggctgtcgggaactaactgtggagaccttcacggcacttcactctgggggaccccgcattattccacaagcctgtggggtcccccaagcagcagcgacccccgaggaattagcagcccatctcccattaacgcttttctttctgttgaccacctgggtgggggtggagagtccatgtaacagtgtagatgcagactcaccgaccgggacctcagacgcgagggaaaggagcactaagtggggctcgccgcctgcagccaggggccgcctgtgggaacagctattctctgcactttgaataggctttccattttgttttggaggttctcactttgaaccttcttgtttacagatttttttgtttgttttttgagaaaaaaaaatgtttactcttccatcatttaaaaaaaatgtaaaagacaaaaaaaaaatggaggatgatttaaaagatgctttctatctctgggaaaaaggagcagcatttggccatgttcttttgtttttctattcctgtcccaaatcaaagagcatggttctcaggaaaaccagttccccagtttaaaaaaaaaaaaaaaaaaaattccttgtagtttcttagaggaaaaaaagaaaaaccccaacttttagcactgatactacatattgctctgttaaagaattttctctgccaaaaaaaaaagaaaaaacaaaaaaacgcttaaagctggagtttgacattctgctttcagatgctgtctttttattagtgagtgatgatggtttgctaataatcaataggtaataattttttgtaatcccatcaagtggctccatatgtttctgctctctcgtgactgtgttaatgtttaactgttgtaccttaaagccgaaatcagtaactatgcatactgtaaccaaggtattgggcttacagagttgtttgttgtataaagaaaattttaaatgttgttgcaaactaacgagttacaccattttaaactttctttcctcccccctttttttgcccacaaatggtattataatgcttgcttagtcaaagaagagagactaaacaagggtaaaaattttaacagtacagaatttgccatcatatcattgccttgattctaactgtttgtgtcctaagatgcaaaagaagtcagtggcttttaactgtttacaaatagaatgtgattgtaaaatgtacagtttggttgtgtttgaattatgaaatttcttcagatataataaaccatgactttttggctgctcaac

SEQ ID NO: 12413 - protein, 440 aa, Homo sapiens [sequence omitted]

SEQ ID NO: 12414 - DNA, 1640 bp, Homo sapiens
  CDS (21)..(1391)
aagacagatttcctgatataatgacttgtcatcacagatcttgtgtggattgcttacgacaatatttaaggatagaaatctctgaaagcagagttaatattagttgcccagaatgtactgaacggtttaatccccatgatattcgcttgatattaagtgatgatgtcttgatggaaaaatacgaagaatttatgcttagacggtggcttgttgcagatcctgattgtaggtggtgtccagctccggactgtggatatgctgtgatagcatttggatgtgccagctgtccaaaattaacttgtgggcgagagggctgtggaacagagttttgctaccactgtaaacagatttggcaccccaaccagacctgtgatgctgctcgacaagagagagcccagagcttacgtttgagaactatacgctcttcatccattagttatagtcaagagtctggagcagcagctgatgatataaagccatgtccacgatgtgctgcttatataataaagatgaatgatgggagctgcaatcacatgacatgtgctgtttgtggttgtgagttttgttggttgtgtatgaaagaaatctcagatttgcattatctaagtccatcaggatgtactttttgggggaagaaaccctggagccgaaagaagaaaatattgtggcaactgggaacactggttggtgctcctgtcggaatcgctttaatagctggcattgctattcctgcaatgattattggcattcctgtgtatgtgggccgcaagattcacaatcgctatgaaggcaaggatgtttcaaagcacaaacggaatttggccatagcaggtggtgtaacgttgtctgtaatcgtgtctccagtagtagctgcagtgactgtaggtatcggtgttcctattatgttagcttatgtctatggcgtagttccaatttctctttgtcgaagcggaggttgtggagtctcagcaggcaatggaaaaggagttaggattgaatttgatgatgaaaatgatataaatgttggtggaactaacacagctgtagacacaacatcagtagcagaagcaagacacaacccaagcataggggagggaagtgttggtgggctgactggcagtttgagtgcaagtggaagccacatggatcgaataggagccatccgagacaacctgagtgaaacggccagcaccatggcactagctggagccagtataacggggagtctgtcaggaagtgccatggtaaactgttttaacaggttggaagtacaagcagatgtacagaaagaggctgctgtcgccgctgctgggagatgggcctactcgcccgccaccctgcgctgccgccgctctgaggagttaaagaacatccatgatagcagtcttctgtaaatcgaacttttcaagaattctctgaaggaaccaagtaggatattcttacatcatgacttaatgtgaatgcaagaacaagaaataggttttatctctaaatataatgaagggctgtgtgtaaacactgaccctgtctcaattctaacaagcattttagacatgagtttacaccggcaaatgggttcagatcgagatcttcagtcctctgcttcatctgtgagcttgccttcagtcaaaaaggcaccc

SEQ ID NO: 12415 - protein, 457 aa, Homo sapiens
MTCHHRSCVDCLRQYLRIEISESRVNISCPECTERFNPHDIRLILSDDVLMEKYEEFMLRRWLVADPDCRWCPAPDCGYAVIAFGCASCPKLTCGREGCGTEFCYHCKQIWHPNQTCDAARQERAQSLRLRTIRSSSISYSQESGAAADDIKPCPRCAAYIIKMNDGSCNHMTCAVCGCEFCWLCMKEISDLHYLSPSGCTFWGKKPWSRKKKILWQLGTLVGAPVGIALIAGIAIPAMIIGIPVYVGRKIHNRYEGKDVSKHKRNLAIAGGVTLSVIVSPVVAAVTVGIGVPIMLAYVYGVVPISLCRSGGCGVSAGNGKGVRIEFDDENDINVGGTNTAVDTTSVAEARHNPSIGEGSVGGLTGSLSASGSHMDRIGAIRDNLSETASTMALAGASITGSLSGSAMVNCFNRLEVQADVQKEAAVAAAGRWAYSPATLRCRRSEELKNIHDSSLL

SEQ ID NO: 12416 - DNA, 1696 bp, Homo sapiens
aaaaagccggcttccggaagccgggacgatgtccgcatgacaaccgacgttggagtttggaggtgcttgccttagagcaagggaaacagctctcattcaaaggaactagaagcctctccctcagtggtagggagacagccaggagcggttttctgggaactgtgggatgtgcccttgggggcccgagaaaacagaaggaagatgctcctgctgctgtcctatgacctctttgtcaattccttctcagaactgctccaaaagactcctgtcatccagcttgtgctcttcatcatccaggatattgcagtcctcttcaacatcatcatcattttcctcatgttcttcaacaccttcgtcttccaggctggcctggtcaacctcctattccataagttcaaagggaccatcatcctgacagctgtgtactttgccctcagcatctcccttcatgtctgggtcatggtaagagtggcagtctgaattctttttttaatttttattttaaatagaggtggggtcttactttgttaccaaggctggtctcaaactcctgagctcaagcaattctcctgcttctgcctcccaagctcaagcaattctcctgcttctgcctcccaaagtgctggaattacaggcatgagtcactgtgcccggcctgaactctgaattcctgaatcgctaaagggctaggaataacttttcttttcttttcttttctttttttttttttttgagacagagtctcgctctgtcgcctggctggagtgcagtggcgtgatctcagctcactgcaacctccgcttcctgggttcaagcaattctcctccctcagtctcctgagtacctgggattacaggcacgcaccaccacgcccagctaattttttgtgtatttttagtagagacagggtttcaccgtgttagccaggatggtctcgatctctgacctcatgatccgcctgcctctgcctcctaaagtgctgggattacaggcgtgagccaccacgcctggccaggttctgttcttaacctgaaatgatactcaggagcacccctgaggcttctcttctgcttcctccccacagcagcagtgttgtactgctacttctataaacggacagccgtaagactaggcgatcctcacttctaccaggactctttgtggctgcgcaaggagttcatgcaagttcgaaggtgacctcttgtcacactgatggatacttttccttcctgatagaagccacatttgctgctttgcagggagagttggccctatgcatgggcaaacagctggactttccaaggaaggttcagactagctgtgttcagcattcaagaaggaaggtcctccctcttgcacaattagagtgtccccatcggtctccagtgcggcatcccttccttgccttctacctctgttccaccccctttccttcctttcctctctgtaccattcattctccctgaccggcctttcttgccgagggttctgtggctcttacccttgtgaagcttttcctttagcctgggacagaaggacctcccagcccccaaaggatctcccagtgaccaaaggatgcgaagagtgatagttacgtgctcctgactgatcacaccgcagacatttagattttcatacccaaggcactttaaaaaaatgttttataaatagagaataaattgaattcttgttccat

SEQ ID NO: 12417 - DNA, 1628 bp, Homo sapiens
  CDS (45)..(581)
gagcgcggcccctgggttcgaacacggcacccgcactgcgcgtcatggtgctggcctggtatatggacgacgccccgggcgacccgcggcaaccccaccgccccgaccccggccgcccagtgggcctggagcagctgcggcggctcggggtgctctactggaagctggatgctgacaaatatgagaatgatccagaattagaaaagatccgaagagagaggaactactcctggatggacatcataaccatatgcaaagataaactaccaaattatgaagaaaagattaagatgttctacgaggagcatttgcacttggacgatgagatccgctacatcctggatggcagtgggtacttcgacgtgagggacaaggaggaccagtggatccggatcttcatggagaagggagacatggtgacgctccccgcggggatctatcaccgcttcacggtggacgagaagaactacacgaaggccatgcggctgtttgtgggagaaccggtgtggacagcgtacaaccggcccgctgaccattttgaagcccgcgggcagtacgtgaaatttctggcacagaccgcctagcagtgctgcctgggaactaacacgtgcctcgtaaaggtccccaatgtaatgactgagcagaaaatcaatcactttctctttgcttttagaggatagccttgaggctagattatctttcctttgtaagattatttgatcagaatattttgtaatgaaaggatctagaaagcaacttggaagtgtaaagagtcaccttcattttctgtaactcaatcaagactggtgggtccatggccctgtgttagttcatgcattcagttgagtcccaaatgaaagtttcatctcccgaaatgcagttccttagatgcccatctggacgtgatgccgcgcctgccgtgtaagaaggtgcaatcctagataacacagctagccagatagaagacacttttttctccaaaatgatgccttggggtggggagtggtagtgggaagagctcccaccctaaggggcacacactgagttgcttatgccacttccttgttcaaaataaagtaactgccttaatcttatactcatggcttggagttaccttatattcaggtatatgtgatattttgcctggtttgttaaaattgccccatttagattccttctataattgttcttatagataagtaatttatatatgagctgtgttagtatttttttcagtgtgagatctctggattctttcacaataaagctgttgaattttaacaggagtattagtacataaattttctactcaacaattccgagataggattatgcctagtttgtcatatcacagaaaaactccaagttaacttcatgttttggaagggcaggtcgtttttaaagtatttctttttttaactggatgaaaaatcttcatgttaggattaattttcttaatcacctccacactgtacagaggaaactcaagccttaaatgtttaagtaaactctgtctcagttttaggattaaaatacccaccggtggtgtgatgatgccatataccgcagggcttgcttctgtcaagtgtgactctatctcagtaattaaaataagtgctgatctactg

SEQ ID NO: 12418 - protein, 179 aa, Homo sapiens
MVLAWYMDDAPGDPRQPHRPDPGRPVGLEQLRRLGVLYWKLDADKYENDPELEKIRRERNYSWMDIITICKDKLPNYEEKIKMFYEEHLHLDDEIRYILDGSGYFDVRDKEDQWIRIFMEKGDMVTLPAGIYHRFTVDEKNYTKAMRLFVGEPVWTAYNRPADHFEARGQYVKFLAQTA

SEQ ID NO: 12419 - DNA, 1635 bp, Homo sapiens
  CDS (72)..(683)
agtgcgcctgcgcggagctcgtggccgcgcctgctcccgccgggggctccttgctcggccgggccgcggccatgggagaggccgaggtgggcggcgggggcgccgcaggcgacaagggcccgggggaggcggccaccagcccggcggaggagacagtggtgtggagccccgaggtggaggtgtgcctcttccacgccatgctgggccacaagcccgtcggtgtgaaccgacacttccacatgatttgtattcgggacaagttcagccagaacatcgggcggcaggtcccatccaaggtcatctgggaccatctgagcaccatgtacgacatgcaggcgctgcatgagtctgagattcttccattcccgaatccagagaggaacttcgtccttccagaagagatcattcaggaggtccgagaaggaaaagtgatgatagaagaggagatgaaagaggagatgaaggaagacgtggacccccacaatggggctgacgatgttttttcatcttcagggagtttggggaaagcatcagaaaaatccagcaaagacaaagagaagaactcctcagacttggggtgcaaagaaggcgcagacaagcggaagcgcagccgggtcaccgacaaagtcctgaccgcaaacagcaacccttccagtcccagtgctgccaagcggcgccgcacgtagaccctcagccctggtggcggcagagaagcgggcgaggcactgtggtcgctgagggggttggctgggtctgagtgccaccccccaggccacagtgataccatcccagtgccatgagcccacactgcccgccctcaggctctcaggtgaacgtggccgtcagcggggaaacgtgtgtgtcagttggaccatgtgggaccccgatggacctgaaagaccaggatcggtccagctcagatattgagggctctgaagcctagttctgtcttctctggagcagctgtggcttccccgtggctgcttggtgacatggattagcgctacgtgggctgcagcatttgggatccaggctacctagaggggcatcgggccagggaaaacctcggattagcaagcaataaaaatatgacctcactcttcctcaaaggagcccctggtcttccctgtgtgactcagttctttccatctgtttgtcccgctgcaagcctctttctgcgctgactgtgacatcggaacgtggccttcctgtcaccccctccgtgccacgcactgaaggccacccccacccacctgggaaactaagaactggatattttgcctcattcacttgtactgtaacaatgtatataatttggttggtatttcactatttaatttttaagaagcctattttactagtgttttatatgaacaaagtactgcagaagttaaacctgtgttgtattttttctgagatgttttgctttaagagatactttttgctcagtttttatatgccagatacagagaatttgtagcggttattttttgtatgatctagtaacttgcaaacagaccaaatggatgagaggcggggaccgtgcagctgtcggctgatgaggaggcggccgccccagtgctgatggagatgccactttcgtgtgactgcgaacattaaagcacaaaaaaatcc

SEQ ID NO: 12420 - protein, 204 aa, Homo sapiens
MGEAEVGGGGAAGDKGPGEAATSPAEETVVWSPEVEVCLFHAMLGHKPVGVNRHFHMICIRDKFSQNIGRQVPSKVIWDHLSTMYDMQALHESEILPFPNPERNFVLPEEIIQEVREGKVMIEEEMKEEMKEDVDPHNGADDVFSSSGSLGKASEKSSKDKEKNSSDLGCKEGADKRKRSRVTDKVLTANSNPSSPSAAKRRRT

SEQ ID NO: 12421 - DNA, 2082 bp, Homo sapiens
  CDS (13)..(1908)
gactggcgagccatggcgctggggctgcagcgcgcaaggtcgaccacggagctgcgcaaggaaaagtcccgggatgcggcccgcagccggcgcagccaggagaccgaggtgctgtaccagctggctcacacgctgcccttcgcccgcggcgtcagcgcccacctggacaaggcctctatcatgcgcctcaccatcagctacctgcgcatgcaccgcctctgcgccgcaggggagtggaaccaggtgggagcagggggagaaccactggatgcctgctacctgaaggccctggagggcttcgtcatggtgctcaccgccgagggagacatggcttacctgtcggagaatgtcagcaaacacctgggcctcagtcagctggagctcattggacacagcatctttgatttcatccacccctgtgaccaagaggagcttcaggacgccctgaccccccagcagaccctgtccaggaggaaggtggaggcccccacggagcggtgcttctccttgcgcatgaagagtacgctcaccagccgcgggcgcaccctcaacctcaaggcggccacctggaaggtgctgaactgctctggacatatgagggcctacaagccacctgtgcagacttctccagctgggagccctgactcagagcccccgctgcagtgcctggtgctcatctgcgaagccatcccccacccaggcagcctggagcccccactgggccgaggggccttcctcagccgccacagcctggacatgaagttcacctactgtgacgacaggattgcagaagtggctggctatagtcccgatgacctgatcggctgttccgcctacgagtacatccacgcgctggactccgacgcggtcagcaagagcatccacaccttgctgagcaagggccaggcagtaacagggcagtatcgcttcctggcccggagtggtggctacctgtggacccagacccaggccacagtggtgtcagggggacggggcccccagtcggagagtatcgtctgtgtccattttttaatcagccaggtggaagagaccggagtggtgctgtccctggagcaaacggagcaacactctcgcagacccattcagcggggcgccccctctcagaaggacacccctaaccctggggacagccttgacacccctggcccccggatccttgccttcctgcacccgccttccctgagcgaggctgccctggccgctgacccccgccgtttctgcagccctgacctccgtcgcctcctgggacccatcctggatggggcttcagtagcagccactcccagcaccccgctggccacacggcacccccaaagtcctctttcggctgatctcccagatgaactacctgtgggcaccgagaatgtgcacagactcttcacctccgggaaagacactgaggcagtggagacagatttagatatagctcaggatgctgatgctctggatttggagatgctggccccctacatctccatgggtgatgacttccagctcaacgccagcgagcagctacccagggcctaccacagacctctgggggctgtcccccggccccgtgctcggagcttccatggcctgtcacctccagcccttgagccctccctgctaccccgctgggggagtgacccccggctgagctgctccagcccttccagaggggacccctcagcatcctctcccatggctggggctcggaagaggaccctggcccagagctcggaggacgaggacgagggagtggagctgctgggagtgagacctcccaaaaggtcccccagcccagaacacgaaaactttctgctctttcctctcagcctggtgtgttgggggattaatgggattctctggccctcattacctagctggcttaaacctactgttttatagataggaaaccagagaggggcaggggctggttgagggtcatacagaaagtcagtgggccagctgagactaaagcctgatcttctagtttcactaatgggtattaaaaacctctgcagtgaactgagattgcgccactgcaccccagcatgagcgacagaatgggaccttgtc

SEQ ID NO: 12422 - protein, 632 aa, Homo sapiens [sequence omitted]

SEQ ID NO: 12423 - DNA, 1842 bp, Homo sapiens
  CDS (147)..(1469)
aaacatggggcggggcggcgcggccggggaagcgtgatgaaggcctacgagtgcggcgcggcctgaaggggcacgcgggggacctgcaaagctagtgaggggcggggcaggcggcgcggtgggggcgggccgagcccggaggccagatgtgcggacacagccccacgcgcggggccatgcaggtggccatgaacggtaaggcccgcaaagaggcggtgcagactgcggctaaggaactcctcaagttcgtgaaccggagtccctctcctttccatgctgtggctgaatgccgcaaccgccttctccaggctggcttcagtgaactcaaggagactgagaaatggaatattaagcccgagagcaagtacttcatgaccaggaactcctccaccatcatagcttttgctgtagggggccagtacgttcctggcaatggcttcagcctcatcggggcccacacggacagcccctgcctccgggtgaaacgtcggtctcgccgcagccaggtgggcttccagcaagtcggtgtggagacctatggtggtgggatctggagcacctggtttgaccgtgacctgactctggctggacgcgtcattgtcaagtgccctacctcaggtcggctagagcagcagctggtgcacgtggagcggcccattcttcgcatcccacacctggccatccatctgcagcgaaatatcaacgagaactttgggcccaacacagagatgcatctagtccccattcttgccacagccatccaggaggagctggagaaggggactcctgagccagggcctctcaatgctgtggatgagcggcaccattcggtcctcatgtccctgctctgtgcccatctggggctgagccccaaggacatagtggagatggagctctgccttgcagacacccagcctgcggtcttgggtggtgcctatgatgagttcatctttgctcctcggctggacaatctgcacagctgcttctgtgccctgcaggccttgatagattcctgtgcaggccctggctccctggccacagagcctcacgtgcgcatggtcacactctatgacaacgaagaggtggggtctgagagtgcacagggagcacagtcactgctgacagagctggtgctgcggcggatctcagcctcgtgccagcacccgacagccttcgaggaagccatacccaagtccttcatgatcagcgcagacatggcccatgctgtgcatcccaactacctggacaagcatgaggagaaccaccggcctttattccacaagggccccgtgatcaaggtgaacagcaagcaacgctatgcttcaaacgcggtgtcagaggccctgatccgagaggtggccaacaaagcaaggtccccctgcaggatctcatggtccggaatgacaccccctgtggaaccaccattggacctatcttggcttctcggctggggctgcgggtgctggatttaggcagcccccaactggccatgcactctatccgggagatggcctgcaccacaggagtcctccagaccctcaccctcttcaagggcttctttgagctgttcccttctctaagccataatctcttagtggattgagccctcttggaaagacttctctgccatccctttgcacctgagaggggaagttctcagctgagctgaagctggattattaaagtggattgtcactcagactctccgtgctacgcttatttggagactagaggagtgggagttgagcctggcttgaacctttggaaccagaaaagttggggagcaggtggaggaggccacactcctgggagctgatggttttaaatctggttttaaatctc

SEQ ID NO: 12424 - protein, 441 aa, Homo sapiens [sequence omitted]

SEQ ID NO: 12425 - DNA, 1847 bp, Homo sapiens
  CDS (102)..(1790)
aggggataggacgaagaaaccgaagggaaagctcagttgcagcggcgactttcagtttcatttccacggaccctcctgcctgggccgcagccgccgccgcgatgcccagtaagttcagctgccggcagctccgggaggcgggccagtgtttcgagagtttcctggtcgttcggggactggacatggagacagatcgcgagcggctgcggaccatttataaccgcgacttcaagatcagctttgggacccccgcccctggcttctcctccatgctgtatggaatgaagattgcaaatctggcctacgtcaccaagactcgggtcaggttcttcagactcgaccgctgggccgacgtgcggttcccagaaaagaggagaatgaagctggggtcagatatcagcaaacaccacaagtcactgctagccaagatcttttatgacagggctgagtatcttcatgggaaacatggtgtggatgtggaagtccaggggccccatgaagcccgagatgggcagctccttatccgcctggatttgaaccgcaaagaggtgctgaccctgaggcttcggaatggcggaacccagtctgttaccctcactcacctcttcccactctgccggacaccccagtttgctttctacaatgaagaccaggagttgccctgtccactgggccccggtgaatgctatgaactccatgtccattgtaagaccagctttgtgggctacttcccagccacagtgctctgggagctgctgggacctggggagtcgggttcagaaggagccggcacattctacattgcccgcttcttggctgccgtcgcccacagccccctggctgcacagctgaagcccatgactcccttcaagcggacccggatcaccggaaaccctgtggtgaccaatcggatagaggaaggagagagacctgaccgcgctaagggctatgacctggagttaagtatggcgctggggacatactacccacctccccgcctcaggcagctgctccccatgcttcttcagggaacaagtatcttcactgcccctaaggagatcgcagagatcaaggcccagctggagacagccctgaagtggaggaactatgaggtgaagctgcggctgctgctgcacctggaggaactgcagatggagcatgatatccggcactatgacctggagtcggtgcccatgacctgggaccctgtggaccagaaccccaggctgctcacgctggaggttcctggagtgactgagagccgcccctcagtgctacggggcgaccacctgtttgcccttttgtcctcggagacacaccaggaggaccccatcacatataagggctttgtgcacaaggtggaattggaccgtgtcaagctgagcttttccatgagcctcctgagccgctttgtggatgggttgaccttcaaggtgaactttaccttcaaccgccagccgctgcgagtccagcaccgtgccctggagctgacagggcgctggctgctgtggcccatgctctttcctgtggcacctcgggacgtcccgctgctgccctcagatgtgaaactcaagctgtacgaccggagtctggagtcaaacccagagcagctgcaggccatgaggcacattgttacgggcaccacccgtccagccttaactgcctgcctgaccctgaaccagaacccagctgaactgcccctccaagggacaggaaggctgggggagggagtttacaacccaagccattccaccccctcccctgctggggagaatgacacatcaagctgctaacaattgggggaaggggaaggaagaaaactctgaaaacaaaatcttgttctatgc

SEQ ID NO: 12426 - protein, 563 aa, Homo sapiens
MPSKFSCRQLREAGQCFESFLVVRGLDMETDRERLRTIYNRDFKISFGTPAPGFSSMLYGMKIANLAYVTKTRVRFFRLDRWADVRFPEKRRMKLGSDISKHHKSLLAKIFYDRAEYLHGKHGVDVEVQGPHEARDGQLLIRLDLNRKEVLTLRLRNGGTQSVTLTHLFPLCRTPQFAFYNEDQELPCPLGPGECYELHVHCKTSFVGYFPATVLWELLGPGESGSEGAGTFYIARFLAAVAHSPLAAQLKPMTPFKRTRITGNPVVTNRIEEGERPDRAKGYDLELSMALGTYYPPPRLRQLLPMLLQGTSIFTAPKEIAEIKAQLETALKWRNYEVKLRLLLHLEELQMEHDIRHYDLESVPMTWDPVDQNPRLLTLEVPGVTESRPSVLRGDHLFALLSSETHQEDPITYKGFVHKVELDRVKLSFSMSLLSRFVDGLTFKVNFTFNRQPLRVQHRALELTGRWLLWPMLFPVAPRDVPLLPSDVKLKLYDRSLESNPEQLQAMRHIVTGTTRPALTACLTLNQNPAELPLQGTGRLGEGVYNPSHSTPSPAGENDTSSC

SEQ ID NO: 12427 - DNA, 1595 bp, Homo sapiens
  CDS (290)..(1084)
ggttggctctgagctccttccaaaagatgaattaaatgatctgatcgaccgagccttcagcagattccgtcacagagaagtggtccatctgtccaggttgaggaatgggctgaacgtgttggagctgtggcatggcgtcacatatgcatttaaggacctgtccctgtcctgcacaacacagttcctgcagtacttcctggagaagagggagaagcacgtcactgtggttgtaggaacatctggggacacaggaagtgctgccattgagagtgttcaaggggcaaagaacatggacattatcgttctgctgcccaaaggtcactgcacaaagattcaggagctccagatgacaacggtgctgaagcagaacgtacatgtgtttggagtggagggaaacagcgatgagctcgatgagccgatcaagactgtgtttgccgatgtggcttttgtcaagataggcctgcccatccgtctggtcgtggcagtgaaccgcaatgacatcatccacaggactgtccagcagggagacttctctctctctgaggctgttaaatcaaccttggcatcagctatggacattcaggtgccctacaacatggagagggtgttctggctgctctctggctctgacagccaggtgacaagagccctcatggagcagtttgaaaggacccaaagtgtgaatctgcccaaggaactgcacagcaagctttcagaggcagtgacatccgtgtcagtgtcggatgaagccatcacccagaccatgggccgctgctgggatgagaaccagtacttgctgtgcccccactcagcggtggccgtgaactaccattaccagcagatagacaggcagcagcccagcactccccggtgctgcctcgcccctgcctctgcagccaagttcccggaagctgtcctggctgctggcctgacccctgagactcccgcggagatcgtagccctggagcacaaggagacacgctgcaccctgatgcggagaggtgacaactggatgctgatgcttcgggacaccattgaggaccttagccgacagtggaggagtcatgccctcaacacctcccagtagcctggctggaggtggctttctttaggcttcagatcccaggaagatgcaccttctgagctgccttgtgcaccctccccattaagcgtaggttaggaggtttccgggaggctgctcagctggatctggagccagctggctttgctccgttccctggctagtctgtgcctggtcaccagggaggctgagtgaggggctgtgaacagttgccggaagcaccccctccctccccggcccgtgcagcagtgtctgagctgtagtgaaagtttcagggcctgcaaaagaagaggcttgggcacaggactgaccatggctccaggggtttaggacccccagacctgtgaaggtgggagcagctcaccaccttcacgcaggctttgtatgttctctgagccttagttgattttggcccccaaaccaaatccaaaggttctggcccaccttgtcagaggcttccaccctgctcacatgttgggaatccctggaataaaatgcttgttcagtgtgatgg

SEQ ID NO: 12428 - protein, 265 aa, Homo sapiens
MDIIVLLPKGHCTKIQELQMTTVLKQNVHVFGVEGNSDELDEPIKTVFADVAFVKIGLPIRLVVAVNRNDIIHRTVQQGDFSLSEAVKSTLASAMDIQVPYNMERVFWLLSGSDSQVTRALMEQFERTQSVNLPKELHSKLSEAVTSVSVSDEAITQTMGRCWDENQYLLCPHSAVAVNYHYQQIDRQQPSTPRCCLAPASAAKFPEAVLAAGLTPETPAEIVALEHKETRCTLMRRGDNWMLMLRDTIEDLSRQWRSHALNTSQ

SEQ ID NO: 12429 - DNA, 1604 bp, Homo sapiens
  CDS (185)..(934)
gtaagtaagcctgccagacacactgtgacggctgcctgaagctagtgagtcgcggcgccgcgcactggtggttgggtcagtgccgcgcgccgatcggtcgttaccgcgaggcgctggtggccttcaggctggacggcgcgggtcagccctggttcgccggcttctgggtctttgaacagccgcgatgtcgatcttcacccccaccaaccagatccgcctaaccaatgtggccgtggtacggatgaagcgtgccgggaagcgcttcgaaatcgcctgctacaaaaacaaggtcgtcggctggcggagcggcgtggaaaaagacctcgatgaagttctgcagacccactcagtgtttgtaaatgtttctaaaggtcaggttgccaaaaaggaagatctcatcagtgcgtttggaacagatgaccaaactgaaatctgtaagcagattttgactaaaggagaagttcaagtatcagataaagaaagacacacacaactggagcagatgtttagggacattgcaactattgtggcagacaaatgtgtgaatcctgaaacaaagagaccatacaccgtgatccttattgagagagccatgaaggacatccactattcggtgaaaaccaacaagagtacaaaacagcaggctttggaagtgataaagcagttaaaagagaaaatgaagatagaacgtgctcacatgaggcttcggttcatccttccagtcaatgaaggcaagaagctgaaagaaaagctcaagccactgatcaaggtcatagaaagtgaagattatggccaacagttagaaatcgtatgtctgattgacccgggctgcttccgagaaattgatgagctaataaaaaaggaaactaaaggcaaaggttctttggaagtactcaatctgaaagatgtagaagaaggagatgagaaatttgaatgacacccatcaatctcttcacctctaaaacactaaagtgtttccgtttccgacggcactgtttcatgtctgtggtctgccaaatacttgcttaaactatttgacattttctactttgtgttaacagtggacacagcaaggctttcctacataagtataataatgtgggaatgatttggttttaattataaactggggtctaaatcctaaagcaaaattgaaactccaagatgcaaagtccagagtggcattttgctactctgtctcatgccttgatagctttccaaaatgaaagttacttgaggcagctcttgtgggtgaaaagttatttgtacagtagagtaagattattaggggtatgtctatacaacaaaagggggggtctttcctaaaaaagaaaacatatgatgcttcatttctacttaatggaacttgtgttctgagggtcattatggtatcgtaatgtaaagcttggatgatgttcctgattatctgagaaacagatatagaaaaattgtgccggacttacctttcattgaacatgctgccataacttagattattcttggttaaaaaataaaagtcacttatttctaattcttaaagtttataatatatattaatatagctaaaattgtatgtaatcaataaaaccactcttatgtttatt

SEQ ID NO: 12430 - protein, 250 aa, Homo sapiens
MSIFTPTNQIRLTNVAVVRMKRAGKRFEIACYKNKVVGWRSGVEKDLDEVLQTHSVFVNVSKGQVAKKEDLISAFGTDDQTEICKQILTKGEVQVSDKERHTQLEQMFRDIATIVADKCVNPETKRPYTVILIERAMKDIHYSVKTNKSTKQQALEVIKQLKEKMKIERAHMRLRFILPVNEGKKLKEKLKPLIKVIESEDYGQQLEIVCLIDPGCFREIDELIKKETKGKGSLEVLNLKDVEEGDEKFE

SEQ ID NO: 12431 - DNA, 1760 bp, Homo sapiens
  CDS (462)..(1598)
gtcgcactccttctccccgagacttggtactgggagataggacgggagtctcctacacgcagtcaacacttgccacgagcggctagacttaggacaggcaagttgccctgccatccttctatcgcccccacccctcctttacttaagggcgatggcagagacgtcctcctcccccttctcctcctctttggtgcctccagccaggaggcgggagcgatccacagcagctgacccagctcaggcactgcctctctcacagccctcaagacacaccatgggcccagaggcaggtttgctacacagcagcgacgacgcgggcggcggccccagcgactcgcaactgcctccctgaccacagcggccaccgcccaacacccccgagaagccatcgccaccaccggcaggagaacctagggtccataaagccatcttcgcgatcgactaaagctacgtcaacaactatggcgggcgacgggcggcgggcagaggcggtgcgggaaggatggggtgtgtacgtcacccccagggcccccatccgagagggaaggggccggctcgcccctcaaaatggcggcagcagcgatgcgcctgcgtacagaactcctccgtcgcgccagggccggcgggaagtgaggttctcggacgagccgccagaagtgtacggcgacttcgagcccctggtggccaaagaaaggtccccggtgggaaaacgaacccggctagaagagttccggtccgattctgcgaaagaggaagtgagagaaagcgcgtactaccttcggtctaggcagcggaggcagccgcgaccccaggaaaccgaggaaatgaagacgcgaaggactacccgccttcagcagcagcactcagagcagcctccgctacagccgtctcctgttatgaccaggagagggctgcgggactctcattcctctgaagaggatgaagcatcttcccaaactgatttaagccaaacgatctcaaagaaaactgtcaggagcatacaagaggctccagcagtgagtgaagatcttgtaatcaggttacgtcgaccccctctaagatacccaagatatgaagccaccagtgtccaacagaaggtcaatttctctgaagaaggagaaactgaagaagatgatcaagacagctctcacagcagtgtcactactgttaaggccagatccagggattctgatgaatctggagataaaaccaccagatcatctagtcaatatatagaatcattttggcagtcatcacaaagtcaaaacttcacagctcatgataagcaaccttcagtgctaagctcaggctctactttgatcttctacaaatattgtgaccatgaaaacgcggccttcaaagatgtagccttagtcctgactgtcttattggaggaagagacacttggaacaagtctaggcctaaaggaagttgaagaaaaagtaagagattttcttaaagtcaagttcaccaattctaacacacccaactcctacaatcatatggacccagacaaactgaatggcctctggagccgtatttctcacttagttctgcctgtgcaacctgaaaatgccctgaaaaggggcatctgcttataagaagtgagagagaagaaaaatcatgtcccaagttctgagaattgttcacactttctaaccagagacagaattcagagctctttttgaaagaactagtttctttttaaagaagttaagtgcttacataaacatggaacatataaatcattcattcaacct

SEQ ID NO: 12432 - protein, 379 aa, Homo sapiens
MAGDGRRAEAVREGWGVYVTPRAPIREGRGRLAPQNGGSSDAPAYRTPPSRQGRREVRFSDEPPEVYGDFEPLVAKERSPVGKRTRLEEFRSDSAKEEVRESAYYLRSRQRRQPRPQETEEMKTRRTTRLQQQHSEQPPLQPSPVMTRRGLRDSHSSEEDEASSQTDLSQTISKKTVRSIQEAPAVSEDLVIRLRRPPLRYPRYEATSVQQKVNFSEEGETEEDDQDSSHSSVTTVKARSRDSDESGDKTTRSSSQYIESFWQSSQSQNFTAHDKQPSVLSSGSTLIFYKYCDHENAAFKDVALVLTVLLEEETLGTSLGLKEVEEKVRDFLKVKFTNSNTPNSYNHMDPDKLNGLWSRISHLVLPVQPENALKRGICL

SEQ ID NO: 12433 - DNA, 2388 bp, Homo sapiens
  CDS (87)..(641)
ttttatttattgctgtggaaggcttcctctttgaagctgatttgggaaggaagccaccagctatcccaataaggtactatgccataatggtgaccatgttcttcaccgtgagcgtggtgaacaactatgccctgaatctcaacattgccatgcccctgcatatgatatttagatccggttctctaattgccaacatgattctaggaattatcattttgaagaaaagatacagtatattcaaatatacctccattgccctggtgtctgtggggatatttatttgcacttttatgtcagcaaagcaggtgacttcccagtccagcttgagtgagaatgatggattccaggcatttgtgtggtggttactaggtattggggcattgacttttgctcttctgatgtcagcaaggatggggatattccaagagactctctacaaacgatttgggaaacactccaaggaggctttgttttataatcacgcccttccacttccgggtttcgtcttcttggcttctgatatttatgaccatgcagttctattcaataagtctgagttatatgaaattcccgtcatcggagtgaccctgcccatcatgtggttctacctcctcatgaacatcatcactcagactcctacttaactggaagagaaatgtctattaaatgtctctcctctttctctgggtcaagaccatgtaattttatgcttcagagatgaagatactgtttgtttacaaagagtttagtttttaagacatccaaaactctatgctagagcaaaaatcaaatagcaaaggacactagccagaaaatacagtgtgtgtgtgtgcacctgtgtgcctgctgaacaacttgacagtgtaacagataaggtaactgaagatggtggatatttgaattgtattagcttaatgtctacatatctttggccaaaactctattgtcatattagaaacatgttatctttttcatgtttattagtaatttatttttgattctttgttttctttttcgtccaactaaaacaactgtaatgtacttgatacatttatatcaagttctaaagtatttagacaaatccaaatactttgtttttagttttttcctcctttccatcctgttaaccacagtgaaacgctgcagtattttgatttggtcagtgctacggaggaagaccatgaaagctgaattggtctgtgccacccagagtaaacctcttctcttcttctggaaagatggcgtgatgtttttcaaggattctaataaatatcccgcagtcatctcctgagcagctttcctctgtttcacttcggaactccttcccccactttcttcactccagtttcttcacttgcagcgttttctgctaagaaagacttatcatcttgtatctgtttatgcctctcttctttggggcccctggatgtttttgtggatttttacagagtatttatatctgcacagcgtgtattttgttatacattcttacaagcattgatattggggggtacattcataatagtgagaatatctggcagaatgtgtgaatgccatatctgtagatgacgatgaatgtgaagggttaatgtagaaatgtttgtttattctgttacagctcaaaatggaggctgagaatctctaccaccattcccttctctatttgagaatctctaccaccattcccttctctatttgggaaacaatactctcttattttgctatttttaccttcccattaactggcttcactcaacagtgccagatacctatggagaggggaagtaaaacaccttaggtcaggaataataaaccaatgagttagctcagggccggtggacatgttcactggtggaccagttggcattgacctaaacggacagagaaatgcacatggaggagaactacgttgaaatcaagatcctatgtctgttgtattttctctttgcctggagtaaatagcattataagtcattccacccttattagataaccaaagcatattggtctcaatagctttctcctgaaaaatgtgattgaatcttacctgtagcagttcactcttaaggttgaaagaactgtcaatatagataaaatccattccttattattattgattggtgtgacatttgaaaatgtgtctaaacaatatttgtaagtaaaagaaccagtcataagcctcaaatgtgttcagtgtgtaccaagctggaatgggagactggcccctcttggctttaaagtagcatgttgtctttttctagcagcttcttcctagtagacattccagggatgggaggggccagggatcatgtcttactcatttctgtatcgccagcccctggcatagtgtctggcttatgttatgtgaataaatgaatgcttgccaag

SEQ ID NO: 12434 - protein, 185 aa, Homo sapiens
MVTMFFTVSVVNNYALNLNIAMPLHMIFRSGSLIANMILGIIILKKRYSIFKYTSIALVSVGIFICTFMSAKQVTSQSSLSENDGFQAFVWWLLGIGALTFALLMSARMGIFQETLYKRFGKHSKEALFYNHALPLPGFVFLASDIYDHAVLFNKSELYEIPVIGVTLPIMWFYLLMNIITQTPT

SEQ ID NO: 12435 - DNA, 1571 bp, Homo sapiens
gataaatgccccatatatataaaagtgaaaacaatactgtaccaatgaggaagagagttttgtaaaagcaagcaggctggctgtcattaaaagttatcttaaataacttgtcgcagcccactcccaccagtcctgaaaatagttcattcaagtggtaaaataagacaaggcagaggacgatgtctctaacttccctgatgtgagatctaaagccccattcctaactcttggttttagaattgaggaaagtggaataaatgcatttggaaaggatctgttttcttcccaggtttcctgcctgggttgaaaataaggtttcaggggatggaagcaactttgaggaacataaagaggtattggggttcatcaattcatctttgtttcaagatggttcccccccaccctccacaatgcaagttaattaggagataatttagctaccttgtgaattagttttaagataagtatctttttaagctttgtcactttaattgccccactgattgataagaagtagttatttctaattgacacttttttgatgtccattggaagcatttatttggaactttttgggggtggaaggaaagttaattaattttatcagtctacccccaaaaggactctgcctaattttgttgaagaagacaaaggaagtgaaggaaaccaaataaaaaatcaatctcatggaattttaattattaagggacactttggtttaaattagagggcatctactaatataatacgtcaaaacgttctatttatggcctcaaatctctaatttattgagatgcattttataggtattcattttcctatggatacactcaacggccctttatatgcttccttcattttggagcaggttcctctgctgtgtaaataatttttgtgaaaagtaaaatctgtcaaacttggtatgcccagaaaaaatgaaatcatttttgtaagagccaattgtaagaaagatttactaatagtcatccttgttctgtaattattgatggagttgggtataaaggtgaaactttacttacagtgacttgccttttcatacctaaaccttggagtaaacagtttaatcattcacatcctccagaacattttgctgtgagagagaaaggagtgaaagaataaggagaaaaagaaagacactgaaaggaggcaatgggggtggaaaggaaagaaagggagaaggtagctggagagaataaaatgaaagcattcatttcagaaatgaagatagccaggtgcatggaacctttgccattcaatataagaaaattgaaatcctgctttcaaaatacatttttgttaacaccaaatctctaccacagtctctaagcaacccctaaccaccaagggatacccccagttttctaccccttaaaaaaaaagaggagaattttaggaagctggctgatccggatcttggatatctggctgtcaaagtctttatttggggtccatgaaaaggaagtaagaaaacgcacattgtgctctgggatttataaagagattcgagtgttgtttatgtttattttattattaaagcccctgtgatcttc

SEQ ID NO: 12436 - DNA, 1637 bp, Homo sapiens
  CDS (522)..(1202)
gttcggtgcgcggccggggccggagttcgctgcaagtcggcggaaagtttggctgcgcgggttcccccgaagttcagagtgaagacatttccacctggacacctgaccatgtgcctgccctgagcagcgaggcccaccaggcatctctgttgtgggcagcagggccaggtcctggtctgtggaccctcggcagttggcaggctccctctgcagtggggtctgggcctcggccccaccatgtcgagcctcggcggtggctcccaggatgccggcggcagtagcagcagcagcaccaatggcagcggtggcagtggcagcagtggcccaaaggcaggagcagcagacaagagtgcagtggtggctgccgccgcaccacctcagtggcagatgacacaccaccccccgagcgtcggaacaagagcggtatcatcagtgagcccctcaacaagagcctgcgccgctcccgcccgctctcccactactcttcttttggcagcagtggtggtagtggcggtggcagcatgatgggcggagagtctgctgacaaggccactgcggctgcagccgctgcctccctgttggccaatgggcatgacctggcggcggccatggcggtggacaaaagcaaccctacctcaaagcacaaaagtggtgctgtggccagcctgctgagcaaggcagagcgggccacggagctggcagccgagggacagctgacgctgcagcagtttgcgcagtccacagagatgctgaagcgcgtggtgcaggagcatctcccgctgatgagcgaggcgggtgctggcctgcctgacatggaggctgtggcaggtgccgaagccctcaatggccagtccgacttcccctacctgggcgctttccccatcaacccaggcctcttcattatgaccccggcaggtgtgttcctggccgagagcgcgctgcacatggcgggcctggctgagtaccccatgcagggagagctggcctctgccatcagctccggcaagaagaagcggaaacgctgcggcatgtgcgcgccctgccggcggcgcatcaactgcgagcagtgcagcagttgtaggaatcgaaagactggccatcagatttgcaaattcagaaaatgtgaggaactcaaaaagaagccttccgctgctctggagaaggtgatgcttccgacgggagccgccttccggtggtttcagtgacggcggcggaacccaaagctgccctctccgtgcaatgtcactgctcgtgtggtctccagcaagggattcgggcgaagacaaacggatgcacccgtctttagaaccaaaaatattctctcacagatttcattcctgtttttatatatattttttgttgtcgttttaacatctccacgtccctagcataaaaagaaaaagaaaaaaatttaaactgctttttcggaagaacaacaacaaaaaagaggtaaagacgaatctataaagtaccgagacttcctgggcaaagaatggacaatcagtttccttcctgtgtcgatgtcgatgttgtctgtgcaggagatgcagtttttgtgtagagaatgtaaattttctgtaaccttttgaaatctagttactaataagcactactgtaatttagcacagtttaactcc

SEQ ID NO: 12437 - protein, 227 aa, Homo sapiens
MMGGESADKATAAAAAASLLANGHDLAAAMAVDKSNPTSKHKSGAVASLLSKAERATELAAEGQLTLQQFAQSTEMLKRVVQEHLPLMSEAGAGLPDMEAVAGAEALNGQSDFPYLGAFPINPGLFIMTPAGVFLAESALHMAGLAEYPMQGELASAISSGKKKRKRCGMCAPCRRRINCEQCSSCRNRKTGHQICKFRKCEELKKKPSAALEKVMLPTGAAFRWFQ

SEQ ID NO: 12438 - DNA, 1784 bp, Homo sapiens
  CDS (111)..(839)
accaagaatcaatactacaactgcaggagctccttcatcttaaattcggtgtagccacagaaatacttctcaaacaagctagtactttggcagatctggacagtggaaatatggaaaaagtcattaaagatgaaaatgttactctgtatgtgtgggcaaacctcaagaagaatccaaggcacagaagtgttagattctctgaaacacaaattggatttgagattccaaggatattagcaacaagtgacattgctgtacgactcctgcatacccactatgatcatgtttctgcactgcaccctgtttcaacaccatcaaaagaatacacttctgcagtaactgagcttgtcaaagatgatgttaagaatgtagaaaaagcaatcagcaaggaggtcgaagaagagtccaaacaacaagaaagagggtctcacttaattcaggaggaagaaataaaagttgaggaggaacaaggtgatattgaagtgaaaatgagttctgctgaggaagaatctgaagccataaaatgtgaacgagagatgaaagtattaagtgaaactgtttcagcagcacagttgttgctggtagagaattcttctgaaaagccagatttctttgaagacaatgtggtggatttatgccagttcacaactctgggtggagtataccacttggatattttggagcttcctccacagtgtaaaccagtgaagggatggatgattgtggaaatactcaaagaaggattacagaaatacacatatcctccggaaactacagaagagtttgagacagaaaatgctttcccacctatagaggtccacttgaggttcatgagaatgtaatcttttttgaggatcctgtggttgtaaggtgggatgctgaaggtaaacattggagaactgatggcatcagcaatgtatcctacaaaccaaaagaaagacttgtaacattcagcctggacacctttggccctgttaccttgattcaagatgctcatattaacatgccgtaccagtcatgggaactaagaccacttgatgtaaataaagtacttttaactgtgactacagtatttactgagattcaaatacaaattaaggaaaacctctgcatgttatcttcaatcaaactaaaagacaagaaacacatctctattttggaaggaacctggatgactcctattcctttcattattgctttgaaagaagctggactgaatatctttcctactagacactctcatttttatgttattataaacaataaggttcctttggtagaagtgaaagcttatcgacagatggccctactaagttctgcttttgcatttggttggagcaagtggaacctactatgtaattctacaaaagtcgtatttaaggtgagggaacaccttactgaagaatgtactgagaatcctaattgggcccttttaatgtttagtggtgacagagcacaaagactgaagatcaaggaagagagtgaggcattttctgaagcacttaaagaagaaactgagtttcattctactttatatcacatggtgaaggattttgcttctgaggaagcaatggagaaagtcaggagttccaactgtcagtttgtcaactctgtgtgccacatgctgctctctaccagattgctcagctactcctaacctccacttacaaactgtattgtaagtatgaagaaccaagcatggtgaaagacaggtatttctgcaacacaatgtaatgagtgaatgaatacatttcaaatcaactattaaaaattttctaatctgc

SEQ ID NO: 12439 - protein, 243 aa, Homo sapiens
MEKVIKDENVTLYVWANLKKNPRHRSVRFSETQIGFEIPRILATSDIAVRLLHTHYDHVSALHPVSTPSKEYTSAVTELVKDDVKNVEKAISKEVEEESKQQERGSHLIQEEEIKVEEEQGDIEVKMSSAEEESEAIKCEREMKVLSETVSAAQLLLVENSSEKPDFFEDNVVDLCQFTTLGGVYHLDILELPPQCKPVKGWMIVEILKEGLQKYTYPPETTEEFETENAFPPIEVHLRFMRM

SEQ ID NO: 12440 - DNA, 2849 bp, Homo sapiens
  CDS (19)..(402)
acatgcgcaggaggctcaatgacagtcgagctttggctaaggctccggggaaagggtctagccatgctgcatgtgacccggggggtctgggggtccagggtccgagtatggccactgttgcccgcgctcctcgggcccccccgggccctctcatcgctggcagccaaaatgggggagtatcgcaagatgtggaaccccagggagccccgcgactgggcccagcagtaccgcgagcgcttcattcccttctccaaggagcagctgctccgcctcctaatacaggtaacaggaattccactcgagtccggcagagaaggcggctttggaggcgttctcagcccacgtggacttctgcaccctgttccactaccaccaaatcctggcccggctgcaggccttatatgaccccatcaaccctgacagggagaccctcgatcagccatcactaacggatccccagcgtctgtctaatgagcaggaggtgcttcgggctctggagcccctgctggcccaggccaacttctccccgctgtctgaggacaccctggcctacgcgctggtggtccaccaccctcaggatgaggtccaggtgacagtaaatttggatcagcctggttgggagtcttggctccatggcacggccccctcctgtcattctttcctctacctgagctgacactctccctacaagagatcctgcgcgctccctgtgtgggctccaggtggtccccttgcctacaggagcccccaccttccctgcccaagagcccctgactggtccccagacgaaagccccagagctgggccttctggccctctcgaccctcctgggccttgttccgctcccctccaagcctcaagatcactcctaggcttctcccaaacccaggcccttcctgttctttgccctacgcccctccttgctgctccctcgaatcttccccgatctcagtgtgacctcagaacacctgcctctccccttgcagagacctccaggtggctccggtcggaggtggagaacttggctcctagccaagtcaggctgtgaggtgaccttcaacggaactcgggccctggcgcatctgcaggccctgacccccagcatgggattgtacccacccccgggtttccccaaactagacccagtggctccgatcacttccgagcccccgcaagccacgcccagcagtaacatctcctgagtagaacctacctccctgcccagtcagcaggctaggaactaagccccgcctccttcacgacaggctgtcaattacggttattatacttttcactccaacttccaataactgacaggtgattatttttgctgcactgtgtgcttaagcaaagcagccaatcaaagcagctagcagttgttaagtcttccccgccccttcgatgaacagccaatcaaagcgatttagctctgcttctgttccatttcttagtcccaccctcaccataaacatccaagtgtggtttggctgaggagctgagggtgtctgccaatcacagctgctcagctctggcttctgtaaaccgccaggtagaagagttaaagctgcgccctcccgagactatatatcattgtctttttcagcccgctccgggcaaactgcccatcatgtgcaccaaggccgttggccctgcctcctggcaaacgtccagtgccagctgctgggttccatcaactttgggcagccggttgtcgctgcagggaaggaaccaataagaatttctaaaggaaacctgatcttgctatcaattgctgctgcttaaatggcaggccaactggtcagctgctgatcagggtgtctaggctgaaggagttggagaccttgtgctaggtaggtgaaccagaaaccaccctcgccaccaagactcgctcccaacctggctcccggcaacctcaggtgccttcctcgcccaggtctttcaccctttctacagaaactacctcggtctggatctccccaccaccagcagcctgtgcaatatttattggtctatcaatttctcccgtctcctgtcccaaagtaataaatcatgtttaataagtctggatgaggctactcttaacgcactgcctttagggtaaccctgctctgtaggagtggttaaaaaattatttttaaaaatctagatgagtgggatggctgcaggagttggagggaaggaaagcatttgaatcctggaaagaggggagggactctagctaggtcttggggtcccagacagagaaagctgtagtcctaaaaagaggctgggttcatggtcggtgaaacaaagacagtcatagaagaggatcttagaaggatctgattccagaggagtcccagggcctgatgaacagaggagatagcgtagccatgtgcgattgtgcagatttgcagatttttttttgttcttgagatggagtttcgcgcttgttgcccaggctggaatgcaatggcgtgatcttggctcactgcaacctccgcctcctgggttcgggtgattctcctgcctcagcctcccgagtagctgggaccgcgggtgtgtgccaccacaccaggctaatttttttgtatttttttgtagagacggggttttgtctcattgcccaggctggtctcaaactcctgagcacaagcaatacgcttgccttagccacccaaagtgctggaattacatgggtgagctaccgtgtccagcctcaatttaaaaataaagagcataattgcattgtttgtaacacaaagaataaatgcttgaggggatggataccccctttaccctgtgattattatgcattgcatacctgtatcaaagtatcccataaatatatacacctactatctacccac

SEQ ID NO: 12441 - protein, 128 aa, Homo sapiens
MTVELWLRLRGKGLAMLHVTRGVWGSRVRVWPLLPALLGPPRALSSLAAKMGEYRKMWNPREPRDWAQQYRERFIPFSKEQLLRLLIQVTGIPLESGREGGFGGVLSPRGLLHPVPLPPNPGPAAGLI

SEQ ID NO: 12442 - DNA, 1577 bp, Homo sapiens
  CDS (472)..(1455)
gtctcgccctcttgcagtctgcagcttctcctgtcatcggaaatgccaggccaaggtggctgccccctgcgttcctccatccaaccatgagctggtgcccatcaccactgagaatgcaccaaagaatgtagtggacaagggagaaggaggctcccggggtggaaacacacggaaaagcctcgaggacaacggctccaccagggtcaccccgagtgtccagccccacctccagcccatcagaaacatgagtgtgagccggaccatggaggacagctgtgagctggacctggtgtacgtcacagagaggatcatcgctgtctccttccccagcacagccaatgaggagaacttccggagcaacctctctgagcggagacctgacatcacgagctccatgccaaggtacaggaatttggctggcccgacctccacaccccagccctggagaagatctgcagcatctgtaaggccatggacacatggctcaatgcagaccctcacaatgtcgttgttctacacaacaagggaaaccgaggcaggataggagttgtcatcgcggcttacatgcactacagcaacatttctgccagtgcggaccaggctctggaccggtttgcaatgaagcggttctatgaggataagattgtgcccattggccagccatcccaaagaaggtacgtgcattacttcagtggcctgctctccggctccatcaaaatgaacaacaagcccttgtttctgcaccacgtgatcatgcacggcatccccaactttgagtctaaaggaggatgtcggccgtttctccgcatctaccaggccatgcaacctgtgtacacatctggcatctacaacatcccaggagacagccagactagcgtctgcatcaccatcgagccaggactgctcttgaagggagacatcttgctgaagtgctaccacaagaagttccgaagcccagcccgagacgtcatcttccgtgtgcagttccacacctgtgccatccatgacctgggggttgtctttgggaaggaggaccttgatgatgctttcaaagatgatcgatttccagagtatggcaaagtggagtttgtattttcttatgggccagagaaaattcaaggcatggagcacctggagaacgggccgagcgtgtctgtggactataacacctctgaccccctcatccgctgggactcctacgacaacttcagtgggcatcgagatgacggcatggaggaggtggtgggacacacgcaggggccactagatgggagcctgtatgctaaggtgaagaagaaagactccctgcacggcagcaccggggctgttaatgccacacgtcctacactgtcggccacccccaacacgtggaacacacgctttctgtgtatttatatagatggaaatatactttatattttgtatcatcgtgcctatagccgctgccaccgtgtataaatcctggtgtatgctccttatcctggacatgaatgtattgtacactgacgcgtccccactcctgtacagctgctttgtttctttgcaatgcattgtatggctttataaatgataaagtt

SEQ ID NO: 12443 - protein, 328 aa, Homo sapiens
MDTWLNADPHNVVVLHNKGNRGRIGVVIAAYMHYSNISASADQALDRFAMKRFYEDKIVPIGQPSQRRYVHYFSGLLSGSIKMNNKPLFLHHVIMHGIPNFESKGGCRPFLRIYQAMQPVYTSGIYNIPGDSQTSVCITIEPGLLLKGDILLKCYHKKFRSPARDVIFRVQFHTCAIHDLGVVFGKEDLDDAFKDDRFPEYGKVEFVFSYGPEKIQGMEHLENGPSVSVDYNTSDPLIRWDSYDNFSGHRDDGMEEVVGHTQGPLDGSLYAKVKKKDSLHGSTGAVNATRPTLSATPNTWNTRFLCIYIDGNILYILYHRAYSRCHRV

SEQ ID NO: 12444 - DNA, 1757 bp, Homo sapiens
  CDS (159)..(1238)
aggtgctgaaggagctgttggagacgtggggcagcagcagtgccatccgccacactcccctgccgcagcagcgccacgtcagcaaggctgtcctcatctgcctggcgcaactcggggagccggaactgcgggacagccgggatgaactgctggccagcatgatggcgggcgtgaagtgccgcctggacagtagcctgccccccgtgcgacgcctgggcatgatcgtggcagaggtcgttagtgcccggatccaccccgaggggcctcccctgaaattccagtacgaagaggatgaactgagcctcgagctgctggccttggcctccccccagcctgcgggtgacggcgcctcggaggcgggcacgtccctcgttccagccacggcagagccccctgcagagacccccgcagagatcgtggatggcggcgtcccccaagcacagctggcgggctctgactcggacctggacagcgatgatgagtttgtcccccacgacatgtcgggggacagagagctgaagagcagcaaggctcctgcctacgtccgggactgcgtggaagccctggatgtgctgactctggctgcccaggagctgtctaggcctgggtgcctcgggaggactccccaacctggctccccaagtcccaacaccccgtgcctgccagaggcagccgtctctcagcctggcagtgccgtggcgtctgactggcgggtggtggtggaggagcggatcagaagcaagacccagcggctctccaagggtggcccgaggcagggcccggcaggcagccccagcagattcaactccgtggccggccacttcttcttccccctccttcagcgctttgacaggcctctggtgaccttcgacctcttgggagaagaccagctggttctcggaaggctggcgcacaccttaggggccctgatgtgcctggctgttaacaccacggtggctgtggccatgggcaaggccctgctggaattcgtgtgggcccttcgcttccacatcgatgcctacgtgcgccaggggctgttgtcggccgtctcctccgtcctgctcagcctgcctgctgcgcgcctgctggaggacctgatggacgagctgctggaagcccggtcctggctggcggacgtggccgagaaagacccggacgaggactgcaggacgctggcactgagggccctgctgcttctgcagagactcaagaacaggctcctcccacccgcgtctccctagtccctggaggcctccccaggaccaccctcgccgacagcaaggcaggcggctgagcagcggcctggagcagcagagccaggctttgtagcgaggccaggtcttcggccgcatccggtacggagagtgcagatgcaggaaggcccggcctgccgctatttatagtgcagccagtctgctaaaaatacactgggcctgggcactgcccgccgggacatggcagcctggacgtggggctggggctgtgggcgctgctggcggggttgactcttccagtgagggcagaaccaggctggcaggaggggaggacggtgtacctgctgctcagagcccccaaggctctcctctgagagccaccaagcaggacagagcagctcttgtcccaggtccctcgggctgagcgccgtgtcaccaggagaatagtgctcacagcccaggcagggtgtgtggctcctggatgggctcgtggggcgggatgggacagggcacgggctctcagaaaataaactgctttattgg

SEQ ID NO: 12445 - protein, 360 aa, Homo sapiens [sequence omitted]

SEQ ID NO: 12446 - DNA, 1617 bp, Homo sapiens
  CDS (431)..(1027)
ttacctgtcatgcccgatggctctgtgctgctggtggacaatgtctgtcaccagtctggggaagtctccatgggctccttctgccgcctacccgggacctctggctgcttcccctgcccgctgaatgccctggaggaacacaacttcctgtttcagctgagagggggtgagcagccccctccaggggccaaggagggcctggaagttcccctgattgctgtggttcagtggtctaccccaaagctgcccttcactcagagcatctacacccactaccgcctgcccagtgtccgcttggaccgcccgtgttttgtgatgaccgcttcttgtaagtcccctgttcggacctacgagcgtttcactgtcacctacacgctgcttaacaatctccaagacttccttgctgtgaggctcgtgtggaccccagagcatgcacaggctgagtggctttgagaatcagatgagactgtgctggcgaaggccctgtgggaatgaggaacgctgtagtgtttgctggtccctgtttctgcccccaggaaagcagctgtgtgaggaggagcgccgggccatgcaggctgccctggactccgtcgtctgccacacgcccctcaacaaccttggcttttcccggaagggcagcgcgctcaccttcagtgtggccttccaggctctgaggacggggctcttcgagcacatgaaactgaagctgcagttcaccgccagcgtgtcccaccctccacccgaggcccggcccctctcccgcaagagcagccccagcagccctgctgtccgggacttggtggagaggcatcaggctagcctgggccgctcccagtccttctcccaccagcagccttcccgaagccacctcatgaggtcgggcagtgtgatggagcgcagagccatcacgccccctgtggcctctcctgttggccgccccctctacctgcccccggacaaggctgtgttgtctctggacaagattgccaagcgcgagtgcaaggtcctggtggtggaacccgtcaagtagcaccgtgccagctctgtttcctcttacactccagagacccaacgcccccagaggggatccctgctcccgggctgtgcctcccctgggatgcctcccagacgggggtgaagaggcctggcagagctgcctgtcttgtgtctgctgatgagggatgggggaagaagctgtgaagtgggcgggcatggctgggactaagccaccagtattccccgagttcctgtggggggggctggccccacccctaggccagggcaagggttcccagagctcccttgtccccggccctttaccctggttctgagtttacaaagtctcttcctcattcccgttgagttctttcccacctctgacattccctccctccctcccgcagggctgagattagagggtggtgatggctaagggcccctgacagtgaccttcctgtctcaggggttggggacagggccaggtagcctcctgccccttatgtttacgtttgcagcctgaagcactttaatttttttttttttggtctgttcctgtaacttattttccaactattgcttccaactgaaataagactattaaatgcctgttcaggaggg

SEQ ID NO: 12447 - protein, 199 aa, Homo sapiens
MHRLSGFENQMRLCWRRPCGNEERCSVCWSLFLPPGKQLCEEERRAMQAALDSVVCHTPLNNLGFSRKGSALTFSVAFQALRTGLFEHMKLKLQFTASVSHPPPEARPLSRKSSPSSPAVRDLVERHQASLGRSQSFSHQQPSRSHLMRSGSVMERRAITPPVASPVGRPLYLPPDKAVLSLDKIAKRECKVLVVEPVK

SEQ ID NO: 12448 - DNA, 2844 bp, Homo sapiens
  CDS (55)..(1581)
gcagtgaagtgtttgtctgaatttgcgtgcaatgcagctttcccagacacaagtatggaagcaattcgacttattcgccattgtgcaaaatatgtgtctgatagacctcaggctttcaaggaatacacaagcgatgatatgaacgtagcacctgaagacagggtgtgggtgagaggatggttcccaattctctttgagttatcctgtatcatcaatagatgcaaattagatgtaagaaccaggggtttaacagtaatgtttgaaataatgaaaacatatggccacacttatgagaaacactggtggcaggatttatttagaattgttttcagaatctttgacaatatgaaattgccagaacaacagacagagaaagctgaatggatgacaacaacttgcaatcatgcactttatgcaatctgtgatgtattcactcagtatttagaagtactcagtgatgtacttttggatgacatttttgctcagctctactggtgtgtgcagcaagacaatgagcagttagcgcgatctggtacaaactgtttagagaatgttgttattctgaatggtgaaaaatttaccctagaaatctgggataaaacttgcaactgcacactggatatcttcaaaaccacaatcccacatgcgctgttgacctggcgacccaattctggagaaactgcccccccacctccatctcctgtaagtgaaaagccattggatacaatatcacagaagtctgtagatattcatgattctattcaaccaaggtctgtggataacagaccacaagcaccactggcttctgcgtctgctgttaatgaagaagtcagcaaaattaaatctacagcaaaatttccagaacaaaaattgtttgctgccctgttgattaaatgtgttgtgcagctggaactcatccagactatcgacaacattgtcttcttcccagccacaagtaagaaagaagatgcagaaaacttagctgcagcacagagagatgcggtggactttgatgttcgcgttgatactcaagaccaaggaatgtaccgctttttaacatcacaacaactttttaagctactggactgcttattagagtcacatagatttgcaaaagcgtttaattccaacaacgaacagaggactgccctgtggaaagcaggattcaaaggcaaatccaagcccaaccttctgaagcaggagaccagcagcctggcctgtgggctgcgcattctcttccggatgtacatggatgagagccgcgttagtgcctgggaggaggtccagcagaggcttttgaatgtctgcagtgaagcactaagttacttcctcactctaacatcagaaagtcatcgagaagcctggactaacttactgcttttgtttctaactaaagttctaaagataagtgataataggtttaaagctcatgcatcattctactaccctctcttatgtgaaattatgcaatttgacttgattcctgaacttcgtgctgttcttagaagattttttctgcgaatcggagtagtttttcagatatcacaaccacctgaacaggaacttggaataaacaagcaatgatgggaacttaatatttttgttggcatttacatccctctgctctttaaaaggacgctggagctgaggtttcctacctgaaaaatgatttctctggattgcagtgtctgagttactggtaaagatgcttagaagtcttactcaaacttgcaacactccagtcccttttagtgctggtggattttgtgtgttatattggcctcatgttgagcagaaagcctgtttaaacagtgtcagctcatgctcacgggtccttccctgtcttccacggcaggaaaagccccacgtttttggcaggtgtggaagtgaaacttacccaaagaactatagatgtaaagattgaacttctacaagaagtacaactcaggagagctgcattttgaaggataaaatgtttataattggggagtggggagagaagaagaaattattgttcatggtaaaagatatttagcaactatggtattcttattctgaagatttttgcacactcaggctatctgagatactggtaatcatcctgtgaaaaatgtacagagatgcaggtctgtaatataaaaatcttaaaacattatatagttcttcctgcactgttttctttattttcttattcatttgctaaatacccataatattttgtcaaatgcactaaacatttgggtggaactttcttttttattttatagggatttttagttttgccctttttggtaggtggtgattttgaggctgtaacatgcccagaagctgttgtggccgacacttcaacaatagggaaaaaaaggtagaaaatatccctactgacagtaactacctgtcacatatttctcttaggacttttaaagatgagccattaaaatagaatgatcctttatggaccaaaacttgaatcactgcaaaatgaatccagattgctgtcattttcttttcttttgggtggtggggcttgatgtaggttttactctatgtacagaatttaacgttgaatatattaaaataacaaatctggcatggtttgcggaggttagatttactggaaatgtattcatactgtgaattgtgctctgatggttaaaagacaagattgtcaagcattccgtattaacagtggatgtagaaaattttttcagatggacaaaatgtatatggtacagatgtaaagttttctatgtaaaaaattctgtacaactttctgtacaatattgattcccatctggcatattctaatcaggttataggtcaataaagtttttgaattatttc

SEQ ID NO: 12449 - protein, 509 aa, Homo sapiens [sequence omitted]

SEQ ID NO: 12450 - DNA, 2606 bp, Homo sapiens
  CDS (1461)..(1964)
acgggatggggagctggaccaggctggagtgcaatggcgcgatctcagctcactgcagcctccgcctcccgggttcaagcgattcttctgcctcagcctcccgagtgacagcggcatggacatatgccccaggctttcctgctggggtccatccatgagcctgcaggtgccctcatggagccccagccctgccctggaagcttggctgagagcttcctggaggaggagcttcggctcaatgctgagctgagccagctgcagttttcggagcctgtgggcatcatctacaatcccgtggagtatgcatggtagccacatcgcaactacgtgactcgctactgccagggccccaaggaagtactcttcctgggcatgaaccctggaccttttggcatggcccagactggggtaaagggtttggcttccccagtgggtggagtggggggttctaggtggatgcttggctgggtgtgctgtggagaaggagcatgtgcatggctgtagacatgtgtaggtcctcccgccccattctgtctcaacacatatactggctcctgtggtccggggccctctcccagcgtctctgcccgtaattaaccaagcacattaatggtagtttcgttttccctgcgagctggccagtaattgcctctgagagcccttccttccgccagccccatccttactttactggatctcccctgtccctgaagtgtggttggggtcagaagagggactaggactgctgggtcctcagaagagactggttgacaggggtgggtatgtaagagatgcagggcgttctgggaacctgggttctgtttcctagctaaggcgaggttcaaaacagagcctggctccagtgcctgcccgcttttctttcagggctcaggatgagtgactgcccccagtgggggtgcttggcaggtgggggaggggaagaggcttcagggcagaaggctcaatcgcttttattgaccccaactgggtgatgaaaggtgatcaatgatgatcgatggaaatgacagcctgaggcttggggctgagagggcatccagacagcagtggtcagcccatccttgtgcctcctttaaccctggctgcctttctgtctcagaccatctgtctgtccccagtactaaccatcaaaccctgtgtagggctagatatctcaatgtagtccctgtacttatcccaaaggctagttgggctagagggaaacaaattcttctggaccacggttcacaatgaagaactggaaaaagacagacaggctcaaaccatagggccaagaatccttgtctcaggcctttgggtgaaggtaggggtagggggtgcaggctggatcctcatgtaaggtataaagaagtcagttggtccagagcccgggcctcaggtctccagtttgaagcctttcatgtctctctccttcctcacaggtgccctttggggaagtaagcatggtccgggactggttgggcattgtggggcctgtgctgacccctccccaagagcatcctaaacgaccagtgctgggactggagtgcccacagtcagaagtgagtggtgcccgattctggggctttttccggaacctctgtggacagcctgaggtcttcttccatcactgttttgtccacaatctatgccctctgcttttcctggctcccagcgggcgcaaccttactcctgctgagctgcctgccaagcagcgagaacagcttcttgggatctgtgatgcagccctctgccggcaggtgcagctgctgggggtgcggctggtggtgggagttgggcgactggcagagcagcgggcacgacgggctctggcaggcctgatgccagaggtccaggtggaagggctcctgcatccctctccccgtaacccacaggccaacaagggctgggaggcagtggccaaggaaagattgaatgagctggggctgctgccactgctgttgaaatgagtgcccttggggccttgcatgggacacattcaagacctcgaagtcattcttggccaagcagatgacaacacatctcctgtactggagcaaaaggtccttctgtgcaccctggtcgctgggaaacgtattctttgatctgttgaactgtcttccaacctgccatggcagttttgacactactcctgtttgccctcctgattcctgctttctttaccttttaacattgcccctttcaggggaccccactttgtagggaatctgcagaaggtgtgcttttgcacttgcagactgctctacctcagtgtttccttgggagactttattcagctgagagtgccctagacagtaacttctaaggtcacgtttactatttcagaggaaatatcttgccaggatacctacccatccttatagaacagttgcctttagctgacccctttcctcacagggaccaagacaaagcatgggacatgaaattaagagtgaacttcttatgggaggctgcagctggatcagaggaaaaatccagtgtgacagagtgcaagtcagaagacctggcttttcatcccagctttgaaacttggaactttttgattgacaaattaataaacctctctatgcctcaggctcctcatctgt

SEQ ID NO: 12451 - protein, 168 aa, Homo sapiens
MVRDWLGIVGPVLTPPQEHPKRPVLGLECPQSEVSGARFWGFFRNLCGQPEVFFHHCFVHNLCPLLFLAPSGRNLTPAELPAKQREQLLGICDAALCRQVQLLGVRLVVGVGRLAEQRARRALAGLMPEVQVEGLLHPSPRNPQANKGWEAVAKERLNELGLLPLLLK

SEQ ID NO: 12452 - DNA, 1755 bp, Homo sapiens
  CDS (232)..(654)
tgtcctgcgggtccaggactgtccgcggggttgagggaaggggccgtgcccggtgccagcccaggtgctcgcggcctggctccatggccctggtcacagtgagccgttcgcccccgggcagcggcgcctccacgcccgtggggccctgggaccaggcggtccagcgaaggagtcgactccagcgaaggcagagctttgcggtgctccgtggggctgtcctgggactgcaggatggaggggacaatgatgatgcagcagaggccagttctgagccaacagcaccctagtttcattctcaactctagccctgcacactcacctatggcccgggagattgacaacttctaccctgagcgcttcacctaccacaatgtgcgcctctgggatgaggagtcggcccagctgctgccgcactggaaggagacgcaccgcttcattgaggctgcaagagcacagggcacccacgtgctggtccactgcaagatgggcgtcagccgctcagcggccacagtgctggcctatgccatgaagcagtacgaatgcagcctggagcaggccctgcgccacgtgcaggagctccggcccatcgcccgccccaaccctggcttcctgcgccagctgcagatctaccagggcatcctgacggccagaacctgagggtggtggggaggagaaggttgtaggcatggaagagagccaggcagccccgaaagaagagcctgggccacggccacgtataaacctccgaggggtcatgaggtccatcagtcttctggagccctccttggagctggagagcacctcagagaccagtgacatgccagaggtcttctcttcccacgagtcttcacatgaagagcctctgcagcccttcccacagcttgcaaggaccaagggaggccagcaggtggacagggggcctcagcctgccctgaagtcccgccagtcagtggttaccctccagggcagtgccgtggtggccaaccggacccaggccttccaggagcaggagcaggggcaggggcaggggcagggagagccctgcatttcctctacgcccaggttccggaaggtggtgagacaggccagcgtgcatgacagtggagaggagggcgaggcctgagccctcacacatgcccacgctcccctgacactgaagaggatccacaactccttggagaaacaccctcacgtctgttgccgcacacattcctctcagctccgccccatacccgtcactacagcctcacctcccacccctgtcactacggcctcacctcccacccctgtcactacagcctcacctcctacagccttaagtcccaggcccatgtctgcctgtccaagggctcaagactttctaactgggatgtggtagagggactgaaggtacctttgggggcaacagcaccctagtttcattctcaactctagccctgcacctcctgtcctctcccagttcattcctggaaccagccaggccaggcaaccagtggcccccaaaggcaggcaggatcctcaggccccagccgcgggaggctggaagggctggcagatcgcttccctcatccacctccaccggtccaggtctttgctgctgtccccagacctcctgtgacaccacgccagatcacagggcaccaggccagagatagtcttctttttgtcctttctggcctctggctagtcagtttttcatagccttacagtatctggctttgtactgagaaataaaacacattttcatatttggtt

SEQ ID NO: 12453 - protein, 141 aa, Homo sapiens
MEGTMMMQQRPVLSQQHPSFILNSSPAHSPMAREIDNFYPERFTYHNVRLWDEESAQLLPHWKETHRFIEAARAQGTHVLVHCKMGVSRSAATVLAYAMKQYECSLEQALRHVQELRPIARPNPGFLRQLQIYQGILTART

SEQ ID NO: 12454 - DNA, 1918 bp, Homo sapiens
  CDS (155)..(1528)
aagtatatccctcctccctttcaaagataagtggatccattctcaatgaacttattggacttgtgagatcacccttattgcaggggggagctcttagtgccatgctagactttttccaagctctggttgtcatggaacaaataatttaggatacatggatttgttgcgcatgctgactggtccagtttactctcagagcacagctcttactcataagcagtcttattattccattgccaaatgtgtagctgcccttactcgagcatgccctaaagagggaccagctgtagtaggtcagtttattcaagatgtcaagaactcaaggtctacagattccattcgtctcttagctctactttctcttggagaagttgggcatcatattgacttaagtggacagttggaactaaaatctgtaatactagaagctttctcatctcctagtgaagaagtcaaatcagctgcatcctatgcattaggcagcattagtgtgggcaaccttcctgaatatctgccgtttgtcctgcaagaaataactagtcaacccaaaaggcagtatcttttacttcattccttgaaggaaattattagctctgcatcagtggtgggccttaaaccatatgttgaaaacatctgggccttattactaaagcactgtgagtgtgcagaggaaggaaccagaaatgttgttgctgaatgtctaggaaaactcactctaattgatccagaaactctccttccacggcttaaggggtacttgatatcaggctcatcatatgcccgaagctcagtggttacggctgtgaaatttacaatttctgaccatccacaacctattgatccactgttaaagaactgcataggtgatttcctaaaaactttggaagacccagatttgaatgtgagaagagtagccttggtcacatttaattcagcagcacataacaagccatcattaataagggatctattggatactgttcttccacatctttacaatgaaacaaaagttagaaaggagcttataagagaggtagaaatgggtccatttaaacatacggttgatgatggtctggatattagaaaggcagcatttgagtgtatgtacacacttctagacagttgtcttgatagacttgatatctttgaatttctaaatcatgttgaagatggtttgaaggaccattatgatattaagatgctgacatttttaatgttggtgagactgtctaccctttgtccaagtgcagtactgcagaggttggaccgacttgttgagccattacgtgcaacatgtacaactaaggtaaaggcaaactcagtaaagcaggagtttgaaaaacaagatgaattaaagcgatctgccatgagagcagtagcagcactgctaaccattccagaagcagagaagagtccactgatgagtgaattccagtcacagatcagttctaaccctgagctggcggctatctttgaaagtatccagaaagattcatcatctactaacttggaatcaatggacactagttagatgtttgttcaccatggggaccattacatatgaccatacaatgcactgaattgacaggttaatcataagacatggaaagagaagtgtctaaaagcttcaaaatgttccacttttttttccttcatggagactgtttgtttggctttcttccattgttgtttttgtagcatttatttcagaaatgtgtatttccataatccagaggttgtaaaaccactagtgttttagtggttacagcaacatttgaaatggaaactaaaagttaggattttatggagtatggagatagggtccagtatctatttaccctgtaatgtttaggattaaaatgttaaaattttgtgaccatgaatttctttcttttataaattttctcatttaaaaatc

SEQ ID NO: 12455 - protein, 458 aa, Homo sapiens
MDLLRMLTGPVYSQSTALTHKQSYYSIAKCVAALTRACPKEGPAVVGQFIQDVKNSRSTDSIRLLALLSLGEVGHHIDLSGQLELKSVILEAFSSPSEEVKSAASYALGSISVGNLPEYLPFVLQEITSQPKRQYLLLHSLKEIISSASVVGLKPYVENIWALLLKHCECAEEGTRNVVAECLGKLTLIDPETLLPRLKGYLISGSSYARSSVVTAVKFTISDHPQPIDPLLKNCIGDFLKTLEDPDLNVRRVALVTFNSAAHNKPSLIRDLLDTVLPHLYNETKVRKELIREVEMGPFKHTVDDGLDIRKAAFECMYTLLDSCLDRLDIFEFLNHVEDGLKDHYDIKMLTFLMLVRLSTLCPSAVLQRLDRLVEPLRATCTTKVKANSVKQEFEKQDELKRSAMRAVAALLTIPEAEKSPLMSEFQSQISSNPELAAIFESIQKDSSSTNLESMDTS

SEQ ID NO: 12456 - DNA, 2081 bp, Homo sapiens
  CDS (9)..(719)
ccgagacgatggggctcaggacctgtgccggtgaatccaaggactatgccctccatgcgggtgacggctcttccgacccggaggtgctgctgaacatagaaaaccaaagacgaggtcaagagctgagtgccacccggcaggcccatgacctgtccccagcagccgagagttcctcgaccttctctttctctgggcgagactcctccttcactgaagtgccacggtcccccaagcacgcccacagctcctccctgcagcaggcagcctcccggagcccctcctttggtgacccacagctatcccctgaggcccgacccaggtgcacttcacattcagaaacgccaactgtcgatgatgaagaaaaggtggatgaacgagccaagctgagcgtcgccgccaagaggttgcttttcagggagatggaaaaatcttttgatgaacaaaatgttccaaagcgacgctcaagaaacacagctgtggagcagaggctacgccgtctgcaggacaggtccctcacccagcccatcaccactgaagaggtggtcatcgcagccacattgcaggcctctgctcaccaaaaggccttagccaaggaccagacaaatgagggcaaagagcttgctgagcaaggagaacctgattcctccactctaagcttggccgaaaagttggccttgtttaacaaattgtcccagccagtctcaaaagcgattctgatgtaaactgtaaagtaacaaatgtaaatgtaagacagtggtaactgtggaataaataccaaagagggcgaagaggaaagctcttcagaattggaagttcagtctcacaatgcacgtagagccttccctactgtattagtcggttctcacactgctatgaagaaataccggagactaggtaatttataaaggaaaatatttcaattgactcacagttctgcatggctggcgaggcctcagaaaaacttacaatcatgcagaaggcacctcttcacagggcggcaggagaatgagtgcccagtgaagcggggaagccccttataaaaccatcagctcttgtgagaactaactcactatcacaagaacaatggggaaaactgcccccatgattcatttatctccacctggtttcgctcacacacgtggtgattatggaactacaattcaagatgagattggttgggaacacaaccaaaccatatcacctaccgttgagggggaggtgaaaagagtcccatgcccagtgttcctggcaagaatgaatctgtgtctataggagtgtgcacctgtagtctccctatcacaagcaactgcacgtggcccatctgtattactgttctctgcagtgacctctggttccaattacctttccagctccctgtccttccatgaaccctggtagcactggctggggccctgtttgttctagtctcttccccaggacagatggatacttgaataaacatgttggatacaaatagcgcacccaaactctccttagaaatctcattttgtgccctgcatgttcagcccagatagaatctccacagaccagaccagctggatcagactcagctctaccctagcttagtggtttggaccacaggtcctcctgtggaggaggggtctccagccactttccccagctctctcccctccactctaagtcaacattggttccaattacctccctcctcctcattaggagcccacagtactgataatgaccattttaaatatctttttctaaaaatatcaccaaaaacaagaaaggcacaagatagaaggcccaaagaaaatacgaaacatgtagctttaaatttttcatccttcaaaggaaggaccaaagataattaaaatattagtgaaggaagtacaggtagataaaaataggtatttacatatatgctgcccctttgggggggactttcaattttaaaaacttagctgataaaaacgataaagctggccgggcgcggtggctcacgcctgtaatcccagcactttgggaggccgaggcaggcggatcacgaggtcaggagatcgagaccatcctgactaacacggtgaaaccgtgtctctact

SEQ ID NO: 12457 - protein, 237 aa, Homo sapiens
MGLRTCAGESKDYALHAGDGSSDPEVLLNIENQRRGQELSATRQAHDLSPAAESSSTFSFSGRDSSFTEVPRSPKHAHSSSLQQAASRSPSFGDPQLSPEARPRCTSHSETPTVDDEEKVDERAKLSVAAKRLLFREMEKSFDEQNVPKRRSRNTAVEQRLRRLQDRSLTQPITTEEVVIAATLQASAHQKALAKDQTNEGKELAEQGEPDSSTLSLAEKLALFNKLSQPVSKAILM

SEQ ID NO: 12458 - DNA, 2056 bp, Homo sapiens
  CDS (87)..(1298)
gagaggcgcccaggcggcggcggcggcggcccagcttcttctttcctcgcacagccaggcggcccctgctcgagtcccgcgtcgccatggccgcggttcccgagttgctgcagcagcaggaggaggaccgcagcaagctgagatctgtatctgtggacctgaatgttgatccctcgcttcagattgacatacctgatgcgctcagtgagagagacaaagtcaaatttacagtgcacacaaagaccacactgcccacgtttcagagcccagagttttctgttacaaggcaacatgaagactttgtgtggctacatgacactcttattgaaacaacagactatgctgggcttattattccacctgctcctacgaagcccgactttgatggtcctcgagagaagatgcagaaactgggagaaggtgaagggtctatgaccaaagaagaatttgccaagatgaaacaagaactggaagctgagtatctcgctgtgtttaagaagactgtgtcctcccatgaagtctttcttcagcggctttcttctcaccctgttctcagtaaagatcgcaactttcatgttttcctggaatatgatcaggatctaagtgttaggcggaaaaatactaaagagatgtttggtggcttcttcaaaagtgtggtgaaaagtgctgatgaagtcctttttactggagttaaggaggtagatgacttctttgagcaagagaagaacttccttattaactattacaataggatcaaagattcttgtgtgaaagctgacaaaatgaccagatctcataaaaatgttgccgatgactatatccacaccgcagcctgcttacatagcctggctttagaagagcccacagtcatcaaaaagtacctattgaaggttgctgagctatttgaaaaactaaggaaagtagagggtcgagtttcatcagatgaagatttgaagctaacagagctcctccgatactacatgctcaacattgaagctgctaaggatctcttatacagacgcaccaaagccctcattgactatgagaactcaaacaaagctctggataaggcccggttaaagagcaaagacgtcaagttggctgaggcacaccagcaggagtgctgccagaaatttgaacaactttccgaatctgcaaaagaagaactgataaatttcaaacggaagagagtggcagcatttagaaagaatctaattgaaatgtctgaactggaaataaaacatgccaggaacaatgtctcccttttgcagagctgtattgacttgttcaagaataactgatatgccttcactcagaagaaaagaaatgaatgtgaaagaaagccaagcatcacttgcacttaaatcattaccacggaagatatattagcttcaactttagtttaaaattatgtgaataaatattttgatttctacaaatcttaacatttaaccatgttggtttaaaaatattattgcttgctacttggacataactaatttttccttgtgcatttaatacctctgggcagaatccaaatactgggttctcccgtagttcgtctttagttactaagaaagggtgtaggacacattagccttctggaaacaagtagaagccatcacctggcccatgtccctacaaacccatgattgtcagggaggtgccagttacagcaggtgattcagctacttgaggtcggtaacagaccttccattcctcactgaaggtggggtttgtgtttttgttttgccctgttactccactggtagtcatctggtgtttgtactataacaacagcaagaaaatctcatttatctttatatactctttgcacctcctttttttagtcgagatataaatatttgaggggagagaaatatctacaggtatatatggaaacaaataatgtggtctgctttataagatggccagatctacattaggaaaagtataagccccctccctaatggccgctggggggtgagggcggtgtgttgtatgtctttgggtgtttgtttttttataaagcatataataaaataatcgtgctact

SEQ ID NO: 12459 - protein, 404 aa, Homo sapiens
MAAVPELLQQQEEDRSKLRSVSVDLNVDPSLQIDIPDALSERDKVKFTVHTKTTLPTFQSPEFSVTRQHEDFVWLHDTLIETTDYAGLIIPPAPTKPDFDGPREKMQKLGEGEGSMTKEEFAKMKQELEAEYLAVFKKTVSSHEVFLQRLSSHPVLSKDRNFHVFLEYDQDLSVRRKNTKEMFGGFFKSVVKSADEVLFTGVKEVDDFFEQEKNFLINYYNRIKDSCVKADKMTRSHKNVADDYIHTAACLHSLALEEPTVIKKYLLKVAELFEKLRKVEGRVSSDEDLKLTELLRYYMLNIEAAKDLLYRRTKALIDYENSNKALDKARLKSKDVKLAEAHQQECCQKFEQLSESAKEELINFKRKRVAAFRKNLIEMSELEIKHARNNVSLLQSCIDLFKNN

SEQ ID NO: 12460 - DNA, 1377 bp, Homo sapiens
gtgcttcctgtggctgacgtcatctggaggagatttgctttctttttctccaaaaggggaggaaattgaaactgagtggcccacgatgggaagaggggaaagcccaggggtacaggaggcctctgggtgaaggcagaggctaacatggggttcggagcgaccttggccgttggcctgaccatctttgtgctgtgtgtgtccaggcacggttccttacgccccatgtgtgctgtgtgtgtcctgcctgtatatgtggcttcctctgatgctgacaaggtggggaacaatccttgccagagtgggctgggaccagactttgttctcttcctcacctgaaattatgcttcctaaaatctcaagccaaactcaaagaatggggtggtggggggcaccctgtgaggtggcccctgagaggtgggggcctctccagggcacatctggagttcttctccagcttaccctagggtgaccaagtagggcctgtcacaccagggtggcgcagctttctgtgtgatgcagatgtgtcctggtttcggcagcgtagccagctgctgcttgaggccatggctcgtccccggagttgggggtacccgttgcagagccagggacatgatgcaggcgaagcttgggatctggccaagttggactttgatcctttgggcagatgtcccattgctccctggagcctgtcatgcctgttggggatcaggcagcctcctgatgccagaacacctcaggcagagccctactcagctgtacctgtctgcctggactgtcccctgtccccgcatctcccctgggaccagctggagggccacatgcacacacagcctagctgcccccagggagctctgctgcccttgctggccctgcccttcccacaggtgagcagggctcctgtccaccagcacactcagttctcttccctgcagtgttttcattttattttagccaaacattttgcctgttttctgtttcaaacatgatagttgatatgagacaatgccccttatcctcagcctccaagtgtgccgcccagctaccctggaccaagctaccagggctaccacaccatgccgcctcagccagggatgccagcagcaccctacccaatgcagtacccaccaccttacccagcccagcccatgggcccaccggcctaccacgagaccctggctggaggagcagccgcgccctaccccgccagccagcctccttacaacccggcctacatggatggcagctctggcccagacatgaatacctcgtgttcctcctccctctattactgtttcaccagagctgtcttagctcaaatctgttgtgtttctgagtctagggtctgtacacttgtttataataaatgcaatcgtttgg

SEQ ID NO: 12461 - DNA, 1776 bp, Homo sapiens
  CDS (41)..(418)
ctttctccatttgccagcccatggcattgctgccaccctgatggagcgccctctcatctggcaccttcctggcctctttcccaggccccagttctgtccatgcagctgtgggtgcttcctgcattgcgggtctcacggggaggagacgagagtgcccctggttgagtcaggaaagaattctatcttcacgtcgctgccagcaaatgaccacagcagcttcacgacctctgcaggaacctatcttggtaaagaaacggggcctatgtggtggccgagcctcaggtgtggccgagcttcaggtgtggcccttatgcacagcacagcccaagcctgtgggcaccactcgccctgggctgcctggcacctggactccttcccatccttggccgaggtctgcgtggcccttcagggccgaatctgacactgtcttcctcctgagtctgccccccgggcttcctgcccacccccaggctgtttcatggcctctgcagggagcttcgtagaggtgaggctggtgccatctgtctgcttcagaccacctcaggctctgcgtgccctcacagtcccctctgcacttctctgtggggcagggaagcccttcccatcaggtctgctccagcctggctaccttgttcctgctgtcccctccccttcaggcccccggacaagacttcagtgtacttgctggtgccgggcagaatgggggaccttgcctctcacacacacctgctagtatctccgcaacctccaggcatcatctcagctgacagtgacgccatcctggggaagctcccctgactcctggctctcctggaagcctgtggtgctccttcacaatggcccgtggcccttcataggtcccgtaagccagtgtcacagggattcggcttttctcttctgtgtttgcctgctgcgggactgtgagcagcttcagggccaagacagtgcctttccatccgtgaatctcctgatccatcagaatactcgaaagagaaataccgactgagtgtattcattaaagaattaatgttccttacaggatcattgttgttgaactgacctgacatgtgtatagtaatctcatgaacaagaaagaatgtgttcacacgtttgcttaaattgaatttagcaatcgcattaggatactgatatttccacaatgtatatacactatccttttaaatttaacttatttgctttttagacggaagctcctcagtcttagagagttctgaaggtggatttctcagccacgttcaacctgatgagttcactgcttcttccccaaacattgcagagctgcaggaaatttgggctgtgaacttacgtgtgatgtttactattatgcaaatgctcagacgacacacacgacctaccctgatggtttggaagttgtgcagtttcttaacaagcagacagatcagaccctctagttgcaggaaaaaaagctcagggcggtcgagtgcagtggctcgcgcctgtaatcccagcactttgggaggccaaggtgggcagatcacgaggtgaggagttcgagaccaacctggtaaacatagggaaaccctatctcttctaaaaaaaaaaaaatacaaaaaattagttgggcgtggtggatggcacctgtagtcttagctactcaggaggctgaggcaggagaatcgtttgaacctgggaggtggaggttgcagtgagccaagatcatgccattgcactccagcccgggttacagtgtgaggctttctaaaaacaaaaacaaaacaacaacaacaacaaaac

SEQ ID NO: 12462 - protein, 126 aa, Homo sapiens
MERPLIWHLPGLFPRPQFCPCSCGCFLHCGSHGEETRVPLVESGKNSIFTSLPANDHSSFTTSAGTYLGKETGPMWWPSLRCGRASGVALMHSTAQACGHHSPWAAWHLDSFPSLAEVCVALQGRI

SEQ ID NO: 12463 - DNA, 1270 bp, Homo sapiens
  CDS (17)..(532)
gttagccaagattacaatgaaggactactccaaattaggagtccatgacatgaacgaccgcaaacgtctcttccaacttatcaaaattattaagattatgcaagaagaagataaagcagtcagtatcccagagcgtcatcttcagacaagcagcctgcgcatcaaatctcaggaattaagatctggccctcgcagacagctgaattttgattctcctgctgacaataaagacagaaatgccagcaatgatgggtttgaaatgtgcagtttatcagatttctctgcaaatgaacagaagtccacttacctaaaagtgctagaacacatgctaccagatgattcccagtaccatacaaaaacaggaattctgaatgccacagctggtgattcctatgtgcaaacagaaatcagcacttcactcttttcaccaaattacctttctgcaatactgggggattgtgatattcccattattcaaagaatctctcatgtttcagggtataactatggaatcccccattcttgtatcaggtaataaattttatctttctttcttttgagggaaagtagcctcaggcaagggcaggcctctccttcatgtccagcagacagcatctactccttatttatagtaaatgaatataacagaaattatcatgaacagcatttgcatcaataataggaatacctggatgtgggaaaattaatgagaaattgggactttctaggtgggagaaagatgatattgttcatgtacatcagaacagctgctacttgccaggatctgtagcagatctgtttctattgtttattatagcgtaacatgatacatctagtacatctgtgaaagtgaaatagttaacccttctacagtggagaaaaaaattacacaatccacaggacttttttaaggttatcaaattcacttaacccaaccaggagacttaaagatgctttgttaaaaaacaagggcatgtagtttaattaagtaggtctttggggcagttagttcacctacacacattgaaatatgatcctaattttgagtgctttctacaatttcaaccccggaaaaaacagataattttggtgattacaaacagtaagacattgttggtggagatgagagtttgagagtcagggtgacaataagttatttttacctagtgtttcgagttagaatttgaaataaggtccctaagaggtgaaataacaagtaatccctagtactaacaatggtataataggaaatatgttcttttaatcttgt

SEQ ID NO: 12464 - protein, 172 aa, Homo sapiens
MKDYSKLGVHDMNDRKRLFQLIKIIKIMQEEDKAVSIPERHLQTSSLRIKSQELRSGPRRQLNFDSPADNKDRNASNDGFEMCSLSDFSANEQKSTYLKVLEHMLPDDSQYHTKTGILNATAGDSYVQTEISTSLFSPNYLSAILGDCDIPIIQRISHVSGYNYGIPHSCIR

SEQ ID NO: 12465 - DNA, 2110 bp, Homo sapiens
  CDS (1530)..(1892)
gaaaaataaataaatggcatagactggaaagattcatagttggcacaattatgtatatataaaatcctcgggaatgtacactttacatactagaatttaaaagtaagtttagcaactgtgttagttcgttttcatgctgctgataaagacatacctgagactggacaatttacaaaagaaaggtttattggacctatagttccacatgtctggggaggcctcacaatcatggcagcaggcaaggaggggcaagtcacatcttatgtggatggcaacaggcaaagagagagcttgtgcagggaaactcctgtttttaaaaccaccagatctcatgacacccattcactgtcaggagaacagcatgggaaagacccacccccatgattcaattgtctcccacaaggcccctcccataccacatgggaattatgggagctacaagatgagatttgggtgaggacacagagccaaaccacatcagcaacatgtcagaacacagaaaaaatgtaaaatatcactgtatttctatgtactagtagtgaactgtctcctagcttgtttgtttaaaaaaaaaaatcccatggtcttcaatttggtcatttaaaaataatctacaaggtatactgtttttctgttcttgttatttcctaacttttaaggtttctatttttccaccctgtagatcttgttctcactagagaataatttctacattatgcccaggttcttctgagctatgaaggggcccagatttaagggctatttttgacaccctaaatgtgctgagacaagtcattaaggtggtcctgccaggacacagccatctaaagcagcaatctgcttcttgccagaaaatctcgtgcctctgcagagccttttccagaatgaaccacaccatgctgaggtagggtagaaggggcagtacaccaataggcctgggtatcctagaacaataggcctagaacttctcatcagctcctgtttcttttcatctctaggaaaggagaaagagactacctactgcatttctgtcactcgctgaaaaggacactctgtcagaaaatcttctagcaaacttcaaagggcaaaatcaccccttgttactgataaagcccagagagcttcagcagctaacattccctggacagggcacagcaaggatttgaacctaggtcagtctggccagaacacccacaagctttccttaactcagtgtgctatctccccacgactaggtcactactgctttataatcacctttgtagccaccagtggattttgctcatcagtatttttcaggcaattgatactttagatattcagctgcaagacgtatgcagttttcattgacatcttttggagaaactgacaaactggacttgacttaatgcctttggaaccttccaagatgttatataactctagatagaaggctgggcctccatgatgtcaggaatgttgcattcttatttccccatagataaacccatttgtccacaaagtcaaggagtcaggcagaggcccttgccatggggctttttaggataaagcaacaagcctggactttgctctacaacagggttttgcatagggagtggtatgaccagatccctcaagaaagaaagcttagagaccatcctgagcaacagggcaaaaccttgtctctactaaaaatacaaaaaattagctgggcatggtggcctgtacctataatcccagctacttgggaggctgagacacaacaatcacttgaacctgggatgcagaggttgcagggagctgagattgaaccactgtactccagcctggggaacaaactgagactctgtctcaaaaaaaaagaaagaatacttatgggtaaatctgacaaaataagtgtaagacctgtacactaaaaactacaaaacattgctgaaataaattaaagaagacctaaataatcggagagatatactttgtttaaaggtcagaagtctcagtattgctaaaatgagaactcttcccaatgcagtgctaatcaaatttctagcaggctttttgtagaaattgaaaagcagatttgaaattcatatggaagtgcgaacaaaaccaaaagagccaatataacttt

SEQ ID NO: 12466 - protein, 121 aa, Homo sapiens
MGLFRIKQQAWTLLYNRVLHREWYDQIPQERKLRDHPEQQGKTLSLLKIQKISWAWWPVPIIPATWEAETQQSLEPGMQRLQGAEIEPLYSSLGNKLRLCLKKKERILMGKSDKISVRPVH

SEQ ID NO: 12467 - DNA, 2106 bp, Homo sapiens
  CDS (223)..(1716)
acacacagggctcccccccgcctctgacttctctgtccgaagtcgggacaccctcctaccacctgtagagaagcgggagtggatctgaaataaaatccaggaatctgggggttcctagacggagccagacttcggaacgggtgtcctgctactcctgctggggctcctccaggacaagggcacacaactggttccgttaagcccctctctcgctcagacgccatggagctggatctgtctccacctcatcttagcagctctccggaagacctttgcccagcccctgggacccctcctgggactccccggccccctgatacccctctgcctgaggaggtaaagaggtcccagcctctcctcatcccaattctcgggggcccctccagtgcaagggggctgctcccccgcgatgccagccgcccccatgtagtaaaggtgtacagtgaggatggggcctgcaggtctgtggaggtggcagcaggtgccacagctcgccacgtgtgtgaaatgctggtgcagcgagctcacgccttgagcgacgagacctgggggctggtggggtgccacccccacctagcactggagcggggtttggaggaccacgagtccgtggtggaagtgcaggctgcctggcccgtgggcggagatagccgcttcgtcttccggaaaaacttcgccaagtacgaactgttcaagagctccccacactccctgttcccagaaaaaatggtctccagctgtctcgatgcacacactggtatatcccatgaagacctcatccagaacttcctgaatgctggcagctttcctgagatccagggctttctgcagctgcggggttcaggacggaagctttggaaacgctttttctgcttcttgcgccgatctggcctctattactccaccaagggcacctctaaggatccgaggcacctgcagtacgtggcagatgtgaacgagtccaacgtgtacgtggtgacgcagggccgcaagctctacgggatgcccactgacttcggtttctgtgtcaagcccaacaagcttcgaaatggccacaaggggcttcggatcttctgcagtgaagatgagcagagccgcacctgctggctggctgccttccgcctcttcaagtacggggtgcagctgtacaagaattaccagcaggcacagtctcgccatctgcatccatcttgtttgggctccccacccttgagaagtgcctcagataataccctggtggccatggacttctctggccatgctgggcgtgtcattgagaacccccgggaggctctgagtgtggccctggaggaggcccaggcctggaggaagaagacaaaccaccgcctcagcctgcccatgccagcctccggcacgagcctcagtgcagccatccaccgcacccaactctggttccacgggcgcatttcccgtgaggagagccagcggcttattggacagcagggcttggtagacggcctgttcctggtccgggagagtcagcggaacccccagggctttgtcctctctttgtgccacctgcagaaagtgaagcattatctcatcctgccgagcgaggaggagggccgcctgtacttcagcatggatgatggccagacccgcttcactgacctgctgcagctcgtggagttccaccagctgaaccgcggcatcctgccgtgcttgctgcgccattgctgcacgcgggtggccctctgaccaggccgtggactggctcatgcctcagcccgccttcaggctgcccgccgcccctccacccatccagtggactctggggcgcggccacaggggacgggatgaggagcgggagggttccgccactccagttttctcctctgcttctttgcctccctcagatagaaaacagcccccactccagtccactcctgacccctctcctcaagggaaggccttgggtggccccctctccttctcctagctctggaggtgctgctctagggcagggaattatgggagaagtgggggcagcccaggcggtttcacgccccacactttgtacagaccgagaggccagttgatctgctctgttttatactagtgacaataaagattattttttgatac

SEQ ID NO: 12468 - protein, 498 aa, Homo sapiens [sequence omitted]

SEQ ID NO: 12469 - DNA, 2093 bp, Homo sapiens
  CDS (251)..(934)
aagggcgtgcagatggacagggcggtcatgctgtaccacaaggctggccacttctccaaggccctggagctggcctttgccacccagcagtttgtggccctacagctcatagcagaggacctggatgagacgtcagaccctgcgctcctggcccgctgctccgacttcttcatcgagcacagtcagtacgagagggcggtagagctgctgctggctgtccacgggggtcgcacacagcctgcgcaccgacatgcacatcagtggagtgtttgccaccaaggatgctgtcgcagtctggaacggaaggcaggtggcgatcttcgagctttctggagccgcgatacggagtgcagggaccttcttgtgtgagacgcctgtgttagcaatgcatgaagaaaacgtttacacggtggagtcaaaccgagttcaagttcgaacctggcaggggactgtcaaacaactcctccttttctcggagactgaggggaatccctgcttcttggacatctgtgggaatttcctggttgtagggacagacttggctcactttaaaagctttgatctttcccgaagagaggccaaagcacactgtagctgcaggagcctggcggagctggtccctggggtggggggcatcgcttctctgcggtgcagcagcagcgggagcaccatcagcatcctccccagcaaggctgacaacagccctgattccaaaatctgcttctacgatgttgaaatggacacagtgaccgtctttgacttcaagactggacaggcttggtgtcttgctcttgtggaggttggaccaaaggggccgagtgcaagggacgcctctgctgaaacacgagtatgggaaacacctcacgcactgcatcttccggctcccccctcctggcgaggacctggttcagttggcaaaggcagctgtgagcggtgatgagaaagccctggacatgtttaactggaagaagagcagttctggaagtttgctgaagatggggtctcacgaggggctgttgttctttgtcagtctgatggacgggacagtgcactatgtggatgaaaagggcaagaccactcaggtggtgtccgcagacagcacgattcagatgctgttctacatggagaagagggaggcactggtggtggtcacagagaacctccggctgtccctgtacacggtgcctcctgagggcaaagcagaagaagtgatgaaggtcaagctgagcgggaaaaccggccgccgggcagacatcgctttgattgaaggcagccttctcgtgatggccgtcggggaggctgccctcagattctgggacatagaacgaggagagaattatatactgagtccagatgagaagtttggctttgaggaaggagagaatatgaactgtgtgtgttactgtaaagtcaaaggtcttctggccgctggtaccgacagagggcgagtagccatgtggaggaaagtaccagactcccactgccacgcaccgtccccgagcaggtccgccacaacagcatggaggacgccagggagctggacgaggaggtggtggaagaggcagatgacgacccctgaggggcctgggccccaggaccagcgtgctgctgcagaaaggcatcttctggaattttttcgtcagctgtggcaaagccagcatttttgctgggaaaaaacatgtctgtgttggaatacgcgacagagctgggcgagaacgcagcggcccgggccggcggagggtgtgacccgtctgcaccttgctctgtcccacctgcctctgggtgcccggcagctccactagatttttggattcattcctttgaagggagtcgggttcacccttccatcgtattctcccaactacacattgtaaagcctgagaaacttctagaacctcaggaagctgcagctggagggctggggcacctgcccccctgctccccacacatcatatcctccccatactcctgcagggcccacggctcctgagcaacagctgggacacccgggccttggcggctgcaccccctgctaggctctgcccaccggccaccaacactcctgtaattccaataaagcagtttattttctg

SEQ ID NO: 12470 - protein, 228 aa, Homo sapiens
MHISGVFATKDAVAVWNGRQVAIFELSGAAIRSAGTFLCETPVLAMHEENVYTVESNRVQVRTWQGTVKQLLLFSETEGNPCFLDICGNFLVVGTDLAHFKSFDLSRREAKAHCSCRSLAELVPGVGGIASLRCSSSGSTISILPSKADNSPDSKICFYDVEMDTVTVFDFKTGQAWCLALVEVGPKGPSARDASAETRVWETPHALHLPAPPSWRGPGSVGKGSCER

SEQ ID NO: 12471 - DNA, 1751 bp, Homo sapiens
  CDS (160)..(603)
gcgacaccatgacttatgcttatctcttcaagtatatcatcatcggagacacaggtgtggggaagtcatgtctcctcctgcagtttacagataagcggttccagcctgtccacgacctcacaataggtgtggagtttggagctcgtatggtcaacattgatggaaaacaaatcaaactgcaaatctgggatacggggagcagctggagcactgctggtgtacgacattacaaggcgtgaaaccttcaaccacctgacctcatggttagaggatgcccggcagcactctagttccaacatggttatcatgctcattgggaataagagtgacctagagtcccgcagggatgtgaagagagaagaaggagaggcctttgctagggagcatggacttatattcatggaaacttcagccaaaacagcctgcaatgttgaagaggccttcattaacacagccaaagaaatatataggaagatccagcagggtttatttgatgtccacttcccactaagaattagggtcaaagacattctatttgaacacttgcaattacctagatctagttggcctttggttgatagatcctctgcctcggaatttcattgagtttttttcttccttgcctttgggtgtctgcttgccacttcctaagaattcttgtagaaggcagtttcctctacttgcccaagagcactgagtacttctctactatcctattattagcttctatctcttagtgtaacttcaaaacttttaagagcagtgaagttggtcagggacatgtggccacttattattacctaaagaaaacatttgttccctgttcattttattttaggggccagatctaacattgtagtgtctttcaccagatagacttctactgtttcatcaaactcccttcttaactagacctagactttctactccaatcaggctaatctacttactgaatgtgacatatttattcctagttccatacctttgcacatgccctactctccactaattatacttaaaagtccaaaaattttttctttagtaacagacttaggtactgctaagcagttattaacacaatattccttagttttcatatgttggttattcatatgtctatttatatgtatatttattttatgtatgttactatgtaaatatggtttgcagttgtttttgtgtggaatcttgtcttcccgtataagttgtaagctccttgagagcaggatccatgtcattcctttatttttataaattattccccctatcattcctttacagtgcctagtgctactcattatgtgttcattgaatttgactgacatagttaaaaacttaaggtttattttagactttcaaggaaacaaaagactttagagtcctctctctgtaattctgccccactcatttgtttaccctgggttttatacagttctcttccttctcccctcccacctttccctggctttttgcctccattccatgaggcatacagtaaggctgcctgctagtaagcagtcacataagtgggtacctatccagccattctcttttcagagcatataatactatcttagccaaacttgcctttgcttcactcatcatgcagccttctgggttggttgctatatatatcttttttccttgatgtcccattctcttccacagccctgaggtcttacgaatttttctactttctttttgctgttgatgaattgtttcattattaaatatatgcatgtatcaaagct

SEQ ID NO: 12472 - protein, 148 aa, Homo sapiens
MENKSNCKSGIRGAAGALLVYDITRRETFNHLTSWLEDARQHSSSNMVIMLIGNKSDLESRRDVKREEGEAFAREHGLIFMETSAKTACNVEEAFINTAKEIYRKIQQGLFDVHFPLRIRVKDILFEHLQLPRSSWPLVDRSSASEFH

SEQ ID NO: 12473 - DNA, 1772 bp, Homo sapiens
  CDS (186)..(1079)
agctctccgccagtaggagtttccggaaggagtttgaatttttgtgatttttatgcttgtttggtcggtggaatatgttgggatttatgtttgcctctgaacaagtgtcttgctcacatcgtaaatgactttctctccgaaacgctaaatattctttcccgcaggagctcatatccttattttccatgacggatcttaacgacaatatatgcaaaagatatataaagatgataactaatatagttatactgagcctgatcatttgcatttcgttagctttctggattatatcaatgactgcaagcacctattatggtaacttacgacctatttctccgtggcgttggctgttttctgctgttgttcctgttctgatcgtctctaatggccttaaaaagaaaagtctagatcacagtggggctctaggagggctagtcgttggatttatcctaaccattgcaaatttcagcttttttacctctttgctgatgtttttcttgtcttcttcgaaactcactaaatggaagggagaagtgaagaagcgtctagattcagaatataaggaaggtgggcaaaggaattgggttcaggtgttctgtaatggagctgtacccacagaactggccctgctgtacatgatagaaaatggccccggggaaatcccagtcgatttttccaagcagtactccgcttcctggatgtgtttgtctctcttggctgcactggcctgctctgctggagacacatgggcttcagaagttggcccagttctgagtaaaagttctccaagactgataacaacctgggagaaagttccagttggtaccaatggaggagttacagtggtgggccttgtctccagtctccttggtggtacctttgtgggcattgcatacttcctcacacagctgatttttgtgaatgatttagacatttctgccccgcagtggccaattattgcatttggtggtttagctggattactaggatcaattgtggactcatacttaggggctacaatgcagtatactggtaagaacattccttcattcttgcaacttattggtatgttaaagaaatagggaaaagaaagaaaaaaatgttaacaatgaaaacaaatccaaagacacagggtgttgagggactagaaatgatagggcaaagtctctttcacaattttggttttcttattcttttgtattaaattaattgaaagagaattagtcccgcgcagcaatgattagaagccatgtggggaagatacaatagtgcagagaacagacgtttttgtgtgagccattacctaatcccagaaaagcaagacgtttgggatcagatcattttaatacaattccttccattcattttcctattccatttgaggagtaattgtacaaatctgactatacacacgacctactttcttactgtggtatcatgcttgctattcttgcccctgagttttttgcttcattaagatatatggtcgatgtctgggcacggtggctcacatctataatcccagcactttgggaggccaaggggggcagatcactggaggtcaggagttcgagactagcctggccaacatggtgaaaccccatctctactaaaaatacaaaaattatctggtgtagtggcgcctgcctataatcccagctacttgggaggctgaggcaggagaattgcatgaacctgggaggcggagattgcagtgagccgagatcatgccactgcactatagcctgggcaacagagcaagactccatctc

SEQ ID NO: 12474 - protein, 298 aa, Homo sapiens
MTDLNDNICKRYIKMITNIVILSLIICISLAFWIISMTASTYYGNLRPISPWRWLFSAVVPVLIVSNGLKKKSLDHSGALGGLVVGFILTIANFSFFTSLLMFFLSSSKLTKWKGEVKKRLDSEYKEGGQRNWVQVFCNGAVPTELALLYMIENGPGEIPVDFSKQYSASWMCLSLLAALACSAGDTWASEVGPVLSKSSPRLITTWEKVPVGTNGGVTVVGLVSSLLGGTFVGIAYFLTQLIFVNDLDISAPQWPIIAFGGLAGLLGSIVDSYLGATMQYTGKNIPSFLQLIGMLKK

SEQ ID NO: 12475 - DNA, 1721 bp, Homo sapiens
  CDS (51)..(932)
gtcacctggaatgccgggagcccctgctcatcccgatcctctccttgtacatgggcgcacttgtgcgctgcaccaccctgtgcctgggctactacaagaacattcacgacatcatccctgacagaagtggcccggagctggggggagatgcaacaataagaaagatgctgagcttctggtggcctttggctctaattctggccacacagagaatcagtcggcctattgtcaacctctttgtttcccgggaccttggtggcagttctgcagccacagaggcagtggcgattttgacagccacataccctgtgggtcacatgccatacggctggttgacggaaatccgtgctgtgtatcctgctttcgacaagaataaccccagcaacaaactggtgagcacgagcaacacagtcacggcggcccacatcaagaagttcaccttcgtctgcatggctctgtcactcacgctctgtttcgtgatgttttggacacccaacgtgtctgagaaaatcttgatagacatcatcggagtggactttgcctttgcagaactctgtgttgttcctttgcggatcttctccttcttcccagttccagtcacagtgagggcgcatctcaccgggtggctgatgacactgaagaaaaccttcgtccttgcccccagctctgtgctgcggatcatcgtcctcatcgccagcctcgtggtcctaccctacctgggggtgcacggtgcgaccctgggcgtgggctccctcctggcgggctttgtgggagaatccaccatggtcgccatcgctgcgtgctatgtctaccggaagcagaaaaagaagatggagaatgagtcggccacggagggggaagactctgccatgacagacatgcctccgacagaggaggtgacagacatcgtggaaatgagagaggagaatgaataaggcacgggacgccatgggcactgcagggacagtcagtcaggatgacacttcggcatcatctcttccctctcccatcgtattttgttcccttttttttgttttgttttggtaatgaaagaggccttgatttaaaggtttcgtgtcaattctctagcatactgggtatgcccttcctgatctaacattctgtttatgatctaggatttagaacgtcgtatgagatcctacaatggaagaataaaatcacctcattcttcatttcagatctgaacattagcagtgatctagatttttttttttttaaacaaaattaagtgtgcttagagtcatccctctacatgggctgtggctgtcagcccataggtttgtcagtttcacatcaaaactgtgggtataaactgttgaaaccaatcacattaaaatatttagctgggcacagtggtgtgcatctgtagtcccagctacttgggaggctgaggcaggaggatcgcttaagcacaggagttggaatccagcctgagcaacagagcaaaaccccgtctctaaaatacaaataaaatatttgtgtagtttttgattaaaattgactacagcggtcagtataaaatacatgtcgcttttaaggaagtgctctttatgtatctaacagatggaagtttttgcattggtaagagcatttatatatgctttgtttcagggtttatggatttgtattcatatattgtcaaataggtttcatactctaattttactttaagtaaagcttaaacacttggcatacaactg

SEQ ID NO: 12476 - protein, 294 aa, Homo sapiens
MGALVRCTTLCLGYYKNIHDIIPDRSGPELGGDATIRKMLSFWWPLALILATQRISRPIVNLFVSRDLGGSSAATEAVAILTATYPVGHMPYGWLTEIRAVYPAFDKNNPSNKLVSTSNTVTAAHIKKFTFVCMALSLTLCFVMFWTPNVSEKILIDIIGVDFAFAELCVVPLRIFSFFPVPVTVRAHLTGWLMTLKKTFVLAPSSVLRIIVLIASLVVLPYLGVHGATLGVGSLLAGFVGESTMVAIAACYVYRKQKKKMENESATEGEDSAMTDMPPTEEVTDIVEMREENE

SEQ ID NO: 12477 - DNA, 1676 bp, Homo sapiens
  CDS (4)..(1257)
gcgatgaaagcagcagctgctgcccctgcctcagaggatgaggacgatgaggatgacgaagatgatgaggactatgacccaaattgtgaggaagaggaagaagaagaagaagacgaccctggggacatagaggactattacgtgggagtagccagcgatgtggagcagcagggggctgatgcctttgatcccgaggagtaccagttcacttgcttgacctacaaggaatctgagggtgccctcaatgagcacatgaccagcttagcttctgtcctaaaggtatctcattcagttgctaaacttatattagttaatttccactggcaagtttcagagatattggacagatacaagtccaattctgctcaactgcttgttgaggctcgagttcagcctaatccatcaaaacatgttcccacatcccatccccctcaccactgtgcagtgtgtatgcagtttgtgcgaaaggaaaacctactctctctggcctgtcagcaccagttttgccgcagctgctgggagcagcactgctcagttctcgtcaaggacggcgtgggcgtgggagtctcttgcatggctcaggactgtccactccgtacaccagaggactttgtgtttccattgcttcccaatgaagaattgagagagaaatacaggcgctacctcttcagggactatgtggagagtcattaccagctccagctgtgccctggtgcagactgccccatggttattcgggtacaggagcctagagctcgccgagtacagtgcaatcggtgcaacgaggtcttctgtttcaagtgtcgtcagatgtatcacgcacccacagactgtgccacaatccggaaatggctcacgaagtgtgcagacgactctgaaacagccaactacattagtgctcacactaaagactgtcccaagtgcaacatctgcattgagaagaatggaggctgcaatcacatgcaatgctccaaatgtaaacacgacttctgctggatgtgtctaggagattggaagactcatggcagtgaatactatgagtgcagtcgttacaaggagaatcctgacatcgtgaaccagagccaacaagcccaggcgagggaagccctcaagaagtacttattctactttgagaggtgggaaaacctctcatggaaagtggagcgtgcagacagctatgacagaggggacttggagaaccagatgcatatagcggagcagcggaggagaaccctgctgaaagatttccatgacacctaagttgggatgtggatgtgccggggtgaggaagatgtggctgcaaggtctcccggctgccatactgcatgctgcaggctctgcctttcatgaccccaggcaacagccagggccccactcctgagagacactggcaacacctcttagttgatttctgttttcttctcttttcactttttgtttctaccagggtagaggccatgttgaactggcctcttttcaggacttttatttccccctggatggttgttgggagggagggaaagtgttttctgaatggctattaatagtattagatcatcacaacttatgtaactttcaaaggttgtacaattatacaaaaaaaaaaaaaaggcaaactataggataacacagagccctttttgaaaataaattggcattggagtgttttaccctct

SEQ ID NO: 12478 - protein, 418 aa, Homo sapiens
MKAAAAAPASEDEDDEDDEDDEDYDPNCEEEEEEEEDDPGDIEDYYVGVASDVEQQGADAFDPEEYQFTCLTYKESEGALNEHMTSLASVLKVSHSVAKLILVNFHWQVSEILDRYKSNSAQLLVEARVQPNPSKHVPTSHPPHHCAVCMQFVRKENLLSLACQHQFCRSCWEQHCSVLVKDGVGVGVSCMAQDCPLRTPEDFVFPLLPNEELREKYRRYLFRDYVESHYQLQLCPGADCPMVIRVQEPRARRVQCNRCNEVFCFKCRQMYHAPTDCATIRKWLTKCADDSETANYISAHTKDCPKCNICIEKNGGCNHMQCSKCKHDFCWMCLGDWKTHGSEYYECSRYKENPDIVNQSQQAQAREALKKYLFYFERWENLSWKVERADSYDRGDLENQMHIAEQRRRTLLKDFHDT

SEQ ID NO: 12479 - DNA, 1148 bp, Homo sapiens
  CDS (191)..(1078)
cttacctcttaaaaggtgaaaaattagggacttggatgtttaattctaaaatgatcccaagatttaaccactgaaagaagcaaacaagggaagagctggtctttgcagaaatagttttaagtgtgcatattagagcactaatttgtttctctctttcaaagaactggatgaattgcctccattgtctccaatgcagccaatttcagaggaagaggctattcagattattgcagaccctccattgccaccagcttcattcacacttcgagactatgtggatcatcctgagactctgcagaagttggttcttctaggcgtggatttgtccaagatagaaaaacatccagaagcagcaaacctccttctgagactggattttgaaaaagacattaagcaaatgcttctgtttcttaaagatgtgggtatagaggataaccaactgggagcattcctgacaaaaaatcatgcaattttctctgaagaccttgaaaatctgaagaccagggtggcttatctgcattcaaaaaatttcagtaaagcagatgttgcacagatggtcagaaaagcaccatttttgctgaacttttcagtggaaagactggataacagattgggattttttcagaaagaacttgaacttagtgtgaagaagactagagatctggtagttcgtctcccaaggctgctaactggaagtctggaacccgtgaaagaaaatatgaaggtttatcgtcttgaacttggttttaaacataacgaaattcaacatatgatcaccagaatcccaaagatgttaactgcaaataaaatgaaacttaccgagacgtttgattttgtgcacaatgtgatgagcattccccaccacatcattgtcaagttcccacaggtatttaatacaaggctgtttaaggtcaaagaaagacacttgtttcttacctatttaggaagagcacagtatgatccagcaaaacctaactacatctctttggacaaactagtatctattcctgatgaaatattttgtgaagagattgccaaagcatcagtacaggactttgaaaaattcttaaaaacgctttagatttttatgtatgttaaaatgcagtattgtaaagtgaatatatatatgaataaatgaatatattttt

SEQ ID NO: 12480 - protein, 296 aa, Homo sapiens [sequence omitted]

SEQ ID NO: 12481 - DNA, 2160 bp, Homo sapiens
aataaatgttcagtgagaaccataatgtgaatagtataacccagcatgattttggtgtgaggataattgataatcattttcttccagcagacctacccatctcggtgggatttgcttcaagtgatgtatatgcaaattaatttgcatctcctggtcatatactaattggttggtgagtggttagtagccaagaaacactgcttatggcaagagaaagtcaagtgaaagattaaagaaaatcatgattaataatctgccagctgataaataagatagttataacaccactttggtgaggtgtacgcttttggccatgtgtacactggtgcattttcaagacagtggctatcttttcacttctgtttggctaatcatgttatgttgttctgaagttactgctgccctatacccacttcacacagcctgagctctgtctccttccaatgaacatgaagatcttttgattccgtagttcctggttctgttctgattccgacaggatgctggcatcctcaattaggccagctaaggaaagcattagaaaacagtgatgcactacactctgtggaacttaccgaaaccaacaggattttagagaagaaataagggggagcctgaagctgtcaggccgcaaagaatgtcaaagagaaatgaaacttcagtcttagaatgtcaaataaagtgtgataagaaataagaggagggaagatattccaagtaggtaagggcatcagcataagcaaaggtgctggaaggggtaatgaacatgtaatggtgggtgagcaggactgctgggagcagacagtgagtttgggtagaaatgacatagaagagtgaattggtaaaaatggaagagatgatgggcaaatgagaaagcaacgaagcaaaaaatatatagtacaatatgatattggaggacagaaatgattattgggggtaatttgacttttgaccatttcccaggcttaattcaagtatatttagctttcaaacatgacttctcctaatatcttctacacagctctttcagatgaaaaaaaaattggctaactgggtaaagggtgatacctttatagctctatttttttaatccctgaggaagtgaaccatgttatgagtcacatacattgtgtttaggtaggtgaggaaatgcattgaactgatttgcagagaatgagagctccagacccagacagtgagacttcagaacttcatagatgtcaaagcatctttgacatctatgtcccagctctaggacacattcatgataggttcacttacttccaaacccaaagaggatattcttagacacttcctagtttcttcatcttgtaaaagtggttaagtggcttgtccaaggtcttttggctataaattgtagacaaggattcagagccaagtgttctgtccccaagaatgcttttgtctcttttttttaaatagtaacatcatgaggacatctcaggtcatggctggggagtgctttgtgctctgtaagggactaggaaattgttcacatacttcttcaatattgttcctgctgtgctttttataggataacacattttaactctgtcctcactaccaagactttatataaaatcagctggaatgaattgctggtcaaattcaaaattaatttcatgtcaaagtcttttcctcatgatatttgtgtgttttgtgagaactgcctttcttaaattcttctgaaccaactcataatactccaaatttaaatccatccatctataaaactaccttttctgtatcagtagtactttttcagaacatacctatttctagattataatcaaatattcttaaaataatctggtagtctgtgagtcctttgtctagaacttaattaaaagtggcaaaggaggccgggcgctgttgctcactcctgtaatcccagtactttgggaggccgaggcaggtggatcacgaggtcaggagatcgagaccatcctgggtaacacggtcaccccgtctctactaaaaatacaaaaagttagccgggagtggtagtggatgcctgtagtcccagctacttgggaggctgaggcaggagaatggcatgagcccaggatgtggagcttgcagtgagccgagacggcaccactgcactccacactgggcaacagagcaagactccgtctc

SEQ ID NO: 12482 - DNA, 1279 bp, Homo sapiens
caaacttcatgtctttcagaatatcatcacccttgcagaaactggctctctggacttcagaacattttgtacatcatgtcttgtgagttttttcatataatttttttccgtagtgaaagcaaagtcttggtaacgttgctgatgtaagcatttgtcagatcttcatggtatatttatacacctttgtttttacccatttctaattttacattcctgtctgaacagctttctgtcttgaacatatggcagaatgatgtttataatctcttgaagttgtctctggttacatctctccgtgaattatccattgtgtgttttatttgcttttctctgtcatgaagcatatattagaactaacgtcaaatcagaggctcataatgaccttagaaaccacttagtgaaacctctcattttgcaattgaggaatcaagggaggaagtaaattctcccaaattattggtggtgataaaaatggaacttgggtttccttcccttggttgagtgcttattttgctctgtggtactgcctcatttctgcttagccagtatgaacaggctctggaattcagatcccacttagtgatgtcctaatcaaagtagacatatggaagtaaatactaataaggcattccacagcctctgtgtgaattgatggtctgtttaggatttgtgccaatgcctctgtgacctaaagttaaaattttgcttgtgatttgttaccactttgagacactggtttttgcttaggcctctcttaattgcccacttagataaggaagccattaaggtcactccactgccatgtatgcaactgctgtgtggctcgatatgatcaacactgcctgtggactggacggtgcataggttttggcaaccatcactattacatattcttcttgtttttcctttccatggtatgtggctggattatatatggatctttcatctgtaagtgtaaatttttcttacaacaagcacatacatctacacccatttctacttttccttgtaaacccttgtatatcacattctggctgggtgactataaaccatactcctaataaaaacaaagcaaatgcctctaagactccctcagcattgggaagctgcaagaaatacaagatgaggttagttctcggtactttaggaaaaaaatgtgataaatttgaaaagtagtcaaaaatagaaattcatttaaggcaagtgcagatttgctccccagtgaagaaggaaagtcagctgctgaagtacaaagctggaggtgataactgaataaaac

SEQ ID NO: 12483 - DNA, 1663 bp, Homo sapiens
  CDS (269)..(643)
atcgagtcggccttgttgggtgctaggatttcaagtatttggtgtctggccagaaggatctgatgggacagatatcaatgcactggtgcgatcccacaatagaaaggtgatagctgttgccgatgacttttgtaaagtccatctgtttcagtatccctgctccaaagcaaaggctcccagtcacaagtacagtgcccacagcagccatgtcaccaatgtcagttttactcacaatgacagtcacctgatatcaactggtggaaaagacatgagcatcattcagtggaaacttgtggaaaagttatctttgcctcagaatgagactgtagcggatactactctaaccaaagcccccgtctcttccactgaaagtgtcatccaatctaatactcccacaccgcctccttctcagcccttaaatgagacagctgaagaggaaagtagaataagcagttctcccacacttctggagaacagcctggaacaaactgtggagccaagtgaagaccacagcgaggaggagagtgaagagggcagcggagaccttggtgagcctctttatgaagagccatgcaacgagataagcaaggagcaggccaaagccacccttctggaggaccagcaagacccttcgccctcgtcctaacaccctggcttcagtgcaactcttttccttcagctgcatgtgattttgtgataaagttcaggtaacaggatgggcagtgatggagaatcactgttgattgagattttggtttccatgtgatttgttttcttcaatagtcttattttcagtctctcaaatacagccaacttaaagttttagtttggtgtttattgaaaattaaccaaacttaatactaggagaagactgaatcattaatgatgtctcacaaattactgtgtacctaagtggtgtgatgtaaatactggaaacaaaaacagcagttgcattgattttgaaaacaaacccccttgttatctgaacatgttttcttcaggaacaaccagaggtatcacaaacactgttactcatctactggctcagactgtactacttttttttttttttttcctgaaaaagaaaccagaaaaaaatgtactcttactgagataccctctcaccccaaatgtgtaatggaaaatttttaattaagaaaaacttcagttttgccaagtgcaatggtgttgccttctttaaaaaatgccgttttcttacactaccagtggatgtccagacatgctcttagtctactagagaggtgctgccttttctaagtcataatgaggaacagtcccttaatttcttgtgtgcaactcgacggtttcgccggcagtctcgatgatagtatttctgctgcaagtacttctgatgttcaagatcgcctgtcagctcttgagtcacgagttcagcaacaagaagatgaaatcactgtgctaaaggcggctttggctgatgttttgaggcgtcttgcaatctctgaagatcatgtggcctcagtgaaaaaatcagtctcaagtaaaggccaaccaagccctcgagcagttattcccatgtcctgtataaccaatggaagtggtgcaaacagaaaaccaagtcataccagtgctgtctcaattgcaggaaaagaaactctttcatctgctgctaaaagtggtacag

SEQ ID NO: 12484 - protein, 125 aa, Homo sapiens
MSIIQWKLVEKLSLPQNETVADTTLTKAPVSSTESVIQSNTPTPPPSQPLNETAEEESRISSSPTLLENSLEQTVEPSEDHSEEESEEGSGDLGEPLYEEPCNEISKEQAKATLLEDQQDPSPSS

SEQ ID NO: 12485 - DNA, 1624 bp, Homo sapiens
aaaaacatgaaggacagatatgttgaagtccttcagtgttcagctgaggagatgaactttgtgttaatggggggcactttaaatcgaaatggcttatccccaccgccatgtaagttaccatgcctgtctcctccctcctacacatttccagctcctgctgcagttattcctacagaagctgccatttaccagccctctgtgattttgaatccacgagcactgcagccctccacagcgtactacccagcaggcactcagctcttcatgaattacacagcgtactatcccagtgtttgaaagatgtatggtgatcttgaaacctccagacacaagaaaacttctagcaaattcaggggaagtttgtctacactcaggctgcagtattttcagcaaacttgattggacaaacgggcctgtgccttatcttttggtggagtgaaaaaatttgagccagtgaagccaaatcgtaacttacagcaagcagcatgcagcatacctggctctttgctgattgcaaataggcatttaaaatgtgaatttggaatcagatgtctccattacttccagttaaagtggcatcataggcgtttcctaagttttaagtcttggataaaaactccaccagtgtctaccatctccaccatgaactctgttaaggaagcttcattttcgtatattcccgctcttttctcttcatttccctgtcttctgcataatcatgccttcttgctaagtaattcaagcataagatcttggaataataaaatcacaatcttaggagaaagaataaaattgttattttcccagtctcttggccatgatgatatcttatgattaaaaacaaattaaattttaaaacacctgaagatatattagaagaaattgtgcaccctccacaaaacatacaaagtttaaaagtttggatctttttctcagcaggtatcagttgtaaataatgaattaggggccaaaatgcaaaacgaaaaatgaagcagctacatgtagttagtaatttctagtttgaactgtaattgaatattgtggcttcatatgtattattttatattgtacttttttcattattgatggtttggactttaataagagaaattccatagtttttaatatcccagaagtgagacaatttgaacagtgtattctagaaaacaatacactaactgaacagaagtgaatgcttatatatattatgatagccttaaacctttttcctctaatgccttaactgtcaaataattataaccttttaaagcataggactatagtcagcatgctagactgagaggtaaacactgatgcaattagaacaggtactgatgctgtcagtgtttaacactatgtttagctgtgtttatgctataaaagtgcaatatcagacactagctagtactgctgcctcatgtaactccaaagaaaacaggatttcattaagtgcattgaatgtggctatttctctaagttactcatattgtcctttgcttgaatgcaatgccgtgcagatttatgtggctgctatttttattttctgtgcattactttaacaccttaaagggagaagcaaacatttccttcttcagctgactggcaatggccctttaactgcaat

SEQ ID NO: 12486 - DNA, 1825 bp, Homo sapiens
  CDS (73)..(675)
aaggaattttttgagaagttacaacacacactggatcaaaagaagaatgaaattctgtctgactttgagaccatgaaacttgctgttatgcaagcatatgacccagagatcaacaaactcaacaccatcttgcaggagcaacggatggcctttaacattgctgaggctttcaaagatgtgtcagaacccattgtatttctgcaacagatgcaggagtttagagagaaaatcaaagtaatcaaggaaactcctttacctccctctaatttgcctgcaagccctttaatgaagaactttgataccagtcagtgggaagacataaaactagtcgatgtggataaactttctttgcctcaagacactggcacattcattagcaagattccctggagcttttataagttatttttgctaatccttctgcttggccttgtcattgtctttggtcctaccatgttcctagaatggtcattatttgatgacctggcaacttggaaaggctgtctttcaaacttcagttcctatctgactaaaacagccgatttcatagaacaatcagttttttactgggaacaggtgacagatgggtttttcattttcaatgaaagattcaagaattttactttggtggtactgaacaatgtggcagaatttgtgtgcaaatataaactattataaaatctgtttcaagtatgcagttttcttttgttagaaattgttagagaatagagagtggtaattcagatttggtcaacgattctagtcacatattttcctccaaaagtattccttccaaaaataatctatacatgttcaaattaggtagcataaagataaaagtgaaatttagtagtataggcctgaacctttttttgtttaaaagagtgcttttgaaataagcatccaccccaaatgttggttgtatttatgctgtgataaaaataggtgagagatcatatgatctaatattgtattgatggaagtataggtagtatagtagtgattgttcttcaagcatgcagtaaagatcacttttttttttttttttttttgagatggagtcttgctctgtcgcccaggctggagtgcagtggtgcaatcttggctcactgcagcctctacctcccaggttcaagtgattatcctgccttagcctcctgagtagctgggattacaggcgcgtgccaccacgcccagctaattttttgtatttttagttgagacagggtttcactgtcccttaagaccatcctgttagccaagatggtcttgatctcctgacctcgtgatccgcctgcctcggcctcccaaagtgctgggattacaggtgtgagccaccgtgcccagccaaagactgctcttaaagcacctttttgacagtgaacatggtctaaaaaagggaagatattgtagaagatttcacacacacacgcgtgtgtgggagacaactaaaggtattgaaggtactaattaattagatttccaaaattttctacagagagttaattatcaccaaaatgcgaatggtacatacaaaacctggcattttcttgtgataagtttacatttttaggagagtggagctttcaatctgcccttttctcctttgtttttgtagttttcaccaaagatgatcaactagaaatgttaagtggctatgcaagcaaaagcatagataggttaaaaaaaaggatcagctggctgggcagggtggctcatgtctataatctcagcattctaggacagtgatgtgggaggattatttgaggctaggagttccagttcgaaaccagcttcgtaaacatagcaagacccagtctctacc

SEQ ID NO: 12487 - protein, 201 aa, Homo sapiens [sequence omitted]

SEQ ID NO: 12488 - DNA, 1784 bp, Homo sapiens
  CDS (52)..(465)
acacgcgtcctcccctcggcggggaggccggctaggggcaggcgggcagcgatgcctgcgtcggccacagctgcctggcactgccctcctttgtgcctgcctcctctgccagcctccgctccaacctccccccccaaccccgcaacgaggcctgctcctgggcccggccgcagggcccgttgcccacagagcgcccaccctgcgcccacccggggtgccctcaccttctgggcccctggctcctggcctcgggtcctgctggtgcccaggtcgcccggccccgtcctccgtgctccgcgtttgccccaccctgctgcccgagctcggcggcgagcctggcacggtgccaggctgcctgggagcccagcccgggcagggcgaactttccagcgagggttggtctcaaactcctgggctcatgcaatcttcctgcctcggcctcccaatgtgctggaattacaggtatgagctaccgcgctcagcccaaacccagggctcttaaccaccctactatgtactgtgctggcccccggtcaagggagagaactcacgtcaggcaaaaatgttttacagagaggcagctaagtcttttccacagtggatgacacagtccccctcacaaaccaccccacagatccaaccccaaggaactctgcttctacgtgtgcccttggggcaagggatgcaaagcaccaggcgatggagctcagaggatggcactcttccagagagctgtgtgtctctgggaaagctaacacgcctctctgagcctgtcagcagatgcacaggcctgtgcacagagctctgcggagaccacgccgacatcgccgcacacccaccctcctgctcatgggacagaccattcacacctgcttcaccaccagccacaggcttgtcggaaggagcagactcttctccacggacaagccactgcccctttgagggcctcagcttccttaccctatgagatgaggaaacagatcttcacttgccacaggacttggggggatgaaaaggtaacctccgtaaagctgcccctggtgtggggaagccaccccatagatgacattgcccgccctccccctaggcccagagctctacagagtcctcaagctggtgtccctccaggctaaaacacttccaccccctgggcagtgcactacagggtggtggggaaggggccatctgtggaagaaacacagggcctggcctggggtcctgggcaagacctctgtgacctcagtttccccagatccctccaggtgtgaccttgtagatggcctctattctggattcacagctgctgaggaggaggaagaggacactgaaggcattccttcagtcccctggggaggttcagatgctcagactccctgataccacctttcctgggcagaataaagtccccaagatgtccaagccctaatccctggagcctgggaaagtgttacctcccagaccaaagggactttgtaggtgtgtgattgagttgaagatctgcagtgagagggtagcctggattagccacgtgtgcccaaaagcagagactccttcccagccgtggtcagagacagaacaaggggacgctgctggctttaaagacggaagaagggacgaggagccaaggagtgcaagtgccgccagaggccagaaaaggcaagggatggatttttcccctggagttccaggaggaaccagccctgccaacacctggattttagttctgggaccccacctcagacatctgacccccttgactgtaaggtaataaatgtgcgttgctt

SEQ ID NO: 12489 - protein, 138 aa, Homo sapiens
MPASATAAWHCPPLCLPPLPASAPTSPPNPATRPAPGPGRRARCPQSAHPAPTRGALTFWAPGSWPRVLLVPRSPGPVLRAPRLPHPAARARRRAWHGARLPGSPARAGRTFQRGLVSNSWAHAIFLPRPPNVLELQV

SEQ ID NO: 12490 - DNA, 1753 bp, Homo sapiens
cagagtatttgaaatatcccattagcttactgttagtagttgtcttaggaacttcttactaacggtgaatagtaaccgctatttgttgagcatttactaagcactgtgtgtgtgtgtgtgtgtgtgtgtgtgtgagagagagagagagagagagagagagagagagagagagaaagagagagagagtctgtgggttattcccatttgacagattggaatattaaggcaaaaagatactaagtattttgtccaatacctcatagccattgacagagatgggaataaaaattggcctatgtaacatcaccaaagcccacgcagtgcctgtgggaaaaatgaatttcagatttagcttaatgtcacacacacacagcccacaaggaaatgcctgacaattacgctccatgttctgaaactgacgtgtcatcatcaccacagaattgccactttatgcctcagtttacccaacttcaaagtagagaaacatttcatcatttaattttacttgctaggataatgtatgaattagttaatgcttataaagaagtgatttgatgaggggaaagctctatctaaatgctaagtattatttattattcatgtaagcatattactgtacccttcaatcaccttttttggatgtttcaaatgggcaattactgtctctttgtgtaaagctttaaaaatttttaatttaaattaaaagttaatctaatttaggaaaactctgccagctggaatggaacacagacttttttttcccccttttccaaacaaaacagcaattcagaatagactctcttttaatatagtaatgtggataggctttcctgggctagcggtattaggaatgagggctaattagtaatggctgttttgtaatgctggtaatctatgtgttaggattagtgctgataatatatctgattaggtggaattaactgatatttagaaggatggagattcttttgtttatgaaatctccattttggggttacgatgtgtagctggagtggctgagtccttgaaatcaagttaacatggctttcccataacgcagtgcccatatatgagtagagccaggaagcaatgagggtcatttgagctcaagaagacctttacatcttaaggcctcagtaaggagccctacaaatagtgaaaatcagagttcaaaggtcagaaatgtcaagtatgctttaaaaggagaagacatatttacctgagctcttcagttaacatccagcagtccttgatgggaaaattctttctatgtagcactttctgtcacatgcctgttgactcaaaagtaactggttttcgttttaaaatagaaaatgaaaaatgtatcattgaaagaaatcactgttttaattcctctcccctacaaatttgcatgttcaaccttccttttaaagtaaccatttttaaatgttccctagcacttaaattttaaggaaatatgcttagaaatcacattattcagttgcacagtttcagttgcccagcagtatcattaaatcctctggagtgattccagtcccacaaaaattagggacccctttacattgtttccatattcaaatggaaatctttttgcaagttagtaattaaagtatttaacctctctctccctccatttattagaaaactcttttttctttattttttcaattacgaaaaaactgctaaagccaatcaagcatttattttgataaaccgcttgtaacagtctcagctaaattctgcaaatacc

SEQ ID NO: 12491 - DNA, 1050 bp, Homo sapiens
  CDS (74)..(655)
ttttgttcgcgcggaagcgccgcggtagggtgggaacccaagcgggagagccgcgggatttgcggccgccgccatgccgtcgtccccgctgcgggtggcggtggtgtgctcgagcaaccagaaccggagcatggaggcgcacaacatcctcagcaaacggggattcagcgtccgatcctttggaacagggactcacgtgaagcttccaggaccagctcccgacaagcccaatgtttatgatttcaaaaccacatatgaccagatgtacaatgatcttcttaggaaagacaaagaactctatacacagaatgggattttacatatgctggacagaaataagagaatcaagccccggccagaaagattccagaactgcaaagacctgtttgatctgatcctcacttgcgaagagagagtgtatgaccaggtggtggaagatctgaattccagagaacaggagacctgccagcccgtgcacgtggtcaatgtggacatccaggacaaccacgaggaggccaccctgggggcgtttctcatctgtgagctctgccagtgtatccagcacacggaagacatggagaacgagatcgacgagctgctgcaggagttcgaggagaagagtggccgcacctttctgcacaccgtctgcttctactgagcccagcgcccgcatggagccgcctctggagcttcctgttgttcatactttttccttcctgacatttgtttttacttacaggtgttctgctggtgacggtagcattacccaaataaactgtgcatatgaaatgggagaggagatgccaaaacgccagatgaaagcagtcaagtttcttcttttccacttttacttatgagcgggatattgattacaaagtttttcttctttaaccaaaaaggaaagacaacggtttgtgtgcacttcccgacatacctgtgtcttcgtgtgcctgccttccctccctcctccccaccgggccggactgtacagagccctgctgcggcgtgttaggaatgacctggaattgtcaataaacagatgctgctgtc

SEQ ID NO: 12492 - protein, 194 aa, Homo sapiens
MPSSPLRVAVVCSSNQNRSMEAHNILSKRGFSVRSFGTGTHVKLPGPAPDKPNVYDFKTTYDQMYNDLLRKDKELYTQNGILHMLDRNKRIKPRPERFQNCKDLFDLILTCEERVYDQVVEDLNSREQETCQPVHVVNVDIQDNHEEATLGAFLICELCQCIQHTEDMENEIDELLQEFEEKSGRTFLHTVCFY

SEQ ID NO: 12493 - DNA, 1126 bp, Homo sapiens
  CDS (54)..(836)
agccgagacggtgcagggccggagaagcaccttcactcccagcctgcgccccgatgctgcgcgttctgtgcctcctgcgcccctggaggccccttcgggcccgcggctgcgcttccgacggggcggccgggggctcagagatccaagtgcgcgccctggcgggtccggaccaagggatcactgagattctgatgaacagaccttctgcccgcaatgccttggggaatgtcttcgtcagtgagctgctggaaactctggcccagctgcgggaggaccggcaagtgcgtgtcctgctcttcagaagtggagtgaagggcgcgttctgtgcaggtgcagacctgaaggagcgggaacagatgagtgaagcagaggtgggggtgtttgtccagcgactccggggcctgatgaatgacatcgcttcctcggcagtcatgggactgattgagaccacgcgagggctcctcccgggggcaggagggactcagaggctgccccgttgtctgggggtggccctggcgaaggagctcatcttcacgggccgacgactgagtggaactgaggcccacgtactggggctggtgaatcacgctgtggcccagaacgaggagggggacgccgcctaccagcgggcacgagcactggcccaggagatcctgccccaggcccccattgccgtgcggctgggcaaagtagccattaaccgaggaacggaggtggacattgcatctgggatggccattgaagggatgtgctatgcccagaatattccaacccgggaccggctagagggcatggcagccttcagggagaagcggactcccaaatttgttggcaaatgacccccattttaaccttcagcatgggagatgcatgccctgaagagcaggatccagaaggaagatttgtggccagattgccttcatcatttcacctctccagacttccatttcttcacaaggatgatgatggaaataaaatgactggcgtgatgcctggaaccaaggtgctgatcctaccacctactgctaccttccttagcttcaccctggctagaaataatcacgagggttgggtttgctttggaaaatgcctgtctctctacttgaatgataaagaattaaattag

SEQ ID NO: 12494 - protein, 261 aa, Homo sapiens
MLRVLCLLRPWRPLRARGCASDGAAGGSEIQVRALAGPDQGITEILMNRPSARNALGNVFVSELLETLAQLREDRQVRVLLFRSGVKGAFCAGADLKEREQMSEAEVGVFVQRLRGLMNDIASSAVMGLIETTRGLLPGAGGTQRLPRCLGVALAKELIFTGRRLSGTEAHVLGLVNHAVAQNEEGDAAYQRARALAQEILPQAPIAVRLGKVAINRGTEVDIASGMAIEGMCYAQNIPTRDRLEGMAAFREKRTPKFVGK

SEQ ID NO: 12495 - DNA, 1413 bp, Homo sapiens
tctctcagatgttgttattaactcgctctgtgttgttgcaaaactttttggtgcagattcgtttccaaaactattgctactttgtgtgctttaaacaaaataccttgggttgatgaaacatcaacccagtgctaggaatactgtgtatctatcattagctatatgggactatattgtagattgtggtttctcagtagagaagtgactgtagtgtgattctagataaatcatcattagcaattcattcagatggtcaataacttgaaatttatagctgtgataggagttcagaaattggcacatccctttaaaaataacaacagaaaatacaactcctgggaaaaaaggtgctgattctataagattatttatatatgtaagtgtttaaaaagattattttccagaaagtttgtgcagggtttaagttgctactattcaactacactatatataaataaaatatatacaatatatacattgttttcactgtatcacattaaagtacttgggcttcagaagtaagagccaaccaactgaaaacctgagatggagatatgttcaaagaatgagatacaattttttagttttcagtttaagtaactctcagcattacaaaagagtaagtatctcacaaataggaaataaaactaaaacgtagatttaaaaagaactgcacgggctttagggtaaatgctcatcttaaaccccactagagggaagtcttctcaagtttcaagcaagaccatttacttaatgtgaagttttggaaagttataaaggtgtatgttttagccatatgattttaattttaattttgcttcttttaggttcgttcttatttaaagcaatatgattgtgtgactccttgtagttacacttgtgtttcaatcagatcagattgttgtatttattccactattttgcatttaaatgataacataaaagatataaaaaatttaaaactgctatttttcttatagaagagaaaatgggtgttggtgattgtattttaattatttaagcgtctctgtttacctgcctaggaaaacattttatggcagtcttatgtgcaaagatcgtaaaaggacaaaaaatttaaactgcttataataatccaggagttgcattatagccagtagtaaaaataataataataataataaaaccatgtctatagctgtagatgggcttcacatctgtaaagcaatcaattgtatatttttgtgatgtgtaccatactgtgtgctccagcaaatgtccatttgtgtaaatgtatttattttatattgtatatattgttaaatgcaaaaaggagatatgattctgtaactccaatcagttcagatgtgtaactcaaattattatgcctttcaggatgatggtagagcgatattaaacaagcttccacttttg

SEQ ID NO: 12496 - DNA, 1201 bp, Homo sapiens
  CDS (36)..(1067)
aaaacggcgggaccagcagcgacggtagcagcagcatggccgcgatctatgggggtgtagaggggggaggcacacgatccgaggtccttttagtctcagaggatgggaagatcctggcagaagcagatggactgagcacaaaccactggctgatcgggacagacaagtgtgtggagaggatcaatgagatggtgaacagggccaaacggaaagcaggggtggatcctctggtaccgctgcgaagcttgggcctatctctgagcggtggggaccaggaggacgcggggaggatcctgatcgaggagctgagggaccgatttccctacctgagtgaaagctacttaatcaccaccgatgccgccggctccatcgccacagctacaccggatggtggagttgtgctcatatctggaacaggctccaactgcaggctcatcaaccctgatggctccgagagtggctgcggcggctggggccatatgatgggtgatgagggttcagcctactggatcgcacaccaagcagtgaaaatagtgtttgactccattgacaacctagaggcggctcctcatgatatcggctacgtcaaacaggccatgttccactatttccaggtgccagatcggctagggatactcactcacctgtatagggactttgataaatgcaggtttgctgggttttgccggaaaattgcagaaggtgctcagcagggagaccccctttcccgctatatcttcaggaaggctggggagatgctgggcagacacatcgtagcagtgttgcccgagattgacccggtcttgttccagggcaagattggactccccatcctgtgcgtgggctctgtgtggaagagctgggagctgctgaaggaaggttttcttttggtgctgacccagggcagagagatccaggctcagaacttcttctccagcttcaccctgatgaagctgaggcactcctccgctctgggtggggccagcctaggggccaggcacatcaggcacctcctccccatggactatagcgccaatgccattgccttctattcctacaccttttcctagggggctggtcccggctccaccccctccaagctcagtggacactgggtctgaaaggaaggagtcttttgcttcctttctcctttttacaaaaacaaacatagaagaaaataaatgcactttatccactcccc

SEQ ID NO: 12497 - protein, 344 aa, Homo sapiens [sequence omitted]

SEQ ID NO: 12498 - DNA, 1972 bp, Homo sapiens
  CDS (12)..(785)
attttttgcagatgcagaagagagtatcgggtcactatgtgacatctgcagctgccaagagtgtccatgctgcccctaatcctgctccaaaagaactgacaaataaagaggcagaaagggatatgctgccttctccggagcagactctttctcccttaagtaaaatgcctcactctgttccacaaccccttgttgaaaaaactgatgatgatgtcatcggtcaggctcctgctgaagcctcccctcctcccatagctccaaaacctgtgacaattcctgctagtcaggtatccacacaaaatctgaagactttgaaaacttttggtgccccacgaccatactcaagttctggtccttcaccgtttgctcttgctgtagtgaaaaggtcacagtctttcagtaaagagcgcaccgagtcacctagtgccagtgcattggtccaacctccagccaacacagaggaagggaagactcattctgtaaataaatttgtggacatcccacagcttggtgtgtctgataaggaaaataactctgcacataatgaacagaattcccaaataccaactccaactgatggcccatcattcactgttatgagacaaagttctttaacattccaaagctctgacccagaacagatgcgacagagtttgctgactgcaatccgttcgggagaggctgctgccaaattgaaaagggttaccattccatcaaatacaatatctgtgaatggaaggtcaagactcagccattccatgtcccctgatgcccaggacggccattaaatgttaccctgccacaccactgcacttcacttccacttcagaccaacttcatactaatggaacattttggcaaatgtatattcagatgtacactaatatattatctattaaaatattagaatttgtgttgtggcttttaatgccagaagaaaagttaccagaatttataatttatagtaattttttgatcttttttttgccttaagagttgaatatgctgctttagaactttaaaacaaggtgtaaatgattttcattttttacaaatgaaaaataattcctttgtattgatttcacttaccagcacattctctacaatggtgacttagacaaaagtataagattcatagactttatatttgtatgacatacaactaggacaaacatagatatgacatttgctgcctcagtgtagcaattggaaatatttataagttatatgaaagcctgttttgggctgaaagaatgatttagaaaactagtgataccaaataagtatattcagttcaataattattttcaatgatgaatcacttagtgtgaaagacttgccttgtgtattctttatgtaattacaaatcactgtcaattttatgggaagctcatagtattttaatattttattaacatggaactcttgtttttttaatctttagaacttaaattctacaataattttaaatattttctgtatataattatgacattgtcacacagaaattacacattttatgtgccagaagccttaaacatctttctgtgaaaatgctgatatattgtgacagttatttcacatttgatatgtagagaggaataggggttagtttatgtttatattgaaaaactttaaagactatttggaagttccagaaattctggttttaattcaagtaaaatgataaaatagtcattatatagttcagatgctaatattctaagtaataatatatatttacattgaagctaaaactgttaagcaaaacaatgcccatttgtcggcttacagctcttccggagtctagagcctgttggtgttctgtccctactttaagaatttaattgctcacttattctgaaagctttgttcaaacaagatgatattaaatttgttttcactaaaactactgggatatctgcctcttggggatttttttttcaatttaataaaagcaagttgtatattt

SEQ ID NO: 12499 - protein, 258 aa, Homo sapiens
MQKRVSGHYVTSAAAKSVHAAPNPAPKELTNKEAERDMLPSPEQTLSPLSKMPHSVPQPLVEKTDDDVIGQAPAEASPPPIAPKPVTIPASQVSTQNLKTLKTFGAPRPYSSSGPSPFALAVVKRSQSFSKERTESPSASALVQPPANTEEGKTHSVNKFVDIPQLGVSDKENNSAHNEQNSQIPTPTDGPSFTVMRQSSLTFQSSDPEQMRQSLLTAIRSGEAAAKLKRVTIPSNTISVNGRSRLSHSMSPDAQDGH

SEQ ID NO: 12500 - DNA, 1666 bp, Homo sapiens
  CDS (324)..(788)
tacaaaaaaaaacttataaaatgtttaaaaaaatgttcaaagcttgggagaaaagctttcttcattagtcaaggtgttttgatatggtattaaaatgtctaataaaagatggcactgcgtgattttattttaatgaagtgttatacaatcaagaaatgggggcaagggcctgccccccactccctcacctacctccttagcattccttcaggctgctactcggggctccaggtgtgtgaattggtcctcagatagtcaggcctgggtggagggagtggcaagtcaggcgtgcctcctacaagcttcctaacctcttaagcatcatggaaccagtcagccctctgtggagtcattgtgctggacctctgaaaagatctgcaggggccaagatgttgcagccaccggaggctgcaaggatgtgggttcttccaggtgtgggcccagcccccctccttccagcctttgctccccatcccacgttccactcgccctgcctgttgttcagtttgcgtctcagtgctgactcacgggcatgcttcattgaggcccaggaagaggccctggtttggggctgtgccagctcagagcccttgaaccagaaccaactgctcaggctcacaaaagttggcaaaatgcgggctgggcaggcagctcggggcagggagcagcagtgcaggcctggcctgtgtccccgtgcccagcgggctcccggagcagcattccagagcctcctgcagagccagcgaaggaaagctctagagggagacgactccaccgcctctctgctctgacccttctcaggcccgcctgatgtgctggaccatccccctgctgccacggcccctggctccgcagtcaccctccatcagatgcttccagaagcacctactctgtgcaagggcattcacaacaggccagtgggcaaacgtgagccagggccagcggagaaacactaaagaagactcggtggttcagagcctgggtctcagcgcgggacccgtctggggtgaagaccttggggctgttgtgagtcggtggcaggaacgtgggctctagactgtgcattcaggctctcctacttggcagaatgatcttggggaaacgacttcatctgaacttcagatatttcacatgtgaagcggggacaaaaccatgcagctcagaggtccctgtgggggctgggggagctgccctgcaggtcttggcacatgcacagcaggctccccatagctttgtcaccacaaagggcactgttctattcacagcacctcctgcttctgcctttctgggatgggagagaaggtgagggagccggcgagcaggttctaccctctctgctaagggcctagcacactttgatgaggttcctggacgtgagaccctcacaaagaccaaccattcctctaatagccatttaacggtactgcagttcatgggaaaatgtcctcattcttaggagatagatgctggattatataggtgaatgccttcaagaaatgtgtaatttaattccaaatagttccccccaaaatacacaaagcaaataaggccaaaatgttcattgttgaatctgcagtggctggtatttcagtgaacagtgtacttgttctttcaacttttctgtatgtttggaatttttcttaataaaagattgtgggaaatggtc

SEQ ID NO: 12501 - protein, 155 aa, Homo sapiens
MEPVSPLWSHCAGPLKRSAGAKMLQPPEAARMWVLPGVGPAPLLPAFAPHPTFHSPCLLFSLRLSADSRACFIEAQEEALVWGCASSEPLNQNQLLRLTKVGKMRAGQAARGREQQCRPGLCPRAQRAPGAAFQSLLQSQRRKALEGDDSTASLL

SEQ ID NO: 12502 - DNA, 1871 bp, Homo sapiens
agtcccccttgaacgcacctcaggatggcccgtactttggaaccactagcaaagaagatctttaaaggagttttggtagccgaacttgtaggcgtttttggagcatattttttgtttagcaagatgcacacaagccaagatttcaggcaaacaatgagcaagaaatatcccttcatcttggaagtttattacaaatccactgagaagtctggaatgtatggaatcagagagctagatcaaaaaacatggttgaacagcaaaaattagatccagtcatcacgttcagcctcccatctaagctgtttgagacctttgagagaagaagaaaagatgagtgtactaccacactgtagactcttggtggtcccacagaacatgctgctgagtcacaggaacttctagcctgccttggcctgtggtttcccacccactatacaaacccactgcttgtttgttgcttttcttctcatatttattgtcaaagatgaatgtttcaaaaagaaatgactaaggaaggaaaagaaacaaatgctctaaagattttctctccccaagcacttttactggtgaaataaaaaccagtaacaatcaatatgtaaaaacggcccacttccctaaaaaaaagtaatttttgtagtctgcaaggtttttttttttttgctttagtctaaatacttgttaatcttacatgttctcctgagagaagaaaaagccattcctttcaggttgtaaagtaccatgaaaaggtctttcaaaaatattcctatcagccaggcatggtggctcacaccagtaatctcagcactttgggaggccgaggcaggcgggtcacttgaggtcaggagttcgagaccagcctggccaacatggtgaaaccctgtttctactaaaaatacaaaaattagctgggcgtggtggtgcatgcctgtaatcccagctacttgggaggctaaggtaggagaattacttgaacatgggagatggaggttgcagtgagccaagatcatgccactgcattccaacctgggcaagggagtgagacgctgtctcaaaaaaaaaaaaaacgaaaatttcctatcttctgaagttccaagccaaagctatttttaaaacatcaataaaaaaatttaagttacttacttgcattatctttgttagccatggcattcatgccaatgttatcaaacttggatcccatattttcatccaatagatggccaaacttttaaacaaaaacgataaatttattagaaaactaaaaataatgtagaatagctagcttgttaaaacagtacattagccttacctcttcagcagatacaaataggctggaatcatttaagtttcttttcttttttcttggccctaaaaaaaattgtaagtctacattattcaattataaatctaatgattttagaaaaatgcaatgcaacatgattttattttaaaaattatacttgggtaaaaacaattgcaataatcttctggcaccattgggtagctggcatttaaatataatttaagagttagtatataatattttcaaaaagctaacaacatcctaatagaactgttcagatgacaagagtgtcttcttgcttttcagatttggccactgatcgaagttttacccataagggaaataacatagtatcaagcaatagtaaaattatcagtttgacatggatgggttttgaaatacttaagacacaacataaaatttagttcaggggtctttagattgtaaagaaattgactgaaagtatgtttattatgctataaatgaagttgtttataacagcgaaaaaggttctcctttaaaaaaaaacttatctgtagtgctgaatatataaacttttcctgaaacaatt

SEQ ID NO: 12503 - DNA, 2208 bp, Homo sapiens
  CDS (7)..(765)
gagagaatggataaagatctgggatctgtgcagggatttgaagatacaaataaatccgagagaactgagagtctggaagcaggagatgacgagtccaagttagatgatgcacattcattaggctctggtgctggagaaggatacgagccaatcagtgatgacgaactagatgaaattctggcaggtgatgcagaaaagagggaggaccaacaggatgaggagaagatgccagatcccttagatgtgatagatgtggattggtctggtcttatgccaaagcatccaaaagaaccacgagagcctggggctgcactcttaaaattcacacctggagctgttatgctaagagttgggatttctaaaaagttggcaggttctgaactctttgccaaagtcaaagaaacatgtcagagacttttagaaaaacccaaagatgcagacaatctctttgaacatgaattgggggctctcaatatggctgcattactacgaaaagaagaaagagcaagtcttcttagtaatcttggcccatgttgtaaggcgttgtgcttcagacgggattctgcaattcgaaagcagcttgttaaaaatgagaagggcaccataaaacaagcttacacgagtgctccaatggtagacaatgaattacttcgattgagtcttcggttatttaagcggaagactacttgccatgctccaggacatgaaaagactgaagataataaactttcacagtccagtatccaacaggaactgtgtgtgtcttaagaccgaagttcaatatggtatttttggtactgtcttccttcagcagtgcatattcttttgcaaagttctttggtttgacaggcattagtgacaaaggcagaaaagatttatcagccatgctaaaagagtgaagaattttgatctttagagacactagttttggccaacttaagattttacgttaatttttacatagtatttgacactcatgcaaaataatgtgaaaacatctagatttagtagtttattctgcgccttttgttaaaactgaagattttggaaaatggttgtcactgctcttccagcctatgaatatttttgtgaaatggaaccatggatttatgtctggatcatccatacagaaccaacaattttattcaaaaacaatgtgttcatcaaagtaattgctcacattgtgcagtactatgttgtacagaccacgtgaaagggaatgctggtctagctggcgtggtatgtttataggcgaatttcagcagaaggaagccaaaatagttttttccttttgaaagttttttaaaaattatttcatgggtcttttttttaattaatatgtgtgcattgttacaatgtatgttggatgtcttttgaccctaaatgctttttttgttatcagagattgtgtactatttttatttttaataaatgtatcttccctttccttgttttagatttactttgctcttcgttaatcttattcctgatgatctagaacattagtcatcaacattacatgtttcatgcttcagatattttactgcttgtgtccttattgttggacagctttaaacagagttgatgtacttcaaatatagctcattgatacttaaggcatcttcttggaatgtggcttttgaagaaaaaaattactcaaagcaaatcaagagttaacaaacctaacgtaacctgaggtttaatattctactatcatattttttagagctataacttttgattatattaaactgcctccagctgtactatgtaaaacagatttacttttaaaaattacagtatacctgctttgttctatatgtatatgtttaactcatgaagtggactcttagaaggatttgaaatggactctggccacagaatttgtgagcagacagtagtagtgataataataaaagaaggcaatcaaaatttaattttatcatgccctctcacaggtttgtgttataattgtaagcccatattacttgtgttagtagttttgtctctataggtaacataatgacagtggtgtaaagtttctgttcaagaaacatatgttgtaaagttactttatacaagatacctgccaaaggaaatggtcttactttcaaatgactttgaaggcatgtataattgcaaacagagcaggagaagactttaatcagaatttccttgtgtccttttcctttactaagtgttttgaat

SEQ ID NO: 12504 - protein, 253 aa, Homo sapiens [sequence omitted]

SEQ ID NO: 12505 - DNA, 1966 bp, Homo sapiens
  CDS (36)..(1214)
caggagaatcaattaaagccattgtgaaagatgtcatgtatatctgcccatttatgggagcagtgagtggaaccctgacagtgacggactttaagctgtacttcaaaaatgtcgagagggacccgcattttatccttgatgttccccttggagtgatcagcagagtggagaagattggagcacagagccatggagacaattcctgtggtatagagatagcgtgcaaggatatgaggaacttgcggcttgcttataaacaggaagaacagagtaaactagggatatttgaaaacctcaacaaacatgcatttcctctttctaacggacaggcactatttgcattcagctataaagaaaaatttccaattaatggctggaaagtttatgatccagtatctgaatataagagacagggcttgccaaatgagagttggaaaatatccaaaataaacagtaattatgagttctgtgacacctaccctgccatcattgttgtgccaactagtgtaaaagatgatgacctttcaaaagtggcagcttttcgagcaaaaggcagagtccctgtgttgtcatggattcatccggaaagtcaagcaacgattacccgttgcagccagccacttgtgggtcccaatgataagcgctgcaaagaggatgaaaaatacttgcaaacaataatggatgctaacgcacagtcacacaagcttatcatctttgatgctcgacaaaacagtgtcgctgataccaacaagatgctgcttgctggggcagtaagaattgctgataaaatagaatctgggaaaacatctgtggtggtgcattgcagcgacggttgggaccgaacagcccagctcacatctctggctatgctaatgttggacagttactacaggaccattaaaggatttgaaactctcgtagaaaaggagtggataagctttggacacaggtttgcactgcgagtgggccatggtaatgacaaccatgcggatgctgaccgatctcccatatttctgcagtttgttgattgtgtttggcaaatgacaaggcagtttccttcagcattcgagtttaatgagctattcttgattacaattttggatcacctttatagctgtctttttgggacctttttgtgcaactgtgaacagcagcgattcaaagaggcatggggggctgggacccagcgagcccgtggctctctcaggagtagatgagtgctagaccctggacctcctgactccgagttcatgtagtctccgctgcaccaactccaaaaccgtgggattctgcttttcatcctctgtggtgttggccagatcatacttgaaggccttggaaatggagtctgctgattagccaaaaagcccactttaggatgtatatacaaagacgatatctttatggtcgtatatcaatagccagctagacgagttttctaatcccttctttgtgaattatgaaaaccacgtgttatatcctgttgctagtctgagtcatttggaattgtgggtaaattattatgtacgatggaatccacggatgagacctcagaaatatgtaatcccctggctgactaggactgttaaacatagtgtggactggatgatgccttcgacaaaccagagaagccaagttggggggagctggtgcctggagtgggccctgtgcacctcacctggcggaggctgggggggctctgtcagcaggaccctagaggagactctcattcgattttaaagaagcacaacgggtcattttcctttgtatgttcctagcgcagaactgtttctaaaacaacttgaagtatagttttgttatctaagcaatttttgttttaagtaagtaagtgtactagaatgcgaagccgttatggttcaggtttttaaaaactggtacagtattgtatctgtctcatctgttgcactgtatttcaatcatctgtaattaaaatgatcatatgttt

SEQ ID NO: 12506 - protein, 393 aa, Homo sapiens [sequence omitted]

SEQ ID NO: 12507 - DNA, 2744 bp, Homo sapiens
  CDS (257)..(1786)
gttgttggccacagcgtgggaagcagctctgggggagctcggagctcccgatcacggcttcttgggggtagctacggctgggtgtgtagaacggggccggggctggggctgggtcccctagtggagacccaagtgcgagaggcaagaactctgcagcttcctgccttctgggtcagttccttattcaagtctgcagccggctcccagggagatctcggtggaacttcagaaacgctgggcagtctgcctttcaaccatgcccctgtccctgggagccgagatgtgggggcctgaggcctggctgctgctgctgctactgctggcatcatttacaggccggtgccccgcgggtgagctggggacctcagacgtggtaactgtggtgctgggccaggacgcaaaactgccctgcttctaccgaggggactccggcgagcaagtggggcaagtggcatgggctcgggtggacgcgggcgaaggcgcccaggaactagcgctactgcactccaaatacgggcttcatgtgagcccggcttacgagggccgcgtggagcagccgccgcccccacgcaaccccctggacggctcagtgctcctgcgcaacgcagtgcaggcggatgagggcgagtacgagtgccgggtcagcaccttccccgccggcagcttccaggcgcggctgcggctccgagtgctggtgcctcccctgccctcactgaatcctggtccagcactagaagagggccagggcctgaccctggcagcctcctgcacagctgagggcagcccagcccccagcgtgacctgggacacggaggtcaaaggcacaacgtccagccgttccttcaagcactcccgctctgctgccgtcacctcagagttccacttggtgcctagccgcagcatgaatgggcagccactgacttgtgtggtgtcccatcctggcctgctccaggaccaaaggatcacccacatcctccacgtgtccttccttgctgaggcctctgtgaggggccttgaagaccaaaatctgtggcacattggcagagaaggagctatgctcaagtgcctgagtgaagggcagccccctccctcatacaactggacacggctggatgggcctctgcccagtggggtacgagtggatggggacactttgggctttcccccactgaccactgagcacagcggcatctacgtctgccatgtcagcaatgagttctcctcaagggattctcaggtcactgtggatgttcttgacccccaggaagactctgggaagcaggtggacctagtgtcagcctcggtggtggtggtgggtgtgatcgccgcactcttgttctgccttctggtggtggtggtggtgctcatgtcccgataccatcggcgcaaggcccagcagatgacccagaaatatgaggaggagctgaccctgaccagggagaactccatccggaggctgcattcccatcacacggaccccaggagccagccggaggagagtgtagggctgagagccgagggccaccctgatagtctcaaggacaacagtagctgctctgtgatgagtgaagagcccgagggccgcagttactccacgctgaccacggtgagggagatagaaacacagactgaactgctgtctccaggctctgggcgggccgaggaggaggaagatcaggatgaaggcatcaaacaggccatgaaccattttgttcaggagaatgggaccctacgggccaagcccacgggcaatggcatctacatcaatgggcggggacacctggtctgacccaggcctgcctcccttccctaggcctggctccttctgttgacatgggagattttagctcatcttgggggcctccttaaacacccccatttcttgcggaagatgctccccatcccactgactgcttgacctttacctccaacccttctgttcatcgggagggctccaccaattgagtctctcccaccatgcatgcaggtcactgtgtgtgtgcatgtgtgcctgtgtgagtgttgactgactgtgtgtgtgtggaggggtgactgtccgtggaggggtgactgtgtccgtggtgtgtattatgctgtcatatcagagtcaagtgaactgtggtgtatgtgccacgggatttgagtggttgcgtgggcaacactgtcagggtttggcgtgtgtgtcatgtggctgtgtgtgacctctgcctgaaaaagcaggtattttctcagaccccagagcagtattaatgatgcagaggttggaggagagaggtggagactgtggctcagacccaggtgtgcgggcatagctggagctggaatctgcctccggtgtgagggaacctgtctcctaccacttcggagccatgggggcaagtgtgaagcagccagtccctgggtcagccagaggcttgaactgttacagaagccctctgccctctggtggcctctgggcctgctgcatgtacatattttctgtaaatatacatgcgccgggagcttcttgcaggaatactgctccgaatcacttttaatttttttcttttttttttcttgccctttccattagttgtattttttatttatttttatttttatttttttttagagatggagtctcactatgttgctcaggctggccttgaactcctgggctcaagcaatcctcctgcctcagcctccctagtagctgggactttaagtgtacaccactgtgcctgctttgaatcctttacgaagag

SEQ ID NO: 12508 - protein, 510 aa, Homo sapiens
MPLSLGAEMWGPEAWLLLLLLLASFTGRCPAGELGTSDVVTVVLGQDAKLPCFYRGDSGEQVGQVAWARVDAGEGAQELALLHSKYGLHVSPAYEGRVEQPPPPRNPLDGSVLLRNAVQADEGEYECRVSTFPAGSFQARLRLRVLVPPLPSLNPGPALEEGQGLTLAASCTAEGSPAPSVTWDTEVKGTTSSRSFKHSRSAAVTSEFHLVPSRSMNGQPLTCVVSHPGLLQDQRITHILHVSFLAEASVRGLEDQNLWHIGREGAMLKCLSEGQPPPSYNWTRLDGPLPSGVRVDGDTLGFPPLTTEHSGIYVCHVSNEFSSRDSQVTVDVLDPQEDSGKQVDLVSASVVVVGVIAALLFCLLVVVVVLMSRYHRRKAQQMTQKYEEELTLTRENSIRRLHSHHTDPRSQPEESVGLRAEGHPDSLKDNSSCSVMSEEPEGRSYSTLTTVREIETQTELLSPGSGRAEEEEDQDEGIKQAMNHFVQENGTLRAKPTGNGIYINGRGHLV

SEQ ID NO: 12509 - DNA, 1709 bp, Homo sapiens
  CDS (294)..(1364)
attttgaatgtgcagctgcagcgggcgtgagttgggggaggacgggttgccgactcgcctacctagcggtctcttgattgtcgatattttgttggcataggtttatgtagagacgtatacatatatatagacacactgtctttaaatctaggcctgtatccggtgtccgaggcgaactcagtaagatgatgttaagaggaaacctgaagcaagtgcgcattgagtaaaacccggcccgccttcgcgccctggagtccgcggtgggcgagagcgagccggcggccgcggcagccatggcgctcgctcttgccggggagccggcaccgcccgcgcccgcgcctccagaggaccacccggacgaggagatggggttcactatcgacatcaagagtttcctcaagccgggcgagaagacgtacacgcagcgctgccgcctcttcgtgggaaatctgcccaccgacatcacggaggaggacttcaagaggctcttcgaacgctatggcgagcccagcgaagtcttcatcaaccgggaccgtggcttcggcttcatccgcttggaatccagaaccctggctgaaattgcaaaagcagagctggacggcaccattctcaagagcagacctctacggattcgcttcgctacacatggagcagccttgactgtcaagaacctttctccagttgtttccaatgagctgctagagcaagcattttctcagtttggtccagtagagaaagctgttgtggttgtggatgatcgcggtagagctacaggaaaaggttttgtagagtttgcagcaaaacctcctgcacgaaaggctctggaaagatgtggtgatggggcattcttgctaacaacgacccctcgtccagtcattgtggaacccatggagcagtttgatgatgaagatggcttgccagagaagctgatgcagaaaactcaacaatatcataaggaaagagaacaaccaccacgttttgctcaacctgggacatttgaatttgagtatgcatctcgatggaaggctcttgatgaaatggaaaagcagcagcgtgagcaggttgatagaaacatcagagaagccaaagagaaactggaggcagaaatggaagcagctaggcatgaacaccaattaatgctaatgaggcaagatctaatgaggcgtcaagaagaactcagacgcttggaagaactcagaaaccaagagttgcaaaaacggaagcaaatacaactaagacatgaagaggagcatcggcggcgtgaggaagaaatgatccgacacagagaacaggaggaactgaggcgacagcaagagggctttaagccaaactacatggaaaatggtgataaaagaaaatgtggctgaagttacccgaagttcagcttgcagtgtaattcagaagagttaagaccagaagtactggaatcatacttcctttcaggtcaaaacattttgtgggaaatatcctgttcgtgacctaggagaaacaagacagaaaacaaatctttcttcatttatgaatttcttactccatacaagcagtttatggatgtctgggcaatcatagcacttgccatttaaaaacatgctacaggggcacattttctgtggttaaaaatgatctccagaataagtgtaaactgcagttttcctttgcattgagggttttggctttttatttgtaaattaaatcaagatgttacccac

SEQ ID NO: 12510 - protein, 357 aa, Homo sapiens
MALALAGEPAPPAPAPPEDHPDEEMGFTIDIKSFLKPGEKTYTQRCRLFVGNLPTDITEEDFKRLFERYGEPSEVFINRDRGFGFIRLESRTLAEIAKAELDGTILKSRPLRIRFATHGAALTVKNLSPVVSNELLEQAFSQFGPVEKAVVVVDDRGRATGKGFVEFAAKPPARKALERCGDGAFLLTTTPRPVIVEPMEQFDDEDGLPEKLMQKTQQYHKEREQPPRFAQPGTFEFEYASRWKALDEMEKQQREQVDRNIREAKEKLEAEMEAARHEHQLMLMRQDLMRRQEELRRLEELRNQELQKRKQIQLRHEEEHRRREEEMIRHREQEELRRQQEGFKPNYMENGDKRKCG

SEQ ID NO: 12511 - DNA, 2022 bp, Homo sapiens
  CDS (181)..(672)
attccccaacctgatagccctccgcgacgcattacgcaccgcggacagctggagaggccgaggcgctctcgctttgatttcggcgcctccgccctcgcggggagagattggctgcggccgcgggacggggtagtgagcgcgtcacttcctgccgctgccaggcgcgtcctcccgcgcgctatgacggccagcgcacagccgcgcgggcggcggccaggagtcggagtcggagtcgtggtgaccagctgcaagcatccgcgttgcgtcctcctggggaagaggaaaggctcggttggagctggcagtttccaactccctggaggtcatctggagttcggtgaaacctgggaagaatgtgctcaaagggaaacctgggaagaagcagctcttcacctgaaaaatgttcactttgcctcagttgtgaattctttcattgagaaggagaattaccattatgttactatattaatgaaaggagaagtggatgtgactcatgattcagaaccaaagaatgtagagcctgaaaaaaatgaaagttgggagtgggttccttgggaagaactacctcccctggaccagcttttctggggactgcgttgtttaaaagaacaaggctatgatccatttaaagaagatctgaaccatctggtgggatacaaaggaaatcatctctaggtggccgagaagatttgattttctttaaaaagacaagaataaggtctggttagggaatgaaaaatgtatacatttcggaacaactccattttatctaaaaaagttcttgtgattgccagtttatttgcagtctcttaatgtatcccccactctttcagccagtacttgagaaaatttttctgaaatatgtcattgaattgtattccagacacagaatacatgataaatactgatattatgggtaatctgctttccatatttacctatgatatttactgtgcagtttgtcattactagcttgcatggagtaggatgcagtcaaatttgccttagtgtttctgttcaaatagagacctgaattcaaatattgtagtttaggttcaaacagagtatggctgttgcaaaatttaccaaatttgttgattacctcttttattaaagaaatgttggggagagggtaatatattgtgacaatttttgcaacttacagggaataggacaggtcattagggtgtatttcccaggtttccaattgagaatctaaaccaagagaagtgagacaaaccatctaatatctgtatcatgctattaataggctgtgatgttgagtttctcacttactctttctgaggtccagggtccttatatgaagagattcatatatatgaagagattcgtctagagcagtggttgtcaaagtgtggtctgggggggcctcaagagcctttcaagggtattctaggtcaaagctgtttttataacactaagacattatttcactatttatagcttttccttttttttatttgagaaggagtcttgctctgttgcccacattggagtgcagtggcacgatctcagctcattgcagcctccgccacctgggttcaagcaattctcctacctcagcttcccgagtagctgggattataggcacccaccaccacacctggctaatttttgtatttttagtggagacggggtttcaccatgttggccaggctggtctggaactcctgagctcaagtgatctgcccatctcagcctcccaaagtgctgggattacaggtatgagccacaacgcccagccatcatttatctttttcactcattttttcatgagtatgcagaggagttttcaagaggctatctggtgtgatattgtaataggctgaatgcaaaagcagatacaagattccagctttcgtctgtcatcagacattgaagagatttggagaaatgtaaagcagcagtactcttctcactaatttttattgtggttagttagaaaaatggttatttttagtgggttttaatatgtgaaaaaaataaaattagctatttgcc

SEQ ID NO: 12512 - protein, 164 aa, Homo sapiens [sequence omitted]

SEQ ID NO: 12513 - DNA, 1957 bp, Homo sapiens
tcactagaatgtaaaaatcacaaaaggaagttgtttgttttgttcacttgtgtatctctaataactagaacaatgctcagtatatgctggattgttagatgaatggacaggactttaaataagtgcttctttagctatgatgaatgactagtttttaattacgaatctgtcacaacctagtacttttgtaaaatgcggtggaaatagtatatatgtatttattagtgtcatgttattaaaatcaacaggcattaaattgtcagattgctataaaaacttctaaatgttttcaattttttgctcataatgaccttctaataaacttgttgtggtcagcacccatttgcagacgacactatcagtaccactgtactagaacatatttaccattttatagtcagcagttaaaatgtgaaagctaaatgaaggacgtattcttctccttgctagacaagaagaagccacttaagagctgatgtcacattatgatggctgaattcctgcaggattattaacttacaaaaaggtttttttagtaataccaggaaaatttgataagtaccaattctatgcagagataagtctttttcagtggactcaattaaaacatcataatcctcattttatgtctgtcatttaatttgaggtttgtttttaatagctgtttatgtgttattcaatgaagtctcagttttacaggtttaaaaatattttatctcagtaaacactgctgtattatacctaatatgtttccgaagatatattgatcatttttaacatgtcttgtctgttttagtatgttgattactttactgtttatgtatctgggatggaaggagagtcattaaataatgacatttggagtttgggatctgggttcacaagaagatatacagctgaaagtaaaagctatgaagtttttaaaaagccgtgcctcagtttccactggtggattgcaaccagggttggtgttaattttaatgcttttcagctcctggatattcaagtcattttgcgttaggtatgtagaggtagatactgaattaagctcctttgggtgtcacttcatatgctcataacaaacactgataaactagtattatcagcttgagtagttggaatgctccagattcctcttgtctttgagctgttctctttccttatacagtttaattttacaaattattttaaactttcatagtgtagtccaatatactactactggcaacacacaaaactcaaaatcactgtcttatattttgaaacacaagaatatttctcagtttactgtttgagacactaccacagggaaagaaacattttcatttaattcatttctaatgcaaaaatcctgaaaaatccatttctggtcactaatttaaataaatttgtttttcaggatttttgcattataattttgcattgtaatggtcactaacttaaacacgtttgttttttcaggatgtttacatttgtttttcaggttttttaccttatattttggtttaaggacagcagcaattatttaataacatagaactgatcaaaatgtagatagagtttccgaataacaaattgagtatacgtgtagatagaaatacagatacagcatacatacatactatatgtatttagaaaacacatatgtttacatatgtaattaagaaaaaataggccgggtgcggtggctcatgcctgtaatcccagcactttgggaggccaaggtgggcggatcacctgagatcgggagttcaaaacccgcctggccaacatggtgaaaccctgtctctactaaaaaatacagtaattagctgggcgtggtggtgcatgtctgtaatcccagctactccggaggctgaggcaggagaatcacttgaacctgggaggtggaggttgcagtaagccaagattgcgccattgcactccagcctgggcaacaagagcgaaactccaactc

SEQ ID NO: 12514 - DNA, 2244 bp, Homo sapiens
  CDS (632)..(937)
taattgtaaagttttgttatatatcttttatcacaactttagttgtaagtaaacaaagtagaggctaaatgctaccttatacatttataggttgcttaagtcgtgaagcaatatgagtcatatatgtagcacataacatatactgtatataagtcaagttgtacatagtttaaagaaaatcaggtgtgcagaaactcagaccaaattgggaagtatttgcattataaaataactcattataaggatttttcagttagtagatctccatagtaaatttcattcagcaaatgtgtatttttcctatttatttatttttttatttattgagatgaagtctcgctctgttgcccaagctggagtgcagtggcgtgatcttggctcactgcaacctctgcctcccaggttcaagcgattcttctgcctcagcctcctgagtagctgggactacaggtgcgcaccaccatgcctggctaatttttatatttttagtagagacggggttttactatgttggtcaggctggtctcgaactcctgaccttgtgatcctcccgcctcggcctcccaaagtgctgggattacaggcgtgagccactgtgccaggtctagttatttatttatttattgtagagatgggctctcactgtgttggccagggtggtcttgaactcctggcctcgagcaatccttccacctcagtctcccaaagtgctgggattacaggtgcgagctatcacacctggccatttttttttttttttttttttgagatagagtctcactctgtcacccgcattgtagtgcagtggcgcattcttgctcactgcaacctccccttcctgggctcaggggatcctcctacctcagcctctcaagtagctaggactacagggatgtgccaccatgcctggctagtttttgtgtatgtgtgtgttttgtagagacgaggtctcactattttgcccaggctggtccggaactcctgggctcaagcaatcctgcctcctcagcctcccaacgtgctgggattgcaggcatgatccagtgcacctgaccatcattcagcaagtatttttgagtgtctcctatgctagacaatggaagggataaagattattcatacgtgtgtgtgtgtgtgtgtgtgtacgtgcccataaatagcccttggctttctgtctagtaaggtaggtaagacaatacagtgataaatgccttgtgagttgtaagccgagtgctatagaggctcagaggagggaaaggtcacttcctgctgagtgagctcttacgagtatgtggcaaggtgatacgttagagaatgcaagactaagagtttgtcaagttaagtaattaaggcaacattaagaggtagtgagttggtgtccagtgctagagcaaggagtttcagctttagttaggaagcaatggggagccactgactttttttttctttttgatcaaaaagtcttatctgggaaaatgtatctggcagtaatgtgtaatttcaatttttttttaaaaaaattggttcttggatagtcttttaggcttcttttgtatgaaacaaagccatgtttataaataagtgaattatgaaatggattcatttccaatctttttaaaaggtagtcagaaactatcttcagatgcaattagatacagtaagataggctgcatagttaagatgtaagcagtttacacagtgggataaaaatgctacttttcatactttctcaaaccatttttaggggtatttttgtgtcagccatcctgctatctcatttgtccaattaaagcaaggaagaaatcctccattctccttttttccccattcttggatagaatgaatgtctatagtgaaaagaactcatcagtagtcctctcagatttggtctgaatttcaccaaatatttgtataattgcaaaaaacttgtttctcagccttctcctttagggggaaaacaaatagagggcatgatggcctacctccctgcattgtggtgagggtcagctgatacaaaataaagtgttaagtgtaattaccctgaaatgtttgtaattaatggagaaatgaagtgtagacactttgttagtagaaaccactgtggtttggaaatgcagtgtttcaataataaagactggataaataaggttgtggtttggaaatgcagtgtttcaataataaagactggataaataaggttgtggtttggaaatgcagtgtttcaataataaagactggataaat

SEQ ID NO: 12515 - protein, 102 aa, Homo sapiens [sequence omitted]

SEQ ID NO: 12516 - DNA, 2076 bp, Homo sapiens
  CDS (11)..(406)
cgcttttaaaatgattcgtaccaacgtttctcatgtggttggccagttggatgacataagaaaaaaccctaggaagtttgtttgcctgaatgacaacattgaccacaatcataaagatgctcagacagtgaaggctgttctcagggacttctatgaatccatgttccccataccttcccaatttgaactgccaagagagtatcgaaaccgtttccttcatatgcatgagctgcaggaatggagggcttatcgagacaaattgaagttttggacccattgtgtactagcaacattgattatgtttactatattctcgttttttgctgagcagttaattgcacttaagcggaagatatttcccagaaggaggatacacaaagaagctagtcccaatcgaatcagagtatagaagatcttcatttgaaaaccatctacctcagcatttactgagcattttaaaactcagcttcacagagatgtctttgtgatgtgatgcttagcagtttggcccgaagaaggaaaatatccagtaccatgctgttttgtggcatgaatatagcccactgaccaggaattatttaaccaacccactgaaaacttgtgtgttgagcagctctgaactgattttacttttaaagaatttgctcatggacctgtcatcccttttataaaaaggctcactgacaagagacagctgttaatttcccacagcaatcattgcagactaactttattaggagaagcctatgccagctgggagtgattgctaagaggctccagtctttgcattccaaagccttttgctaaagttttgcacttttttttttcatttcccatttttaagtagttactaagttaactagttattcttgcttctgagtataacgaattgggatgtctaaacctatttttatagatgttatttaaataatgcagcaatatcacctcttattgacaatacctaaattatgagttttattaatatttaagactgtaaatggtcttaaaccactaactactgaagagctcaatgattgacatctgaaatgctttgtaattattgacttcagcccctaagaatgctatgatttcacgtgcaggtctaatttcaaagggctagagttagtactacttaccagatgtaattatgttttggaaatgtacatattcaaacagaagtgcctcattttagaaatgagtagtgctgatggcactggcacattacagtggtgtcttgtttaatactcattggtatattccagtagctatctctctcagttggtttttgatagaacagagaggccagcaaactttctttgtaaaaggctggttagtaaattattgcaggccacctgtgtctttgtcatacattcttcttgctgttgtttagtttgttttttttcaaacaaccctctaaaaatgtaaaaaccatgtttagcttgcagctgtacaaaaactgcccaccagccagatgtgaccctcaggccatcatttgccaatcactgagaattagtttttgttgttgttgttgttgttgtttttgagacagagtctctctctgttgcccaggctggagtgcagtggcgcaatctcagctcactgcaacctccgcctcccgggttcaagcagttctgtctcagccttctgagtagctgggactacaggtgcatgccaccacaccctgctaatttttgtatttttagtagagacgggggttccaccatattggtcaggcttatcttgaactcctgacctcaggtgatccacctgcctctgcctcccaaagtgctgagattacaggcataagccagtgcacccagccgagaattagtatttttatgtatggttaaaccttggcgtctagccatattttatgtcataatacaatggatttgtgaagagcagattccatgagtaactctgacaggtattttagatcatgatctcaacaatattcttccaaaatggcatacatcttttgtacaaagaacttgaaatgtaaatactgtgtttgtgctgtaagagttgtgtatttcaaaaactgaaatctcataaaaagttaaatttttgtctgac

SEQ ID NO: 12517 - protein, 132 aa, Homo sapiens
MIRTNVSHVVGQLDDIRKNPRKFVCLNDNIDHNHKDAQTVKAVLRDFYESMFPIPSQFELPREYRNRFLHMHELQEWRAYRDKLKFWTHCVLATLIMFTIFSFFAEQLIALKRKIFPRRRIHKEASPNRIRV

SEQ ID NO: 12518 - DNA, 2196 bp, Homo sapiens
  CDS (976)..(1926)
atgatggttggcagttagcttcctggagtgtggacgggtccttccctgcctgactgacttgtccacagggcagcaagaagatgcgccccttggtgtgtcccgagtgtctcctgtaggcagctgagctttcgcaggtctggctgggagccaaggttaccaatctggggggtaacccagccatcatctggatgagcgttggggtctttctgctctggattgcagggcagacgtcgttttgtgctggtcaggcccctcgcctgcctgattcccttggagccccccaagacaggagatgggcagatgtcctctgaagtggcatgggctgcttgctcactggccttcccaggaccctgcccaggtggtgctgcttggccccaggtcgaattcctgtgctggcagcaagcaggggcctgggccgtcggctggctggggctcatgcagccatcccctttgcagccatccgggtgacctgcataggttcctgcggggtctccaacaaggctaatgacacagcgtgggtagtggaggagggttacttcaacagttccctgtcgctggcagacaaggggagcctgcccgctggagagcacagcttccccttccagttcctgcttcctgccactgcacccacgtcctttgagggtcctttcgggaagatcgtgcaccaggtgagggccgccatccacacgccacggttttccaaggatcacaagtgcagcctcgtgttctatatcttgagccccttgaacctgaacagcatcccagacattgaggtgaggatggcacagtgacctccttggtgggtccccaccctcatggaggctggggaagagctgggcaggcactgcttcatcccagcgtcctgtccccagctgaggtgaggggggccagggtctggaggcagtggcctctttgccctgagctgactgctgatgtccaggggcagggcgtggcagggctgaggggcctgtcccaatgccacagggatccagcctgcgcacacctgctaagcccctccctggccctccccccaagcaacccaacgtggcctctgccaccaagaagttctcctacaagctggtgaagacgggcagcgtggtcctcacagccagcactgatctccgcggctatgtggtggggcaggcactgcagctgcatgccgacgttgagaaccagtcaggcaaggacaccagccctgtggtggccagtctgctgcagaaagtgtcctataaggccaagcgctggatccacgacgtacggaccattgcggaggtggagggtgcgggcgtcaaggcctggcggcgggcgcagtggcacgagcagatcctggtgcctgccttgccccagtcggccctgccgggctgcagcctcatccacatcgactactacttacaggtctctctgaaggcgccggaagctactgtgaccctcccggtcttcattggcaatattgctgtgaaccatgccccagtgagcccccggccaggcctggggctgcctcctggggccccacccctggtggtgccttccgcaccaccccaggaggaggctgaggctgaggctgcggctggcggcccccacttcttggaccccgtcttcctctccaccaagagccattcgcagcggcagcccctgctggccaccttgagttctgtgcctggtgcgccggagccctgccctcaggatggcagccctgcctcacacccgctgcaccctcccttgtgcatttcaacaggtgccactgtcccctactttgcagagggctccggggggccagtgcccactaccagcaccttgattcttcctccagagtacagttcttggggctacccctatggtgagtcgacagccagggcttggcagggaggggacgccaagagccccacgcagaccctgctttcttcccgcagaggccccaccgtcttatgagcagagctgcggcggcgtggaacccagcctgacccctgagagctgaccccgtgctgccttctccaggcaggcctggcctctgccctgggactggggcgcccagggcctcgtgccttctctcttggcctagcctggcccactcaggacctgcccagcctctgccagctcctctggcatccgccctcttctccctggggctggggtgggggtggcagggagctgggacctggagagacaactcctgtaaataaaacactttatttgtag

SEQ ID NO: 12519 - protein, 317 aa, Homo sapiens
MPQGSSLRTPAKPLPGPPPKQPNVASATKKFSYKLVKTGSVVLTASTDLRGYVVGQALQLHADVENQSGKDTSPVVASLLQKVSYKAKRWIHDVRTIAEVEGAGVKAWRRAQWHEQILVPALPQSALPGCSLIHIDYYLQVSLKAPEATVTLPVFIGNIAVNHAPVSPRPGLGLPPGAPPLVVPSAPPQEEAEAEAAAGGPHFLDPVFLSTKSHSQRQPLLATLSSVPGAPEPCPQDGSPASHPLHPPLCISTGATVPYFAEGSGGPVPTTSTLILPPEYSSWGYPYGESTARAWQGGDAKSPTQTLLSSRRGPTVL

SEQ ID NO: 12520 - DNA, 2062 bp, Homo sapiens
  CDS (722)..(2062)
attacaaaggttgcttaacttctaattatttgatcactgaggaaaatccagaaagctacacaacactgaaggggtgaaataaaagtccagcgatccagcgaaagaaaagagaagtgacagaaacaactttacctggactgaagataaaagcacagacaagagaacaatgccctggacatggctccagagatccacatgacaggcccaatgtgcctcattgagaacactaatggggaactggtggcgaatccagaagctctgaaaatcctgtctgccattacacagcctgtggtggtggtggcaattgtgggcctctaccgcacaggaaaatcctacctgatgaacaagctagctgggaagaataagggcttctctctgggctccacagtgaaatctcacaccaaaggaatctggatgtggtgtgtgcctcaccccaaaaagccagaacacaccttagtcctgcttgacactgagggcctgggagatgtaaagaagggtgacaaccagaatgactcctggatcttcaccctggccgtcctcctgagcagcactctcgtgtacaatagcatgggaaccatcaaccagcaggctatggaccaactgtagtatccttttgtgacccagaacagcaccaaggtcagaggggacacctgtattcataaaccagctgcctgactgtgaatcctgatgaatcaagctcaaaaggagaaaacaaaaaataatgcaagtacagaggggagatcccatctatgtgacagagctgacacatcgaatccgatcaaaatcctcacctgatgagaatgagaatgaggattcagctgactttgtgagcttcttcccagattttgtgtggacactgagagatttctccctggacttggaagcagatggacaacccctcacaccagatgagtacctggagtattccctgaagctaacgcaaggtaccagtcaaaaagataaaaattttaatctgccccgactctgtatccggaagttcttcccaaagaaaaaatgttttgtcttcgatctgcccattcaccgcaggaagcttgcccagcttgagaaactacaagatgaagagctggaccctgaatttgtgcaacaagtagcagacttctgttcctacatctttagcaattccaaaactaaaactctttcaggaggcatcaaggtcaatgggcctcgtctagagagcctagtgctgacctatatcaaagctatcagcagaggggatctgccctgcatggagaacgcagtcctggccttggcccagatagagaactcagccgcagtgcaaaaggctattgcccactatgaccagcagatgggccagaaggtgcagctgcccgcagaaaccctccaggagctgctggacctgcacagggttagtgagagggaggccactgaagtctatatgaagaactctttcaaggatgtggaccatctgtttcaaaagaaattagcggcccagctagacaaaaagcgggatgacttttgtaaacagaatcaagaagcatcatcagatcgttgctcagctttacttcaggtcattttcagtcctctagaagaagaagtgaaggcgggaatttattcgaaaccagggggctattgtctctttattcagaagctacaagacctggagaaaaagtactatgaggaaccaaggaaggggatacaggctgaagagattctgcagacatacttgaaatccaaggagtctgtgaccgatgcaattctacagacagaccagattctcacagaaaaggaaaaggagattgaagtggaatgtgtaaaagctgaatctgcacaggcttcagcaaaaatggtggaggaaatgcaaataaagtatcagcagatgatggaagagaaagagaagagttatcaagaacatgtgaaacaattgactgagaagatggagagggagagggcccagttgctggaagagcaagagaagaccctcactagtaaacttcaggaacaggcccgagtactaaaggagagatgccaaggtgaaagtacccaacttcaaaatgagatacaaaagctacagaagaccctg

SEQ ID NO: 12521 - protein, 447 aa, Homo sapiens
MQVQRGDPIYVTELTHRIRSKSSPDENENEDSADFVSFFPDFVWTLRDFSLDLEADGQPLTPDEYLEYSLKLTQGTSQKDKNFNLPRLCIRKFFPKKKCFVFDLPIHRRKLAQLEKLQDEELDPEFVQQVADFCSYIFSNSKTKTLSGGIKVNGPRLESLVLTYIKAISRGDLPCMENAVLALAQIENSAAVQKAIAHYDQQMGQKVQLPAETLQELLDLHRVSEREATEVYMKNSFKDVDHLFQKKLAAQLDKKRDDFCKQNQEASSDRCSALLQVIFSPLEEEVKAGIYSKPGGYCLFIQKLQDLEKKYYEEPRKGIQAEEILQTYLKSKESVTDAILQTDQILTEKEKEIEVECVKAESAQASAKMVEEMQIKYQQMMEEKEKSYQEHVKQLTEKMERERAQLLEEQEKTLTSKLQEQARVLKERCQGESTQLQNEIQKLQKTL

SEQ ID NO: 12522 - DNA, 2393 bp, Homo sapiens
  CDS (362)..(1267)
tcaaaccttgtactactcagctgatcacaagttgcttgatgggaacctactagatggacaggctgaggtgtttggcagtgatgatgaccacattcagtttgtgcagaaaaagccaccacgtgagaatggccataagcagataagtagcagttcaactggatgtctctcttctccaaatgctacagtacaaagccctaagcatgagtggaaaatcgttgcttcagaaaagacttcaaataacacttacttgtgcctggctgtgctggatggtatattctgtgtcatttttcttcatgggagaaacagcccacagagctcaccaacaagtactccaaaactaagtaagagtttaagctttgagatgcaacaagatgagctaatcgaaaagcccatgtctcctatgcagtacgcacgatctggtctgggaacagcagagatgaatggcaaactcatagctgcaggtggctataacagagaggaatgtcttcgaacagtcgaatgctataatccacatacagatcactggtcctttcttgctcccatgagaacaccaagagcccgatttcaaatggctgtactcatgggccagctctatgtggtaggtggatcaaatggccactcagatgacctgagttgtggagagatgtatgattcaaacatagatgactggattcctgttccagaattgagaactaaccgttgtaatgcaggagtgtgtgctctgaatggaaagttatacatcgttggtggctctgatccatatggtcaaaaaggactgaaaaattgtgatgtatttgatcctgtaacaaagttgtggacaagctgtgcccctcttaacattcggagacaccagtctgcagtctgtgagcttggtggttatttgtacataatcggaggtgcagaatcttggaattgtctgaacacagtagaacgatacaatcctgaaaataatacctggactttaattgcacccatgaatgtggctaggcgaggagctggagtggctgttcttaatggaaaactgtttgtatgtggtggctttgatggttctcatgccatcagttgtgtggaaatgtatgatccaactagaaatgaatggaagatgatgggaaatatgacttcaccaaggagcaatgctgggattgcaactgtagggaacaccatttatgcagtgggaggattcgatggcaatgaatttctgaatacggtggaagtctataaccttgagtcaaatgaatggagcccctatacaaagattttccagttttaacaaatttaggaccctctcaaactaacaggcttagtgatgtaattatggttagtagaggtacacttgtgaataaagagggtgggtgggtatagatgttgctaacagcaacacaaagcttttgcatattgcatactattaaacatgctgtacatactttttgggtttatttggaaaggaatgcaaagatgaaggtctgttttgtgtacttttaagactttggttattttactttttggaaaagaataaaccaagaattgattgggcacatcatttcaagaagtcccctctcctccacatttgttttgccaatttgcacattaaatgactcttccctcaaatgtgtactatggggtaaaaggggtagggtttaaagatgtagacagttgggttttttaagggccctttttcaataactggaacactctataacaaaggatacttatttaaatagatgacattgactatttttgtttttattaaaaggaagcttacatgcctaccaatatttaatcttttatgattgcctttttataactttttatattctcagcagagtgctttaccaattgaagtaaaatgtggcaggctggagttattgaagcagagtggcagtcttcagtttgcagagtaggggtctgtcttttaaactctgagtgcaaacttcagagttcttgccttggctgcagtttttttccttcaagaatgcagtactaacatttatttgagtggagttactgaacagtaacatagctgtgatttttggtatttgaaacactggttttaaatattttgacttgttgagggtatgttttatatagcaagacattatatagcagtaaaaaatggtgttttatcttctatataattcctgtttttattattaacaaaacagtcctaaatagcagccctcaattgtgaaaaaatttactttaaactacattaggttgtgaatgcaggttttatcagaactatgtttttgttcagtttatctgttcatatggataaatattggttgggatgacttggtgtctaatgtgtagtgctacacacctaacttatggggccaaaatagcatgtcctaatgcttgctgctgatttaaacacattaaaggtactttgcagg

SEQ ID NO: 12523 - protein, 302 aa, Homo sapiens [sequence omitted]

SEQ ID NO: 12524 - DNA, 2010 bp, Homo sapiens
  CDS (323)..(733)
cggcccaggccatggctatgatggggaggagagagcggtgagtgatagcttcgggcctggagagtgggatgaccggaaagtgcgacacacttttatccgaaaggtttactccatcatctccgtgcagctgctcatcactgtggccatcattgctatcttcacctttgtggaacctgtcagcgcctttgtgaggagaaatgtggctgtctactacgtgtcctatgctgtcttcgttgtcacctacctgatccttgcctgctgccagggacccagacgccgtttcccatggaacatcattctgctgaccctttttacttttgccatgggcttcatgacgggcaccatttccagtatgtaccaaaccaaagccgtcatcattgcaatgatcatcactgcggtggtatccatttcagtcaccatcttctgctttcagaccaaggtggacttcacctcgtgcacaggcctcttctgtgtcctgggaattgtgctcctggtgactgggattgtcactagcattgtgctctacttccaatacgtttactggctccacatgctctatgctgctctgggggccatttgtttcaccctgttcctggcttacgacacacagctggtcctggggaaccggaagcacaccatcagcccggaggactacatcactggcgccctgcagatttacacagacatcatctacatcttcaccttcgtgctgcagctgatgggggatcgcaattaaggagcaagcccccattttcacccgatcctgggctctcccttccaagctagagggctgggccctatgactgtggtctgggctttaggcccctttccttccccttgagtaacatgcccagtttcctttctgtcctggagacaggtggcctctctggctatggatgtgtgggtacttggtggggatggaggagctagggactaactgttgctcttggtgggcttggcagggactaggctgaagatgtgtcttctccccgccacctactgtatgacaccacattcttcctaacagctggggttgtgaggaatatgaaaagagcctattcgatagctagaagggaatatgaaaggtagaagtgacttcaaggtcacgaggttcccctcccacctctgtcacaggcttcttgactacgtagttggagctatttcttcccccagcaaagccagagagctttgtccccggcctcctggacacataggccattatcctgtattcctttggcttggcatcttttagctcaggaaggtagaagagatctgtgcccatgggtctccttgcttcaatcccttcttgtttcagtgacatatgtattgtttatctgggttagggatgggggacagataatagaacgagcaaagtaacctatacaggccagcatggaacagcatctcccctgggcttgctcctggcttgtgacgctataagacagagcaggccacatgtggccatctgctccccattcttgaaagctgctggggcctccttgcaggcttctggatctctggtcagagtgaactcttgcttcctgtattcaggcagctcagagcagaaagtaaggggcagagtcatacgtgtggccaggaagtagccagggtgaagagagactcggtgcgggcagggagaatgcctgggggtccctcacctggctagggagataccgaagcctactgtggtactgaagacttctgggttctttccttctgctaacccagggagggtcctaagaggaaggtgacttctctctgtttgtcttaagttgcactgggggatttctgacttgaggcccatctctccagccagccactgccttctttgtaatattaagtgccttgagctggaatggggaagggggacaagggtcagtctgtcgggtgggggcagaaatcaaatcagcccaaggatatagttaggattaattacttaatagagaaatcctaactatatcacacaaagggatacaactataaatgtaataaagtttatgtctagaagtt

SEQ ID NO: 12525 - protein, 137 aa, Homo sapiens
MGFMTGTISSMYQTKAVIIAMIITAVVSISVTIFCFQTKVDFTSCTGLFCVLGIVLLVTGIVTSIVLYFQYVYWLHMLYAALGAICFTLFLAYDTQLVLGNRKHTISPEDYITGALQIYTDIIYIFTFVLQLMGDRN

SEQ ID NO: 12526 - DNA, 2093 bp, Homo sapiens
  CDS (268)..(1812)
acagagcctttcaattcagcttggggtgagctgcacttcaggcatggggatataatagtgtgatgaaccattcttctgaaggttcttctgaaaagctgctggtcttgggatactgtgagagcccctctcattgctctttagaagtaatttaaatttttctgctacattgtctgctcagctcgtattctggtcatagaggaacctgaagccagagaaactagacaaaaaggaacctctttcaggagctataaaagaaagggaggaatcatgtccacaattgcagctttctatggcggcaagtccattctcatcacgggggccacaggctttctgggcaaagtgctaatggagaagctgtttcgcaccagcccagacctgaaagtcatttacatccttgtgaggcccaaggctggccagacactgcagcagagggttttccagatcctagacagtaagctatttgagaaagtcaaagaagtttgtccaaatgtgcatgagaagatcagagctatttatgcagatctcaatcagaatgactttgccatcagcaaagaggacatgcaggagcttctctcctgtacaaacataatatttcactgtgcagccactgtacgctttgacgacactctcagacatgctgtgcaacttaacgtcactgccacccggcagctcttgcttatggctagtcagatgccaaagctggaagcctttatacatatctctactgcctattcaaattgtaacctgaagcacatcgatgaagttatctatccgtgccctgtggagccaaaaaaaatcattgattcccttgagtggttagacgatgctattattgacgagattacacccaagctgatcagagattggcccaatatttatacctacaccaaggccttgggagaaatggtggtgcagcaagagagcaggaacctgaacattgccatcataaggccctccattgtgggagcaacttggcaggagcctttcccaggttgggttgataatataaatggacctaatggaatcattattgcgactgggaaagggtttcttcgggccataaaagctactccaatggctgtggcagacgtaattccagttgatacagtcgtcaatctcatgctagctgtaggatggtatactgcagttcacagacctaagtcaacattagtctaccacattacatctggtaacatgaatccctgcaattggcacaaaatgggagtccaagtcttggcaacctttgaaaaaatcccatttgagagacctttcaggaggccaaatgctaattttaccagcaacagcttcacatcacagtactggaatgcggtcagccaccgggcccctgccattatctatgactgctatctgcggctcactggaaggaagcccaggatgacaaagctcatgaatcggcttttaagaactgtttccatgttggagtatttcatcaaccggagttgggaatggagcacgtacaatacagaaatgctgatgtctgagctgagtcctgaagaccagagagtattcaactttgacgtgcgccagttgaactggttggaatacattgaaaattatgttttgggagttaaaaaatacttattgaaagaggatatggctgggatcccaaaagcaaagcaacgcttaaaaaggctccgaaatattcactacctctttaatactgccctcttccttatcgcctggcgccttctcattgcaagatctcagatggctcggaatgtctggttcttcattgtaagcttctgttataaattcctctcctactttagagcatccagcacgctcaaagtttaagagcatttagccatcgccttttatctggaacctctcagatacctctaaaacagcaaactgtgattctcaagattagaaagtaacaaggaatatgcccaaactgtcaaatgtcacctgttatgtattcgtccctattccttaactatgtatttttatttcagtgagagaaggaaagttgtaaactagcccatagtcacctatattttagggaaaaaaatccaaattgtttcctaacattctattttatgcccttgcgtattaaacgtgaaagtactccc

SEQ ID NO: 12527 - protein, 515 aa, Homo sapiens
MSTIAAFYGGKSILITGATGFLGKVLMEKLFRTSPDLKVIYILVRPKAGQTLQQRVFQILDSKLFEKVKEVCPNVHEKIRAIYADLNQNDFAISKEDMQELLSCTNIIFHCAATVRFDDTLRHAVQLNVTATRQLLLMASQMPKLEAFIHISTAYSNCNLKHIDEVIYPCPVEPKKIIDSLEWLDDAIIDEITPKLIRDWPNIYTYTKALGEMVVQQESRNLNIAIIRPSIVGATWQEPFPGWVDNINGPNGIIIATGKGFLRAIKATPMAVADVIPVDTVVNLMLAVGWYTAVHRPKSTLVYHITSGNMNPCNWHKMGVQVLATFEKIPFERPFRRPNANFTSNSFTSQYWNAVSHRAPAIIYDCYLRLTGRKPRMTKLMNRLLRTVSMLEYFINRSWEWSTYNTEMLMSELSPEDQRVFNFDVRQLNWLEYIENYVLGVKKYLLKEDMAGIPKAKQRLKRLRNIHYLFNTALFLIAWRLLIARSQMARNVWFFIVSFCYKFLSYFRASSTLKV

SEQ ID NO: 12528 - DNA, 2201 bp, Homo sapiens
gagaaatgcctgaaattgctccaggctggtgctcagctgctgagctgggctagttgttaaaatattcagtggtccccaacctttttggcaccagggaccagtttcgtagaaggcaatttttccatggactggggaatgaaactgttccacctcagatcaccgggcattagattctcataagaagcatgcaacctagatccctcgcatgcacagttcacaacagggttcaagctcctatgagaatctaatgccactgctgatctgacaggaggcggagctcaggcagtaatgctggctgaactgctgctcacctcctgatgtgaagcctggttcctaacaggccacggatgggtgccggtccatgatccgggggatggggacccctgaatattggctagctattgccctgagccctccctagccaaccccagtcactctgatcttgtccccaggaccctctaaacctctccaccttccaacaactaaagggtcccaggaccctcctccatcactatgacatgcacccatcccttctgaatggtcagtgcccagctgcactagttgttaaatattttgaatctcagctccgggtgcagggagtcctggctccatgagaaagtgagtgggtaacttggggcaacttgcttaactgctctgaccttccattcccacatccctgcatggaggggttgtgatgggagtgagaggatgtgtataacgcattaagcatggaatacagactcagggcttggtccatgggaattaatattatgaaaaggcttcacaaggctggactcacactccagcagctgggactcctgggagctcctggctctgcccagactctagacacctaggagtcgaactggggtctgggacacctctggaccaatctcaggagtcctcgttgcctcctctcccagggaaaactccagtcattagaggacagggagattccttcagccaggctgagatccttggagatttccacccaggcaggatgctgcagctgtttgccttaaccatggcaaggaaattcatctcaacacatccatctctgtgtgaaaagccccatttggactgaataaggaggagagggagaggtcttgggtctcagctttcaaagtccatgatcttcctatttggttaggggaaaccaaattacagtcatttgcaataccgtcattcacatcccatcttcactattttttgccttatatgcttacattgctgtaccatgatttactaaaggttttttttttcttttagatcatctcatttttgataaagttaaattcttatcactgaaatgttcactgaggaaagcgatcatgaaataaatccaatgaaagcaaactgtggttaaattctaactagataatattgcctgcctaagggcctcagctctctcattgttaaaaagggaaggtagcaagtgatagaggctaaaggcgttaaaggcatgttagtacttagcagagacattccttcagatgtaagtagaagcactgaaagagaactgaagaggaattactttcccaccaaatgggtttaaatacaagtcacttggttagagaccttggacttgtctatctctctgagtttcagtttccccataagtaatataagagcattgtcatggacaatcaggaagatcctttggggccctgatactctgtggttcaatgatcctgcaatttgtatgatactccatcttgctgtcaagatgccaacatgtaaggtcaaagactgcaacgtaattctcactccaccctaagaggtgggtactattattgccccctttttttctgcaaagaaacaggttcgaagagtcaagatcaccagccccatgttgtgtggtcaggaagagtcagaatttgaatgcacgtcagcctgcctgcaaaacccatgctctaggccatagccaccctgtcacactgtacctggtgtgcactgggttggtgtgcacatggttaaacagtcagcccatccccagcattgggagggaggtctaaacttttgactttgtctccgcttcaaaagcttgacttggcagctttctagttccctctttttcttccaaatgggcttcccagaagcagccttgttcatctccatggttccaatctggcaaggaatctcctgggtagatacggctcatgtggctacaggttgttgtacccacaaaaaaagaaagaaag

SEQ ID NO: 12529 - DNA, 1911 bp, Homo sapiens
  CDS (443)..(1141)
gttttgcagtctttcactttaaaaactcaaaatggaaaattatatactttattttaatatttacaaatatttacaaatatttatttttaaataaaatgtatataccatgtagtatgttgtatttatttactcaatgttcttttaagtgtttcaggctgcatgtaccaagtagttcagacgattggctcggatggaaaaaatcttctgcaattacttccaattcctaagtcttctggaaatcttataccactagttcaatcttcagtcatgtctgatgctttgaaagggaatacaggaaaaccagttcaagttacttttcagactcagatttccagctcttccacaagtgcatcagttcaattgcccatttttcagccagccagttcttcaaactattttcttacaagaacagtagatacatcagaaaaagatccataatgagatggcatcaacatcagataaaggtgcccaaggaagaaatgacaagaaagattctcaaggaagaagtaataaggcattacatctgaagagtgatgctgaatttaaaaagatatttggccttactaaggatttgagagtgtgccttactcgaattcctgaccatttgacctctggagaaggtttcgattcctttagcagtttggtaaagagtggtacttacaaagagacagagtttatggtgaaggaaggagagagaaaacagcagaattttgataagaaaagaaaagcaaaaactaataagaagatggatcacataaagaagagaaaaacagagaatgcttataacgcaatcataaatggggaagctaatgtcaccggttcccaactcctaagcagtattttaccaacttcagatgtgtcacaacataacattctcacgagtcacagcaaaaccagacaagaaaagagaactgagatggaatactatacccatgagaagcaagagaaaggcactttgaattcaaatgcagcttatgaacaaagtcatttcttcaataaaaattataccgaagatattttcccagtgacaccaccggagttagaagaaaccattcgagatgaaaaaataagaagacttaagcaggtgctgagagagaaagaagcagctcttgaagaaatgcgtaagaagatgcaccaaaaataaaatctcctgtaaagacttcagtgaaatagctgttttttaaaatatacttcagcattaataagttaattgtaggtgtgttctgaaagtgtctttgaatatgaagcttgttttttcatcagtcgattgtacaactttaaggaatacagaaaaggttgattcacatatgacttgtgaataatttacatggggtatctatacctttgtcttagatacctttttttggaaggataaattttatatttttctattattttaactagaattctccaagtttgaatatttgggcagggtttttgttattgtttgtatctttacctaaattgctcaggcattattccagcagtagatagtgactgtgtattactgaaattttacaattcaagagaggaaatcagctccaaacttagcttttccagtggatttgtatatgtacttgctttatctctttacccttaaaatgatgataccttgtattcaccattgttttttttaatgtcgtgaaataatatgtattatggcaacattatttaaacattcaaacatttctcaagaatgagcaacatttgtaactttacaatgtaattttatataatccaaaggtattttagaattcaggccatttgatgttttgtttgcttatagtgatgtgttcccaggcaaatgctgcttttttttttttgggactatgtacatacgttactgagattgtgtaaaaagtagatcctgaacagttatcacatttaatatttcttaaactgtaaaagtgt

SEQ ID NO: 12530 - protein, 233 aa, Homo sapiens
MASTSDKGAQGRNDKKDSQGRSNKALHLKSDAEFKKIFGLTKDLRVCLTRIPDHLTSGEGFDSFSSLVKSGTYKETEFMVKEGERKQQNFDKKRKAKTNKKMDHIKKRKTENAYNAIINGEANVTGSQLLSSILPTSDVSQHNILTSHSKTRQEKRTEMEYYTHEKQEKGTLNSNAAYEQSHFFNKNYTEDIFPVTPPELEETIRDEKIRRLKQVLREKEAALEEMRKKMHQK

SEQ ID NO: 12531 - DNA, 1607 bp, Homo sapiens
  CDS (71)..(1180)
tttaaagcatgccatcaccacatatctattttgcacttaccctgatgcgcatgagggccgcctttcatatatgagaagcaaaaaggtcagcaactgtaatctgtatcgccttggaaaaaagaagggactacccagccgcatggtggtgtcaatatttgatccccctgtgaattggcttcctcctggttatgtagtaaatcaagacaaaagcaacacagataaatgggaaaaagatgaaatgacaaaagactgcatgctggcgaatggcaaactggatgaggattacgaggaggaggatgaggaggaggagagcctgatgtggagggctccgaaggaagaggctgactatgaagatgatttcctggagtatgatcaggaacatatcagatttatagatagtatgttaatggggtcaggagcttttgtaaagaaaatctctctttctcctttttcaaccactgattctgcatatgaatggaaaatgcccaaaaaatcctccttaggtagtatgccattttcatcagattttgaggattttgactacagctcttgggatgcaatgtgctatctggatcctagcaaagctgttgaagaagatgactttgtggtggggttctggaatccatcagaagaaaactgtggtgttgacacgggaaagcagtccatttcttacgacttgcacactgagcagtgtattgctgacaaaagcatagcggactgtgtggaagccctgctgggctgctatttaaccagctgtggggagagggctgctcagctcttcctctgttcactggggctgaaggtgctcccggtaattaaaaggactgatcgggaaaaggccctgtgccctactcgggagaatttcaacagccaacaaaagaacctttcagtgagctgtgctgctgcttctgtggccagttcacgctcttctgtattgaaagactcggaatatggttgtttggagattccaccaagatgtatgtttgatcatccagatgcagataaaacactgaatcaccttatatcggggtttgaaaattttgaaaagaaaatcaactacagattcaagaataaggcttaccttctccaggcttttacacatgcctcctaccactacaatactatcactggtaaggagcccacgaccagacttcatttctgggaaaatgagactttgtgttgatctcatcgtgttggccttgtaaaagtgatctatgcatgtacagtgttcatgcttaatattcaagggatggggcggggaacaaaaggaatagaaagaattcttttccttgttatttggggagcacgtattgctttataactttggttgttgggagtatggctatcatataccctcatcagtgtcattttatatctgcctaattagagaaattttaaccttagtattttgatgtgttttccccattttatcctccgcaaatatctttctcttgcccattcagtgctgcttttggtttttgatttagttgtatattctggatgtatttccacagccttttattgttcttcctggacaaaaagacccctcctttagggtctttttaaagatggatagattaaaagattaaaagcaatgatttcacaag

SEQ ID NO: 12532 - protein, 370 aa, Homo sapiens
MRSKKVSNCNLYRLGKKKGLPSRMVVSIFDPPVNWLPPGYVVNQDKSNTDKWEKDEMTKDCMLANGKLDEDYEEEDEEEESLMWRAPKEEADYEDDFLEYDQEHIRFIDSMLMGSGAFVKKISLSPFSTTDSAYEWKMPKKSSLGSMPFSSDFEDFDYSSWDAMCYLDPSKAVEEDDFVVGFWNPSEENCGVDTGKQSISYDLHTEQCIADKSIADCVEALLGCYLTSCGERAAQLFLCSLGLKVLPVIKRTDREKALCPTRENFNSQQKNLSVSCAAASVASSRSSVLKDSEYGCLEIPPRCMFDHPDADKTLNHLISGFENFEKKINYRFKNKAYLLQAFTHASYHYNTITGKEPTTRLHFWENETLC

SEQ ID NO: 12533 - DNA, 2002 bp, Homo sapiens
tttataaatgttgctttctgatttttatcagagtgagaaaattaaaattattgatttgcaagtagtaaacagttcatattttgatttcccctcattttagtttaatataatttgcaataaatgtacatattgttgtttgtttcataaagcatatcactttaaaatggtttttactcctgtgattatgttggaatatttggaattttgaaggagtaaagactgtccagcatttggttttataatgtttgtcaccagatttttattaatgtaaaaaaaatcaatttttaaaaaatagttggactttggcagcttttaaggaaagttggaggtgttttaggattgctatcaattttcagcattgtgctatttggaaataagtgttttgcttttgtctgatggtctgggctcatttttatgtttattttagaaaactgttgcatcaatatattatgtttcttggcattgttcagcataggtaatgtgtgcactttatgtgtacacataatcatatttaagttttttgcataaaataaatgcttctagatgtcatggcagtctttttaatctctttatcatatgctttcttgtgaattttttcatgttaaagagctaaagtcataacatgattacagtcaactctccattatctatataaaatagtgactaagcctcaggtttttaattttgtgataacaaaataacgaaggcatgtaagacctgattctggaggaacatgaaatttgtcttttctcatgtccagagttctatcctgcccccactgtccactgtagggtcatccgcaaagccctagcagaatgtgctcactccatttccttacacgtttctagcatgggtcagaggaaacaacatttgtgttataacttcgtcttgataggctgtagtgtacatgggatgtaaaacaaacaagtgtatcaaaggtggatgattctgttagagtgaagtttgagagtaaatgtcacttacgtttctcatagataatcaagagttggctgtgtattgactgaaagatgggtaattattttaaatatgcatttacacacatttaggtatcagaagatgcttagggaacaatggataccaatgatagaaaatgatacctttacaggggcagaaaaatccccactcttccttattgcctcttcagaaccctttagaaagtataaaatattgcctccaacatgctgaaaaagagtatctatgcataagtatcagagaagtccctcaagcaatcagtaggtgtgttctatttagagagagtttaaagttctcttagcatcagacaacttgattcctaaggtttccagtgtgtcaccaacaaaaagtgcattgatagggacctttgtctcttcctccctttgattaattgcccggcatcacagtttactagattaccaagtgttacatcatattaaataaaatgtagcagaaccatctgcatcaatatattcctgtttagatttttgcaggagagaagttaaaaggatttgctccttgtatgatgtaagtggcccaccccaattttgtaacatgatgcaagtgtctggcactaagggaagcaagagtagggttgtggaaagaccaagctgatggggagggacttgtttacgggaatttttttagttttccttttcaaaggaaaacattaaaatcccttaggaatttggtattcacatctcagagaactacaacacaaaagtgcagacttatatttgagaattaatgttaaccctttgtgtctagtttgaagcttcttgtatttgtctaaaacaacaagccagaattttgtatctcctttgataaaaagtgtgtataatgtaaagtagttttgcatattcttgtgctgcacatgggctgaatttttaaattttttttaaaaacttgaagcagaaccttgtaatttgtgtaaatgacaagtgtaaaatcctaccataaaatgctaaaaatatgcactgtttcaaataaaaccaagaaatgcagcatt

SEQ ID NO: 12534 - DNA, 1056 bp, Homo sapiens
gagctcatgctacacaattaaatatattccttaaatattgtgtgcttgcaacttttgattttgtaaatgggttcccacaggacaaaaatgagtcttaaacataaaattaaaccatatgaatgttagttttttagttaatttcagctgggtggtagtctatagtcccagctactcgagaggctgaggcagaaggatcgcttgagcccaggagttcagggctgcagtgagctgtgatcacaccactgcactccagcctgggggaagagcaagaccctacaaacaaaaaagagttaattccattatatttatttttacatacccagagtttgactaaaatataccagacaatctcctgtccccaaatccatgtccaagcaaggggagccacgttttctaagctcacagtttaaaggttaaagagacacactgaggaaaactcagggaaagaagctgatttgcatggacactaggcctgtcgttgattccctcatttcaaaagttgcatgtgccatgggaggcggagtctctgaggacatcctggctgtgcctcggtggctctggactccagctctacgcagagcgccttaacactgtactggaagaaatgggaaatcgcattgaggacttacagaagaatgtcaatgacttaatggtgcaagctggcattgaaaattctattaaagaacaaatgctgaagacctaactgcagcatgtctgtatttggagatggggcctctacagaagtcattaaggttacatcggtcctgagggtggggccctcatccaacaggattcgtctttctgagaggagacgcaaggggctcgcctgctctccccccgtgcctgcaccagagaaggaggccatcggcaagccaaggagagccctccccagaaatcacacggaccagcaccttgatctgggacttccagaaaacagaactgtgaaaagacaagtttctgttgtttaaaccacccaatctgaagtattttgttatggcagtcctgggcagactaatacaatatgcaacacatttacaataaatatacaataaactt

SEQ ID NO: 12535 - DNA, 1115 bp, Homo sapiens
  CDS (48)..(599)
agaacgcgctctcagcttcgggtcctgcggctgcggctgccgccatcatggtgcggaagcttaagttccacgagcagaagctgctgaagcaggtggacttcctgaactgggaggtcaccgaccacaacctgcacgagctgcgcgtgctgcggcgttaccggctgcagcggcgggaggactacacgcgctacaaccagctgagccgtgccgtgcgtgagctggcgcggcgcctgcgcgacctgcccgaacgcgaccagttccgcgtgcgcgcttcggccgcgctgctggacaagctgtatgctctcggcttggtgcccacgcgcggttcgctggagctctgcgacttcgtcacggcctcgtccttctgccgccgccgcctccccaccgtgctcctcaagctgcgcatggcgcagcaccttcaggctgcagtggcctttgtggagcaagggcacgtacgcgtgggccctgacgtggttaccgaccccgccttccttgtcacgcgcagcatggaggactttgtcacttgggtggactcgtccaagatcaagcggcacgtgctagagtacaatgaggagcgcgatgacttcgatctggaagcctagcggatctcccactttgcatggctgtcttttacagatgggaaaactgaggcctgatgctggagattctatgagggtgctctcctcaagggtatcagacggtcgtaggttcttaagaatttgattcatcagtggcaggccatgcatagagccacgggaggtgcgtccttgttttccaggaaatgttcttagaacttggactactgattattaattgactgtgccttgggaaacagtgggaagtaacttggtgcagcactggggtattgttggcttcttgtgttggaaactttgtaatgtaaaaggaaaaactggaaatccccacgccctgtttccctttatcgtcttgtggttggactggttcaattcgtttaactcgaattcttgctcctggccgtggttaagctgtgtacagatgatggagagtttggcctcaagtttttataaactgagcgagactagtgttcaggatctcctcccttgtttaaatgtcaataaatgccccaactgctttgt

SEQ ID NO: 12536 - protein, 184 aa, Homo sapiens
MVRKLKFHEQKLLKQVDFLNWEVTDHNLHELRVLRRYRLQRREDYTRYNQLSRAVRELARRLRDLPERDQFRVRASAALLDKLYALGLVPTRGSLELCDFVTASSFCRRRLPTVLLKLRMAQHLQAAVAFVEQGHVRVGPDVVTDPAFLVTRSMEDFVTWVDSSKIKRHVLEYNEERDDFDLEA

SEQ ID NO: 12537 - DNA, 1800 bp, Homo sapiens
  CDS (6)..(1343)
tgaatatgacagatgtaaatgggcagacacctctcatgttatcagctcacaaagtaattgggccagaaccaactggatttcttttaaagtttaatccttctctcaatgtggttgataaaatacaccaaaacactccacttcactgggcagttgcagcaggaaatgttaatgcagttgataagcttttggaagctggttctagcctggatatccagaatgttaagggagaaacacctcttgatatggctctacaaaacaaaaatcagctcattattcatatgctaaaaacagaagccaaaatgagagccaaccaaaagttcagactttggaggtggctgcagaaatgcgagctcttcctgctgctgatgctttctgtgattaccatgtgggctattggatacatattggacttcaattcagattcttggcttttaaaaggatgtcttctagtaacactgttttttctgacatctttgtttccaaggttcttggttgggtataagaaccttgtatacttaccaacagcctttctgctaagttctgttttttggatatttatgacttggttcatcttattttttcctgatttagcaggagcccctttctatttcagtttcattttcagcatagtagcctttctatactttttctataagacttgggcaactgatccaggcttcactaaggcttctgaggaagaaaagaaagtgaatatcatcacccttgcagaaactggctctctggacttcagaacattttgtacatcatgtcttataaggaagccattaaggtcactccactgccatgtatgcaactgctgtgtggctcgatatgatcaacactgcctgtggactggacggtgcataggttttggcaaccatcactattacatattcttcttgtttttcctttccatggtatgtggctggattatatatggatctttcatctatttgtccagtcattgtgccacaacattcaaagaagatggattatggacttacctcaatcagattgtggcctgttccccttgggttttatatatcttgatgctagcaactttccatttctcatggtcaacatttttattattaaatcaactctttcagattgcctttctgggcctgacctcccatgagagaatcagcctgcagaagcagagcaagcatatgaaacagacgttgtccctcaggaagacaccatacaatcttggattcatgcagaacctggcagatttctttcagtgtggctgctttggcttggtgaagccctgtgtggtagattggacatcacagtacaccatggtctttcacccagccagggagaaggttcttcgctcagtatgaagaaaagcaacccaaaactctcaatctgatttgtttttgtttatgtcgatgccctgtagtttgaaagtgaagtaaagatttagaattcacctaagtccaaaggaaaacacgtggtttttaaagccattaggtaaaaaaagttctcaataaaggcattacaattttttaggtttagaaagatggacttttctgataaatcttggcagacatctaaaaaaaaaaccatatttttcacaagaaaatgcaagttactttttttggaaataatactcactgattatggataaaatggaatattttcagatactatattggctgtttcaaaatagtactattctttaaacttgtaatttttgctaagttatttgtctttgttgtatctataaatatgtaaaaaatatttaaatagatgtacctgttttgctttcacacttaataaaaaatttttttttgt

SEQ ID NO: 12538 - protein, 446 aa, Homo sapiens
MTDVNGQTPLMLSAHKVIGPEPTGFLLKFNPSLNVVDKIHQNTPLHWAVAAGNVNAVDKLLEAGSSLDIQNVKGETPLDMALQNKNQLIIHMLKTEAKMRANQKFRLWRWLQKCELFLLLMLSVITMWAIGYILDFNSDSWLLKGCLLVTLFFLTSLFPRFLVGYKNLVYLPTAFLLSSVFWIFMTWFILFFPDLAGAPFYFSFIFSIVAFLYFFYKTWATDPGFTKASEEEKKVNIITLAETGSLDFRTFCTSCLIRKPLRSLHCHVCNCCVARYDQHCLWTGRCIGFGNHHYYIFFLFFLSMVCGWIIYGSFIYLSSHCATTFKEDGLWTYLNQIVACSPWVLYILMLATFHFSWSTFLLLNQLFQIAFLGLTSHERISLQKQSKHMKQTLSLRKTPYNLGFMQNLADFFQCGCFGLVKPCVVDWTSQYTMVFHPAREKVLRSV

SEQ ID NO: 12539 - DNA, 1670 bp, Homo sapiens
  CDS (229)..(630)
acatcttttcctttccccagaagagatccctaacctattgttttattgacagccttgctgttagaggctctttcccagaagttggacgaagaggctcaggcgttgctgtttcttgtcttccaagtcaagtggttactctggtaatggattgcctctctccgagctttcaccctggtgagactgtccagatctagtctgtaaacccagcttagaagcactgttgtaaaaatgactgaagagcccatcaaggagatcctgggagccccaaaggctcacatggcagcgacgatggagaagagccccaagagtgaagttgtgatcaccacagtccctctggtcagtgagattcagttgatggctgctacagggggtaccgagctctcctgctaccgctgcatcatcccctttgctgtggttgtcttcatcgccggcatcgtggtcaccgcggtggcttacagcttcaattcccatgggtctattatctccatctttggcctggttgttctgtcatctggactttttttactagcctccagtgccttgtgctggaaagtgagacaaaggagcaagaaagccaagagacgggagagtcaaacagctctcgtggcaaatcagagaagcttgtctgcttgagactgaatacgaccaaatgggccattgggcctggaaaacgtgctctgactttgtcacccaattcacccagaaccatggtgggagagaacagacttggcgttggagcagactggaagaatgggggtgggagggtggaggggcttctcctttgtgaggaatgactcatgtcttctttaacgacaaacttaaccctaagggctacttctgagactgaaaaatcagctttctatttacatgaaacactttgggggtcatgggagtgcacagcattagacagtatttggttcaccctgtaaagtagccaagaaaagatgagaaaaatcaagataggcctggcacactagacatttgcctccaaaagaaataacctacagtcttaagatgtatcataaaaatgttctgccaaggatctaaattaccttgggtttcgcatatgtctatgaaattctgtgataatttttttcaatacattgattcactggcgtctgttttcattttatacttttaataactcatcactggtggtactttatcttgaaaagtaatattttttatattttaacattggacagtgttagccagttgtaatgatgtatcagaagtaaagaaaaacccattaaagttatagctaatagatgctgttgggggttaaattaatagtaaaataatccaatatagcacttttgatgatttttatataaaagtcaactgtacatttcattcagaataataaatacttattgctgctaaaacttcttaaatggttgtttctgctatagttatttctattgcagttccaaattgccatcttcccttgtctcatttgcaagttctcaattgtatttctctcaaatggacaggttccttctttactggaggatttttgtttttatcatattggtttttcattacttctgaatagtcttaattacgtttactaaattctaaaggatttctgtgctattataattaggaaatcaacgtctttggtcaggaactttataatgtgctattaaatgtatattacatttttgtgg

SEQ ID NO: 12540 - protein, 134 aa, Homo sapiens
MTEEPIKEILGAPKAHMAATMEKSPKSEVVITTVPLVSEIQLMAATGGTELSCYRCIIPFAVVVFIAGIVVTAVAYSFNSHGSIISIFGLVVLSSGLFLLASSALCWKVRQRSKKAKRRESQTALVANQRSLSA

SEQ ID NO: 12541 - DNA, 1841 bp, Homo sapiens
  CDS (199)..(1245)
attttactcttatcgtgctttccagaaagtttgcctgctgggagagtctttttgatcgtttcccatgtgttgtcagatagctccatagaattcagtttctgagaaccagccagaagcatgcagtgacattgcacaatctgcctctgaagctggagatactagctgcagagctcaggggagctgctccacatcaccgacatgaagggaacaggcatcatggactgtgcgcccaaggcactcctggccagggcactttatgacaactgccctgactgctctgacgagctggctttcagcagaggggacatcctgaccattctggagcaacacgtaccagaaagcgagggttggtggaagtgtttgctccatgggaggcaaggcctggcccctgccaaccgcctccaaatcctcacggaggtcgctgcagacaggccgtgccccccattcctgagaggcctggaagaagctcctgccagctcagaggagacctatcaggtgcccactctaccccgccctcccactccaggccccgtttatgagcagatgaggagttgggcggaggggccccagccccctactgcccaagtctatgaattccccgaccctcccaccagtgccagaatcatctgtgaaaagactctcagctttccaaaacaggccatcctcacgcttcccagacctgtccgggcctcactgccgactctgccttcccaggtgtatgacgtgcctacccagcaccggggccccgtggtcctgaaggagccagagaagcagcagttatatgacataccagccagccccaagaaggcaggactccatcccccagacagccaagcaagtaatcctggccctcttatacctcagtcttcgagtcaacagactcctgagaggaaaccccgcttatctgaacactgccggctgtactttggggcgctcttcaaagccatcagcgcatttcacggcagcctcagcagcagccagcccgcggagatcatcactcagagcaagctggtcatcatggtgggacagaagctggtggacacgctgtgcatggagacccaggagagggacgtgcgcaacgagatcctccgcggcagcagtcacctctgcagcctgctcaaggacgtagcgctggccactaagaatgccgtgctcacataccccagccctgccgcgctggggcacctccaggcggaggctgagaagctggagcaacacacgcggcagttcagagggacactgggatgaggactgtctacctcccttcctcctctgctcacctctcagcttcacacccacaccttgtgcaactctgccctatgggaaaagccagccggggcatacaccaatgagctgaaacagacctggtgcccaaagctggtagtaccaagtggctaagcaaccccagggcattgacttaccccgcagggggtcaggaaagagagtcaggtatgaggtaaagaccttgtgaagtttagcatatatggagtatgcagtatcagcttgaagtgacttcgcagaaataatattttatattgattaaatgtgtgcatgttttgtttgttttttgagacaaagtctcactctgtcacacaggctggagtgcagtggcgcgatctcagctcactgcaacctccgccttctgggttgaagcaattctcccgcctcagcctccagagtagctggtactacaggtgtgcgccaccatgcccagctaatttttgtatttttttttaatgaaaggtctcacatatttattactgaacccagccaaccaatgcattcataacagattcagaaagaaaaaatatattcccaataaaacatgtacaattctccag

SEQ ID NO: 12542 - protein, 349 aa, Homo sapiens [sequence omitted]

SEQ ID NO: 12543 - DNA, 1977 bp, Homo sapiens
  CDS (176)..(610)
caaattattattgtctcttaggtttggatattgatgggatatacagagtaagtggcaacctcgcagtgatccagaaactaaggtttgcagtcaatcatggtaagattatatttactgttgttattcagatgcatcactcataactttttgaactggcttaaagtaattttttaaaatgtccaattcctgctgtttttcagatgagaaattggacttgaatgacagtaaatgggaagatattcatgtcattactggagccctcaaaatgttttttcgagaattaccagaacctctttttacatttaatcattttaatgattttgttaatgcaattaagcaagaaccaagacagcgagtcgctgctgttaaggacctaatcagacagttgccaaagccaaaccaagacacaatgcagattcttttccgacatctcagaagagttatagaaaatggagagaaaaatcgaatgacctatcagagtatagcaattgtttttggtcccactctattaaaaccagaaaaagagactggtaatatagcagttcatactgtgtaccagaatcagattgtagaattaattcttctggaactgagttccatcttcggacgttgattcttactgaagacaacctgtggaatagaagctggattccatcagatttcaaatgtttatacacaatgtattttattttttggaccaagcagtgactctttgattttgcactttttttttgagggatcagaagggaaggggagagtcgagatgtgtgttaggccctcatatttgctgctttgttgcaagttgatataactgcgtgtaattatgaattcattttatcctgaatgtttgcatttcatactctgaatttcagtaaaaatcaaaacttaaaattctaaccagtcatatacactggataatttggtaagaaaactgtattttttttccctgaaattggataatgtactttcttctcaagattcatgacttgatagaacaatactttcagttatgttgcaaaggctcttgggcattttaaacaaaatgaagtatatccattttgaaacctgtgtatttctttttcggggtttctgcatgcagtggcagtcttaagtgccaaaattcattataaccccaaaataaccccttgatgaaggcttgctgtcttttactgtgttacacagcatccttactggatatcttagttgcttgtttgggcagcacactaatattacttaaaacactgtgatatactggagttttagttagcggaagtcagttcagggcattttagggctgtcttgctatactgaattgtagctaacaatcctaattatatctagtaccatactgagttattggtatgaccctgtggaaacacacattattttatgtaaatataggctaaagacttaatgtcctttagcttgtgtatataattgtgttgtatagtctcagagtacattctaaccctacatttctaatcattgttattggtaatcttttctgtgaatattaggtttcctccagaaatagtccgttatttgggaaagttaactgtgtgcacttttagatattaactacatttacaggcaaatcactgtaatgagaatggtactggaaaaatactgaatagacttgctaaatggcacatgcactacaagaggaaccttttgggttatttaatatgtacagaaaacattagaaaaaatttattacagaattctaattccagtatgaatagtggaaacccatctgtaaattagatggatgttggatggaaaatgacattgctaaatttgagaatttctttttacctactaatgtagattgctttgtataataaaacacagggtttggaaggttttgttacagggagcatggtctgttgaagatttttaaaatgtatttttctagattaacttctgtacatgaaatgtctaataaaactctaagaggtttagagatttttccattgg

SEQ ID NO: 12544 - protein, 145 aa, Homo sapiens
MSNSCCFSDEKLDLNDSKWEDIHVITGALKMFFRELPEPLFTFNHFNDFVNAIKQEPRQRVAAVKDLIRQLPKPNQDTMQILFRHLRRVIENGEKNRMTYQSIAIVFGPTLLKPEKETGNIAVHTVYQNQIVELILLELSSIFGR

SEQ ID NO: 12545 - DNA, 2233 bp, Homo sapiens
attgggtgttatctaagccaataaaacattgttgattataggtttggtgttttgaccattagctgacatttgattaacctttttttctatgataagagaaccatggtcacttttaagcatataatgaacttttatatttttaacagaagataattgttttaaaatattacacttattacgtgtaattatgtctacagggctcactcagctatccatttttgttgtctgttggggaaatactccttaagaggattgtgtgcacaatattaagttatcattaatcaaatattctcttctgggagataatttttatgtgttaaagtagtctcactatggaaaaacttctaatataactattaaatgtctctcctcacttacgttatttttagagttactgtgacaacaacatactttggccactctgaacagatatcccaggagaggtatcagtatgtcgactgtggaagaaacacaacttatcagttggggcagtctgaatatttaaatgtacttcagccacaacagtaaaaactggaagagatggatttaaagaagaaatatctattgatatttcctatactctcaatgaagaggtatttcctaataggagaccttaaattgaacaaacctaaagtttacacttctaagagtacagttaaaagtatgtggacctgcagttcttgtaactctccactctgtgttaatgatatatttgtactaggatcttttacttgaatctaaatttactggttgatttccttctccagcctatcccctacagggaaaagctgatacttcccctatagtacaataaataattatttaaaagtcatagctccagtcactactgaaaacataattttggtgataaacataatttgagaaacttaatttctgaatgtttttatagaaaattactgaaaatctattactcatggaagacttttaaagagtaaccttttttcctgttttataaattcccattgttatatggtagtatttcagctacacaatattttagcttttagctagacatttataggttttcatttgttgaaatggtaatcatctgcatgtttttgtcacttatttcaggttagtgattgcctaacacttataagccaaaataatctttgcaaaattccatacctaaaattttgaaagcccctaatgttttcacacatctttctgtattagttatagttttgtgaaatctttgtgtgatcttcaaacattatcatttaatgtacaatactgtaaataaactgtgcatggcttttatacagctttagtaaatgtcaaataaagtggtacagactcattacaacaagtttctcataaaaatacaataaataggaaaatgaaattcagaaacccatagactgggaataggttccagttacagcttggatctggcataaaataaatttgaaataaaatattttgatgctccatttttttatgttgcttttcatactaaagaatggtgtagacttgttttgcaactgttaggtacccagttatcaattttatcaatgttttagaggaggaagttatttttttggtagaaattgttcaagaaatccttaattgaatgtcattaaatgatggtggccaaaataaaacctatttagaaatttaatcactttgcacatcacttggaatatgatgcctctagtagttacttttttatagttttctacttttggttttatttaaaattgttttcaaatatagattattgacttattcaactttgctgttttatattttcagtatcatttttcatttgttttttttttttttgtcttttcacttaccaagttctagggacatttaaaatatgtactaagtgtaggagtggttatgataccaaaaaatgtagctgggttgagattaatttcgttctgttttctcatgacagaaatcaggtttccctttccccacccctaagtgcctaacttaggtctgaaacagcctgtttattagtctgactctctcaaccataaaacataagctttatttaattctgcctttaaacacactcaggtttccccttaattttcatattattttctgcaggttttcttgagtatcttcaattcgttgaatgtggtttttggtttttttttgttttaacactagtcttcccttaattcattgctaactcaagccatccttactattaaacccaaatcagtcctttaagttcattatggcctttctagtattt

SEQ ID NO: 12546 - DNA, 2485 bp, Homo sapiens
  CDS (5)..(1354)
agccatggagcaggcacctccggaccccgagcggcagctccagccggcgcccttggagccgctgggctccccagacgctgggctgggggctgcggtcggcaaggaagcggagggggccggagaagagagctctggggtcgacacgatgacacacaataatttttggttgaagaagatagaaatcagtgtttcagaagcagaaaaacgaactggaagaaatgccatgaacatgcaagaaacatatactgcttacctcattgaaacaaggtcagttgaacataccgatggtcagagtgtcctaacagactcactatggcggcgatatagtgaatttgagttgttgagaagctaccttttagtttactatccacatattgttgtgccacctctgccagaaaaacgggcagaatttgtttggcataaactctctgctgacaacatggatccagattttgtggagaggcgacggattggtttagaaaactttctcttgaggattgcttcacatcccatcctttgtagagacaaaatcttctatctgtttttaacacaggaaggtaactggaaggagactgtgaatgaaactgggtttcagctgaaggcagactccaggttaaaagcgcttaatgcaacattcagagtgaaaaacccagacaagagatttactgaccttaagcactatagtgatgaactgcagtctgtcatctcacatcttcttcgagtcagagctagagtagcagatcgactctatggtgtatataaagtacatgggaattatggtcgagttttcagtgaatggagtgccatagaaaaagaaatgggtgatggactgcagagtgctggtcatcatatggatgtgtatgcatcttctattgatgatattttggaagatgaagaacattatgcagatcagttaaaagagtatcttttttatgcagaagcattgcgggctgtgtgcaggaaacatgaacttatgcagtatgacttggagatggctgctcaggacttagcatccaagaagcagcagtgtgaggaactggtaactgggactgtgagaacattctctttgaagggaatgactaccaagctctttggtcaagaaactccagagcagagagaagccagaataaaggtgctagaagaacaaataaatgaaggagaacaacagctaaagtctaaaaatctggaaggcagagaatttgtgaaaaacgcatgggctgatattgaacgcttcaaagaacaaaagaaccgagacttaaaggaggccctcataagctatgcagtcatgcagatcagtatgtgcaaaaagggaattcaagtttggaccaatgctaaggaatgctttagcaagatgtaatcctgtgaattgaatttctcttcaatcaaagtgccccaaaacagaagcacaagtaaataaaagaaatttaagtcactacctagtatacataaacatatacaataagttaaataaattcagctttctttaacttaattgtggtcgtgttaatgtagcacaaaaaatatattttaatgaagattaaatattataatttgaggttttggggactggtgctgattccaaaaagttaatttaataatatataccaacagattgtttgtcacgcttctgaaccaatgactgaatgtcaagatgttcgttaatttctagatgtttgtttcaagaccagctgtttcagatctattaatgtagggaatttttccctaagattgaattcctatatttacttggtaagatccactaatctgttatagggagttgttttctcttgccttatagttgagctatttggtttgacaaagctcagcagaaacttgatgtgaaaaatctacgattttcttctacattcattgatgccccttgtaatgtttgcatacactagaaaatgccttcaatttgtgttttaccagaattttgatactggtcagaaattttatactgccaacaaagaagactcaacttctcagatctataatgggatacattgtcatcctctagcaactcctatatagaaagttttaactgaatatgttacatataagaattaaattcttctcaaataattcttaacctcagtaatgagcctaaatttactctgcttggctctctacacatggcatttcagggtataagatgtagcatttcaatgtgtaagatatatgtactaaacatatgtgttgctatcttcatcattaacatccttcttttctattgcttggctgtaatttttgtaaagataaattatattgtttttttgtatgtgtgtttgtagtatatgttcagaaggcaagcatcttcattttgctagctttgcagaatcttaaaatgtgtactcgttatttctaatgatgtaaaaaaaaatccctagtcctgtttagcatttgacttttttatatgttttaaatgttgctggatttttgtgctgtttgccaaacttatacaataaataaatgaaatattgtgctg

SEQ ID NO: 12547 - protein, 450 aa, Homo sapiens
MEQAPPDPERQLQPAPLEPLGSPDAGLGAAVGKEAEGAGEESSGVDTMTHNNFWLKKIEISVSEAEKRTGRNAMNMQETYTAYLIETRSVEHTDGQSVLTDSLWRRYSEFELLRSYLLVYYPHIVVPPLPEKRAEFVWHKLSADNMDPDFVERRRIGLENFLLRIASHPILCRDKIFYLFLTQEGNWKETVNETGFQLKADSRLKALNATFRVKNPDKRFTDLKHYSDELQSVISHLLRVRARVADRLYGVYKVHGNYGRVFSEWSAIEKEMGDGLQSAGHHMDVYASSIDDILEDEEHYADQLKEYLFYAEALRAVCRKHELMQYDLEMAAQDLASKKQQCEELVTGTVRTFSLKGMTTKLFGQETPEQREARIKVLEEQINEGEQQLKSKNLEGREFVKNAWADIERFKEQKNRDLKEALISYAVMQISMCKKGIQVWTNAKECFSKM

SEQ ID NO: 12548 - DNA, 1790 bp, Homo sapiens
  CDS (54)..(848)
tggattcaacaaaaggagcaacaagcattgaaaagtatgatctccgtacaaatatgtggactccagtagcaaatatgaatgggaggaggctacagttcggtgttgcagtgctagatgacaaactgtatgtggttggaggaagagatggactgaagactttgaatactgtagagtgctacaaccccaaaacaaaaacttggagtgtgatgccacctatgtccacacatagacatggccttggtgtggctgtactggaaggtcccatgtatgccgtaggaggacatgatggctggagctatctgaacacagtggaaagatgggaccctcaggctcgccagtggaattttgttgccactatgtctacccctaggagtacagtaggtgtggcagtactaagtggaaaactttatgcagttggtggtcgtgatggaagttcttgtctcaaatcagtagaatgttttgatcctcatactaataagtggacactgtgtgcacagatgtcaaaaaggagaggtggcgtaggagtgacgacctggaatggactgctgtatgctataggggggcacgatgctcccgcatccaacttgacttccagactctcagactgtgtggaaagatatgatcccaaaacagacatgtggactgcagtagcatccatgagcatcagcagagatgcagtgggggtctgtttacttggtgataagttatatgctgttggggggtatgatggacaggcataccttaatactgtggaggcttatgatccccagacaaatgagtggacccaggtatggcattcatgtttcattattacactgactctctttttattaaaacaattcttatggtaaaacagatcccctcaatcttgtccaatactgaaatatatggcataaatatgacaatcacgttttgattagcgatgagaaaaagaggcaatgtttaattttataacataattaaaatccagaattacctttgagatgtaagttaatactcagagaaattattaattatctgctaccacttgcatgatgaagtgttctagcctgattaaagctgataggactactggagggctgcaacaatgggaggggagactggaaaataaaaacaaggatagtagtcagaaaactttgaacaacttgcccatgtgtgagcagtcggatttttaaatactcaacccattgatatctgggagcagattaaagtcctgataacctaatgaagatggcaaccctaaattacactgagtaagaaacctgatctggcagtcttactaacagaaagaatttcacccttgtgtatttctgggagggtctagcacttctaaaaatgatcttttgagatctttgcttccatcatcaccaagaacagaatcaggaatttgtgcttgtgtcacccagttcagtacttggtacataaaagacaataaatgtttaactgagccaagattttcttgtatacaaggagccatgataagtatggtcaagaaaacaaagcttctaggccaggcatggtggcttatgcctataatcccagcactttgggaggctgaggcgggcagatcacgaggtcaggagttcaagaccagcctgaccaatatggtgagaccccatctctactaaaaatacaaaaaaattagccgggcatggtggcacgtgcctgtaatcccagctactcggggggctgaggcaggagaatcgcttgaacccaggaggcagaggttgcagtgagcagagatcatgccactgcacttcagcctgggtgacagagtgagactccatctt

SEQ ID NO: 12549 - protein, 265 aa, Homo sapiens
MWTPVANMNGRRLQFGVAVLDDKLYVVGGRDGLKTLNTVECYNPKTKTWSVMPPMSTHRHGLGVAVLEGPMYAVGGHDGWSYLNTVERWDPQARQWNFVATMSTPRSTVGVAVLSGKLYAVGGRDGSSCLKSVECFDPHTNKWTLCAQMSKRRGGVGVTTWNGLLYAIGGHDAPASNLTSRLSDCVERYDPKTDMWTAVASMSISRDAVGVCLLGDKLYAVGGYDGQAYLNTVEAYDPQTNEWTQVWHSCFIITLTLFLLKQFLW

SEQ ID NO: 12550 - DNA, 1335 bp, Homo sapiens
  CDS (8)..(1237)
atactatatgcttcaagaacaagtcagtgaatatttgggtgtgacctcctttaaaaggaaatatccagatttagagcgacgagatttgtctcacaaggagaaactctacctgagagagctaaatgtcattactgaaactcagtgcactctaggcttaacagcattgcgcagtgatgaagtgattgatttaatgataaaagaatatccagccaaacatgctgagtattctgttattctacaagaaaaagaacgtcaacgaattacagaccattataaagagtattcccaaatgcaacaacagaatactcagaaagttgaagccagtaaagtgcctgagtatattaagaaagctgccaaaaaagcagcagaatttaatagcaacttaaaccgggaacgcatggaagaaagaagagcttattttgacttgcagacacatgttatccaggtacctcaagggaagtacaaagttttgccaacagagcgaacaaaggtcagttcttacccagtggctctcatccccggacagttccaggaatattataagaggtactcaccagatgagctgcggtatctgccattaaacacagccctgtatgagccccctttggatcctgagctccctgctctagacagtgatggtgattcagatgatggcgaagatggtcgaggtgatgagaaacggaaaaataaaggcacttcggacagctcctctggcaatgtatctgaaggggaaagccctcctgacagccaggaggactctttccagggaagacagaaatcaaaagacaaagctgccactccaagaaaagatggtcccaaacgttctgtactgtccaagtcagttcctgggtacaagccaaaggtcattccaaatgctatatgtggaatttgtctgaagggtaaggagtccaacaagaaaggaaaggctgaatcacttatacactgctcccaatgtgagaatagtggccatccttcttgcctggatatgacaatggagcttgtttctatgattaagacctacccatggcagtgtatggaatgtaaaacatgcattatatgtggacaaccccaccatgaagaagaaatgatgttctgtgatatgtgtgacagaggttatcatactttttgtgtgggccttggtgctattccatcaggtcgctggatttgtgactgttgtcagcgggcccccccaacacccaggaaagtgggcagaagggggaaaaacagcaaagagggataaaatagtttttgactctaatactgtatatgcatttaagtggaatatttggtgccatttacaacattattttcatgccaataaaagattttttttgc

SEQ ID NO: 12551 - protein, 410 aa, Homo sapiens
MLQEQVSEYLGVTSFKRKYPDLERRDLSHKEKLYLRELNVITETQCTLGLTALRSDEVIDLMIKEYPAKHAEYSVILQEKERQRITDHYKEYSQMQQQNTQKVEASKVPEYIKKAAKKAAEFNSNLNRERMEERRAYFDLQTHVIQVPQGKYKVLPTERTKVSSYPVALIPGQFQEYYKRYSPDELRYLPLNTALYEPPLDPELPALDSDGDSDDGEDGRGDEKRKNKGTSDSSSGNVSEGESPPDSQEDSFQGRQKSKDKAATPRKDGPKRSVLSKSVPGYKPKVIPNAICGICLKGKESNKKGKAESLIHCSQCENSGHPSCLDMTMELVSMIKTYPWQCMECKTCIICGQPHHEEEMMFCDMCDRGYHTFCVGLGAIPSGRWICDCCQRAPPTPRKVGRRGKNSKEG

SEQ ID NO: 12552 - DNA, 1947 bp, Homo sapiens
  CDS (224)..(1204)
gtgtggccactctccctggggtccaaagtcccttcccgagggccggcctgtggagctacgggggtgctgggccagggtctgtgggcctcagtcccctctgaacctcactgtgccccagatcgtcaacacctgcagtggcccagacatcgcacgctccgtctcctgcccactgctctcccgagatgccgtggacttcctgcgcggccacctggtccctaaggagatgtcgctgtgggagtcactgggagagagctggatgcggccccgttccgagtggccgcgggagccacaggtgcccctctacgtgcccaagttccacagcggctgggagcctcctgtggatgtgctgcaggaggccccctgggaggtggaggggctggcgtctgcccccatcgaggaggtgagtccagtgagccgacagtccataagaaactcccagaagcacagccccacttcagagcccacccccccgggggatgccctaccaccagtcagctccccacatactcacaggggctaccagccaacaccagccatggccaagtacgtcaagatcctgtatgacttcacagcccgaaatgccaacgagctatcggtgctcaaggatgaggtcctagaggtgctggaggacggccggcagtggtggaagctgcgcagccgcagcggccaggcggggtacgtgccctgcaacatcctaggcgaggcgcgaccggaggacgccggcgccccgttcgagcaggccggtcagaagtactggggccccgccagcccgacccacaagctacccccaagcttcccggggaacaaagacgagctcatgcagcacatggacgaggtcaacgacgagctcatccggaaaatcagcaacatcagggcgcagccacagaggcacttccgcgtggagcgcagccagcccgtgagccagccgctcacctacgagtcgggtccggacgaggtccgcgcctggctggaagccaaggccttcagcccgcggatcgtggagaacctgggcatcctgaccgggccgcagctcttctccctcaacaaggaggagctgaagaaagtgtgcggcgaggagggcgtccgcgtgtacagccagctcaccatgcagaaggccttcctggagaagcagcaaagtgggtcggagctggaagaactcatgaacaagtttcattccatgaatcagaggaggggggaggacagctaggcccagctgccttgggctggggcctgcggaggggaagcccacccacaatgcatggagtattatttttatatgtgtatgtattttgtatcaaggacacggagggggtgtggtgctggctagaggtccctgcccctgtctggaggcacaacgcccatccttaggccaaacagtacccaaggcctcagcccacaccaagactaatctcagccaaacctgctgcttggtggtgccagcgccttgtccaccttctcttgaggccacagaactccctggggctggggcctctttctctggcctcccctgtgcacctggggggtcctggcccctgtgatgctcccccatccccacccacttctacatccatccacaccccagggtgagctggagctccaggctggccaggctgaacctcgcacacacgcagagttctgctccctgaggggggcccgggaggggctccagcaggaggccgtgggtgccattcgggggaaagtgggggaacgacacacacttcacctgcaagggccgacaacgcaggggacaccgtgccggcttcagacactcccagcgcccactcttacaggcccaggactggagctttctctggccaagtttcaggccaatgatccccgcatggtgttgggggtgctggtgtgtcttggtgcctggacttgagtctcaccctacagatgagaggtggctgaggcaccagggctaagcaattaaaccagttaagtctc

SEQ ID NO: 12553 - protein, 327 aa, Homo sapiens
MSLWESLGESWMRPRSEWPREPQVPLYVPKFHSGWEPPVDVLQEAPWEVEGLASAPIEEVSPVSRQSIRNSQKHSPTSEPTPPGDALPPVSSPHTHRGYQPTPAMAKYVKILYDFTARNANELSVLKDEVLEVLEDGRQWWKLRSRSGQAGYVPCNILGEARPEDAGAPFEQAGQKYWGPASPTHKLPPSFPGNKDELMQHMDEVNDELIRKISNIRAQPQRHFRVERSQPVSQPLTYESGPDEVRAWLEAKAFSPRIVENLGILTGPQLFSLNKEELKKVCGEEGVRVYSQLTMQKAFLEKQQSGSELEELMNKFHSMNQRRGEDS

SEQ ID NO: 12554 - DNA, 2116 bp, Homo sapiens
tttgttatgtgcagagttctaaagccattttataatactgcagtatccccccccccccacctttttttttttgagacggactgtctgttgcccaggctggagtacagtggcgcaatcttggctcactgcaacctccacctccctggttcaagcaattcccctgcctcagcctcccatgtagctgggattacgggcgcacaccaccacacctggctaatttgtattcttagtagagacggggtttcaccatgttgaccagactggtctcgaactcctgacctcaggcaatctgcccgcctcagcctcccaaagtgctggaattacaggtgtgagccaccgtgcccggccaagtatctcttttctacagccttattaaactaactacaaacatttattttccaatttagttttactttcagtgcatatcaaagttgttgtactcttcagaccaacaaattaacttgagggcaaattacatagctttccatgtacccttttttcctcaggtgctaatcaaaggctctgaaaatggatactgctttagtgatgtctgctttattcttaaaatgcttatttcttttgctagatgtaaagatttggtgttaacaaaagtggttttaatatgtaaatatgaatgaatgcctttagtttaccctgtttgtctattattaatctgttttcatttatccttcatagaggaggatcctttcatgatcttgaatacatttcattagatattgttgcattttaagaatgaaaatacaactgttttctgtcttagattaatcctgctgctatgagaaactgaaaatcaagaatgtgatgcactttttacattactatataccatacatataccataggttgctttgatacctttcctgtagcacagccactaacaagagtgaatgaattataaaattctttttgggagggaatcaatacaagtaactaattcttagctgatattgtcctatgaaggacaataacttaggaatataagaattctgttaatagtacactttttggccttaaatgtcttctactactgaaaaaagtttaaatcttagctttgtttctattattccctctctctgcctcagaaagaggaattgggaagaatggcttaaaggacgtggtgtcattgatttgttgctgatcttttagaaaacatttgtctatgtaagctggggacttattttttgtttgtatatagaggggaaatagtgctgccctgaaccaatcagatttagtttaaatcaaatcaatcaaaactccagctgtttctcttgtctttttacttagcaaaggaaaactttagtgaatgctacttgacaagaagaaaagtcatttctcaagcacatacccaaacttgaaggtgattgaacccaaaataatgggtgggaaacaccaaatgaggtggaggaatgagaaagatgtgtgggccaaagctatctggttatattttgatgttgccaatatcgcaaagccaaaattttaatttgcttatttaatatatttgttggccagagatctatttttatatcaatgtgccttgcatgtatattaaaaaaaaaaattggaaacgccatgtagtaatgcctgagatagtcgatggttcttaccacctcactaatttttatgcagtatgaaatgctcattctattgcccaactggtgctctctgtttaaagttacagatcttgcgaaactggaactattttataagctggggaagtgatttactttttttgttgtatcttttttgttcttagtctgttagtggctgtcctgtagtgggaaatagtaaaaggattcttcactcccttctcccctcagcaccttcttcaagtaaacatttcttgtgtgctttgaaaaaagtttcagcttgctgtctcttttagtgttttaaagaagtgttatacaaagcattgtttgcaaaatatagggagataatggagtccactttaatttggaattctgtgtgagctatgatccaagttatcagctctttccaactttaaaaattttgttaaaagcaccttgcttagaaaattttaaatatttatgtctgcaacaattgtctcaaaataataaactgtgcaattcttgtcatt

SEQ ID NO: 12555 - DNA, 1045 bp, Homo sapiens
ctccgctcggggtcctcgctcggcctctgctggcctccgcgactccgcggtgcccgcccccgttgagttcaaaaggacgcgcggagcggcgccggcccttcaccagcagcccgtccgactggaaagatctgcctcttctccaagaaactcaaccactagtgacaatgaccagcctcctgactactccttctccaagagaagaactgatgaccaccccaattttacagcccactgaggccctgtccccagaagatggagccagcacagcactcattgcagttgttatcaccgttgtcttcctcaccctgctctcggtcgtgatcttgatcttcttttacctgtacaagaacaaaggcagctacgtcacctatgaacctacagaaggtgagcccagtgccatcgtccagatggagagtgacttggccaagggcagcgagaaagaggaatatttcatctaatgactcccaggccccaaggagcttattcctggctccatcgctaacacgttgactgcttattatgggaaagttttctctgaagccagggagaagcattgattgatgtgggcaaatccaagctccagccaggtcgcagtcccaaatgccgacatcactgactccagggaccagggacatggagaaagctgtttatgatatctttaaccaggccctcttactagagctggtgtttgtgactggccaacaagatgtggctatgccaggggacatctgagtatgtgcccagtcatcttttttcacaggttgaagggagagaaaagattttgagttaaggtcattggctgctctactctgtcccctacctggtcacctagtgatagccccagtggagatactgtccatacaaggtcttcccagaggctggataccacagtaaaaggccaggccaggaggggtaggagactatggagatcttacctcctgataaatgtgctacaccccctaatctgagcccttcctttccgtgttccccaacaacctcatgcttacgtgatttttattcaaattaaaaattttcattgctacag

SEQ ID NO: 12556 - DNA, 1691 bp, Homo sapiens
aaattcaatgcaatgtctcacaatagctgcgctctccttcttccaagcacagagattctctctctacgccacaaagccactgccatgggatggggacgggtggcatcagcaactcaagactgtcttccctaccctcttcattgcctctttcaacagtatgaagttaaaatcagctctgaagatgacaatgcattcaaattcaccagatcacccccagctctgaagatgacaatgcattcaaattcaccagatcacccccagctctgaagatgacaatgcattcaaattcaccagatcacccccagctctgaagatgacaatgcattcaaattcaccagatcacccccagctctgaagatgacaatgcattcaaattcaccagatcacccccagctctgaagatgacaatgcattcaaattcaccagatcatctaatgaagtttcacttctgtttcttagcacctccctgactcttctgttccctagagtggaaggagggtctgggaaaggacctttgcctgaaactaagaagtcaacatgatacccctcaatatcccacctgggaagggagctgccaatgagccgaagcagatggggaggagatgaaactgggctatcggctttgcaggctggagccccctcctgtatctgccttatcttctggtatccccagcacttgacccttggccttgtagaaagcaggaatgtgatacatgtttggtgaatgaatgagtgaattaattaattaatttaatatattaatttgtatctatttcaaatagagtctgaagctcaattaatactttaaaaatacagctgggcatggtggctcacacctgtaatcccagcactttgggaggccaaggcgggagcatcgtccaagagtttaaggctagcttgggcaacatggtgaaaccccatctctaccaaaaatttaaaaaaaaaagaattagctaggcatggtggtatgcgcctgtagtcccagctactcaggagactgaggtgggggaatcacttgatcctgggagggtgagactgcagtgagctgagatcacggcactgccctccagcctgggtgacaaggtgtggccctgtctcaaaaataaataaaaataaaaatactatataatcattcattctaaaacagaagttataatcatgcctatccctagggccattgggaagattaaatccatgaataaatgtaaaacacttagaccagcgcctggcacataccaatcccgcaataagctattcatgtaaactgagagtaggttgtcccactccatgtgggattaggggtcagtgtaggaccagggtcagagatcaaggggagaatcacgcaaaaatttagtatgaagttaggattagaggaccagtttgtgtccacccagcagtcagattttttagttaccatctatttgtttatttatgtcccacattgttccaggaggagtcaaggcagctctcaggaattctaactacagaaatcaagaaagagaaagatcaaagttactatggactgaatgtttgtgtcctccccaaaattaatatgttgaagcctaatccctaatgggatggtattaagaggtgagacctttgagaggtgattacgtcatgaaggtggggctctcatgaatgggattagttcccttttaagaagaaacataaaaggaaaaaaagaaagaaag

SEQ ID NO: 12557 - DNA, 1675 bp, Homo sapiens
  CDS (35)..(1138)
atgccatgtgacaagggcagaacttgccaagattatgcgtaccagagcgaaggaaattgaagtgaaattgcttctttttgctattcaaagaacaactaactttgaggggtttcttgcaaaacgcttctccggctgcaccctgaccgatgggaccctgaaaaagcttgagtctccacccccatctaccaatcccttcctggaagatgagccaacaccagagatggaggaactggcaacggagaaaggagatttagatcaaccaaagaagcctaaagccccagacaatccatttcatggcattgtttccaagtgttttgagcctcatctctacgtgtatatcgaatcccaagacaagaacctcggagagctgatagatcggtttgtggctgatttcaaagcccaggggccacctaagcccaacactgatgaagggggtgccgtgctccccagctgcgccgacctctttgtctactacaagaagtgcatggtgcaatgctctcagctcagtactggggagcccatgatcgccctgaccaccattttccagaagtacctccgagaatacgcctggaaaatcctctctggcaacctgcccaaaaccacaaccagcagtggaggactgactatcagcagcctcctcaaggaaaaggagggctcagaagtagccaagttcactctggaggagctctgcctcatctgtaacatcctgagcacggcagagtactgtctggccaccacccagcagctagaagaaaaactcaaagaaaaagtggatgtaagtctgattgaacgaatcaatctgactggagagatggacacgttcagcaccgtcatctccagcagtattcagctgctggttcaggatctggatgctgcctgtgatcctgccctgactgccatgagcaagatgcagtggcagaacgtggagcacgttggtgaccagagcccctacgtcacctctgtcattctgcacatcaagcagaacgtccccatcatccgtgacaacctggcttccacacgcaagtacttcactcagttctgcgttaaatttgcaaactccttcattcccaaattcatcacccacctcttcaagtgcaagccaattagcatggtgggagcagaacaggtgagatggacgtagtatcaggcatttgcctggcagcttttgttgtagatcaagcacatattcttctagtccagatctacttggcaggaataaaattgatgatgtcccctgtttggggacagtataatgactcacccggaaggtttcttaattcgttcttccatttatttttaaaaattttgtttgaacgcctactaagttctgggtgcagggtataacacagcaagcaccatggaaaggtccctgctcctagtgctcacactccaataagaagaagtggctgggccgggcacagcggctcacgctgtaaccccagcatttcgggaggcctgggcaggcagatcacctggggtaaggaatttgagagcagcctggccaacatggtgaaatcccatctctactaaaaatacaaaaattagctgggcatgggggcaggctaccggggaggctgaggcaggagaatcacttgaacccgggaggtggaggttgcagtgagccgatatcacaccactgcactccagcctgggtgacaaagtgagactccatctc

SEQ ID NO: 12558 - protein, 368 aa, Homo sapiens
MRTRAKEIEVKLLLFAIQRTTNFEGFLAKRFSGCTLTDGTLKKLESPPPSTNPFLEDEPTPEMEELATEKGDLDQPKKPKAPDNPFHGIVSKCFEPHLYVYIESQDKNLGELIDRFVADFKAQGPPKPNTDEGGAVLPSCADLFVYYKKCMVQCSQLSTGEPMIALTTIFQKYLREYAWKILSGNLPKTTTSSGGLTISSLLKEKEGSEVAKFTLEELCLICNILSTAEYCLATTQQLEEKLKEKVDVSLIERINLTGEMDTFSTVISSSIQLLVQDLDAACDPALTAMSKMQWQNVEHVGDQSPYVTSVILHIKQNVPIIRDNLASTRKYFTQFCVKFANSFIPKFITHLFKCKPISMVGAEQVRWT

SEQ ID NO: 12559 - DNA, 1728 bp, Homo sapiens
  CDS (81)..(1235)
ataatccaaaattctttggcaatcttcagtctgatgattccaaaaaaaatgactcaaaaataaaagttactgtgttggaaatgtctgaatatttgaacaaatatgaaagcatgtcctcaaataaagactcaaaaaggcctaagacatgtgagcaaaatactcaacttaatagcatagagaattatctcaataaagataatgaaggtttcaaatgtaaaaagtcagaccaattaaaaaatgaacaagataagcaagaagatccaactaatgaaaaatcccaaaactattctcagagaagaagtataaaagactgtttgtctacatgtgagcaaccaaaaaatacagaggtattgaggactacactgaaacattcaaatgtgtggcgaaaacataattttcattccttggatggaacttcaaccagagcctttcatcctcaaactggattgcctcttctttcaagccctgttcctcaaagaaaaacacaatcaggttgctttgatctggattcttcattactacatctgaaaagcttctcatctagaagtcctcgaccatgtttaaacattgaagatgacccagatattcatgaaaaaccatttttgagttctagtgctccacctataacaagtcttagtctcctaggaaattttgaggaatctgtcttgaactatcgtttcgatcctctcggcattgttgatggttttactgccgaggtaggggcaagtggtgctttctgccccacacatttgactcttccagttgaagtgtcattctacagtgtttcagatgacaatgctccctctccttatatgggtgtgattactttagagtcccttggtaaaaggggttatcgagtacctccttcaggagcaatacaagtgaccttatttaatcctaataagactgtggtgaagatgtttgttgtgatatatgatttacgagatatgccagccaatcatcagacattcctacgacaaagaactttttctgtacctgttaaacaagaagtgaagagaagtgttaataaagagaacatccgacacacagaagaacggttattacgctacctcatacatctgaggttccagagttctaaatctggaaagatctacctccatagagacgtacggctcctgttctctagaaagtcaatggaggttgatagcggtgctgcatatgaactcaaatcttacactgaatcaccaacaaaccctcagttttcaccaagatgttgataaggagtgatgatttaaagtatttactcagtacccaagtttgcaagtaaaaattagcatagaatggagtgtaccaaattaacaatcaggagagtggattctctcctgttatcctggaccagtttttatgaaaggattcctgaaatgaaatccatatattccatgtagactggaaaaactcatgtcctaatcctttttgtactgttgaaaccacttcattggacatgttgcaatagcaaaacccccagttagattagtgtttacacattttctcagttatttaatatttaatgttttccttaatactcaagtgatgtttgtctctagtgttctaatgtagcacaaatcctatgtaaaatcatactatgtatttttgacattaatgttgaaatcaaatatatgcacaagtctttaattttgtgtaatgtgttaagtgctgttcatttaagttattgaaaatgagaataaaatgttgagcttctttaaaagt

SEQ ID NO: 12560 - protein, 385 aa, Homo sapiens [sequence omitted]

SEQ ID NO: 12561 - DNA, 1993 bp, Homo sapiens
  CDS (239)..(538)
agtttggccaactaacaaatcagaatctgaggggcatgttctatttcccaggaatgattgacactttggtgctggggttttgtgggggcggggggtagtttttgtttagcttttgtggagattgtgtgtgtgagaggagatttgatttttttttcttcttttcctttgtgagctgatggctgaagtgtaacagtacatcttcaggtaaagagagggatttctcaatctactttctgttatgtcagactataagagaaaccctttcagctgctttctagatgtacctaaattcagtcagacattttggattaagaaacctaaagtcctgatacattacatactccaaggaaatatatcagggacagacaattggctgaaacactggtacttcaatgtgacacatttttatagaacatttctaccagggggtactgaccttgatttctcctacaaggaccacactgcctttgtgtttaatgtaatgcaatttgtgtaccttctaatcatatatctgcagttcctcatttttataaaactttgatatcatgccagtaagctagatgttgaatgtatgtaagtagcatttggtaactgctaagaggttacaaaaacattattggtaaaaaaaatttccttagttctgatctggttggataagattttatcataacttttctgggtctcaggctctgatgtttgaaaaagaagggaatatattgggttttaaaaaagtgtattgtgacttaaactgttataagttatccttccacagaatacatcagagctatcagtgctttgtacatttagatgtttttacttgattattgtttaagaaaaatatactgaatttatagaaagcaagtattctcctaattagcaaaagttaaaattttatctctaccattaaaattacaatagattttgataaataaccagaaaaaacgccttttttttttcacacctagcaatcctcccgtttttattgtaaggactttcttttttccctaagagactttctgttagactctttatatatgagatgcttgtttaaatatggtggtctgtaacatttttccagctcatgtgaaaatggaaaactagaacctgaactagtatctacaacattgccaaagtccagggtaaagctaaaagttgataagtagacaatttattgttttgtgtgtgtctgtgtgtgtgtgtgtgtgtgtgtgtgtgtgtgtatggtgtgtatatgtatatatcacaaagttgtattttaaatattttaaataccctttcttttaatttaagggatgtcaaataaatgaaaggagtttaaaaatagccaaaataaatgagctataaaggcccataacatactaaaacaggcagtttcaggtatgtaaggaaaggaacattatacttacctagaaagtgagatctaaaaaaaaattaaaaataaataaaaaataaaaaagaaagtgagatcttggctatggctggaggtcagtcactttatggcataaattatttgggaggtaaaaagactgttttcaattcaaattgtgcatttattggcatctaaatctagcatgattttggttagagcacaaaagaaataccacataataccaaatcacagcaaatgttggaattaatacaacaaaattttcctttggctagaaatcttatgttatacctgaaaaattggttttaaaaaatgttcatcttggccgggcacggtggctcacgcctgtggtcccagcactctgggaggctgaggtgggtgaatcatgaggtcaggagttcgagaccagcctggccaacatggtgaagccctgtctctactgaagatgcaaaaaattggctgggcgtggtggcaggcgcctgtagtcccggctgctcgggaggctgaggcgggagaatctcttgagcctgggaggtggaggttgcagtgagccaagaatgcactactgtactccagcctaggcaacagtgcaagactccatctctg

SEQ ID NO: 12562 - protein, 100 aa, Homo sapiens
MSDYKRNPFSCFLDVPKFSQTFWIKKPKVLIHYILQGNISGTDNWLKHWYFNVTHFYRTFLPGGTDLDFSYKDHTAFVFNVMQFVYLLIIYLQFLIFIKL

SEQ ID NO: 12563 - DNA, 1432 bp, Homo sapiens
  CDS (205)..(999)
tttcagattgtctgctcagagttcatctcaaagcctggcaaggattggagaggtcaataagagtcagcgcctttaaaaagaaatctactcactcttctgtgtgcataaggccgagcagaggttcttcgtctcaagaggaactgacttctgttgagcactcaacacgccacagagaccagccatcttgcaacctcacctcacagcatggagagaggagaccaacctaagagaaccaggaatgaaaacattttcaactgcttatacaaaaaccctgaggcaacttttaagctgatttgctttccctggatgggaggtggctccactcattttgccaaatggggccaagatactcatgatttgctggaagtgcactccttaaggcttcctggaagagaaagcagagttgaagaacctcttgaaaatgacatctcccagttagttgatgaagttgtttgtgctctgcagccagtcatccaggataaaccatttgcattttttggccacagtatgggatcctacattgcttttaggactgcactaggtctaaaagaaaacaatcaaccagaaccattgcatttatttttgtcaagtgcaactcctgtacattcaaaggcctggcatcgcattcccaaagatgatgaattgtcagaagaacaaataagtcattaccttatggaatttggaggcacccccaagcattttgctgaagccaaggaatttgtgaaacaatgtagtcccatcataagggcagatctgaacattgttagaagttgcacctctaacgtaccatctaaggctgttctttcctgtgacttgacatgttttgttggatctgaagacatagcaaaggacatggaagcctggaaagatgtaaccagtggaaatgctaaaatttaccagcttccagggggtcacttttatcttctggatcctgcgaacgagaaattaatcaagaactacataatcaagtgtctagaagtatcatcgatatccaatttttagatattttccctttcacttttaaaataatcaaagtaatatcatactcttctcagttattcagatatagctcagttttattcagattggaaattacacattttctactgtcagggagattcgttacataaatatatttacgtatctggggacaaaggtcaagccagtaaagaatacttctggcagcactttgggaggccaaggcgggcggatcacgaggtcaggagatcgagaccgtcctggctaacaccgtgaaaccccatctctactaaaaatacacaaaattagctgggcgtggtggtgggcacctgtagtcccagctactcgggaggctgaggcaggagaatggtgtgaacctgggaggtggagcttgcagtgaaccgagatcgctccactgcactccagcctgggtgacagatccagactctgtctc

SEQ ID NO: 12564 - protein, 265 aa, Homo sapiens
MERGDQPKRTRNENIFNCLYKNPEATFKLICFPWMGGGSTHFAKWGQDTHDLLEVHSLRLPGRESRVEEPLENDISQLVDEVVCALQPVIQDKPFAFFGHSMGSYIAFRTALGLKENNQPEPLHLFLSSATPVHSKAWHRIPKDDELSEEQISHYLMEFGGTPKHFAEAKEFVKQCSPIIRADLNIVRSCTSNVPSKAVLSCDLTCFVGSEDIAKDMEAWKDVTSGNAKIYQLPGGHFYLLDPANEKLIKNYIIKCLEVSSISNF

SEQ ID NO: 12565 - DNA, 1573 bp, Homo sapiens
  CDS (776)..(1396)
gttgcgcctgcgcagtgcatcaccgcaggcgggcctcgcgggtccgggagcgcggcggagacgatgcctgagatcagagtcacgcccttgggggccggccaggacgtgggccgaagctgcatcctggtctccattgcgggcaagaatgtcatgctggactgtggaatgcacatgggcttcaatgacgacgtgagtcccttgggcaggaggcccagaggctgggagagccggccatccacagctggaccctgggcctcagagccgggacagtggggtggtgggcagcagtggttgtgcttggatggctgcaccctgtggggagcagggatgggtgggcctggccgaggtgagcccctgcatggtggggtccccctgtgctggcgctgagccccagccccggggtcctgtaggctggactccgtgagaccctgggctcagcttccagctcacatctgtcagtgaggttgggggtaacctcggcccctccggatgctgtgagcagccaggggtcctggtgccacctgcgggatgggagtgcccagcctgagtctgcacatagaaccccccttcctgggggcccctccctggggcatgggtggccccagatgctgcctggagaccactgtgcaacctgaaacccccacatccttcctagcgacgcttccctgacttctcctacatcacccagaacggccgcctaacagacttcctggactgtgtgatcattagccacttccacctggaccactgcggggcactcccctacttcagcgagatggtgggctacgacgggcccatctacatgactcaccccacccaggccatctgccccatcttgctggaggactaccgcaagatcgccgtagacaagaagggcgaggccaacttcttcacctcccagatgatcaaagactgcatgaagaaggtggtggctgtccacctccaccagacggtccaggtcaggttcccagggccacagctggcacagtcactgcccacccccacaccaaccatgccctccgcccgttctacacagtttctggaaggctggggcctcagggtgagcccaccccacctcactcttgcgtccagcaccgtggggacaccaggaggcgtcagcgcgaggatgcgggtcccagaccagactgggcgccgacccgggagagcacgtgcagggtgggggtatgcaccggcttatgaacccaccaggctctgtccgagcggcattgaaatggccagagtgggacaggctggtgccctcagagcgcttggagcggccagagactcgctggagctcccggggtgttgccgggcagggaggcaggggctggaggggagatgggccagctctggagggtgcctggttctgggtgtgggtcagggaagaagtgaaggttaaatcagcgagtgacaggtgaaattccatttctgacaaagattatgggtttgtctgtgtctcactcgaatctctggatattgcttttatatttcttgaaactatattaggtacctatgtattttggaacatttaattttctgattgaacttgtcaaaatgaagtatgtttatcttt

SEQ ID NO: 12566 - protein, 207 aa, Homo sapiens
MVGYDGPIYMTHPTQAICPILLEDYRKIAVDKKGEANFFTSQMIKDCMKKVVAVHLHQTVQVRFPGPQLAQSLPTPTPTMPSARSTQFLEGWGLRVSPPHLTLASSTVGTPGGVSARMRVPDQTGRRPGRARAGWGYAPAYEPTRLCPSGIEMARVGQAGALRALGAARDSLELPGCCRAGRQGLEGRWASSGGCLVLGVGQGRSEG

SEQ ID NO: 12567 - DNA, 2098 bp, Homo sapiens
  CDS (17)..(1882)
atgcgtgcagcaaagaatggaggagtcggaacccgaacggaagcgggctcgcaccgacgaggtgcctgccggaggaagccgctccgaggcggaagatgaggacgacgaggactacgtgccctatgtgccgttacggcagcgccggcagctactgctccagaagctgctgcagcgaagacgcaagggagctgcggaggaagagcaggaggacagcggtagtgaaccccggggagatgaggacgacatcccgctaggccctcagtccaacgtcagcctcctggatcagcaccagcaccttaaagagaaggctgaagcgcgcaaagagtctgccaaggagaagcagctgaaggaagaagagaagatcctggagagtgttgccgagggccgagcattgatgtcagtgaaggagatggctaagggcattacgtatgatgaccccatcaaaaccagctggactccaccccgttatgttctgagcatgtctgaagagcgacatgagcgcgtgcgggagaaataccacatcctggtggagggagacggtatcccaccacccatcaagagcttcaaggaaatgaagtttcctgcagccatcctgagaggcctgaagaagaaaggcattcaccacccaacacccattcagatccagggcatccccaccattctatctggccgtgacatgataggcatcgctttcacgggttcaggcaagacactggtgttcacgttgcccgtcatcatgttctgcctggaacaagagaagaggttacccttctcaaagcgcgaggggccctatggactcatcatctgcccctcgcgggagctggcccggcagacccatggcatcctggagtactactgccgcctgctgcaggaggacagctcaccactcctgcgctgcgccctctgcattgggggcatgtccgtgaaagagcagatggagaccatccgacacggtgtacacatgatggtggccaccccggggcgcctcatggatttgctgcagaagaagatggtcagcctagacatctgtcgctacctggccctggacgaggctgaccgcatgatcgacatgggcttcgagggtgacatccgtaccatcttctcctacttcaagggccagcgacagaccctgctcttcagtgccaccatgccgaagaagattcagaactttgctaagagtgcccttgtaaagcctgtgaccatcaatgtggggcgtgctggggctgccagcctggatgtcatccaggaggtagaatatgtgaaggaggaggccaagatggtgtacctgctcgagtgcctgcagaagacacccccgcctgtactcatctttgcagagaagaaggcagacgtggacgccatccacgagtacctgctgctcaagggggttgaggccgtagccatccatgggggcaaagaccaggaggaacggactaaggccatcgaggcattccgggagggcaagaaggatgtcctagtagccacagacgttgcctccaagggcctggacttccctgccatccagcacgtcatcaattatgacatgccagaggagattgagaactatgtacaccggattggccgcaccgggcgctcgggaaacacaggcatcgccactaccttcatcaacaaagcgtgtgatgagtcagtgctgatggacctcaaagcgctgcagctagaagccaagcagaaggtgccgcccgtgctgcaggtgctgcattgcggggatgagtccatgctggacattggaggagagcgcggctgtgccttctgcgggggcctgggtcatcggatcactgactgccccaaactcgaggctatgcagaccaagcaggtcagcaacatcggtcgcaaggactacctggcccacagctccatggacttctgagccgacagtcttcccttctctccaagaggcctcagtccccaagactgccaccagtctacacatacagcagccccctggacagaatcagcatttcagctcagctggcctggaatgggccaggctggtcctggctgcctgttccctgtgctcttcagaattactgtttttgtttccttttaccccagctgccattaaagcccaaacctctagccc

SEQ ID NO: 12568 - protein, 622 aa, Homo sapiens [sequence omitted]

SEQ ID NO: 12569 - DNA, 2331 bp, Homo sapiens
  CDS (17)..(1852)
aaaaacaagctcagcgatggcggctccagaaggcagcggtctaggcgaggacgcccggctggaccaggagaccgcccagtggctgcgctgggacaagaattccttaactttggaggcagtgaaacgactaatagcagaaggtaataaagaagaactacgaaaatgttttggggcccgaatggagtttgggacagctggcctccgagctgctatgggacctggaatttctcgtatgaatgacttgaccatcatccagactacacagggattttgcagatacctggaaaaacaattcagtgacttaaagcagaaaggcatcgtgatcagttttgacgcccgagctcatccatccagtgggggtagcagcagaaggtttgcccgacttgctgcaaccacatttatcagtcaggggattcctgtgtacctcttttctgatataacgccaaccccctttgtgcccttcacagtatcacatttgaaactttgtgctggaatcatggtaactgcatctcacaatccaaagcaggataatggttataaggtctattgggataatggagctcagatcatttctcctcacgataaagggatttctcaagctattgaagaaaatctagaaccgtggcctcaagcttgggacgattctttaattgatagcagtccacttctccacaatccgagtgcttccatcaataatgactactttgaagaccttaaaaagtactgtttccacaggagcgtgaacagggagacaaaggtgaagtttgtgcacacctctgtccatggggtgggtcatagctttgtgcagtcagctttcaaggcttttgaccttgttcctcctgaggctgttcctgaacagaaagatccggatcctgagtttccaacagtgaaatacccgaatcccgaagaggggaaaggtgtcttgactttgtcttttgctttggctgacaaaaccaaggccagaattgttttagctaacgacccggatgctgatagacttgctgtggcagaaaagcaagacagtggtgaatggagggtgttttcaggcaatgagttgggggccctcctgggctggtggctttttacatcttggaaagagaagaaccaggatcgcagtgctctcaaagacacgtacatgttgtccagcaccgtctcctccaaaatcttgcgggccattgccttaaaggaaggttttcattttgaggaaacattaactggctttaagtggatgggaaacagagccaaacagctaatagaccaggggaaaactgttttatttgcatttgaagaagctattggatacatgtgctgcccttttgttctggacaaagatggagtcagtgccgctgtcataagtgcagagttggctagcttcctagcaaccaagaatttgtctttgtctcagcaactaaaggccatttatgtggagtatggctaccatattactaaagcttcctattttatctgccatgatcaagaaaccattaagaaattatttgaaaacctcagaaactacgatggaaaaaataattatccaaaagcttgtggcaaatttgaaatttctgccattagggaccttacaactggctatgatgatagccaacctgataaaaaagctgttcttcccactagtaaaagcagccaaatgatcaccttcacctttgctaatggaggcgtggccaccatgcgcaccagtgggacagagcccaaaatcaagtactatgcagagctgtgtgccccacctgggaacagtgatcctgagcagctgaagaaggaactgaatgaactggtcagtgctattgaagaacattttttccagccacagaagtacaatctgcagccaaaagcagactaaaatagtccagccttgggtatacttgcatttacctacaattaagctgggtttaacttgttaagcaatatttttaagggccaaatgattcaaaacatcacaggtatttatgtgttttacaaagacctacattcctcattgtttcatgtttgacctttaaggtgaaaaaagaaaatggccaaacccaacaaactaacattcctactaaaaagttgagcttggacatattttgaatttttgtaagtgaagatttttaaactgactaacttaaaaaaatagattgtaattgatgtgccttaatttgcataaatcataaatgtatgtcctctctgtaattgttttaatgtgtgcttgaaatatccagaaaacctatggagttagtaaattctgggctgtcatatgtaggatagccactttttaggtatatgtacatttatatttctatcaattccttagaaagtaaaataaatgaatagatc

SEQ ID NO: 12570 - protein, 612 aa, Homo sapiens
MAAPEGSGLGEDARLDQETAQWLRWDKNSLTLEAVKRLIAEGNKEELRKCFGARMEFGTAGLRAAMGPGISRMNDLTIIQTTQGFCRYLEKQFSDLKQKGIVISFDARAHPSSGGSSRRFARLAATTFISQGIPVYLFSDITPTPFVPFTVSHLKLCAGIMVTASHNPKQDNGYKVYWDNGAQIISPHDKGISQAIEENLEPWPQAWDDSLIDSSPLLHNPSASINNDYFEDLKKYCFHRSVNRETKVKFVHTSVHGVGHSFVQSAFKAFDLVPPEAVPEQKDPDPEFPTVKYPNPEEGKGVLTLSFALADKTKARIVLANDPDADRLAVAEKQDSGEWRVFSGNELGALLGWWLFTSWKEKNQDRSALKDTYMLSSTVSSKILRAIALKEGFHFEETLTGFKWMGNRAKQLIDQGKTVLFAFEEAIGYMCCPFVLDKDGVSAAVISAELASFLATKNLSLSQQLKAIYVEYGYHITKASYFICHDQETIKKLFENLRNYDGKNNYPKACGKFEISAIRDLTTGYDDSQPDKKAVLPTSKSSQMITFTFANGGVATMRTSGTEPKIKYYAELCAPPGNSDPEQLKKELNELVSAIEEHFFQPQKYNLQPKAD

SEQ ID NO: 12571 - DNA, 2337 bp, Homo sapiens
aattattatgtggaatctcttaagtgagcaactaagaaaaagccttatagaaagactacactggatttataagtgtgtttatgtttctctaagaatgggagcttctgttaacttaggggtggagttgttctgaggaaaccagtagattggatgactgactggagaatccagaataacaaatccattagccagacatgtttacttttatattagaagtttgttgattaggtcttaattttcaaatgcaaacaccaagctttgaaaatattgcatatacaatgtattggtcagcaatttaataatatttaatttgaagttaattattgttaatccttctagaaaagttttttttctttaaataaaagtacatatatatacttttttatttagaggttaccagaagctctggttttgttttgttttgttttgtttttttgtttttttaatcattttcagatgttatccagaaatctgcaagtgtacttttcctgttttaactccttccttttatcacctgactatcagggaagcgaggttgaggctgccctgacctgacatgtcatgatgtcgacttgctaggtggggttcgctggggacgataaccagtggaattgttggtaagaacttttttttcctatttttttttttatcagtagtggggcattaagtgtgggagaatgcccatatcctataagtgggcaattatgtcagccttgtagaaaaataggactttaatattaaattattttgttcttaataggaacatataataacacttcacttacttttaaattggtagcagatcagcaggaaaggcctgcaagtatgaagtaatgaaatactcagggtatattttaagtgagcaaaatagacaccttataatcttaaaaagtctgttggagagacaataaatttgctttaactgtcatttcagtctagtactatattttctatattttgttggatagattaacatataatgcatcttaaagagatatttattgcacactaattttagtgaaaacaagaagacattgatagaatggagggcttaaacaccaaagatactatttttaaaaatcttccaaagtaatcttaacactgtaaaatgaaactttaaaaagttttagcagtttgacaataatggcctcaatttagagatatgttgagacaatgactttgggtcaagaggaaattacatagctgaaatattaagaccttgaacatagcagaaacataaacctatgaacaacttgtgttttgtgtgaaagctagggtagctgataggattagcagatattggtagaattaagagtcaatatttaaattattgctaaagattaaaatccctcatcttatagtttgtaggggattccatgatggtaaggtatagattgaaattaaatttagtaactaggcatttctgaccataccatataaaaaataattgtaatatggtataaacactgattaaaagtaattatggattttcatgcctgaagaaccttctcagtattcttacagcactgtatcttctttattggttgagaatatcagtctagaaagactttcctagatgttaaatgtgctagtcagtgtcatgaatataaacccttacttgtaagtttgctatagactagttgtacaacactagaatgaaattatgtaatacttttaagaattgtagtgattgcagggttgtgttaaggtaacattttatgcatgtgtcagtgacagaaaggatcagggtataaaacttagcactaaatagcatgctccttaggaagttttaaggtaagcagtaggaatattcatgtaattctgatgagtttatgtaagttaaggaaaatgcaatgccagtttgttgactttaaacactaaaaacaaaatacattttgtggaaccaacaaaggagacattctggggaaaaacttaaattgctcaaatttaaataagggctctcactttatatagtagatttgtcaggatcccatgaacattgcttttcttgatttctcacatatgagggttgggcaaaagggacttctctagcctcttcgataatgtaggtagacttgtacttagtgaatcccattataatgttaggtactatgttctaagactatttctataattggactgaaggctcctgcaaacataaattgctgatatggatatagtaacataagaaataccaaaatagggacatttgcaagaccttttccatttaatcatcagtttaataaaaatcatgcttttggtacagtgttcatgtaccataactgtattggaatatttgtacgatgttaaatatttttaataaaatttaacatgttc

SEQ ID NO: 12572 - DNA, 2150 bp, Homo sapiens
  CDS (45)..(1433)
gtgcgcctgcgcgcggcgccgaggggacggggtccgactcagaaatggcggcctccatgttctacggcaggctagtggccgtggccacccttcggaaccaccggcctcggacggcccagcgggctgctgctcaggttctgggaagttctggattgtttaatgaccatggactccaagtacagcagcaacagcaaaggaatctctcactacatgaatacatgagtatggaattattgcaagaagctggtgtctccgttcccaaaggatatgtggcaaagtcaccagatgaagcttatgcaattgccaaaaaattaggttcaaaagatgtcgtgataaaggcacaggttttagctggtggtagaggaaaaggaacatttgaaagtggcctcaaaggaggagtgaagatagttttctctccagaagaagcaaaagctgtttcttcacaaatgattgggaaaaaattgtttaccaagcaaacgggagaaaagggcagaatatgcaatcaagtattggtctgtgagcgaaaatatcccaggagagaatactactttgcaataacaatggaaaggtcatttcaaggtcctgtattaataggaagttcacatggtggtgtcaacattgaagatgttgctgctgagactcctgaagcagtaattaaagaacctattgatattgaagaaggcatcaaaaaggaacaagctctccagcttgcacagaagatgggatttccacctaatattgtggaatcagcagcagaaaacatggtcaagctttacagcctttttctgaaatacgatgcaaccatgatagaaataaatccaatggtggaagattcagatggagctgtattgtgtatggatgcaaagatcaattttgactctaattcagcctatcgccaaaagaaaatctttgatctacaggactggacccaggaagatgaaagggacaaagatgctgctaaggcaaatctcaactacattggcctcgatggaaatataggctgcctagtaaatggtgctggtttggctatggccacaatggatataataaaacttcatggagggactccagccaacttccttgatgttggtggtggtgctacagtccatcaagtaacagaagcatttaagcttatcacttcagataaaaaggtactggctattctggtcaacatttttggaggaatcatgcgctgtgatgttattgcacagggtatagtcatggcagtaaaagacttggaaattaaaatacctgttgtggtacggttacaaggtacacgagtcgatgatgctaaggcactgatagcggacagtggacttaaaatacttgcttgtgatgacttggatgaagctgctagaatggttgtaaagctctctgaaatagtgaccttagcgaagcaagcacatgtggatgtgaaatttcagttgccaatatgatctgaaaacccagtggatggctgaaggtgttaaatgtgctataatcattaagaatactgtgttctgtgttattgttctttttctttttagtgtgtggagattgtaattgccatctaggcacacaaacatttaaaaggatttggactgcatttaattgtaccattcagaatggactgtttgtacgaagcatgtataatgcagttatcttctttctttcgtcgcagccagtcttttttgcttctcctacaaaacgtaacttgcaatttgccagtttattattgttggatacaaagttcttcattgataagagtcctataaataagataaatacgaagataaagctttattccttagtgttaaaatacagtatatctaataactagcctcattagtagagcagtatattaaaacaatgttttatgtaaaaagtgtttatcttcagcaccaaatacatgataaatgtatcaatcactatttataaacagagctttcaaacactcctcagaatattcttctaagtattttgatgaagtaactttgtaattatttgaacattgttttaatcattaggaaacactgattaactgcaagtcttcatgattctgtcatattaagaaacacctgtaggtttgcttcaaataaaggcatatataccaaggacttacagacaaaattaagaatgtcaatttaagttaataaaaatctcccaatatg

SEQ ID NO: 12573 - protein, 463 aa, Homo sapiens [sequence omitted]

SEQ ID NO: 12574 - DNA, 1044 bp, Homo sapiens
  CDS (140)..(895)
aaaagcaaaatctgagcaggcttccgaggtttcctatgcaggagtgattggggcagatgtgagagggcacggcctcatctgtgaggggcggccagtgacgtcacggctggctgtcatctgtggaacgtcttcttgtcacatggggatcagcaaagacccgatttttgtaccaggcgtctgggggccttatttctcagccatggtacctgggttctggctgaatgaaggtggtcagagcgttactggaaaattgatagaccacatggtacaaggccatgctgcttttccagaactacaagtaaaggccacagccagatgccagagtatatatgcatatttgaacagtcacctggatctgattaagaaggctcagcctgtgggtttccttactgttgatttacatgtttggccagatttccatggcaaccggtctcccttagcagatctgacactaaagggcatggtcaccggattgaaactgtctcaggaccttgatgatcttgccattctctacctggccacagttcaagccattgctttggggactcgcttcattatagaagccatggaggcagcagggcactcaatcagtactcttttcctatgtggaggcctcagcaagaatcccctttttgtgcaaatgcatgcggacattactggcatgcctgtggtcctgtcgcaagaggtggagtccgttcttgtgggtgctgctgttctgggtgcctgtgcctcaggggatttcgcttctgtacaggaagcaatggcaaaaatgagcaaagtcgggaaagttgtgttcccgagactacaggataaaaaatactatgataagaaataccaagtattcctgaagctggttgaacaccagaaggagtatttggcgatcatgaatgatgactgaacagggcttgcaggtgctgatgccagaagcttctgtgccattgcattaaagacttctgtcatttgatccatgttcaagacccttgaggtattgtttcatcatttctgtattgtctttcaataaagaaaacaaacatgtgcaaccag

SEQ ID NO: 12575 - protein, 252 aa, Homo sapiens
MGISKDPIFVPGVWGPYFSAMVPGFWLNEGGQSVTGKLIDHMVQGHAAFPELQVKATARCQSIYAYLNSHLDLIKKAQPVGFLTVDLHVWPDFHGNRSPLADLTLKGMVTGLKLSQDLDDLAILYLATVQAIALGTRFIIEAMEAAGHSISTLFLCGGLSKNPLFVQMHADITGMPVVLSQEVESVLVGAAVLGACASGDFASVQEAMAKMSKVGKVVFPRLQDKKYYDKKYQVFLKLVEHQKEYLAIMNDD

SEQ ID NO: 12576 - DNA, 2122 bp, Homo sapiens
  CDS (299)..(1210)
atattatgaaatacccggcccaataaacaagacaacagagcgacatctagctatcaactgtgttcatgatagagttgtttgctggtggccactggtcaacgatgatgcttggccttgggcccccatttcttctgagaaggacagagccaatctactcctcctgggttatgctcaaggaagactagaggttctgagttctgtccgcacagaatgggacccactggatgttcgctttggcaccaaacagccttatcaggtgttcacagtggagcactccgtaagtgtagacaaagagcccatggctgacagctgcatctatgaatgcattcggaataaaatccagtgtgtgtcagtcaccagaataccactaaagtcaaaggccatcagctgctgcaggaatgttactgaagacaaactgattctgggctgtgaagattcttcgctaattctttatgaaactcaccgtagagtgactctcttagcacagactgaacttttgccttcattaataagctgccacccaagtggtgccattctgctagttggcagcaaccaaggggagttgcaaatttttgatatggctctatcccctattaacatccaactgttggctgaagaccgcttacccagggagactctgcaattcagtaaattatttgatgcctccagcagtcttgttcaaatgcaatggatagctcctcaggttgtttctcagaagggtgaaggtagtgatatctatgatctcctcttcctcaggtttgaaagaggacctttgggtgtgctgttgtttaaactaggcgtcttcactcgaggacagctgggcctgatagacatcatcttccagtacattcactgtgatgagatctatgaggcaataaacatcctgagcagcatgaactgggacactctgggccaccagtgctttatcagcatgagcgccattgtaaaccatcttcttagacagaagctcactccagagagagaagcacagcttgagacaagccttggaaccttctatgctccaacaagaccacttctggattccactatattggaatatagagatcaaatcagcaaatatgcaaggagattcttccatcacttgctcaggtaccagaggtttgaaaaggcatttctcctagctgttgacgttggtgctcgtgacctctttatgaactcctgggaccttggacagaggggatatgctaaatgaagcatttattggcctgtctttagcacctcaaggagaagactcatttccagataacctccctccctcttgcccaacccacagacatattttacaacaaagaatactgaatggctcttctaacagacaaataattgacagaaggaatgaacttgaaaaagacatctgttctggatttttgatgactaatacctgtaatgcagaagacggagaactgagagaagacggcagagaacaggaaatcagagatggtggttctctcaaaatgattcactttggtctggtgtaaacattaagaaaaaaagaaaactgccttcttcatatctaaacttttcatggcctgatacagacttaaaatcccccgtgtggatttttaacaagagacagtatgaatcatataaattagttaagagttttgagttgagtgtttgttttcaaaataaagttttattatttcaaaaacatgcagcataacagcaaagtgatcgtaagtaaaagtcttcaacctacttattttcaataatgtaaaattttgaaagtgtcttaaattgtatgttaattaggtgctacaaaaatagaatatttaaactttgttctcccaggtactttaaaaaaggggcagtagggggcaggcatagtgctcatgcctgtagtcccagtgctttaggaggccaaggctgaaggatcacttgagcccaggagttcaaggctagcctgtgcaacatagtgaaacgctgtctctagaaaaaattttaaaaattagccaggcatggtggttcatgcttgtgaagctgaggcagaagaattgcttgagcccaggagttcaaggctacagtgagctgtgatcgcgccactgcactctaacctgggcaacagagagtgaccctgtctccaaaaaaaaaaaaaaaaaag

SEQ ID NO: 12577 - protein, 304 aa, Homo sapiens
MADSCIYECIRNKIQCVSVTRIPLKSKAISCCRNVTEDKLILGCEDSSLILYETHRRVTLLAQTELLPSLISCHPSGAILLVGSNQGELQIFDMALSPINIQLLAEDRLPRETLQFSKLFDASSSLVQMQWIAPQVVSQKGEGSDIYDLLFLRFERGPLGVLLFKLGVFTRGQLGLIDIIFQYIHCDEIYEAINILSSMNWDTLGHQCFISMSAIVNHLLRQKLTPEREAQLETSLGTFYAPTRPLLDSTILEYRDQISKYARRFFHHLLRYQRFEKAFLLAVDVGARDLFMNSWDLGQRGYAK

SEQ ID NO: 12578 - DNA, 1729 bp, Homo sapiens
  CDS (71)..(664)
agagcgaacttgcggctcgtccgagtacatgtgagcggtaatcgcccctgcagctggttatcctgacattatgcactccgaagcagaagaatccaaggaagtggccacagatgtctttaattccaaaaacctggccgttcaggcacaaaagaagatcttgggtaaaatggtgtccaaatccatcgccaccaccttaatagacgacacaagtagtgaggtgctggatgagctctacagagtgaccagggagtacacccaaaacaagaaggaggcagagaagatcatcaagaacctcatcaagacagtcatcaagctggccattctttataggaataatcagtttaatcaagatgagctagcattgatggagaaatttaagaagaaagttcatcagcttgctatgaccgtggtcagtttccatcaggtggattatacctttgaccggaatgtgttatccaggctgttaaatgaatgcagagagatgctgcaccaaatcattcagcgccacctcactgccaagtcacatggacgggttaataatgtgtttgatcatttttcagattgtgaatttttggctgccttgtataatccttttgggaattttaaaccccacttacaaaaactatgtgatggtatcaacaaaatgttggatgaagagaacatatgagcacatgagttaagattgtgactgatcatgatttatttgaagatggagcactgctgatttatgaaggaaaaaagaagaattttctaaagattacacatatttcagaaagactttacccaattcagttgtcagacataatgatttatttgaaggcttgttttatttgaagaaaagcatattgccaaaaattctggttaaaagcttcctaacgggtaacagaccatgggagagatatgtggttgggtaatgcaaatgtagttatacaaagaaaaatacagatgtctccagacctggggactttttaatagggcagttgttgtgttggtggcacattggatatttctaacatgtacaaagctatgtattttgatttactttcatttcttgctatgtatatgtacttttcttaaaatgccaagaactttctcttgctatcattgctccttttgaaacaattcaattttcatgtctacagctgactgttttgttaagattgagtcatcgacattcaggatttaagtctgaggtagtcaaccctcaggaaaaaaaaaatggcttatctgaaatcagtactgtggaaatgaactatattagctattatgaataatgtccagtataagaatatgcttctggaattgagttctccttttaagtaccaatgatacttaaatttctcagaaatgtaatggtgtgtcattgccttgaaatgcttgcttagggcttcttttatgttatcttaaaaagtgctggtgaattttccattttttacatccatttcacatgtaagagacaaaaaagtctagattggtcttgatattgagataataaaaagtaagtagcattaagaaaggtaacaatcttcattctacagatgaactcattgaaacaatttaggggaatgaggggcaaaaggggagaaatactgctaaagaacatgagcataaaaatgcgtgcgtttcagtgtttaagaaggcttgataaagaatgtcacttttttatttaactgataagatttttgttattttttactttgataagtaaaccaaagaatatttgtatttc

SEQ ID NO: 12579 - protein, 198 aa, Homo sapiens
MHSEAEESKEVATDVFNSKNLAVQAQKKILGKMVSKSIATTLIDDTSSEVLDELYRVTREYTQNKKEAEKIIKNLIKTVIKLAILYRNNQFNQDELALMEKFKKKVHQLAMTVVSFHQVDYTFDRNVLSRLLNECREMLHQIIQRHLTAKSHGRVNNVFDHFSDCEFLAALYNPFGNFKPHLQKLCDGINKMLDEENI

SEQ ID NO: 12580 - DNA, 1911 bp, Homo sapiens
ttattatatgcaaataatattttcccgccatcgttatggaaaattctatattttgtcaacgttcattttcttctcaaaagccttttgttattatttccaaatgaatattatgtgtgtctcagacaaccacagaaagttttgtttttgtcacattctactgctactgtgtcaatggcagcattttgatataggtggagggatgctcacatcaaccccataatttgtgtcagcttctcctgaagttatcagaagcatacaatttaagtaaaaacagtatcttcgctatccaaatgatgttccaaggtaaatctcctcagatcccttccagtacatgtatgctccaaggcctgctctatgtagaacttttggagccatcaacgtactgcttgaggttgctttgaacaaaaggtatttgacataagctctataagatcagggactcttttttattttattcattgttctttatcttctagagcaataatttgcaaaatgactatttattgaataaactaggacggaggtgaaaaggaaagaacagctcatccttccaaggggaagagagcagtatcccaaatccaaattgaagaaaataaacatatatctattcaccagaagagatagaagggagacagggcagaatttctgtggttcttactatctctgtcacctctacaggccaaaccagtgaggaccttggagactactaatatcactggatttgtgaatgagttcatcctcttgggcttcccctgccgctgggagatccagatcctcctttttgtggtcttctctctcatctaccttctgaccctcctaggtaacacacccagctaatttttgtattttttagtagagacagggttttgctatgttggccaggctggtctcaaactcctgaccttaaatgatccacacacctcggcctcccagagtgctgagattacaggcatgagccagcatgctgggccaaaagaagtttattgctcacttaaaatctgaatgggtgctcctgattggcaggttcttcaagtgctgattctggaattcaggacttctctttgacttcatcatcttcataaatgtctttcaatgtcattgtgctcaatggtatcaaaaatcatcaaggcccttgtatgggtagggcctgaagtgttgcacagcagttttcattgttttctctgaactagaactcggtcacatgaccacacctaactccaaaggggacccagaaatgtgatctacacttgaaaaagaggaaatggatttgtctttttcacacaattgatatcttaacttctgagttgactaacatctaccttgtttgatctatatgtggagaaaaagagtttataagaaataaagatgggtagctctgtggatttctgggcataagatccttctggatttagtgggcaagatcttcaaactgccaattgggcaacatggatgaaaaattttgggtcttgtgaataatttaaaaagcaaagaaaaagaaacttgacattttggagacaaacctgtgtgagtgttttattggtacaaacgtatttaacactaggggttttgtacaattttttgccttttctactagaaaacaatgtaaagtgatttcacaatgtgaagagaaaaaaaaattgccgctgtgaccaaacgcacagtctgttgtgcagcaacaatgggcttcgatcaactcagtcgtgattcagctgtagaaatgcttttccttcaccttgtttgagcttttcctttctttcctgttttgatttgcaaaagaaaatgtcttttttgtgtgaacttgtgttgtactctgtagaaaactacgggttttactttaatggtttaagaaaaaaagcaagaagagccctcgtcgcttttcttacctcatcacagagtttgtgtagtgaattt

SEQ ID NO: 12581 - DNA, 2043 bp, Homo sapiens
  CDS (99)..(1682)
aattaaagatggctgcgcccatgtaacatcactagcgaccggtgacctctttttcccccttgcctggctcctgtggtggcaggctgggcacgaggaccatgctgggccggagcctccgagaagtttctgcggcactgaaacaaggccaaattacaccaacagagctctgtcaaaaatgtctctctcttatcaagaagaccaagtttctaaatgcctacattactgtgtcagaagaggtggccttaaaacaagctgaagaatcagaaaagagatataagaatggacagtcacttggggatttagatggaattcctattgcagtaaaagacaatttcagcacttctggcattgagacaacatgtgcatcaaatatgctgaaaggttatataccaccttataatgctacagtagttcagaagttgttggatcagggagctctactaatgggaaaaacaaatttagatgagtttgctatgggatctgggagcacagatggtgtatttggaccagttaaaaacccctggagttattcaaaacaatatagagaaaagaggaagcagaatccccacagcgagaatgaagattcagactggctgataactggaggaagctcaggtgggagtgcagctgctgtatcggcgttcacatgctacgcggctttaggatcagatacaggaggatcgaccagaaatcctgctgcccactgtgggcttgttggtttcaaaccaagctatggcttagtttcccgtcatggtctcattcccctggtgaattcgatggatgtgccaggaatcttaaccagatgtgtggatgatgcagcaattgtgttgggtgcactggccggacctgaccccagggactctaccacagtacatgaacctattaataaaccattcatgcttcccagtttggcagatgtgagcaaactatgtataggaattccaaaggaatatcttgtaccggaattatcaagtgaagtacagtctctttggtccaaagctgctgacctctttgagtctgagggggccaaagtaattgaagtatcccttcctcacaccagttattcaattgtctgctaccatgtattgtgcacatcagaagtggcatcgaatatggcaagatttgatgggctacaatatggtcacagatgtgacattgatgtgtccactgaagccatgtatgctgcaaccagacgagaagggtttaatgatgtggtgagaggaagaattctctcaggaaactttttcttattaaaagaaaactatgaaaattattttgtcaaagcacagaaagtgagacgcctcattgctaatgactttgtaaatgcttttaactctggagtagatgtcttgctaactcccaccaccttgagtgaggcagtaccatacttggagttcatcaaagaggacaacagaacccgaagtgcccaggatgatatttttacacaagctgtaaatatggcaggattgccagcagtgagtatccctgttgcactctcaaaccaagggttgccaataggactgcagtttattggacgtgcgttttgtgaccagcagcttcttacagtagccaaatggtttgaaaaacaagtacagtttcctgttattcaacttcaagaactcatggatgattgttcagcagtccttgaaaatgaaaagttagcctctgtctctctaaaacagtaaacatatcttacaaattaaaatgacttttaggctgggtgcagtggctcacacctgtaatcccagcactttgggaggccaaggcgagcggatcatgaggtcagaagatctagaacagcctggtcaacatggtgaaaccccgtctctactaaaaatacaaaaattagccaggcttagtggcgggcatctgtagtcccagctactcaggaggctgaggcaggagaatcacttgaaccctggaggtggaggttgcagtgagccgagatcatgccactgcactgcactccagcctgggtgacaaagcaagactgtgtctcaaaataaataaataaaataaaataaaatgacgtacagagattct

SEQ ID NO: 12582 - protein, 528 aa, Homo sapiens
MLGRSLREVSAALKQGQITPTELCQKCLSLIKKTKFLNAYITVSEEVALKQAEESEKRYKNGQSLGDLDGIPIAVKDNFSTSGIETTCASNMLKGYIPPYNATVVQKLLDQGALLMGKTNLDEFAMGSGSTDGVFGPVKNPWSYSKQYREKRKQNPHSENEDSDWLITGGSSGGSAAAVSAFTCYAALGSDTGGSTRNPAAHCGLVGFKPSYGLVSRHGLIPLVNSMDVPGILTRCVDDAAIVLGALAGPDPRDSTTVHEPINKPFMLPSLADVSKLCIGIPKEYLVPELSSEVQSLWSKAADLFESEGAKVIEVSLPHTSYSIVCYHVLCTSEVASNMARFDGLQYGHRCDIDVSTEAMYAATRREGFNDVVRGRILSGNFFLLKENYENYFVKAQKVRRLIANDFVNAFNSGVDVLLTPTTLSEAVPYLEFIKEDNRTRSAQDDIFTQAVNMAGLPAVSIPVALSNQGLPIGLQFIGRAFCDQQLLTVAKWFEKQVQFPVIQLQELMDDCSAVLENEKLASVSLKQ

SEQ ID NO: 12583 - DNA, 2007 bp, Homo sapiens
  CDS (123)..(1874)
cttttcgcggccgggccccagcatggctgcccccacggctgagggcctggcagctgctgcgccctcgctttcttgacattccctggcttctgtgctctcttccccaggccaccccagcagacatgtttgccaaggcctttcgggtcaagtccgacacggccatcaaggggtcggacaggagaaagcttcgagctgatgtgacaactgctttccccacccttggaactgatcaagtctctgagttagtacctggaaaggaggagctcaacattgtgaagttgtatgctcacaaaggggatgcagtgactgtgtacgtgagtggtggtaaccccatcctctttgaactggagaaaaatctgtatccaacagtgtacacgctgtggtcctatcctgatcttctgccaacctttacaacatggcctctggtgctcgagaaactggtagggggagcagatttgatgctgcctggactggtgatgccccctgctggtctgcctcaggtacagaagggcgacctctgtgccatttctttggtggggaacagagcccctgtagccattggagttgcagccatgtccacagctgagatgctcacgtcaggcctgaagggaaggggcttctctgtgctccacacttaccaggaccacttgtggcggtctggaaacaagtcctctccaccttccattgctccactggccctggattcagcagatctcagtgaagagaaggggtctgtccagatggactccaccctgcagggagacatgaggcacatgaccctggagggggaagaggagaatggggaggttcaccaggcacgtgaagacaagtctctctcagaagccccagaagacaccagcaccaggggcctgaaccaagactccacagatagcaaaacgcttcaagaacaaatggatgagctgttacagcaatgcttcttgcatgccttgaagtgccgagtcaaaaaggctgacctccctttactcaccagcactttccttggcagccacatgttctcctgctgccccgaaggacgacaactggacataaagaagtcaagctacaaaaagctctctaagttcctgcagcaaatgcagcaggagcagattatacaggtgaaggagctgagcaaaggggtggagagcattgtggctgtggactggaaacacccgaggattacatctttcgtcatacccgagccctccccgacctcccagactatccaggagggtagcagggaacagccctatcaccctccagatataaaacccctctactgtgtcccagccagcatgaccctgctcttccaggagtctggccacaagaaggggagctttctggagggcagtgaggtccgaacgatcgtcattaactacgccaagaaaaatgacctggttgatgcagacaacaaaaatcttgtgagattggatcccatcctatgtgactgcatcttagagaaaaatgaacagcatacagtcatgaagcttccatgggacagtcttctgaccaggtgtttggaaaaattacagcctgcctatcaagtgacccttcccggacaagagcccattgtgaagaaagggagaatctgtccaattgacatcaccctagcacaaagagcgtctaataaaaaggtgaccgtggtccggaacttggaggcctatggtctggacccatactcagtggctgccatccttcagcagcgatgccaggctagcaccaccgtcaatcctgcccctggggccaaggacagccttcaggtgcagatccagggaaaccaggtccaccacctcggctggctattgcttgaagagtatcagctccctcgaaaacacatccaaggtctagaaaaggccctcaaacctggcaagaagaagtgacagactcttttgtctcacgtggtggatccggtggaaatccaagctctgggctggtaatttttatgagcattttcagcttttgcaaatacaaaatataattctttacaaaaataaatttttattctaatct

SEQ ID NO: 12584 - protein, 584 aa, Homo sapiens
MFAKAFRVKSDTAIKGSDRRKLRADVTTAFPTLGTDQVSELVPGKEELNIVKLYAHKGDAVTVYVSGGNPILFELEKNLYPTVYTLWSYPDLLPTFTTWPLVLEKLVGGADLMLPGLVMPPAGLPQVQKGDLCAISLVGNRAPVAIGVAAMSTAEMLTSGLKGRGFSVLHTYQDHLWRSGNKSSPPSIAPLALDSADLSEEKGSVQMDSTLQGDMRHMTLEGEEENGEVHQAREDKSLSEAPEDTSTRGLNQDSTDSKTLQEQMDELLQQCFLHALKCRVKKADLPLLTSTFLGSHMFSCCPEGRQLDIKKSSYKKLSKFLQQMQQEQIIQVKELSKGVESIVAVDWKHPRITSFVIPEPSPTSQTIQEGSREQPYHPPDIKPLYCVPASMTLLFQESGHKKGSFLEGSEVRTIVINYAKKNDLVDADNKNLVRLDPILCDCILEKNEQHTVMKLPWDSLLTRCLEKLQPAYQVTLPGQEPIVKKGRICPIDITLAQRASNKKVTVVRNLEAYGLDPYSVAAILQQRCQASTTVNPAPGAKDSLQVQIQGNQVHHLGWLLLEEYQLPRKHIQGLEKALKPGKKK

SEQ ID NO: 12585 - DNA, 2069 bp, Homo sapiens
  CDS (8)..(343)
aaattcgatgagcgcgtcgggctccaaggcaggcgctgtcagcccgggagggctgtctgggatttctagagggtcccagaacgggttcttcccaggccgatcccgcctgcttcctgccccgtctctccacccgcctcccgccctctgtaagggaccccgagggcggcgccggaaacacggagaaggcccagaacggcgcgggacccgagaggcctacgttggcaaacgcagcccgctgcccctttgctcgcttcccccgggcctggagtggctcctgtcgcttctggcgctccgatttcgagaaatgactttcagctgtgcaaggcgagaatgctactttagataatgagaaaaaatctctcgaatggctcccaaaatgaggtccttgtttaagaggccacaggaagccgccagccgaacgctgataccaaagaggaggccaagaagcggactgtggcttggtgacctgtttggtattgccaaattttcagcttttattaaagctgaaacaccttggctgtttaaaacgttcgacaaggacttttttatgaacgttaacggcacagcatacgggttttttggaaaaaaaaaaaaggcaggacttcagcccgtccgcccccttgtgcaggtccattcatgaacctcgagttagaggcctttcttctgaaactcagaatctagtagggaagacctgtgtagacgaataaaaataaatacatcacagcttgttaagtgctgtgacaaagaggcagtgaaatcctgcttgaggtcatctgccttgctaaagaggtttgactatgttgtaggcacagggttagggttagactctgtaatgggaagttatgtgatcagatttctgtttaggaggatcactggccaggcggggtggcttacgcctgtaatcccaatactttgggaggccgagtcggtggattgcttgaggctaggattttgagaccagcctggggaaaccgcgtctctactaaaaatttgaaattagccaggcatggtggtgcgaggctgtaattccagctacttggaggctgaggcgggagaatagcttgaacccagtggcggaggctgcagtgagccgagattgcgccactgcactccagcctgggcgacagagcgagattccatctcaaaaaaatcattccaacgagtggataaagaaaatgtgatatatatgcactatggaatactaagccataagaaggaatgaaataatggcatttgcagcaacctagatggagttggagaccattattctaagtgaagtaactcaagaatggaaaaccaaatattgtatgttctcactcgtaagtgggagctaagctgcgaagatgcaaaggcataagaatgatatagtggactttgaggactcaagggttgaaggatgagactacacattgggtacagtgtgcactgcttgggtgatgagtgcaccaaaatctcagaactcaccactgaagaacttccccatgtaaccaaaaaccacctgttccacagaaactatcgaaataacacttttaaaactttactatttctgaataaaatttacatgcatttctcagaaaaaaaaatatttggaattgaggtatctaatagagaactgagttaaattattgccacttaaaaacacaaagtgatatagccactttgtgaattaatcagtcagcagtggctaggttatgcttagtggtttataaccaaatcttagtttataacaacaaatgtgtattgttaattcccactacaagtttataacgacattgctggatgctacactccatgtctctttgtgggacccaggctcatgggacttctgttatctgcattagagagagagaagacaacaaaatatgcactggttcttgaagcttaggcccagaagtaaaatatgtcttttacctgttcacattgcattgggccagggcaattatcatggctgcaagtaacttcaaaaggatggggaagtgcgatcttggcatgtgtcagaagaaatgaaaacatttggtgaagagcattaatgactgtctttacaggaaaaaagcaatcaaatagacatg

SEQ ID NO: 12586 - protein, 112 aa, Homo sapiens
MSASGSKAGAVSPGGLSGISRGSQNGFFPGRSRLLPAPSLHPPPALCKGPRGRRRKHGEGPERRGTREAYVGKRSPLPLCSLPPGLEWLLSLLALRFREMTFSCARRECYFR

SEQ ID NO: 12587 - DNA, 2077 bp, Homo sapiens
  CDS (459)..(956)
ctgtcctggtagggcacctgcacctgcgaatcttgcaccttgcaaacaatcagttacagacctttcctgcaagcaaactaaataaattggagcaattggaggaactgaacctaagtggcaacaagcttaaaaccattcccacaaccatagcaaactgtaaaaggctgcacacccttgttgcacactccaacaacatcagcattttcccagaaatactgcagttgcctcagatccagtttgtagacctaagttgcaacgacttgacagaaatcctgattccagaggctttgcctgctacattacaagaccttgacctgactggaaatacaaatctggttctggaacacaagacactggacatatttagccatatcacaaccctgaaaattgatcagaaacctttgccaaccacagattctacagttacgtcaaccttctggagccatggactggctgagatggcagggcagagaaataagctgtgtgtctcagcacttgctatggatagctttgcagagggggtgggagctgtgtatggcatgtttgatggagaccgaaatgaggagctcccgcgcctgctgcagtgtacgatggcagatgtgcttttagaagaggtacagcagtcaactaatgacacagttttcatggctaacaccttcttggtatctcacaggaaattaggaatggctggccagaagttgggctcctccgctctcctgtgctacatccgccctgacactgccgatccagcaagtagctttagcttgactgtaggcaatgttggcacgtgccaagcagtcctgtgccgaggtgggaagccagtgcccctctctaaagtcttcagcctggagcaggacccagaggaggctcaaagggtgaaggaccaaaaagccatcatcacagagaattgggttcttaaccaaaagcacctgcaggattttcctggggaagataagtgagaacaaacacatgaaaccacattccgtgacactgcaaagctgtgagttaaggttccggaagatctcaaagagttccagaccacagatattccggtgcatcactgtaacttcccggctgttctcggctgcctttgtagcgcttctgttctcggtagctacgcagggccagcaccacgctggcgccgtacatgatcacgagaagacaagcaaaggtggctgctgctccgtcggtgcctgccagctggcagtccatccaggtgagacccttgcgggcatagagcctctctcttgttttgcaagtgtcggtgctattgatctgcagagccacgtggaggtaaacaccaatgcctgtgcagtagcccactgccgctaggaggctgaaggcggcctccgtgaggagccacttccctgacaacattgttcgactcttggctccttggagtaaaacacccatggtgaggacccccagacccagagaaacagccacgccaccgtatatcaggggcgagcggaggatcgtgtactgctggtccagctgccgaacctgctctagctcagtgccctcgaacgatgttttcagatcagttcctacaagaggagccacattttgttaagtggccttcgacttcattgtatggatggatttgtctattcaaccaggaccttactgatagatatttggactgaaaggaacccacaaatggcacgaggcagaggaagccaacaggccaacagactgaagatcttcttgtccgaggtcagcttttatttgttactgacagaggccccaaatccttcttaggtgtccttctgggagagggtctcctgccattcccgtggtgttcagggatgagcatgaagagaaatacaaatgaaccgagagcaggaccaccaggttcaagtccccgctttttactgccttgtcatcttggccaagccattcagtccttctaagcctcagacaatatgacaaatgaagctaagtctgccaatcttcacccacagggatgtggggaggctcaaatgaaagcaaccgtgtgatactgtgggaagttaacaacaacaacaaaaaagcaagtatgtgaaaatactctaaaaataaaataatgtacaaatgg

SEQ ID NO: 12588 - protein, 166 aa, Homo sapiens [sequence omitted]

SEQ ID NO: 12589 - DNA, 2243 bp, Homo sapiens
  CDS (6)..(371)
cggcaatgtccgccacctggtgcagcccagagggtcaaggaatgggccagggccctggcagggaggtcggaggaaattccgccgccagcggccccgcctctcccataaggaacccatgcctttctgaagcaggactgaaggggcccccaagtgcccaccccctgcggttatgtctcctccatagattggtctgcttctctggaggcctcacgtccattcagctctcacctcgcacctgctgtagccaccagtgggcccagctcttctcacctgcctgcttcccccagtggcgtgctcctggctgtagtttggatgattcccgttctctcacaagaatccgtccagtccatcttcctggcccctccctggactgactttggagacctagccccagaaagcctcccttcttctccaggtcccctccgccctagtccctgcctgtctcatctaacgccccaaaccttcatttgggccttccttcctcatgtctgccctgagcgcggggtggaaatgctcccttctgtgggctccagcagatcccttgttttcctgtcagttggacccctcacctggcctccagggaagaatgcagagaaaagcaaggagagactctagttaagaggtgctggctgcggggatccagacagggcacattgggggcatggaagtgccagggtggttttcaggagctctggtgaagtgggtggagcatcagcgtttgctcagttaagggagaggtagagaggggcccgtgaagtcctttgtcacttctcttgccttagtgtgcctcccaatactcccttcttcctgcccccacaccccatccccagctagcccaggctccaggtcaggaggggagggtgctgggcctgacatggctatataccctcccaggagtaaaagccaagcaagaggttgtttttgccaagaatcacagaatgttagagctgacaggacccttgaaggtcacttagccttcttaggcaaacgcctgcaaaacagaagcctggagaggggagtgacctgctcagagtcattgcagagccgggatggggaccaggtctcccatctcctactttatgacgccctcttccctcttgatgatgtcttttcaaagcaaatgaagtgccttttcccgaggctggggctgggggtggctgggaggggaagggaagggagaggcaagctggctgtgaactgtcctgttgtggggctggagctgctcccacctccctgacctacccctgctgcaccattcccccagctgggctggaaggttccataactggccagctgcccccataactggcagcattcccagacccagggtactctaataggggcggctcaggcactgagactaccgctcaaccccagggtggttttcaggagtccgaggtagccttcaatcactggactccatggccttcccttcgtgttgaccggaccttccttccagggcttttcctttgggggaggcggagaggggagaagaaggaagggaagggcagaaggaaggagggaagaaaagaaagcaaaggaacagaaggaaggaaagaaagatgggaggaagtgcagcaggaatagcaccctctccccgggaggccctagcttccgtgaggggccatcaccagccattccttggagggggctttctccccttttgcttgagcagggttcccaggagggagaaagagaagacaagagcctgatgcccaactttgtgtgtgtggggacgggggagtcagggccccccaagtcccacaatagccccaatgtttgcctatccacctcccccaagcccctttacctatgctgctgctaacgctactgctgctgctgctgctgctgcttaaaggctcatgcttggagtggggactggtcggtgcccagaaagtctcttctgccactgacgcccccatcagggattgggccttctttcccccttcctttctgtgtctcctgcctcatcggcctgccatgacctgcagccaagcccagccccgtggggaaggggagaaagtgggggatggctaagaaagctgggagatagggaacagaagagggtagtgggtgggctaggggggctgccttatttaaagtggttgtttatgattcttatactaatttatacaaagatattaaggccctgttcattaagaaattgttcccttcccctgtgttcaatgtttgtaaagattgttctgtgtaaatatgtctttataataaacagttaaaagctg

SEQ ID NO: 12590 - protein, 122 aa, Homo sapiens
MSATWCSPEGQGMGQGPGREVGGNSAASGPASPIRNPCLSEAGLKGPPSAHPLRLCLLHRLVCFSGGLTSIQLSPRTCCSHQWAQLFSPACFPQWRAPGCSLDDSRSLTRIRPVHLPGPSLD

SEQ ID NO: 12591 - DNA, 1827 bp, Homo sapiens
ttgaggggaggtgcagctttcatctgaccatgcaggcgtgctttgcagtgggtagagcagtgctttcctcctcccagctgcacactggaatcacctggagagtccagaaacttcccgcctcagtgaaagaacatcagtgtatcagcacagcaaatattccaaatgccaggctggattccctccaattaccaggacctccaggcttctcctcctttcaagaactttctgaccctggatccagtctaaatgttggttataaactcacctgacatccacagggcccttccaaaatactgtcaaggctgactgctggtgcctggaacctgcacaccctcctgggactctgcatctctgctggggctggtttctcctctgagccaccttaaggaatcccaccctgacccggtcagagctcaccatgcctccctctcctacttgctcagcattttgtgtctatctagactgaagcctttgctttctctctgtgattgtggtgaaagttcaatttgctttcctatctctagaatgtcagcacgaaggcagaggcatggtctcctgagttccataaccccaaagcctaactccctgcctgccacactgaggggcttagtagacattgacttactaaattgaatagttgagtaataatgctctttgaaataatttggagttagatcttgagccttgtgtggccagaggatgggtgaggacacatcataaaaactaaaggtaactgagcatgccagtggttggggtgagaaatttgcatggagcactccagacacagaggcagcaaaacccaagtgctgggaagtcagagtgagagagtgaaggggcagtgagtgcttctttaggagctggatcaaaacctaagatgatctggccacatggtgcagactgagcacacacttgggagagaaatgggccaggaggagaggagaaaggttcaccacaggacagtggatgactgggaatagaagccctccccatggtggaccaagaagtctgtgaagctgagagaaagacaaaagaaatcacgacttctgtaggtagctgggatggaaacctcaggggtgacagggtctttaaaggaaatctcaaggaaggcatcatgttctgggtgtgctccagggatgctgagtaagaaaagaccagcctttctgtgtgtgtctttactctgccacaaggcacctgggctcctaaatgaccaatacacatgtgctatactggtgccaagaaagaagggtgttttgtaggaaagtcaaggtgagaggaggtgcccaggacttggctcctttctttgaagggtgacggtgtaaattctccatgctggggatcctactgatggatggaggcatgtcgatctcatcatttcacagagtggggagctatggccacaacgtgcctatcacacaagtccagcctcacgtcagctggacaccagctgttctgacacttgtcagcacatggggcacccggaagttcatggtgttctgcaaagaacgccacaaaacagtgagctcaacttcttgaaagtcataatgtgttgctaagtccgatcccagatcctaaaaataatatgaggtagtggccattgaacagaaaaaatttacatcttaaacttgaagataagtacaagtgtacctttttctaccactgttgttcagttttattatattgacaagcacctctgcccaccctgtggggtaaaactgtttgaaagtgtttatgaaagttttatataaatattggttgatcaaatgtacaaaatatgcatgatggcaccatattgtgtataatagtgacaaatacagtctatgtgggtgg

SEQ ID NO: 12592 - DNA, 1862 bp, Homo sapiens
taaacaaatgagcatggctgtgtttcagtaaataaaatttacaaaaacaggtggtctgttggatttgacctgcaagccataatttgctggcccctagtttagcagttaaagatttacatacataatttgaattaatattaattataccaagttggaaacattgaaggacacatacagtgttttagggaatcttaaactttatttttattctctaaagttttagtttgtgttttctgttctcaagtcttgaggaatgctcacagattatctttctgctcatctctgaagggtttagcacttttgagcattacacatgaactgtcagaaaggacctgagtgccttagtgtgaattaatagctgtctccatgtctaagaagttaccatcattgggttttttcctccaggctaaactcccatcttccagcaggctttgagtgtctctgtagagtgagcaaaaacatatcagtatacataactatttactactaagtctttggatctttagatggtgctttctcagctattgcctatggctgaacaactgctagaaaagatccagaaggagcccacagctgtgctgaaagatgaggccatggttctgcatctcactctgggaaagtataatgaattttcagtttcccttttaaatgaggatccgaagagtctagatatatttataaaagctgtgcacacaacaaaggaactttacgcgggaatgccaaccattcagatcacagcccttgaaaaggtcagtgatttctttcagaaactaaggcatagcatgttcaagcatttaaaggtagaaggcaacaggaacagcgttaaaaaaaaaaagattaatattttatttggagaagatagttacaggtggactagacgttttaaaggaaaatgatgtatttgacccatttttgaaaactgaacgttgtacatgggtcattaaaaagaattgcattttaactgacaaaattaagtgggaaacaattttgtattttgagagaggttgatataaaaattatttctggaatttaaacttgttcactgaactcagttgccttttttctaccccctctagattacaaaaccattttttgcagccatatcagatgaaaaagttcagcagaagcttttaagaatgttgtttgatttattggtgaactgtaaaaactcacattgtgctcagactgtcagcagtgtttttaaaggggtaagctgcaaacttcttgtaattttttttattaatgtttatagtctcttccaagggacaccatgtttaagagtcctgtattttatagtgcttgtaagaggtcagatgttaccattaacaaaaatcatggaaaagtaagtcagagagaggcataaaataaaaattttaaatctttaccattattttattttatgaagtatttgttgataattttaaccagataggatgtgtaggaatatgtgtgtgtgtgatctttctcatattagacggaatctacctattcctttatgcaaggaataggaatgagtcaatggctcagtattgaactgggtaacattattctacttaatttaaatagttgtttaatgacatataatggaattgaaattctgcttgttggttttatacgtatattgaaaccttgttattatcagaatagccacctggttattctcttttttgaatatagaataatacaaagttctagtatctagattcagcagttctcagaattttaacatattaatcttttttccttctttttctttgctgaaatattttaaagtaaatctcataatgtcatgcactttcatccctctgtacttcagtgtgcatcttttgaaaagtggatatgactacaatgccattagaagt

SEQ ID NO: 12593 - DNA, 1606 bp, Homo sapiens
  CDS (136)..(855)
tataatgaagccaagaaaacgctgacagagctgaagacttacagtgagaaactggacaaagagcaagcagccctcgagaagatagaatccaaagctgatccaagtatcctacagaacctgagagcacttgtagccatgaatgaaaatctgaaaagtcaagaacaggaatttaaagcacattgtcgagaggagatgacacgactacagcaagaaattgaaaacctgaaagctgagagagcaccacgtggagatgaaaagaccctctccagtggagagccgcctggtaccttgacctctgcaatgactcatgacgaagacctagacagacggtataatatggagaaagagaaactttacaagatacgtttactacaggctcgaagaaatcgagaaatagcaattttgcaccgcaagattgatgaagtccctagccgtgccgagctaatacagtatcagaagagatttattgaaccctaccgccagatttcagcagtgcacaaagaaaccaagcagttcttcactttatataataccctggatgataaaaaggtttatttggaaaaagagattagtctgctgaactcaattcatgagaacttctcacaggccatggcctcccctgctgcccgggaccagtttttacgtcagatggaacagattgtggaaggaattaagcaaagtagaatgaagatggaaaagaaaaagcaagagaacaaaatgagaagagaccagttgaacgaccagtacttggagctgttagaaaagcagaggctatactttaagactgtgaaagagttcaaggaggagggccgcaagaacgagatgctgctgtccaaggtgaaagcgaaggcctcctgaacatccccagccgtggctgtatgtcattgattttacttttaagcaccgtatatcacctacaagatcatgaaatggttctgaaagcgacagtagagagatgcagttgtgatgatttcaacaacctggatgttttctttctcctctttgcttccattcatctctgttggctgctgttgatggagtcagacagtaaacacgtggcttggataacacccatcatcctatgaagaatatagggagtacttgttctctgttgattcaacttttatgtctccagtaacattgcgcttatgaaggtacctgtatttgtatggactctgaataaagaagaattcatttgtttagcaagtattagttcagcaaccactgagaaataagcactgaggaagattcagagacgtgtaaaacacagttcctactgcacaagtacccagcaggtggcccagggaggcagatacagcacacttgaccgcagaactgggctatccaagatgtttttcagtaaacagaaggcatttagctgaaatgatcagcccatgtagtgttggtcacttgggcctttcacctgccatggtaccttttgttcccagctcctccaggtgccagccagcaggcttggtggtgacagcaactggaacgaaagttcagtgttgttttaatttttatacgttactcaagttgatttctcagaaaattgaaaacagaccttgtgctgaggacacgtcaataaaaattataccttcccctg

SEQ ID NO: 12594 - protein, 240 aa, Homo sapiens
MNENLKSQEQEFKAHCREEMTRLQQEIENLKAERAPRGDEKTLSSGEPPGTLTSAMTHDEDLDRRYNMEKEKLYKIRLLQARRNREIAILHRKIDEVPSRAELIQYQKRFIEPYRQISAVHKETKQFFTLYNTLDDKKVYLEKEISLLNSIHENFSQAMASPAARDQFLRQMEQIVEGIKQSRMKMEKKKQENKMRRDQLNDQYLELLEKQRLYFKTVKEFKEEGRKNEMLLSKVKAKAS

SEQ ID NO: 12595 - DNA, 2152 bp, Homo sapiens
  CDS (104)..(1000)
ggaatttttaggtggtcacattgtaaggcatgcccaggctcatcagaaaaaaggcagttttgcatgtgtaatatgtggtaggaaatttagaaacagaggacttatgcagaagcatttgaagaatcatgttaagaagatacagaggcagcaaattgctgcagctcaacaggatgatcaggaagtcactgctttggaagaaataaattgttctagttcttccatttcatttgaaaatgggaattctgatagtaaggatttggaagtggagacacttactgcttctagtgaaggaaacaaagaagtcatccctgagcatgtggctgaattcattgaaattcccataagtgtaccagaagatgttattgaaaatgttattgaaaatggcagtcctaataattctttaaataatgttttcaagcctttaactgaatgtggggatgattatgaggaggaagaggatgaagaaggtgattatgaagaagatgattatgacctgaatcaagaaacttcagtaattcataaaatcaatggaactgtgtgccatccaaaagacatatatgccacagatcaagaaggaaactttaagtgtcctgctcttggttgtgtccggatatttaaaagaattgggtttctaaataaacatgcaatgaccgtacatccaaccgatttaaatgtgcgacaaacagtaatgaagtggagcaaaggaaaatgcaaattttgtcaaaggcaatttgaagattctcaacattttatagaccaacttaatagacatagctatccaaatgtgtatttttgtttgcattttaattgcaacgagtcgtttaagctgccgttccagcttgcccagcacacaaaaagtcacaggacatttcaggctcagtgtagttttccagaatgccatgagctttttgaagatcttcctctgctgtatgaacatgaagctcaacactatttaagtaaaacaccagagtcatctgcacaaccaagtgaaacaattctttaggatgttcagacagactcaaatcctaatcaggaaaaagactcatctagtaatgagaaacaaactattagtctgccagtttctactagcaaatcaaggaaagagtctacagaaccaaggacatgtatagaaagtatggaaaagaaaacagacagtttagttcagaatggaaacgaacgttctgatgacactgtttcaaatataagcttgatagaccaaaagatgcctgacatagagccaaattctgaaaataattgtagtagtagtgatatagtcaatggacacagtgaaatagagcaaacacctttagtttcatcagatcctgctttgaaaattgatacaaacagaatcaggacagaaaatggttccattttgcccagtgttgtaccacaagaacacaacaccttgccagtatctcaggcaccttccaaaccaaatctgacaagtgtacatacttcatatggcttaattttaacaaaaccatacgtcagaccattgcctcccagttaccttgatgaacggtatcttagtatgccaaaacgcagaaaatttctgactgatagagtagatgcctgttctgatcaagataacgtgtataaaaaatcagtgaaaagattaagatgtggcaaatgcctgaccacctactgtaatgcagaagcacttgaggctcatcttgcacaaaagaaatgtcagacactctttggatttgattcagatgatgaaagtgcctgatgaaaatggttcagaaagatctgtcaatcaagcagtagtgtgaaaaaagcactataagaaaatgcatcatcagtttgctatttccctgatggccttaattttagagtggtcttggattactaaagataaagacaaagcacattttctagaatgaactcacagagatgtgctggcttagactccaaaaggattataaaactcccaaagtaccagttttccagaaaaccacattttacagtttatgatgattaatagcagcagcatgttcagtttcgcttatatgagaaacatgtttaggcaactagtcagaaaaccagctatggccttacagaaagggaaaagtttaacccattattaaaaagtgtgtgtgggaggggggctggtttacaatattaaaccatttaaagtattttattctac

SEQ ID NO: 12596 - protein, 299 aa, Homo sapiens
MQKHLKNHVKKIQRQQIAAAQQDDQEVTALEEINCSSSSISFENGNSDSKDLEVETLTASSEGNKEVIPEHVAEFIEIPISVPEDVIENVIENGSPNNSLNNVFKPLTECGDDYEEEEDEEGDYEEDDYDLNQETSVIHKINGTVCHPKDIYATDQEGNFKCPALGCVRIFKRIGFLNKHAMTVHPTDLNVRQTVMKWSKGKCKFCQRQFEDSQHFIDQLNRHSYPNVYFCLHFNCNESFKLPFQLAQHTKSHRTFQAQCSFPECHELFEDLPLLYEHEAQHYLSKTPESSAQPSETIL

SEQ ID NO: 12597 - DNA, 1853 bp, Homo sapiens
  CDS (35)..(1648)
taggtggcagtcgcaacccatactattcggacagatggcacagaaaccgctgcgcctcttggcttgtggagatgttgaaggaaagtttgatattttattcaatagagttcaagcaattcagaagaaaagtggaaactttgatctgctgttgtgtgtaggaaatttctttggctccacccaagatgctgaatgggaggagtataagactggcatcaagaaagctcctattcagacatatgtgcttggtgctaataaccaggaaacagtaaaatatttccaggatgctgatggatgtgaattagctgaaaacattacttatctgggtcgtaaaggtatcttcactggaagctcggggctgcagattgtgtacctcagtgggacagaatccttaaatgagccagtaccaggttatagttttagtcccaaggatgtgtcttctctgagaatgatgctgtgtacaacctcccagtttaagggtgttgatatcttgctcacatccccatggcccaagtgtgtggggaactttgggaattcttctggagaagtggataccaaaaaatgtggttctgctttggtttccagtcttgccacgggcttgaaaccaagataccattttgctgctttggaaaagacctattatgagaggcttccatatcgaaaccatatcattctacaggaaaatgcacagcatgccacccggtttatagctctggcaaatgttggaaatccagaaaagaaaaagtatctttacgcgttcagtattgttcccatgaagctaatggatgcagcagaactggtaaaacagcctccggatgtcactgaaaacccttacagaaaatctgggcaggaagcatccataggaaagcaaattcttgcccctgtggaagaatcagcctgtcagtttttctttgatttaaatgaaaagcagggaaggaagcgttcatccacaggtagagatagcaaatcttctcctcatccaaagcagcctcgcaaacctcctcagcctccaggaccctgctggttttgccttgctagccctgaagtggaaaaacatttggtggtcaacatcggcacacattgctaccttgccctggccaaaggaggcttatctgatgaccatgtcctcatcctgcctattggacactaccagtcagtggtggagctttcagcagaggtggtagaagaggtggagaagtataaggccactctgagacggttctttaagagtcgagggaaatggtgtgttgtatttgagagaaattataagagccatcacctccagctacaggtcattcctgtcccaatcagctgctctactactgatgacattaaagatgccttcattacccaggcacaggagcagcagatagagctgttggaaatcccagagcactctgacatcaagcagattgcacagccaggagcagcatatttttatgttgaacttgacacaggagaaaagcttttccacagaattaaaaagaattttcctttgcagtttggaagggaggtcctggccagtgaagccatccttaatgttcctgataagtctgactggaggcagtgtcagatcagcaaggaagacgaggagaccctggctcgccgcttccggaaagactttgagccctatgactttactctggatgactaaaacaaagggaagaactttttatgaactccacaggaagtagtaaagcttttttttttttttaattaaaagaattttttttgagacaaagtctcgctctgtcacccaagcaggattgcagtgagccaagatcgctccattgcactccagcctgggtgacagtgaaactccatctcaaaaataaaagaataaaagtatgtctgtc

SEQ ID NO: 12598 - protein, 538 aa, Homo sapiens
MAQKPLRLLACGDVEGKFDILFNRVQAIQKKSGNFDLLLCVGNFFGSTQDAEWEEYKTGIKKAPIQTYVLGANNQETVKYFQDADGCELAENITYLGRKGIFTGSSGLQIVYLSGTESLNEPVPGYSFSPKDVSSLRMMLCTTSQFKGVDILLTSPWPKCVGNFGNSSGEVDTKKCGSALVSSLATGLKPRYHFAALEKTYYERLPYRNHIILQENAQHATRFIALANVGNPEKKKYLYAFSIVPMKLMDAAELVKQPPDVTENPYRKSGQEASIGKQILAPVEESACQFFFDLNEKQGRKRSSTGRDSKSSPHPKQPRKPPQPPGPCWFCLASPEVEKHLVVNIGTHCYLALAKGGLSDDHVLILPIGHYQSVVELSAEVVEEVEKYKATLRRFFKSRGKWCVVFERNYKSHHLQLQVIPVPISCSTTDDIKDAFITQAQEQQIELLEIPEHSDIKQIAQPGAAYFYVELDTGEKLFHRIKKNFPLQFGREVLASEAILNVPDKSDWRQCQISKEDEETLARRFRKDFEPYDFTLDD

SEQ ID NO: 12599 - DNA, 1139 bp, Homo sapiens
  CDS (418)..(1026)
gagtaaaaccgccgcccgggagaagactgaaggagcagttgccgccgttggcggcggcccgagcagttttcgctgctgctacggctgttgccatgaggcgaggctagggaggacctcacttccccggggtgtaataatgttaactgagttatattgggagctagtttcaagatgaaatactaattctaagccagtctatccatatggggatggggaagccttggcattgtcctttttctgataacctttggaccctttgtaatattttatttgacattttatatcctctgctttgtgggtgggggtttagtggttactctcctgcttggaaaaacaaactcagagaagtacctagaacagtgtgaacactcatttcttcctccaacatcacctggggttcctaagtgcttagaagaaatgaaacgggaagccaggactattaagattgatagaagattgacgggtgccaatataattgatgaatctctccagcaagttatccagttttccttgagggattatgtccagtattggtattatacactaagcgatgatgaatcttttcttcttgaaattaggcagactcttcaaaacgcactcattcagtttgctactaggtcaaaagaaatagactggcaaccttattttactacacgcattgtagatgactttggcacacacttacgagtattcagaaaggctcaacagaaaataacagagaaagatgatcaagtgaaaggtacagcagaagatcttgtagataccttctttgaagttgaagttgaaatggagaaggaggtttgccgtgatctagtgtgcacttcccccaaagatgaagaaggattcctaagggatttgtgtgaggtcttactatatttattgctacctcctggagatttccagaacaagatcatgcgatactttgtcagggaaatccttgcacgaggaattcttcctccattaataaatcaactcagtgatcctgattatattaatcagtatgtcatatggatggtaggtgccttttaaaattacaactctgttttagaaataatttttgaaatgtaaaaatatagttgggagatagggtgtttaagcagtaatttattaaagaaattaagtaaaaatgtttctgaagt

SEQ ID NO: 12600 - protein, 203 aa, Homo sapiens
MKREARTIKIDRRLTGANIIDESLQQVIQFSLRDYVQYWYYTLSDDESFLLEIRQTLQNALIQFATRSKEIDWQPYFTTRIVDDFGTHLRVFRKAQQKITEKDDQVKGTAEDLVDTFFEVEVEMEKEVCRDLVCTSPKDEEGFLRDLCEVLLYLLLPPGDFQNKIMRYFVREILARGILPPLINQLSDPDYINQYVIWMVGAF

SEQ ID NO: 12601 - DNA, 1750 bp, Homo sapiens
  CDS (114)..(1481)
agtggccggaacccttgagaccagaggcttaccatgctgctccctaggagggccgggaactgctgacgtgaccactggacagttattcgtgtctcttacaattaccaaacagaatggacaagcttaataaaataaccgtccccgccagtcagaagttgaggcagcttcaaaagatggtccatgatattaaaaacaatgaaggtggaataatgaataaaatcaaaaagctaaaagtcaaagcacctccaagtgttcctcgaagggactacgcttcagagagccccgctgacgaagaggagcagtggtccgatgactttgacagcgactatgaaaatccagatgagcactcggactcagagatgtacgtgatgcccgccgaggagaacgctgatgacagctacgagccgcctccagtagagcaggaaaccaggccggttcacccagccctgcccttcgccagaggcgagtatatagacaatcgatcaagccagaggcattccccacccttcagcaagacacttcccagtaagcccagctggccttcagagaaagcaaggctcacctccaccctgccggccctgactgctttgcagaaacctcaagtcccacccaaacccaaaggcctccttgaggatgaggctgattatgtggtccccgtggaagataatgatgaaaactatattcatcccacagaaagcagttcacctccacctgaaaaagctcccatggtgaatagatcaaccaagccaaattcctcaacgcccgcctctcctccaggaacagcttcaggtcgaaacagtggggcctgggaaaccaagtcacctccaccagctgcaccatccccgttgccacgggccgggaaaaaaccaacgacaccactgaagacaactccagttgcctctcaacagaatgcttcaagtgtttgtggagaaaaacctatacctgctgaacgccaccgagggtcaagtcacagacaagaagctgtgcagtcaccagtgtttcctcctgcccagaaacaaatccaccaaaaacccatacctctgccaagatttacagaagggggaaacccaactgtggatgggcccctacccagcttttcatctaattccactatttcagaacaggaagctggcgttctctgcaagccatggtatgctggagcctgtgatcgaaagtctgctgaagaggcattgcacagatcaaacaaggatggatcatttcttattcggaaaagctctggccatgattccaaacaaccatatacactagttgtattctttaataagcgagtatataatattcctgtgcgatttattgaagcaacaaaacaatatgccttgggcagaaagaaaaatggtgaagagtactttggaagtgttgctgaaatcatcaggaatcatcaacatagtcctttggttcttattgacagtcagaataacacaaaagattccaccagactgaagtatgcagttaaagtttcataaagggggaaaaaaaagatcaataccattgcttcagacactttcccaaagtttctccttttgagaaaaagtcccaaaacttcatattttggattatgaatcatccagtaataaaatggaagatggagtcagctattgaagtggtcatccatttctttttaagaagctcatgtggacttgttctattgcctgacctgatgaactgttaatatctggtgaggttgagttatcatgctactaatattttccaaataaatatttttattttt

SEQ ID NO: 12602 - protein, 456 aa, Homo sapiens [sequence omitted]

SEQ ID NO: 12603 - DNA, 1718 bp, Homo sapiens
  CDS (285)..(1427)
aaccaattgcaccacgaccggatggaagagcccagctgacacaaccaagacgagtctcagtgtctagggaagcttggggttctgctccttttacttcaggcgaacctgaactcagttaatgcaattttgaagcatgccctgaatagattcagtcattatcaagtcaaactaaaaacggtgaaaggttgcgactattaccaaataggaaaaacctgaagacataagaactacacatgaggaatatgtcatttagcactttcactttttgatctccacagaagacaatgagaagtcataccataacaatgacgacaacttcagtcagcagctggccttactcctcccacagaatgcgctttataaccaatcatagcgaccaaccgccacaaaacttctcagcaacaccaaatgttactacctgtcccatggatgaaaaattgctatctactgtgttaaccacatcctactctgttattttcatcgtgggactggttgggaacataatcgccctctatgtatttctgggtattcaccgtaaaagaaattccattcaaatttatctacttaacgtagccattgcagacctcctactcatcttctgcctccctttccgaataatgtatcatattaaccaaaacaagtggacactaggtgtgattctgtgcaaggttgtgggaacactgttttatatgaacatgtacattagcattattttgcttggattcatcagtttggatcgctatataaaaattaatcggtctatacagcaacggaaggcaataacaaccaaacaaagtatttatgtctgttgtatagtatggatgcttgctcttggtggattcctaactatgattattttaacacttaagaaaggagggcataattccacaatgtgtttccattacagagataagcataacgcaaaaggagaagccatttttaacttcattcttgtggtaatgttctggctaattttcttactaataatcctttcatatattaagattgggaagaatctattgaggatttctaaaaggaggtcaaaatttcctaattctggtaaatatgccactacagctcgtaactcctttattgtacttatcatttttactatatgttttgttccctatcatgcctttcgattcatctacatttcttcacagctaaatgtatcatcttgctactggaaagaaattgttcacaaaaccaatgagatcatgctggttctctcatctttcaatagttgcttagatccagtcatgtatttcctgatgtccagtaacattcgcaaaataatgtgccaacttctttttagacgatttcaaggtgaaccaagtaggagtgaaagcacttcagaatttaaaccaggatactccctgcatgatacatctgtggcagtgaaaatacagtctagttctaaaagtacttgaggtaaacatactaaaatgaattatataatgcagcctcttaattctttgaagaactaaaaaattaggaaacaaagttctagcatttacaaaactcagatctcaaagctctgcttgtatttgtgatatttcatttgcttaactgtaaaccatttcaaggtactatcttttaaatctgtatgtaaaatcttttcaaaatacatttttaagctaatactcttaacatagattatgaagttaagtgaaatttatggctctaacagcaaaataattaaagtgccatagtttctc

SEQ ID NO: 12604 - protein, 381 aa, Homo sapiens
MRSHTITMTTTSVSSWPYSSHRMRFITNHSDQPPQNFSATPNVTTCPMDEKLLSTVLTTSYSVIFIVGLVGNIIALYVFLGIHRKRNSIQIYLLNVAIADLLLIFCLPFRIMYHINQNKWTLGVILCKVVGTLFYMNMYISIILLGFISLDRYIKINRSIQQRKAITTKQSIYVCCIVWMLALGGFLTMIILTLKKGGHNSTMCFHYRDKHNAKGEAIFNFILVVMFWLIFLLIILSYIKIGKNLLRISKRRSKFPNSGKYATTARNSFIVLIIFTICFVPYHAFRFIYISSQLNVSSCYWKEIVHKTNEIMLVLSSFNSCLDPVMYFLMSSNIRKIMCQLLFRRFQGEPSRSESTSEFKPGYSLHDTSVAVKIQSSSKST

SEQ ID NO: 12605 - DNA, 1680 bp, Homo sapiens
  CDS (224)..(778)
agagagctgtttactaggcacgactgcgaaggcaagggggcaccagctcaggactgcatctgcctgccatttcccttccactcctcctttctggagtctgacattagaaagccagcgagaaggaagattcaaacaaccaaccctgatttcctgcttctccttttcatgagtgttcctgtggtctctgcacctcctttctgtcccccggcagagggcagtagagatggccggcccaaggcctcggtggcgcgaccagctgctgttcatgagcatcatagtcctcgtgattgtggtcatctgcctgatgttatacgctcttctctgggaggctggcaacctcactgacctgcccaacctgagaatcggcttctataacttctgcctgtggaatgaggacaccagcaccctacagtgtcaccagttccctgagctggaagccctgggggtgcctcgggttggcctgggcctggccaggcttggcgtgtacgggtccctggtcctcaccctctttgccccccagcctctcctcctagcccagtgcaacagtgatgagagagcgtggcggctggcagtgggcttcctggctgtgtcctctgtgctgctggcaggcggcctgggcctcttcctctcctatgtgtggaagtgggtcaggctctccctcccggggcctgggtttctagctctgggcagcgcccaggccttactcatcctcttgcttatagccatggctgtgttccctctgagggctgagagggctgagagcaagcttgagagctgctaaaggcttacgtgattgcaagggttcagttccaaccatagtcagaggtggcacatctgctcagccatctcattttacagctaacgctgatctccagctccagcgatggaacccactacagaggaggtggggcccctgtgtcaaagaggccgaggggcagcaagggcagccagggcacctgtgacttcttagtacaagattgtctgtccttcaggacttccaaggctcccaaagactccctaaaccatgcagctcattgtcacaccaattcctgctttaattaatggatctgagcaaatcttcctctagcttcaggagggtggggagggagtgattgccgtcatggggccagacttccaggctgatttgccaaatgccaaaatgaaacctagcaaagaacttacggcaacaaacgaggacattaaaagagcgagcacctcagtgtctctggggacatggttaaggagcttccactcagcccaccatagtgagtgggccgccataagccatcactggaactccaaccccagaggtccaggagtgatctctgagtgactcaacaaagacaggacacatggggtacaaagacaaggcttgactgcttcaaagcttccctggacctgaagccagacagggcagaggcgtccgctgacaaatcactcccatgatgagaccctggaggactccaaatcctcgctgtgaacaggactggacggttgcgcacaaacaaacgctgccaccctccacttcccaacccagaacttggaaagacattagcacaacttacgcattggggaattgtgtgtattttctagcacttgtgtattggaaaacctgtatggcagtgatttattcatatattcctgtccaaagccacactgaaaacagaggcagagacatgt

SEQ ID NO: 12606 - protein, 185 aa, Homo sapiens
MAGPRPRWRDQLLFMSIIVLVIVVICLMLYALLWEAGNLTDLPNLRIGFYNFCLWNEDTSTLQCHQFPELEALGVPRVGLGLARLGVYGSLVLTLFAPQPLLLAQCNSDERAWRLAVGFLAVSSVLLAGGLGLFLSYVWKWVRLSLPGPGFLALGSAQALLILLLIAMAVFPLRAERAESKLESC

SEQ ID NO: 12607 - DNA, 1787 bp, Homo sapiens
tttgttttgagcaataaactaatacaaaatgatggccattcatgtgcagctctttgtcaccatgggccggatgagttgtgctcctcctggctcaccatttccccctgctcccccacagccggttctgcacttatcaccgagtcgcccctggaagcagattcccattgagttttccccaccaaggggaccatgcacatggtagaaacattagattctgcattgacagtagcctttccttggcccgggcctgtggtgggaagacgggcaacaagtataccccaccagggcctgagtgactagaggaagagggcgaggccttgttggcactagatttgggtattttctgcatgtcataacatatcctaactgctatttcagaagaggcagcttgtaggtgattgtacaagtgagaattaaagagagaacagatatttaaacaggtgctgtattagtaacagccagtgccctttcagcccttgcatctattaaaaggagattcaggattttattggcacaggcccttcttagtaggaagaaagggtgcttagctttggacctgaccgggtgtgtgtaaaaccatggactgagtcacagcagacactcgatggtggtaaatgtgatgggtgcttacacactgtaccttttcctttcatactgatgctgcagttcagggctggagttgttaaggcattgacctccacccacctgccccatgtccactgggctgcccaagctgcatgtcacctgagggctggcaggaaggggcgagaaatcccagggcattgtaccaaggacctagttccttctagggatataaatttccaggaatgtgtatttttaatgtggtgagatgcactcttttgttgtaccaaatagggctccccaccccacccctgcgacaagtgctcttctagaacaggttcctaccagcagcactggtgtgaatgaaagagagacccagccgcgtctcacacaggtggaattgcacttcttaacaaaaaggaactttataaaagtttgggattttttttcctaatcataaaaatagccccagaaagagcctaagctatgttcagatagaagcctcgaaattcctgtaaattgtttactttatgatgtttacatacacgtttcactttgaaaaaaaatgcaaatcgactttttaacaactgttgagatgtttcatgggacagtagaactctgactcaccaactgggctaaattttaatttaaaaatgtatttatttgagtgtctttccccccctcaccctcaccatctgaggggctccctgagatcttggtagaggaggcccctcctgcccagaccttcgtttgtttccccggtggcccttgcttcttgctttgcagactgcctgcagccatgattttgtcactgacatctgtgagccaaagactgagcctttttggcaggaataataagcaatactacacaacttgctactttcagaaaacttttttttagcttcaccgatgacaacagaggaagaagggaactgggatttgggtaagttctcctccactgtttgaccaaattctcagtgataaatatgtgtgcagatccctagaagagaaaacgctgactttctttttaagtgtggcacataaggatctgcagaattttccgtagacaaagaaaggatcttgtgtatttttgtccatatccaatgttatatgaactaattgtattgttttatactgtgaccacaaatattatgcaatgcaccatttgttttttatttcattaaaggaagtttaatttaaattgg

SEQ ID NO: 12608 - DNA, 1953 bp, Homo sapiens
tggttatgggctttgtttctggagctcagacagtccttagtttgaatcccaaatctgtccttacctccgataagcctcactaaagctcactaaacctctgtccccttatctgccaattggagataatcatgatatttaatcctatggagtgctgtgaggattaactaaaacaatgcatttgaagttcttggcactatgtctggcatggaggtatatgactatgatttgtaaattgcaatgcttctgagatggcagtagagggagcagagtcaatgggaactggacttcagaaaattagcaagattgatattaaacccttttacaagacaatgttcctgttctgatggagctagagcaacctgcacacagatgagtcgatgagattcacaccaggccatcttatcccaataatccttgctgtcccactcatgtggtactagcagatgcaaccagggaactcaacgcatctttctgcgtgtacatattgtctgtccaacctccaactccagctcaccccagtttcctcagaacacttaagaggggagaggagaagtatggtgatatcacaaaactgaaactagcaaatgtttatattctttgtacaaaaattgggagaaggtggagctggtttacctcccttacagcggcaagagtgatatcctctctcttcctctctctgtttcccacaaaagcagctccactgggcagagtgggaaaagcacaatcagaaccgattttgaatccaccctgtcttctatttacaactgtgaacctgcctatcccacccagactctcttcatctccatttccgctctgtacagcaaggtggcagggaagctggagggttaacctggtgagtgccaaagttacccataacttgtttattattctattattaacagctattgattcagcatttaacctgatcccatttcttacattatatctttgacttttcccagcaatttcaggtgggacataatatccccacttttatagacagggagttttggggttagagaagttaggtaacttatacaactttgtgccactagaaattgacacaccagaactagaagctacttttctgaaagtctttaatctgggattttcttcttagcatgatgcagcaaaaaattagatatagggcttatcaccagggcaactgggtggctgtttgagaaaggagacaggaatctgtgggggcctttgaatttggaaaaccttccaggggtttcattttagcatttggtttgttcttcattttacttcgaatttttttatgtctttgtctctgagggactgacaaggccagggccagtgtagggtcaagaaactgcagacctgcttatttagttttgattctaaaaaagagaaacaaattggacatagaagcgccctttcttagatgtcttcctccactcatgaaatacagaaggaagacagaggttcaaggcagaagatttaaccaagaaaaaagtgcgtatttgggcagagagtccctcatgatagacatctctggataaacgagttacagttggcagcatatggcaaatagagcagaggttctctaagtgttacctgcagatccctgggagtggtccccgagatctttttagagcatctgcaaggttaaactatttttataataatactaatacagttttgtcttttcaccctgctgacatttgcaccaatggtaccaaagcaaaggtgggtgaaactgttggggccttagcacaaagcaaggaagtggtgccaaattatactagcagttgtatatttcaccaccatgcacttacaataaaatgccagtttgacttaagaatgtttttgatgaagcagtaaaaattattaattttattaaatctcagaccttaagtacacgtctttttaatattctttgtgatgaaatggaaaaggcacatattaaaggatgatggtcatctcgag

SEQ ID NO: 12609 - DNA, 2533 bp, Homo sapiens
  CDS (7)..(324)
ttatcaatgctttttaatgtgtttttacccttgcctcactgtgtgtgtgtcactttctataatataaagaaatactataatatttctagagtctggaactgtcaccatgatgaatggccctttcaatgcatagttacagaaattcctgaagattccccaggacttcaatttcattggtttttatttgcagtttttagttgctgtaattgttgctgtttccagtctaaaggacctcctttggtaaaggtgaacaagacctctcccctatgctacccagccagattttgtgtgtgtaatgggctggcccaagagtgttcttttacttagaactccttttgattttgcttttctctgcccctagaaattttagggacaaagacattttggaaattgtcagttacttttagaaagaaaacactgcagaaatatttaacagattacttcttgataaaatttaaatgggattatatgaatttataatgccaattgaaaatattatatacacaaaatttgctattttcacttaaagtaagcatttttaaaggatttattttagaatacaatctatgcaatcctcgaactcagtgtgcttttccctgacaggatatataaaaaggtagattaggtcaaccctcctttaagcttactctcccctcaccttttcttttcactgtatataaacggtactttctgtgattcataccaacagaggactttctgtgattcataccaacagtcctaaactgtcattttctaaatctgggatttaaaatctttagacaatatttaaaatcttgattttttttaaatgtcagcagatacaatttggaagattgcatctgtgtagaagtaatgcaggtacaagatctagagtttttccttagactctttagtcttttctgaattaaagaataagtgctcttaaatccatattttatcctgtcaaagtctgaaatgtgttcattgatgatttggtgacatctaaaaaattgtatttagttggcttggctcacccctcttaaaaatacttagccatctcttggtgggatgtggtgggggtattaaggtctcagagttatttattttctcacctaatttcaaacctttataaacttggggttttgttgttgatggtggtagtattttttgttaagttgtttaaaaggctgacttgattggagcctcctctactttttcttgagggttgcaagtattgtatggtgggggaggggggccttaaggcaaactgtctaaaaagtgactatccaattaatttaactagtaaattagtaagaattattcttagtattcattcagagtttaagatgtgaaaaatctgcactttgtttatcactctaaatgtaaagaactttttgatagtgttatttcaccactccctcagttaaaggctattatttaaactgtttactggagaaaatcctcgctcatgtccatttattgtttttttctgtactgtgatttgtttcaagcttaggaaaactagtatattagagtatgttctaggaaattaaaagatctggttagagtaaaaagttctttttaaggttcttaactaattttttcacaactaagaaaataaatgaagtattcttaggctgaaattcatcttattttatcataaattagattgtaggggcagcctacatttttgtgtatgtgtttttatttcttaaatgattgtgtgagcctggtgactttttatggttcttgtgatctaaactgtttttccaattcacatcttttgtcgtgaagtgatattatactagagtactgtttgcattgtaaaaatgctttgctggtgctctggcattttgtctttatctcatcacctaatttaaaaacccagcacttgataatataactgacagaaatgattgtacccactgatgaagtaatgaaaatgaagaaaaggaaaatattccttccttcaatggcgtaagtttattttttacttaagtggcatctatgtaagttagacaaactatatattaaaattggtaaactttgaatgtttctcctgttttgattcttagattatgaggaggatcagacagaataagactccacacttttgaaatttgataagtcaaaacgttttattttgacatttttaacattgtgaattattcgatatttgtaatctctgtatgtatatgaaactctgccatgtttttcaactttgcctatgtgccactgtatataagaaaggacagctattttgatcttcatcagcattgccttcagctgaaaatttgggaacagttcacagtaaacctctcagtagtttgcaaactgaggtacctgcagaaaccatagctactcaccaaaatacacagattaggtgcatggtatcgtggaaattatttggtaaaaaaacacacacacaaatctatgtgtactgtattttaaggaatatctacaggtgcagctttgattttgaacagaattccaaataatttactgttgtacccaccagaatctagaaaatgtgaattaaagtacatgtttctgc

SEQ ID NO: 12610 - protein, 106 aa, Homo sapiens
MLFNVFLPLPHCVCVTFYNIKKYYNISRVWNCHHDEWPFQCIVTEIPEDSPGLQFHWFLFAVFSCCNCCCFQSKGPPLVKVNKTSPLCYPARFCVCNGLAQECSFT

SEQ ID NO: 12611 - DNA, 2028 bp, Homo sapiens
  CDS (603)..(1580)
aacacaccaagatgagactggtcctaatttttcctctgcgaatatggttttctgattaactactagttatgtctatgccaaaaaaagaaacatgctcagaccacggtttttgcctccagatgaccgaactgtacgtgaaggtgagagaaaagctgccaagctgcattttagtcagttgggcaacagtgaaaattttcttttagaggtggaaaaaagctctagggagaagacaatgaaaaactgtgtaacaggtgagagctctgcatcaaaagtcagtgctaatgttgacagcaggattgaaatggaaagagtcttgctctgtcgcccagactggagtgctgtggcgcgatctcggctcactgcaacctctacctcctgggttcaagcagttctcctgcctcagcctagcgagcagctgggattacagactcaaacaaaggactttttattcccttccccaaccgggaaataaaggattccctaagtacttctgcaactcagggcaatggtacacgtgatcagaaattagacaccttcccactggggacacagagttcagacactactcgcctcgtcagtccacagtccgatccccagagaagatgactagagaagggtaccaagtatcttttttggacaataagtcttcaggttcttctccagaaaaggaattgataccaaaacctgatacttttcatcttacccatgatgcctcattgagtaaatgcctggatgtgggtgattctagccagatccatccctatcagttaccttcagatgttggtctggaaaattatgacagttgttattctcaaactctatccctgcatggaagtcttggtaaaaggcctcagagaagcaagaactatcaagagtatagcataaagccttcaaatgacataaagaccaccgcttcacattcctgtggagacttattaacttctctgtcaaaccctgactccagcactggaaggcttttgaagcttagttcagatctgtatgccacaacccatttcaacagtgaccctgctgtacttgtcaatgtagagcaacaattatctaccagcctggatgatttaacaccagcacatggttctgtcccaaacaacgctgtcctgggaaacaggacaactcctctgcggacactgctgttgtctcctgggacttcagaacacagaaagatttttaccaagaggtcactaagcccatcgaagagaggattcaaatggaaggacaatatccttgccaacctgaatctaaagcatggtttccaagatgctacaggcagcgagcctctctctagtgacctgggtagtttgcacggtttggctggaaaccacagtccccccatctctgccagaaccccccatgtggccactgtcctcagacagctcctggagcttgtggataagcactggaatggctccggctccctcctcctcaacaagaagtttctcggaaagtttgaagcaaaaactggtcagagtgctggaggaaaacctcattttgtcagaaaaaattcaacagttggaggaaggtgctgccatctcaattgtgagtgggcaacagtcacatacttatgatgatcttctgcacaaaaaccaacagctgaccatgcaggtggcttgcctgaaccaggagcttgcccagctgaaaaagctggagaagacagttgccattctccatgaaagtcagagatccctggtggtaactaatgagtatctgctgcagcagctgaataaggagccaaaaggttattccgggaaagcgctcctgcctcctgagaagggtcatcatctggggagatcatcgccctttgggaaaagcacgttgtcttcctcctcaccagtggcacatgagactggtcagtatctaatacagagcgtcttggatgctgccccagagcctggcttatagagctagcatggaactcacaccacagcttccctggtccacagaggctctcaccgccattgccaccagtatggtggtatgtactcacaaagattaagaaagaaatgtattctg

SEQ ID NO: 12612 - protein, 326 aa, Homo sapiens
MTREGYQVSFLDNKSSGSSPEKELIPKPDTFHLTHDASLSKCLDVGDSSQIHPYQLPSDVGLENYDSCYSQTLSLHGSLGKRPQRSKNYQEYSIKPSNDIKTTASHSCGDLLTSLSNPDSSTGRLLKLSSDLYATTHFNSDPAVLVNVEQQLSTSLDDLTPAHGSVPNNAVLGNRTTPLRTLLLSPGTSEHRKIFTKRSLSPSKRGFKWKDNILANLNLKHGFQDATGSEPLSSDLGSLHGLAGNHSPPISARTPHVATVLRQLLELVDKHWNGSGSLLLNKKFLGKFEAKTGQSAGGKPHFVRKNSTVGGRCCHLNCEWATVTYL

SEQ ID NO: 12613 - DNA, 1855 bp, Homo sapiens
  CDS (164)..(676)
atactaaaattggaacgatacagagaagattagcatggcccctgcgcaaggatgacacgcaaattcgtgaagcgttccatatttttgatccatccggattggaaacacagccttttctactagactcttgcctgtcagaggagctgttgaatgtttatttgaaatgggctttgaagagggagaaacacatctcatctttcctaaaaaagcttcagtggagcagctgcaaaaaattcgtgacctgattgccatagagagaagtagcagactggatggctcaaataagagccacaaagtaaagtcatctcagcaacctgcagccagtacccagcttcctacaacaccatcttcaaatcccagtgggttaaaccagcacacaaggaaccgtcaagggcagtcatcagatccaccatctgcttcaacggttgctgctgactcagccattctagaagttcttcagtccaacattcagcatgtgctggtctatgaaaatcctgctcttcaggagaaagcgttggcttgtattccggtccaagaactaaaaaggaaatcacaagaaaagttatcgagagctagaaaattggataaagatataataaccctgagaaacttttggaaacaagatgtggacggtgtggcgagtgggccaattgttttacactgtgctgccgagctgtagggtttgaagctcgctatgtttgggattacgcagaccatgtctggacagaagtctattctccttctcagcagcggtggctgcactgtgatgcatgtgaagatgtctgtgacaagccactcctttatgaaataggatggggcaagaagctttcctatgtcatagcattttcaaaagatgaggtagttgatgtcacttggcgatattcctgcaaacatgaagaggtgattgccagaagaactaaggttaaagaagcattacttcgagacactattaatgggcttaataagcagaggcaactgtttttgtcagaaaacagaaggaaagaacttctccagaggataattgtggagcttgttgaatttatatctcccaaaacccctaaacctggagaacttgggggaagaatatctgggtcagtggcttggagagtagcccgaggtgaaatgggtctacagagaaaagaaaccttgtttattccctgtgaaaatgagaagatttctaaacagctccacctttgttacaatattgtgaaagatcgttatgttcgagtttcaaataacaatcaaaccatttctggatgggagaatggcgtgtggaaaatggaatctatattcagaaaagttgaaacagactggcacatggtatatttggcccgaaaggaaggatcatcttttgcttatatttcctggaagtttgagtgtgggtcagttggcctaaaagtagatagcatttctattagaacaagtagtcaaacttttcagactggaacagtagaatggaaattgcgatctgatacagcacaagtagaactgacaggcgataacagtcttcactcctatgctgatttttctggtgccactgaagttattttggaagcagaattaagcagaggagatggtgatgtcgcttggcaacacacccagctgtttagacaaagcttaaatgaccatgaagaaaattgtttggagataattataaaattcagtgacctttgagaacctgaacattatagaaaagctggcaataatcaaggacttactgaagtagtctgttggttcagtgcatgcttagttggcagttaccaccctgtgctagcatatttcttttgctagctatccatcatgtaaccctcatgaaaattatctttatacgtggactataataaaatattgaatt

SEQ ID NO: 12614 - protein, 171 aa, Homo sapiens
MGFEEGETHLIFPKKASVEQLQKIRDLIAIERSSRLDGSNKSHKVKSSQQPAASTQLPTTPSSNPSGLNQHTRNRQGQSSDPPSASTVAADSAILEVLQSNIQHVLVYENPALQEKALACIPVQELKRKSQEKLSRARKLDKDIITLRNFWKQDVDGVASGPIVLHCAAEL

SEQ ID NO: 12615 - DNA, 1762 bp, Homo sapiens
  CDS (54)..(1544)
gcgccctcgccgcggacaccggagctgcggccgctccccgctgtcccccagagatggcagatcctgaggtagttgtgtgtagctgcagctctcatgaagaggaaaatcgctgcaattttaaccagcaaacatctccatctgaggagcttctattagaagaccagatgaggcgaaaactcaaattttttttcatgaatccctgtgagaagttctgggctcgaggtagaaaaccatggaaacttgccatacaaattctaaaaattgcaatggtgactatccagtacttgcagctatacaatgtctccgttgggaatcatgcttatgagaacaaaggtaccaagcaatctgctatggcaatctgtcagcacttctacaagcgaggaaacatctaccctggaaatgatacctttgacatcgatccagaaattgaaactgagtgtttctttgtggagccagatgaaccttttcacattgggacaccagcagaaaataaactgaacttaacactggacttccacagactcctaacagtggagcttcagtttaaactgaaagccattaatctgcagacagttcgtcatcaagaactccctgactgttatgactttactctgactataacatttgacaacaaggcccatagtggaagaattaaaataagtttagataatgacatttccatcagagaatgtaaagactggcatgtatctggatcaattcagaagaacactcattacatgatgatctttgatgcctttgtcattctgacttgcttggtttcattaatcctctgcattagatctgtgattagaggacttcagcttcagcaggagtttgtcaattttttcctcctccattataagaaggaagtttctgtttctgatcaaatggaatttgtcaatggatggtacattatgattattattagtgacatattgacaatcattggatcaattctaaaaatggaaatccaagctaagagtctaactagttatgatgtctgtagcatacttcttgggacttctaccatgctcgtgtggcttggagtcatccgatacctcggtttctttgcaaagtacaacctcctcattttgacccttcaggcagcgctgcccaatgtcatcaggttctgctgctgtgcagctatgatttacttaggttactgcttctgtggatggatcgtgctggggccttaccatgacaagtttcgttctctgaacatggtctctgagtgccttttctctctgataaatggagatgatatgtttgccacgtttgcaaaaatgcagcaaaaaagttacttagtctggctgtttagtagaatttacctctactcattcatcagcctctttatatatatgattttaagtcttttcattgcactgatcactgatacatacgaaacaattaagcaataccaacaagatggcttcccagagactgaacttcgtacatttatatcagaatgcaaagatctacccaactctggaaaatacagattagaagatgaccctccagtatctttattctgctgttgtaaaaagtagctatcaggtttatctgtactttagaggaaaatataatgtgtagctgagttggaacactgtggatattctgagatcagatgtagtatgtttggagactgttattttgagctaattgagacctataattcaccaataactgtttatatttttaaaagcaatatttaatgtctttgcaactttatgctgggattgtttttaaaaaaactttaatgagg

SEQ ID NO: 12616 - protein, 497 aa, Homo sapiens
MADPEVVVCSCSSHEEENRCNFNQQTSPSEELLLEDQMRRKLKFFFMNPCEKFWARGRKPWKLAIQILKIAMVTIQYLQLYNVSVGNHAYENKGTKQSAMAICQHFYKRGNIYPGNDTFDIDPEIETECFFVEPDEPFHIGTPAENKLNLTLDFHRLLTVELQFKLKAINLQTVRHQELPDCYDFTLTITFDNKAHSGRIKISLDNDISIRECKDWHVSGSIQKNTHYMMIFDAFVILTCLVSLILCIRSVIRGLQLQQEFVNFFLLHYKKEVSVSDQMEFVNGWYIMIIISDILTIIGSILKMEIQAKSLTSYDVCSILLGTSTMLVWLGVIRYLGFFAKYNLLILTLQAALPNVIRFCCCAAMIYLGYCFCGWIVLGPYHDKFRSLNMVSECLFSLINGDDMFATFAKMQQKSYLVWLFSRIYLYSFISLFIYMILSLFIALITDTYETIKQYQQDGFPETELRTFISECKDLPNSGKYRLEDDPPVSLFCCCKK

SEQ ID NO: 12617 - DNA, 1682 bp, Homo sapiens
  CDS (449)..(949)
cattaatgttgggcagggaaacaggagctgtcagactgagagggccagggatgttcattgtggagattaaatgttctgagtaagtgagtttgtagacattttcttgtaagaaaatgttccatgctttactctgttttggacattttcttttgaaaaattttgagatagaaaccttaatatcatttcatatatttacagcacatagttaatttgagtagagtcaaattaatcttactttagaatttgattactaagtattagcatggataataatgcttcttttgcttaaatgtaaaaattaggccgttttactaggtgtactttgtcttaatcatattcctatttttttatacagctgtgcaaccatattgcttctgggaaaaaatgtcaatatgtgggaaactgttcctttgctcatagtcctgaggaaagagaagtttggacttacatgaaggagaatgggatacaagatatggagcaattttacgaactatggctcaagagtcaaaaaaatgaaaaaagtgaagacatagccagtcagtcaaacaaggaaaatggaaaacaaattcacatgccaacagattatgctgaagttacagtggactttcactgctggatgtgtgggaaaaactgcaacagtgagaagcagtggcagggccacatctcctccgagaagcacaaagagaaggttttccacaccgaggacgaccagtactgctggcagcaccgcttcccaacaggctatttcagtatttgtgataggtatatgaatggcacctgcccagaaggaaacagctgtaaatttgcacatggaaatgccgaacttcatgaatgggaagaaagaagagatgccctaaagatgaagctcaacaaagcacgaaaagatcacttaattggcccaaatgataatgactttggaaaatatagttttttgtttaaagatttaaactaatatgctggcttttatgtatgatacctaatcagagcattgaccagaaaaattgaaagtgttctgaggcacatagcagaggagctgcagatttcctgcttgtattggcgtatatcgttcctcctgagcagcaacccacagtaggtaggaaaatgggctgtttcacaggcctggccacgctctcacggaaccactggcatcagatggtgaagtgactgctacccggttgccatctgttgaacagacttttggatgaagtgtgttggggaagaggataaggttatatctaggacaactctttgagttggtccttcatataagaatcgtgacggtaagagaataaacacttgtactgggatcagaatacatgatggatgaaattctttacatgttttagcagaatgaatttgtttaatataataaagtttgctacttatctgtatgtaggttgctaaaaaggattttcttaactcagattttaagccaaataaccatttaacactagtatttgttaaatggggtatttttctgtatttgtatgtttcactataataagggaattaaggataatgtgcattgagaatattttgaaaaataattgactcaaattttatttcttggtcttttgctgtttaaatgatgattttgaaagattaaacctgtactgttggtattgtgttagtgtatggaccaatactgcctgtaataaagattttatatatagatgcctttc

SEQ ID NO: 12618 - protein, 167 aa, Homo sapiens; identical to SEQ ID NO: 10522

SEQ ID NO: 12619 - DNA, 1258 bp, Homo sapiens
  CDS (21)..(854)
aatacttgctggtctgatccatgcacaaggcggggctgctaggcctctgtgcccgggcttggaattcggtgcggatggccagctccgggatgacccgccgggacccgctcgcaaataaggtggccctggcaacggcctccaccgacgggatcggcttcgccatcgcccggcgtttggcccaggacggggcccatgtggtcgtcagcagccggaagcagcagaatgtggaccaggcggtggccacgctgcagggggaggggctgagcgtgacgggcaccgtgtgccatgtggggaaggcggaggaccgggagcggctggtggccacggctgtgaagcttcatggaggtatcgatatcctagtctccaatgctgctgtcaaccctttctttggaagcataatggatgtcactgaggaggtgtgggacaagactctggacattaatgtgaaggccccagccctgatgacaaaggcagtggtgccagaaatggagaaacgaggaggcggctcagtggtgatcgtgtcttccatagcagccttcagtccatctcctggcttcagtccttacaatgtcagtaaaacagccttgctgggcctgaccaagaccctggccatagagctggccccaaggaacattagggtgaactgcctagcacctggacttatcaagactagcttcagcaggatgctctggatggacaaggaaaaagaggaaagcatgaaagaaaccctgcggataagaaggttaggcgagccagaggattgtgctggcatcgtgtctttcctgtgctctgaagatgccagctacatcactggggaaacagtggtggtgggtggaggaaccccgtcccgcctctgaggaccgggagacagcccacaggccagagttgggctctagctcctggtgctgttcctgcattcacccactggcctttcccacctctgctcaccttactgttcacctcatcaaatcagttctgccctgtgaaaagatccagccttccctgccgtcaaggtggcgtcttactcgggattcctgctgttgttgtggccttgggtaaaggcctcccctgagaacacaggacaggcctgctgacaaggctgagtctaccttggcaaagaccaagatattttttcctgggccactggggaatctgaggggtgatgggagagaaggaacctggagtggaaggagcagagttgcaaattaacaacttgcaaatgaggtgcaaataaaatgcagatgattgcgcggctttg

SEQ ID NO: 12620 - protein, 278 aa, Homo sapiens [sequence omitted]

SEQ ID NO: 12621 - DNA, 1763 bp, Homo sapiens
agagtatgctgaagttattgctgtcaggtgcgtttgccatatactcagggacctgggtcccttccttcttagtctccatcttctccaggagccagaaaaaaaggagagagagagcatcaggtggcactgtttatgggcctttcatggaagtgacacctggggttacttctgcttatgttcctttggacagaattcagttgaatggtcatactagaggcattgtgccaggctttgcagcataaaaagaagttagagacagggactttggatccaagtcctccctgactcaaaacccagagaggcagaggatgcttgccacctttgactagtcctatctcctccaaagggtccttttgatttattagcaagaagccatcttctgaccacaaagacaagatttcaaagttctcacccagttcctagctaaagatgtccaaagagacttctaagccaatgattttcaacaaggaaattgaagttgtatgctttgaagagaggggcttgattgggtggcatcttatgcttaagtgtgcatggaagagccatcctacatgcagcatgtgatgggcccccagggactgaggacttgtgtatgactgggagtctacgcagcttggcttcatatcagttcttgccatctcggatccaaatgctctccaggcatgaagtcatttcctccaagagatttgaagatgccccagaagaatcttaggctaaggtcactattcttaagctaaggtcactattcttattcctctgagaaaggtgaaaggtgggttgggtgcagtggctcacgcctgtaatcccagcactttaggaggtcgaggtgggtggatcacgaggtcaagagatcgagaccatcctggccaacacggtgaaaccctgcctctactaaaaatacaaaacttagctgggcatggtggcacgtgcctgtagtcccagctacttgggaggctgaggcaggagtcgcttgaacccaggaggctgaggttgcagtgagctgagatcgcaccactgcgctccagcctggtaacagagtgagactccacctcaacaacaacaacaacaaaaaggtgaaaggtgtttgatggatgaaaatagagctgaaccctaacttgtaaccacccaattttaactagaggttgtcaccaagtaagagatgcccatcgaccttgtgcacaaagctggcgctagtctatgaactgttggtgaagtcacactatgaaacaacgtctctaccacccattcccataccatcagccatcctgctctggcgtatgagcaggggaattcttttccgtcctctctgaaggaacgaatagtctgaaatattgaattggaaaaatgctcaaggcatccattctactctcgtgggccccatgtagttatctgttgaaggcctcggatgtgccagagacaattcatttgttgtcattagttccccccacaaccctcagaagtgagtataccttcatgtcacagatgagattatgttcaaaacggtttagaagctgctcaaggtcacatacccactaggtgacagatttgaatccagaattgtactcctcaacacagagcccccttctcactatgccggagatgctgagtttcttggcctgggctgcagccccacacagccggttttgagctccccaggtgaatctactgggctccctgggctgagaaccactgctctacatcagccttcttacatgaatcaggggttttattccgccttgcatcacaggttcctttagggaagt

SEQ ID NO: 12622 - DNA, 1819 bp, Homo sapiens
gtaccaatgcataatcatctatggggtcgcctgggactacaagtacctgactctgaaagtcaaagcttcctacaggaaaataaacactcacatcctaaaggttccagaaacagatgaggtagagctcacctgccaggctacaggttatcctctggcagaagtatcctggccaaacgtcagcgttcctgccaacaccagccactccaggacccctgaaggcctctaccaggtcaccagtgttctgcgcctaaagccaccccctggcagaaacttcagctgtgtgttctggaatactcacgcgagggaacttactttggccagcattgaccttcaaagtcagatggaacccaggacccatccaacttggctgcttcacattttcatcccctcctgcatcattgctttcattttcatagccacagtgatagccctaagaaaacaactctgtcaaaagctgtattcttcaaaagacacaacaaaaagacctgtcaccacaacaaagagggaagtgaacagtgctatctgaacctgtggtcttgggagccagggtgacctgatatgacatctaaagaagcttctggactctgaacaagaattcggtggcctgcagagcttgccatttgcacttttcaaatgcctttggatgacccagcacttaaatctgaaacctgcaacaagactagccaacacctggccatgaaacttgccccttcactgatctggactcacctctggagcctatggctttaagcaagcactactgcactttacagaattaccccactggatcctggacccacagaattccttcaggatccttcttgctgccagactgaaagcaaaaggaattatttcccctcaagttttctaagtgatttccaaaagcagaggtgtgtggaaatttccagtaacagaaacagatgggttgccaatagagttattttttatctatagcttcctctgggtactagaagaggctattgagactatgagctcacagacagggcttcgcacaaactcaaatcataattgacatgttttatggattactggaatcttgatagcataatgaagttgttctaattaacagagagcatttaaatatacactaagtgcacaaattgtggagtaaagtcatcaagctctgtttttgaggtctaagtcacaaagcatttgttttaacctgtaatggcaccatgtttaatggtggttttttttttgaactacatctttcctttaaaaattattggtttctttttatttgtttttaccttagaaatcaattatatacagtcaaaaatatttgatatgctcatacgttgtatctgcagcaatttcagataagtagctaaaatggccaaagccccaaactaagcctccttttctggccctcaatatgactttaaatttgacttttcagtgcctcagtttgcacatctgtaatacagcaatgctaagtagtcaaggcctttgataattggcactatggaaatcctgcaagatcccactacatatgtgtggagcagaagggtaactcggctacagtaacagcttaattttgttaaatttgttctttatactggagccatgaagctcagagcattagctgacccttgaactattcaaatgggcacattagctagtataacagacttacataggtgggcctaaagcaagctccttaactgagcaaaatttggggcttatgagaatgaaagggtgtgaaattgactaacagacaaatcatacatctcagtttctcaattctcatgtaaatcagagaatgcctttaaagaataaaactcaattgttattcttc

SEQ ID NO: 12623 - DNA, 2201 bp, Homo sapiens
  CDS (4)..(456)
atcatggcgtcaatgcagaaacgactacagaaagaactgttggctttgcaaaatgacccacctcctggaatgaccttaaatgagaagagtgttcaaaattcaattacacagtggattgtagacatggaaggtgcatcaggtaccttatatgaaggggaaaaatttcaacttctatttaaatttagtagtcgatatccttttgactctcctcaggtcatgtttactggtgaaaatattcctgttcatcctcatgtttatagcaatggtcatatctgtttatccattctaacagaagactggtccccagcgctctcagtccaatcagtttgtcttagcattattagcatgctttccagctgcaaggaaaagagacgaccaccggataattctttttatgtgcgaacatgtaacaagaatccaaagaaaacaaaatggtggtatcatgatgatacttgttgatgccactgttatcatcctcctagcagaagatagtcctactgagaaaatgagcactttgatcattcagtctttgaactttaacctttgactggaagtgacctataggcaatgaagactacttccttttactgcatttttactcgtgtgcattctgggcgcatgttgatcgctggttcagtccaggcaactgacatgcttttattagtcatacagtattaatgcaggtgtcaggaaatgtcaaatataattccattttttatttttatttttttaagctcttggaaaagctccaggtcctcatgtattgtgcaataacaatgacttccttggcggttttggtacgttcattgccggcaatgggcgttgtaacaggaaaagttttcattaactcctgccattcaatgattaatgcatgatagggcctatgaaatgaacttactggttatagtgggaatataaataaagtgagggatccaacattactttaaaagtcaccccaactgtttatatttggattccatgcactgtgatcctaaggttaacagcatgaattaacatgcgtctttaaaggactgtaatgaaagatcattgcatatttattgaattgtttatatctactgtcaagttgttttgacatggaagattttcaagtaacattggcagagaggtacagtatgttatccctatggtgaaaataaattaatttgttgtatatagttcctcaatctctgaagtaaaggtatgagtaatatagggtatgaatggtttaatcaaggctttattttggaagtaagaaaaatggcagtgatgattaaattgctgcagtccataatttgggcttgttatttgtacattaaagattttttccaagtaagttacactctgttaacttcctgctagccatcagcatgagccctactgcctaaacactatttcatttatttatgtttggaaaccccgtaaacatttttgtttgcaatcttgtttcttttgttataagtcaagtttgaatgttacaatacttttattgaaacttttgttaagttttttcttgtaaattttctttacttgtgagtatcatcttgtcctttaatcctgtaccctaaaataagaaatacatttttgacagaggcttaatgttttaacaaaagagtgtggacatttttattttaaaatttaggcaaaagtcactatcaaatggttgcttatttgtctcacacagccatatagtttttcctggagggttttgttttgttgttgttgaaaagactttgcttacagctagatgaaactttctatagaaaaaaaaaattgttgaaaggtccagttctcagtaccatgtgagttaatgatactacaactaagttctttttaaaaagtgattaatgtattttataaattaccttttcacatatgcaaaatctgtttctactacaatgttatttttactaatgccttattgttgcactctttttgaaatatcctgcagtgaatatatgaatcaatttgggcttaaaactgaaagccagttggctgaaaggtttgaaatacgtaccccagtaaaaccattcaatcaataattggtaaataatattttaaaattgtttttaatctgtatagatgacattttgtagctttgtacatgttgttaattaagggcatataattttacactcaaagtataattgctgaactcaggggtgggtagacttcaaaaatatgtctgctatagaaataacttg

SEQ ID NO: 12624 - protein, 151 aa, Homo sapiens
MASMQKRLQKELLALQNDPPPGMTLNEKSVQNSITQWIVDMEGASGTLYEGEKFQLLFKFSSRYPFDSPQVMFTGENIPVHPHVYSNGHICLSILTEDWSPALSVQSVCLSIISMLSSCKEKRRPPDNSFYVRTCNKNPKKTKWWYHDDTC

SEQ ID NO: 12625 - DNA, 1775 bp, Homo sapiens
  CDS (4)..(1338)
gagatgaaggtgaagatgctgagccggaatccggacaattatgtccgcgaaaccaagttggacttacagagagttccaagaaactatgatcctgctttacatccttttgaggtcccacgagaatatgtaagagctttaaatgctaccaaactggaacgagtatttgcaaaaccattccttgcttcgctggatggtcaccgtgatggagtcaattgcttggcaaagcatccagagaagctggctactgtcctttctggggcgtgtgatggagaggttagaatttggaatctaactcagcggaattgtatccgtacaatacaagcacatgaaggctttgtacgaggaatatgtactcgcttttgtgggacttcttttttcactgttggtgatgacaaaactgtgaagcagtggaaaatggatgggccaggctatggagacgaggaagagccattacatacaatattaggaaagacagtgtatactgggattgatcatcactggaaagaagctgtttttgccacatgtggacagcaagtagacatttgggatgaacaaagaactaatcctatatgttcaatgacctggggatttgacagtataagtagtgttaaatttaacccaattgagacatttctcttgggaagttgtgcatctgacaggaatatagtactgtacgatatgaggcaagctactcctttgaaaaaggttatcttagatatgagaacaaatacaatctgttggaaccctatggaagctttcatttttacagcagcaaatgaagattataacttatatacttttgatatgcgtgcactggacactcctgtaatggtccatatggatcatgtatctgcagtgcttgatgtggattactctcccactgggaaggagtttgtgtctgctagtttcgataaatctattcgaatctttcctgtagacaaaagtcgaagcagggaggtatatcatacaaagagaatgcaacatgttatctgtgtaaaatggacttctgacagcaagtatattatgtgtggatctgatgaaatgaacattcgcctgtggaaagctaatgcttctgaaaaattgggtgtgcttacatcacgagaaaaagcagccaaggattataaccagaaattgaaggagaaatttcagcattatcctcatataaaacgtatagctcgtcatcgacatctaccaaaatctatctatagccagattcaggaacagcgcatcatgaaagaagctcgtcgacgaaaggaagtgaatcgtattaaacacagcaagcctggatctgtgccacttgtgtcagagaagaagaaacacgtagtggcagttgtaaaataattggtattcctaacaatcctgatgtataattatttgttacttttgatttgagaactctacaaataaaagtgctgggactagattaattgcaaacattttagttatatgtgtagagctttattgttactccttttagctaccctgaaaaatgatccttaaaggtggcctagttggtaagactgttttatccttaatctgcattcttctttcattgtagaatacagtatttgcaactcattttttcttgtttttattacagatatacttactttctctttgatctattattgtagacactatacattcaaattgacatttaagaccaaacatctcttatgttatctttaatattactttgaataatgattgcaatgatgtttcttcctgtgattccacataacatttagaataatgatgtcaattttttacaactg

SEQ ID NO: 12626 - protein, 445 aa, Homo sapiens
MKVKMLSRNPDNYVRETKLDLQRVPRNYDPALHPFEVPREYVRALNATKLERVFAKPFLASLDGHRDGVNCLAKHPEKLATVLSGACDGEVRIWNLTQRNCIRTIQAHEGFVRGICTRFCGTSFFTVGDDKTVKQWKMDGPGYGDEEEPLHTILGKTVYTGIDHHWKEAVFATCGQQVDIWDEQRTNPICSMTWGFDSISSVKFNPIETFLLGSCASDRNIVLYDMRQATPLKKVILDMRTNTICWNPMEAFIFTAANEDYNLYTFDMRALDTPVMVHMDHVSAVLDVDYSPTGKEFVSASFDKSIRIFPVDKSRSREVYHTKRMQHVICVKWTSDSKYIMCGSDEMNIRLWKANASEKLGVLTSREKAAKDYNQKLKEKFQHYPHIKRIARHRHLPKSIYSQIQEQRIMKEARRRKEVNRIKHSKPGSVPLVSEKKKHVVAVVK

SEQ ID NO: 12627 - DNA, 2261 bp, Homo sapiens
aacaaatatgaatattgttacatcacctctgactctctgactagtaagaaactatgcatttccatacccaatgaaacctcaattcctacagcaattctacttttattgcctcccaagaactatttcttcatggtcaatatcactctttaaaagctagcaaaatatgactttcttctgaggtttgggcaatctggatcaatatttatgtatctaaccacttgaaaggctgtctccttttttggccttttaaattaaaacttccataaaatgaagcaaaatatgaaaacagctagttgatttatcaataatgtgaaaccctccttctgaatttttttggtaaaaattaccacactgaaaccaaaacttaaccttggcttggactctcagatagattgcttttgtattctttgactacaaagtattctcaaaaagaagaaattatttctgatggtagatcaaactctagccaagaaggtctagataaactagaggactgtataattatctaaagtaattcagggggacttttagaaaaattctttaatttttgttcctgtgtaaaaattattattaatggatggcagcccaaattactattcttcttttaaaatttgtttcaagtgtgtcaccaggcactcataaaattcatttatttgttatataactcaatgacctgaaataataggtgctcattgctttttcatttgatccttaaaaacaattttattctgtctaaaaaaattctcctgctaaaatccaaatgattacctggctataggaggagtcccattttatgaacatgtatgaaatatttagttggattcagatgaaatgcaacttagagaaaggaatggataccagtagagaagatggaaagagacacaaaaatcagactttgcttacatcaaaattaggtctgttgtctaatcctgttaacctagaggcaagctgaaaatagatggtaaggataaatagatttttaaacacagtatttatatttaacagaatgtcataaaaatgacagaatgccatgaaattcagcatgtcaaaactttgataaaacaaacaagaaatttaataaatatgctaattagagtgaatatttaaagggacaaaaataacttgtcacatcatagatgtctccccagtgcagaatttattatctgctgggaaaatttggttttatgtcttcaatcaatatttgctgcattatctaattaaacattagtatattttttgtgctaatgagaaaccatgcaagagtccaaatatcaagtgtggtgacagcttgaatcagttgagtttggtgttcatgaataaaattcttgatgaatgtgaaatgaatggtttatatacgtaagttttatgtgcagtaaattaattaggctttaaaacttgttagcatgcttagctcctcttttttccattgaattatcttcctatcttccttccttccttcctttccttcctttccttccctccctctttgctttatttctttctagctcttataagataaatgacaatagtactttactatttgggctggagcctccctttttcactttcacatgattgaacactttgtggatttgtgagaaaaggggaaagaagatgagcacgtagatgcagatcagttgaggatagaagtgactgagagaattgggaccttgacttccagagactgtcagtcaagagaaatgtgggtctataaaaatctatgtgtgttcattttcattgaatttaaacactttttcaagaagtatcagggtcaatctgtttggacaatctcctatttttacccccttacaaatgtcttaagttagaaaaacctcttattttcaagtagtcatttttttttatgtgagtaccacactgctaaagactgaaatagaaaaaaaaaatgctttttctgtttgtagggaaattgctttctgaaaactactcccaataagatgtatacatcaaatgcaacttgattttactggctctttatctagagataactgatgcactgtcttctttcttagatacccttctgtaattcagcttggcatagtatgatgttttgagttcttattgagggtttggaaacatttgtcatcaattttatgtctactctattgaaaaagcaatatacaatgtattccatatttcttagctctgtgtctttgaggttttaaacctatattcagatagctgtttttagctacaattttgagtattcaccagaatttacaaattgccattttattaaatac

SEQ ID NO: 12628 - DNA, 1703 bp, Homo sapiens
  CDS (123)..(794)
ttctgcaaaccgagagccccgaatccacagagctccaaagtagactccgccagctgagcctgctctgggaagcagcacagggcgcagtggacagctggagagggggcttacgacagtcgctcatgcagtgccaggacttccaccagttgagtcaaaatctgctgctgtggttagcgagtgccaagaaccggaggcagaaggctcatgtcaccgatccaaaggcagacccccgggctctcctagagtgtcggagggaactaatgcaactggaaaaggagctggtagaacgtcaacctcaagtggacatgttacaggagatttcaaacagccttctcattaagggacatggagaagactgtattgaagctgaagaaaaggtgcatgttattgagaagaaactcaaacagttacgggagcaagtgtcccaagatttaatggccttgcagggaacccagaacccagcctcacccctgcccagcttcgacgaggtagactcgggggaccagcctcctgcaacatccgtgccagctccccgagcaaagttcagagcagtgagaactacagaaggcgaggaggagacagagagcagggtccccggcagcacacggccacagcgctccttcctctcaagggtggtccgggcagccctacccctgcagctgctcctcctgctgctgctgctcctggcctgcctgctgccctcctccgaagaagactacagctgcactcaggccaacaactttgcccggtccttttaccccatgctggggtacaccaatgggccaccccccacatagagggcatagctggccacagtgctacaccacctgcctgattgccaagggtgcccagcacgtggccccagaccaatctgagtgacttagtgttggcaaggtcccgggacctgtgcagacttcttctgggcttacacagcacgggctccctggagcccagggcagctttcagattgtgttcctccccaggagcagggaacctgtgtggcaggtgccccgggtactttggcagaactagttgattagtttagggatctctggaaatgtcagtttcctgaagagccaagcactttgtgaattctggtttgtttgtaaaacagcattattataatgtaggtatggtcaatgagcagtggtgtccatcacatatattatagaagcaagcgagcacattccaccctagaaatggttcagaaactcataggcacccttagctgatggaaacaatcaatcatatttaatacgcttagaatcagttttactccaatcagctggcaattttgagctgccggttatacaccaaaatgttctgttcagtacctagctctgctcttttatattgctttaaatttttaaagaaattatattgcatggatgtggttatttgtgcatattttttaacaatgcccaatctgtatgaataatgtaaacttcgatttttttttaaaaaaattagattttagctggagcttttgactaatgtaaagtaaatgccaaactaccgacttgatagggatgtttttgtaagttaattttctaagactttttcacatccaaagtgatgctttgctttgggttttaactgtttggccacggcgggggtgggggcggggggttggtacagaaacttgaagctgtttgtgatatgtacaactcagatgtttctcattaaaaaacaaaattagccag

SEQ ID NO: 12629 - protein, 224 aa, Homo sapiens
MQCQDFHQLSQNLLLWLASAKNRRQKAHVTDPKADPRALLECRRELMQLEKELVERQPQVDMLQEISNSLLIKGHGEDCIEAEEKVHVIEKKLKQLREQVSQDLMALQGTQNPASPLPSFDEVDSGDQPPATSVPAPRAKFRAVRTTEGEEETESRVPGSTRPQRSFLSRVVRAALPLQLLLLLLLLLACLLPSSEEDYSCTQANNFARSFYPMLGYTNGPPPT

SEQ ID NO: 12630 - DNA, 2204 bp, Homo sapiens
  CDS (102)..(1565)
agaaaaatgtacatgactcccagtgtctgtggaaacatgattgaagacattataagcgagtgcgtgtgacctataaggaaagtctcattggtagaagagacatgcatggtagaaaggatgatgcacaaaagcagcctgttaaaaatcagcttggattaaacccgcagtcacatctaccagaactgcagctatttcaagctgaagggaaaatatataaatatgatcacatggaaaaatctgtcaacagtagttccttagtttccccaccccaacgtatttcttctactgtcaaaacccacatttctcatatatatgaatgtaattttgtggattcattattcacacaaaaagagaaagcaaatattgggacagaacactacaaatgtaatgagcgtggcaaggcctttcatcaaggcttacattttactatacatcaaataatccatactaaagagacgcaatttaaatgtgatatatgtggcaagatcttcaataaaaaatcaaaccttgcaagtcatcaaagaattcatactggagagaagccatataaatgtaatgaatgtggcaaggtcttccataatatgtcacaccttgcacagcatcgcaggattcatactggagagaaaccatataaatgtaatgaatgtggcaaggtctttaatcaaatttcacaccttgcacaacatcaaagaattcataccggagagaaaccttataaatgtaatgaatgtggaaaggtcttccatcaaatttcacaccttgcacaacatcggacaattcatactggagaaaaaccttacgaatgtaacaaatgtggcaaggtgttcagtcgcaattcctaccttgtacaacatctgatcattcatactggagagaaaccttacagatgtaatgtatgtggcaaggtcttcagtcacaagtcatccctagtaaatcactggagaattcatactggagagaaaccttacaaatgtaatgagtgtggcaaggtcttcagtcacaagtcatccctagtaaatcactggagaatccacactggagagaaaccttacaaatgtaatgaatgtggcaaggtcttcagtcgcaattcataccttgcccaacatctgataattcatgccggtgagaaaccttataagtgtgatgaatgtgacaaagcattcagtcaaaattcacatcttgtacaacatcacagaatccatactggagagaaaccttacaaatgtgatgaatgtggcaaagtcttcagtcaaaattcataccttgcatatcattggagaattcatactggagaaaaagcttataaatgtaatgaatgtgggaaggtcttcggtctaaactcatccctagcacatcatcggaaaattcacactggagagaaacctttcaaatgtaatgaatgtggcaaagcttttagtatgcgttcaagcctcactaatcatcatgcgatccacactggagagaaacatttcaaatgtaatgaatgtggcaaactcttccgcgacaattcatatcttgtacgtcatcagagatttcatgccggaaagaaatctaacacatgtaattaatgtggcagagtgttcagttagcattaaagccttgtaagacatacaataatttatactggagaaaaactttgcaagtataatgaatgtagcagagcctttagtttttgttcaaggcttaataaccgttagctagaccatagaggacagaaactttactaatgtactgaatgtggcaaggtcttaaggtaaaatctgagaccaggatttttcaaagaattcttgctggtgagaaacctaacaaatgtaatgaatgtggcaaggtcttctggcacaattctcacattgtacaatattgcaaaaattcatgcttgagagaaacaaaaacactgagagtgggaaaccattatgacttcaaacattcatcaacatcagagaatccatactaaagagcatttataataattatatgtgatagagattttccgcaggccaaagtctcactaggcatcaaaaacttttttgatgaaaccatacaaatgtaacgtgcatgcttaagcttttacccaggcatcaaaaccggaacatcacagggtttatacaggagagtaactacacaaagataatgtaataagcctttcagtgtaatattcatgattttgtcgtgagagatccactcaataaaaaccaggcaaatgt

SEQ ID NO: 12631 - protein, 488 aa, Homo sapiens
MHGRKDDAQKQPVKNQLGLNPQSHLPELQLFQAEGKIYKYDHMEKSVNSSSLVSPPQRISSTVKTHISHIYECNFVDSLFTQKEKANIGTEHYKCNERGKAFHQGLHFTIHQIIHTKETQFKCDICGKIFNKKSNLASHQRIHTGEKPYKCNECGKVFHNMSHLAQHRRIHTGEKPYKCNECGKVFNQISHLAQHQRIHTGEKPYKCNECGKVFHQISHLAQHRTIHTGEKPYECNKCGKVFSRNSYLVQHLIIHTGEKPYRCNVCGKVFSHKSSLVNHWRIHTGEKPYKCNECGKVFSHKSSLVNHWRIHTGEKPYKCNECGKVFSRNSYLAQHLIIHAGEKPYKCDECDKAFSQNSHLVQHHRIHTGEKPYKCDECGKVFSQNSYLAYHWRIHTGEKAYKCNECGKVFGLNSSLAHHRKIHTGEKPFKCNECGKAFSMRSSLTNHHAIHTGEKHFKCNECGKLFRDNSYLVRHQRFHAGKKSNTCN

SEQ ID NO: 12632 - DNA, 2579 bp, Homo sapiens
  CDS (28)..(1242)
aagttggaggtaggggcctgtggaaacatgaagagggtaaacagctgtgtgaagagtgatgagcatgtcctggaggagctggaaacagaaggggagaggcagctgaaaagcctccttcagcatcaacttgatacttctgtctccattgaggaatgtatgtctaagaaagagagctttgctcctggtactatgtacaagccctttgggaaggaagcagctgggactatgactttgtcccaattccagacactgcatgagaaggaccaggaaactgcttctctcagggaattagggcttaatgaaacagaaatcttgatctggaagagccatgtttctggtgaaaagaagacaaaactgagggcaactcctgaagcaatacagaaccgtcttcaagatattgaagaaaggatctcggagcgtcagcgcattctttgcctgccacagagatttgcaaagagcaaacagctgacccggcgagaaatggaaatagaaaagtctttatttcagggagctgatcgtcactccttccttaaggctctttattaccaagatgaaccccaaaagaagaacaaaggtgatcccatgaacaacctggaaagtttttaccaagagatgataatgaaaaaacgtcttgaagagtttcaacttatgagaggtgaaccctttgcttcccactcactggtctcagctacatcagtgggtgatagtggcacagctgagagcccatcattactccaggacaagggaaaacaggcagcacagggtaaaggccccagtctccatgtggcaaatgttattgatttttcacctgagcagtgttggactgggcctaagaagctgacgcagccaatagaatttgtcccagaagatgaaatccagagaaatcgtttgtcagaggaagagatccgaaaaattcctatgttttcttcatataatccaggggaaccaaacaaggtattatacctgaagaaccttagccctcgggtgactgaaagagatcttgtgtcattgttcgctcggttccaggagaaaaaaggacctccaattcaattccgaatgatgactggacgaatgaggggccaggcttttatcacctttcccaataaggagatagcatggcaagcattgcatctagtaaatggatacaaactacatgggaaaatattggtgatagagtttggaaagaacaaaaagcaacggtcaaatctccaagcgacttctctcatatcatgtgctacaggttgaagaagctgagtggaagcaaaactgtcttgtactaaagaactgactccagatggtaagacaaatccacaggaacaaatggagagaacgtgaaataggaaataagtttaatataaaaaaactataaacatatacttactcttctctcagcttcttttaaagatgtaaaattatattaagtaattataataatgtgtgttgggtttgtaatgtataggaataacatatataacaataataccacaaagcgggggatgggtttatataggaatagggttgttacattggaattaagttagtgtttatctgaagcctattctgtttagttaagatgtgtatggtaagccctagagcaaccactgaggaaataacttttaaaaaatcaaaaatattattaaatgtaaatatcacattatgaaataatgcaaaagaaggaatggagaagcaaaaagcttgaggcatatcaaaaacaataaaatggcagtcataagtcttcctatatcaaaataacaatgtgcatggattaagcaatactataaaaggcagagatgtcagaaacaagtctgattccacttcatgccatctatttgagacacactttagaagatagaaagagattaaaggtaaaaggatggaaaacaaatatatcacacagacaacagccataagaaagctggagtggctattctaataccggacaaaatagacttaaaaaaatgttactggagataaagagtaaaatgttacaatgataaaagggtcaatacatcaggaagatgtaacaactataaatatatatgcatctaacagtagagcccaaaatacatgaagcaaaaactgaaaggaaaggagaaacagataagtccataaaaagagttggaatattcaatacccctttttcaataatagagcacctagacagaagataaaccaggaaatagaagacttgaacaacattataaggcaaattgacctaaaagacatctatagaactttccacccaacatcagaatacatattcttctcgagtgcatatgaaacatctccaaaataggtcataagttaaagcataaaacaagccttaataaatataagtagactgaaatcatgcaaagcatgccctctgaccacatgggatgaagttagaaaacaatgaaaagttgggaaactcacaaatatgtggaaatcagacacacttgtaagtgactggctgggtgcagtagctcacgcctgaaatctcagcactttggtaggccgaagtgggaggattccttggatcccttgagaccaggaattcaagaccagcctgggcaacacagcaagaccctgtcattacc

SEQ ID NO: 12633 - protein, 405 aa, Homo sapiens
MKRVNSCVKSDEHVLEELETEGERQLKSLLQHQLDTSVSIEECMSKKESFAPGTMYKPFGKEAAGTMTLSQFQTLHEKDQETASLRELGLNETEILIWKSHVSGEKKTKLRATPEAIQNRLQDIEERISERQRILCLPQRFAKSKQLTRREMEIEKSLFQGADRHSFLKALYYQDEPQKKNKGDPMNNLESFYQEMIMKKRLEEFQLMRGEPFASHSLVSATSVGDSGTAESPSLLQDKGKQAAQGKGPSLHVANVIDFSPEQCWTGPKKLTQPIEFVPEDEIQRNRLSEEEIRKIPMFSSYNPGEPNKVLYLKNLSPRVTERDLVSLFARFQEKKGPPIQFRMMTGRMRGQAFITFPNKEIAWQALHLVNGYKLHGKILVIEFGKNKKQRSNLQATSLISCATG

SEQ ID NO: 12634 - DNA, 1935 bp, Homo sapiens
  CDS (179)..(1120)
acacaaccttggacattagagcctgtccgtctgatctagagaaggaatgttgctggggaaggaaaactcagggcgaggtgagagaggacagaacctctaaccaggaagaggctgtccccgccaagctccggagaggcgcggaagcatgaccctcaggtggtaacagaaaacaatccagatggggtgcaggtgctgtaaaataatacaaagctatctctttgatccagtccaagtgccctctcctggctatgtcaatgaagtcaacagctgcaagctagatgaagacgacactgataaattaaaaggcaaatggagcagtgaagtcttggtgcagaaaaatgaccctcagaggcagggctcaaagaagactgagagcagcagcaggacagctgatccatgggagccctgctggcctcaccaagggccgctcccacagggggacgctggaggggaacaccatgcctgcggtgtcaacggcatcggccctgctgccactccacagcccactgggaattccagccccacccaggatgacaggggctcctgggccagtactgcaaatactgttcccccaactcaacccttcctggaaggagggggcaccaggaaacaggactgtgtgctgctggcctcagaagggacccaagtcatgagaaatggagactccagagctccttctgaggcagaaagttttgccttggaagtacaagaccatgtcttccagataccagccccagattaccttcagcactggggcccagctggagacaacgttgatcataatgaaaaggactgtgttttcaagaaccatactgaggatgaatccctagagggaattcagcccccagtgggggagcatggtttgaatacgcccttctctgtgaggagaagctgggattcattgaatgaggatgtggaaacagaagttctaagcatctgctttaatgagaagggtcctgttcatgccatgcctgtggttgactcaggaaacaggcagggggatacccatggctccgatggagatggggatggggagattgtggacgaggatgcagcggtggcggaggcccttgcagctttagaagctgctactgcaggagaagatttggatgagactgattaggggaggggatttgcacagggaggtaagctggtgtcatgctgagcatgcagatgcatttgctccctggatgcatagcaggtgattctgccagcatgcaccagtgcagccttaccagttgtttacatccagcatctgttctgattgtcagcatctgtcccatgctgcttgtcacatatctggagtttcactctgtgtagatgagctgtcattcaggacactaggagaaaaatctgagtgggtcattgtgcccatatccacagaaaatgcagaagttgaacagcttgcttgacaaccctcaaacatctttgagcacctggtacagatgtttatgagaatactctaagatctcaacccttgatcccaaaggcacacaatcacagagcattccttttgactgtaaactgtttaccttgcttttgagagccaaacattgtacccaacctggaaaaagtaactaccccaattaaagtgcctcatgtgtccccagagcatggcttaacttcagggacaatcacccagggaactaataactaaccagttgttcaacagcgggttaagctcagcagttttcacagtagagcagaagtccccaggaaacaaagggttagtcattagctgagatgttgattttaaaacaccttgaccttaacttttttacattattacttttaaatctcctttgggattggggaggctggccaaaataagtcttaaaactgcttatgtcatatttggattttaagttcatgacattcggaacagcaaagccatatatgcaatgtttttatgccattaaatgtctgattccaatt

SEQ ID NO: 12635 - protein, 314 aa, Homo sapiens
MGCRCCKIIQSYLFDPVQVPSPGYVNEVNSCKLDEDDTDKLKGKWSSEVLVQKNDPQRQGSKKTESSSRTADPWEPCWPHQGPLPQGDAGGEHHACGVNGIGPAATPQPTGNSSPTQDDRGSWASTANTVPPTQPFLEGGGTRKQDCVLLASEGTQVMRNGDSRAPSEAESFALEVQDHVFQIPAPDYLQHWGPAGDNVDHNEKDCVFKNHTEDESLEGIQPPVGEHGLNTPFSVRRSWDSLNEDVETEVLSICFNEKGPVHAMPVVDSGNRQGDTHGSDGDGDGEIVDEDAAVAEALAALEAATAGEDLDETD

SEQ ID NO: 12636 - DNA, 2435 bp, Homo sapiens
  CDS (171)..(1985)
ctgaaaaccttgtgcagcgagatggtgacttcctagttcgtgactctctgtccagccctgggaactttgtcctgacctgtcagtggaagaacctcgctcagcacttcaaaatcaaccggacagttctgcgactcagcgaggcctacagccgcgtgcagtaccagttcgagatggagagcttcgactccatccccggcctggtgcgctgctacgtgggcaaccgccggcccatctcccagcagagtggcgccatcatcttccagcccatcaacaggacggtgcctctgcggtgcctggaggagcattatggcacctccccaggccaggcccgggagggcagcctcaccaagggaaggccggatgtggccaagaggctgagcctcaccatgggtggcgtccaggcccgagagcagaatttgcccaggggaaacctcctcagaaacaaagaaaagagtggtagccagcccgcctgcctggatcacatgcaggacagaagagccttgtccctcaaagcccaccagtcagagagctacctgccgattggctgcaagctgccacctcagtcctcgggtgtggacacaagcccctgcccaaactcacctgtgttcaggacgggaagcgagcctgccctgagcccggcagtggttcggagggtctcctcagacgccagggctggggaggcgctgaggggatcagacagtcaactgtgccctaagcccccgcctaagccctgcaaggtgccgttcctcaaggttccctcgtctccctctgcctggctcaactcagaggccaactactgtgaactgaacccagcgtttgccacaggctgcggcaggggagcaaagctaccctcatgtgcccagggaagccacacagaactgctcacagccaagcagaatgaggcgccaggtccccggaactctggcgtcaactacttgatccttgatgatgatgacagggaaagaccttgggaacctgcggcagctcagatggagaaggggcagtgggacaagggcgagtttgtgacgcccctcctggagactgtctcctccttcaggcccaacgagtttgagtcaaagttccttccccctgagaataagcccctggaaacagcaatgttgaaacgtgcaaaagaactgttcaccaacaacgaccccaaggtcatcgcccagcacgtactgagcatggactgcagggttgctaggatacttggagtctctgaagagatgaggaggaacatgggggtgagctcaggcctggaactcattaccttgcctcacggacaccagctgcgcctggacataattgaaagacacaacacaatggccatcggcattgcagtggacattctgggatgcacgggcactttggaggaccgagcggccactctgagtaagatcatccaggtggcggtggaactgaaggattccatgggggacctctattccttctcagctctcatgaaagccctggaaatgccacagatcacaaggttagaaaagacgtggactgctctgcggcaccagtacacccaaactgccattctctatgagaaacagctgaagcccttcagcaaactcctgcatgaaggcagagagtccacatgtgttcccccaaacaatgtatcagtcccactgctgatgccgcttgtgacgttaatggagcgccaggctgtgacttttgaaggaaccgacatgtgggaaaaaaacgaccagagctgtgaaatcatgctgaaccatttggcaacagcgcgattcatggccgaggctgcagacagctaccggatgaatgctgagaggatcctggcaggttttcaaccagatgaagaaatgaatgaaatctgcaagactgaatttcaaatgcgattgctatggggcagcaaaggtgcacaagtcaatcagacagagagatatgagaaattcaaccagattttaactgccctctcgcgtaaattggaacctcctcctgtaaagcaggcagagctttgataactctccagagaacctttagaatatcttttcaagtttccccagcttcatctttgggaaagcttactgtttttgataaagtaataatgtgcaaatctgacaatatacaagcttttagtatccacaggatattaaacgtgtaaattgcacagagcacacttatttatgaattgtctaaagttactactgattttaaaatgaataatttattattaaggtaactactgctaatgttgatcagcaaatttaagagaagacctagctatgttggctggttgctttctattatcatggtatttgaccattttagttttaattccatgtcagataagtgtaaatagaagagtttaaaagcatgaaacatttcagaaggtatcagttatatgatattctttaaacaaatatgaaaaatgtaaatactcatgaatgaaaatacatctttttgtg

SEQ ID NO: 12637 - protein, 605 aa, Homo sapiens
MESFDSIPGLVRCYVGNRRPISQQSGAIIFQPINRTVPLRCLEEHYGTSPGQAREGSLTKGRPDVAKRLSLTMGGVQAREQNLPRGNLLRNKEKSGSQPACLDHMQDRRALSLKAHQSESYLPIGCKLPPQSSGVDTSPCPNSPVFRTGSEPALSPAVVRRVSSDARAGEALRGSDSQLCPKPPPKPCKVPFLKVPSSPSAWLNSEANYCELNPAFATGCGRGAKLPSCAQGSHTELLTAKQNEAPGPRNSGVNYLILDDDDRERPWEPAAAQMEKGQWDKGEFVTPLLETVSSFRPNEFESKFLPPENKPLETAMLKRAKELFTNNDPKVIAQHVLSMDCRVARILGVSEEMRRNMGVSSGLELITLPHGHQLRLDIIERHNTMAIGIAVDILGCTGTLEDRAATLSKIIQVAVELKDSMGDLYSFSALMKALEMPQITRLEKTWTALRHQYTQTAILYEKQLKPFSKLLHEGRESTCVPPNNVSVPLLMPLVTLMERQAVTFEGTDMWEKNDQSCEIMLNHLATARFMAEAADSYRMNAERILAGFQPDEEMNEICKTEFQMRLLWGSKGAQVNQTERYEKFNQILTALSRKLEPPPVKQAEL

SEQ ID NO: 12638 - DNA, 1719 bp, Homo sapiens
  CDS (179)..(1618)
agaggcgcggcgtgactgagctacggttctggctgcgtcctagaggcatccggggcagtaaaaccgctgcgatcgcggaggcggcggccaggccgagaggcaggccgggcaggggtgtcggacgcagggcgctgggccgggtttcggcttcggccacagctttttttctcaaggtgcaatgaaagccttccacactttctgtgttgtccttctggtgtttgggagtgtctctgaagccaagtttgatgattttgaggatgaggaggacatagtagagtatgatgataatgacttcgctgaatttgaggatgtcatggaagactctgttactgaatctcctcaacgggtcataatcactgaagatgatgaagatgagaccactgtggagttggaagggcaggatgaaaaccaagaaggagattttgaagatgcagatacccaggagggagatactgagagtgaaccatatgatgatgaagaatttgaaggttatgaagacaaaccagatacttcttctagcaaaaataaagacccaataacgattgttgatgttcctgcacacctccagaacagctgggagagttattatctagaaattttgatggtgactggtctgcttgcttatatcatgaattacatcattgggaagaataaaaacagtcgccttgcacaggcctggtttaacactcatagggagcttttggagagcaactttactttagtgggggatgatggaactaacaaagaagccacaagcacaggaaagttgaaccaggagaatgagcacatctataacctgtggtgttctggtcgagtgtgctgtgagggcatgcttatccagctgaggttcctcaagagacaagacttactgaatgtcctggcccggatgatgaggccagtgagtgatcaagtgcaaataaaagtaaccatgaatgatgaagacatggatacctacgtatttgctgttggcacacggaaagccttggtgcgactacagaaagagatgcaggatttgagtgagttttgtagtgataaacctaagtctggagcaaagtatggactgccggactctttggccatcctgtcagagatgggagaagtcacagacggaatgatggatacaaagatggttcactttcttacacactatgctgacaagattgaatctgttcatttttcagaccagttctctggtccaaaaattatgcaagaggaaggtcagcctttaaagctacctgacactaagaggacactgttgtttacatttaatgtgcctggctcaggtaacacttacccaaaggatatggaggcactgctacccctgatgaacatggtgatttattctattgataaagccaaaaagttccgactcaacagagaaggcaaacaaaaagcagataagaaccgtgcccgagtagaagagaacttcttgaaactgacacatgtgcaaagacaggaagcagcacagtctcggcgggaggagaaaaaaagagcagagaaggagcgaatcatgaatgaggaagatcctgagaaacagcgcaggctggaggttagacaaacttatcactggggtaaaactacgatttgtaaggatgactgcttgtgttctgttggttgttaaggtaatccttgtaggctaaaagtttagcattttctcaacatttgggacattgtatcaattgataacactataaagaagaataaataatccttcctgtt

SEQ ID NO: 12639 - protein, 480 aa, Homo sapiens
MKAFHTFCVVLLVFGSVSEAKFDDFEDEEDIVEYDDNDFAEFEDVMEDSVTESPQRVIITEDDEDETTVELEGQDENQEGDFEDADTQEGDTESEPYDDEEFEGYEDKPDTSSSKNKDPITIVDVPAHLQNSWESYYLEILMVTGLLAYIMNYIIGKNKNSRLAQAWFNTHRELLESNFTLVGDDGTNKEATSTGKLNQENEHIYNLWCSGRVCCEGMLIQLRFLKRQDLLNVLARMMRPVSDQVQIKVTMNDEDMDTYVFAVGTRKALVRLQKEMQDLSEFCSDKPKSGAKYGLPDSLAILSEMGEVTDGMMDTKMVHFLTHYADKIESVHFSDQFSGPKIMQEEGQPLKLPDTKRTLLFTFNVPGSGNTYPKDMEALLPLMNMVIYSIDKAKKFRLNREGKQKADKNRARVEENFLKLTHVQRQEAAQSRREEKKRAEKERIMNEEDPEKQRRLEVRQTYHWGKTTICKDDCLCSVGC

SEQ ID NO: 12640 - DNA, 1316 bp, Homo sapiens
  CDS (12)..(314)
ttttcctcaacatggctgcgcccttgtcagtggaggtggagttcggaggtggtgcggagctcctgtttgacggtattaagaaacatcgagtcactttgcctggacaggaggaaccctgggacatccggaacctgctcatctggatcaagaagaatttgctaaaagagcggccagagttgttcatccagggagacagcgtgcggccaggaattctggtgctgattaacgatgccgactgggagctactgggtgagctggactaccagcttcaggaccaggacagcgtcctcttcatctccactctgcacggcggctgagggcccttctctgggcctgggcacccttagaggggagaacgaagcaatcagacatccccttgggccctgcttccaggtctccctgtcccccttgcctgccttcttccctgctctgtcccctaagctccctccaggcagggaaaagaggccaggtgctaaaaatgagcctttctcaagcacgtgagcagcggaaggcagacaggcgccagagcccagcactcccttttccagcagctgtggtgggggagggttcccctccagtttgtcaagagttgaaggaggctctgtggccaggtgacctggctgccttccactccttgtacctcagtctaaacatggagtggccgctgacaaggcgctccagccccagagccagcgtcttcatggggaagatgaatggacctgagtagctgaaggaaggcccctccctacccaaagactggaggcttctcagcctcaatttccctgtctgtacagctgagggctctgcctgtcccccactgctatcagtatggaaccccagctggggtcccctattgagtgccgactccccccaccgccagcagctgctcctccagccacacccctcctgctccccccacccctagcccttgaccctggctggcctgccccgctccacaggccaccagatgggctcctgagaccctccccaggctgcttacagctcattctgctgggggtagagatgaggggagggagtaagttaaaccttggactagcaagtagaagcctggggggatgcgtgtgcctcagtttcctcctccacaactgaatatagtggctgaaaactggggagatacttgatggcgcgaatgtccgttttctctcccttcccacctcctgcaggaagcaggacggggcaggcagcacctggtaggcacagtgctttgcccctcctccccttcccttctggaagtcttggggcctcagtgcttgcaacagccggccttgggcaaataaaagactaggttgtttact

SEQ ID NO: 12641 - protein, 101 aa, Homo sapiens
MAAPLSVEVEFGGGAELLFDGIKKHRVTLPGQEEPWDIRNLLIWIKKNLLKERPELFIQGDSVRPGILVLINDADWELLGELDYQLQDQDSVLFISTLHGG

SEQ ID NO: 12642 - DNA, 2093 bp, Homo sapiens
  CDS (1429)..(2091)
attatccagcatggctttatctaagggagggcctacaaagcacagtggaagagggtgggcattagagtcagacttgggtttgattgacagaactagatacttagttattttcacactgggcaattgcctaaacctgttaagcttcattttttttttcatctgtaaattggagaatatggtgtttacttcatatggctattgtaagcaataaaaaaaaaaggtattttaaacacctagcatagcaggtgttagtgctaaattatatattactttctcctgataaagtaaccttttaaaaagtaaagagcttatttatatagagctagtttccagtctcttgttttagagacttaaaaaacagtactggactgctgttgttgtttcactgtggcaaagaatagaagaatgaattttatttcatcatatatttgatggttcccaaatcattccttgcttcttatagccagcagaaacctacagttggattttggtgagtctaagtttgtagtaagtgagattgtttttagtgagctgtcagcgggggttgatgaaaggcagaagaccatggtcgtttttaatgaggttgtgtgaaaatccaatgaagtggtcagtgaaaattctacctcgagataaactgtgcagactggctctaacagtagattattttcttctaattataagtttgctatagcttcttttatttttgtttctgtttttgtttgaaaccagaaagtcctttgctgtttccttattatcctcgaaaatcattgcattttgtgaaaaggcggatggagaatattattgatcagtgtttgcaaaagccagcagtaagtttgaaagaaatgcatgtctttgtgtaggagcaatagtgtctacagtatgtggctcacttatgtaaatgatcttaatttttagaatgaactatgaaaatgttgatagtcaactgtttttgattaacaaaagtaacaatttcatatggttcaacctaatactccaacttaagtttcttacacacgtgtgtgtgtgtgtgtgtgtgtgtataaagattactgaaggtgttggcatcttgagtattttatttgttcccagaagaaattcattgtaaacagtcttagttacagagctgatgtgtctctgcttactactgaaggatgtgaatgaatggttgttatgagaccagagggaggtggtcttaaacctgccatgtgcttagcaccaaggtccttttcagctcagaattttctctttttccttactgttacaattgtcattaacgtttcttatgtacaaggtttggtgatgtaggcgatttttttaccacattcgaacagtgatggtcagtcactttctgtagagtatctgtgtgcatattaacgctctaattatattttaaaatcttattttatataggatgtaattggaaaatcgatgaatcaagcaatctgtattccattgtatagagataccagaagtgaggattctacacgtagattgttcaaatttccttttctgtggaataataaaacttcaaatctacattatcttctttttactattctagaagattcactttataaaatgtgcatcttaaggagacatactgatatttctcaatctgtgagtaatggactaattgctattaaatttgggagctttacatatgccacaacagaaaaagtcagaagaagcatctacagttgtttagatgcacagttttatgatgatgaaactgtaacagtagttcttaaagacactgtaggacgtgaaggaagagatagactcttggtccagctgcctttgtctttagtatataacagtgaagattctgcagaatatcagttcactgggacttattctacaaggctagatgaacagtgtagtgctattcccacccgtaccatgcatttcgagaagcactggagattactggaaagtatgaaagcacagtatgttgctgggaatggttttcgaaaagtgtcctgtgtgttaagctcaaatcttcgtcatgtgagagtatttgaaatggacatagatgatgaatgggagctcgatgagtcttcagatgaagaggaggaggccagtaataagcctgt

SEQ ID NO: 12643 - protein, 221 aa, Homo sapiens
MNQAICIPLYRDTRSEDSTRRLFKFPFLWNNKTSNLHYLLFTILEDSLYKMCILRRHTDISQSVSNGLIAIKFGSFTYATTEKVRRSIYSCLDAQFYDDETVTVVLKDTVGREGRDRLLVQLPLSLVYNSEDSAEYQFTGTYSTRLDEQCSAIPTRTMHFEKHWRLLESMKAQYVAGNGFRKVSCVLSSNLRHVRVFEMDIDDEWELDESSDEEEEASNKP

SEQ ID NO: 12644 - DNA, 2189 bp, Homo sapiens
  CDS (245)..(1537)
cattttttgtttgttcatttatttttacaggttcgaatgcaagcactgaaatgtttctcagttttagcttttgaaaacccccaggtatcgatgaccctggtaaatggtaggctggagctttcagtggcacctacatgatttaattgatgaactttttagatttaaagaatttccttaatcattgttgtttgttttatttctagttttggttgatggagaattgttaccacagatttttgtgaagatgttacagagggataagcctattgagatgcagctcacatcagcaaaatgtttaacttacatgtgtagagctggagcaattcggacagatgataactgtattgtattaaagacattaccttgtttggttcgaatgtgcagtaaggagagattactagaggagagagttgaaggagctgagacacttgcctatctgattgaaccagatgttgagctacagagaatcgctagcataactgatcacctcattgccatgcttgctgattatttcaagtatcccagctcagtgagtgccatcactgatattaaaaggcttgatcatgatttaaaacatgctcacgaactccgccaggctgcattcaagctctatgcctctcttggagcaaatgatgaagacatccggaagaagatcattgagactgaaaatatgatggaccgaattgtgactggcttgtctgagtctaatgtcaaggtgcggttagctgccgtcagatgtttgcacagtttatccagatctgtgcagcagcttcgaaccagtttccaggatcatgctgtttggaaacctttaatgaaggttttacaaaatgcaccagatgaaatcctagtggtagcatcttccatgctgtgtaatcttcttcttgaattttctccaagcaaagagccaattttggaatcaggagccgtagagctactttgtggattaactcagagtgaaaatcctgctttacgagtgaatggaatttgggctttaatgaatatggcatttcaggctgaacaaaaaataaaagcagatattttacgaagcttgagtactgaacagctattccggttattatcagattcagatttgaatgtgctgatgaagacattgggacttcttagaagtctcctctccactcgtcctcatatagataaaataatgagtactcatggaaagcaaattatgcaagccgtcactcttattctagaaggggaacataacattgaggtcaaagagcagacactgtgcatcttagccaacatagcggatgggacaacagcaaaagatcttattatgaccaatgatgatatcctacagaaaatcaagtattacatgggccattcacatgttaaactgcagcttgcagccatgttttgtatatcaaacctcatatggaatgaagaggaaggttcacaagaacgccaggataaattacgagacatgggcatcgtagatattctacacaaactgagtcagtcaccagattcaaacctttgtgacaaggcaaagatggcactgcagcagtacctggcatgatgggagtgcccctgggcacctgcgagcatcccacctccttgtttaaggaagtacaggaaccagcctcatttgattccttctatttgcacaagtcaccttggactgcagggagctgttttgcaaaagcagtttagtaggcttagatctcaaattcatcttgagagcatttttttgaggtagtaatttcctcagaagactcttgtgttttgttttggtttttttttctgagctactcggactctttattagaacaatcaatcattttcctttggacctacaatttttgcctatgctgcagccactttgtgagtgagaatgaatatgtctgtgtgaacacacaggcatgcgtgtgtatgtgcacgtacatgggccagaatgaatggatgtgtgtgtgtgagggatacctcagatttttcttttcttattttgtgtgaaaatctcttttctacagattttccagggtttaagcattgcttgctgtataaaaaactttactgaattatatacagtttgaatgaaatgttattttaaaaacaaaacaattgttaagtgttccataaaggttatgttgaattttggtcagatgaatatttgtaagtaaaaaatatatgcatttctgaacctcaacttacatagattttctttatat

SEQ ID NO: 12645 - protein, 431 aa, Homo sapiens [sequence omitted]

SEQ ID NO: 12646 - DNA, 1646 bp, Homo sapiens
  CDS (814)..(1422)
gggttaatgacattaagatgaggttctcacttaggctagtgatacagagcgagatggactagccccagaaaagacatcaccagatagagataagaaaaaagagcagtcagaagtatctgtttctcctagagcttcaaaacatcattattcaagatcacgatcaaggtcaagagaaagaaaacgaaagtcagataatgaaggaagaaaacacaggagccggagcagaagcaaagaggtaattaacactttgtagtgaataggtactttaaaatacttataaagtgtctggtagaaagatttgtatgaatataagacgttgtcaagggaagaagacatgaatccaaagataagtcctctaagaaacataagtctgaggaacataatgacaaagaacattcttctgataaaggaagagagcgactaaattcatctgaaaatggtgaggacaggcacaaacgcaaggaaagaaagtcatcaagaggcagaagtcactcaagatctaggtctcgtgaaagacgccatcgtagtagaagcagggagcggaagaagtctcgatccaggagtagggagcggaagaaatcgagatccagaagcagagagaggaagaaatcgagatccagaagcagggaaagaaaacggcggatcaggtctcgttcccgctcaagatcaagacacaggcataggactagaagcaggagtaggacaaggagtaggagtcgagatagaaagaagagaattgaaaagccgagaagatttagcagaagtttaagccggactccaagtccacctcccttcagaggcagaaacacagcaatggatgcacaggaagctttagctagaaggttggaaagggcaaagaaattacaagaacagcgagaaaaggaaatggttgaaaagcaaaaacaacaagaaatagctgcagcagctgcagctactggaggttctgttctcaatgttgctgccctgttggcatcaggaacacaagtaacacctcagatagccatggcagctcagatggcagccctgcaagctaaagctttggcagagacaggaatagctgttcctagctactataacccagccgctgttaatccaatgaaatttgctgaacaagagaaaaaaaggaaaatgctttggcagggcaagaaagaaggggacaaatcccaatctgctgaaatatgggaaaaattgaattttggaaacaaggaccaaaatgtcaaatttaggaaattgatgggtattaagagtgaagatgaagctggatgtagctcagttgatgaagaaagttacaagactctgaagcagcaggaagaagtatttcgaaatttagatgctcagtatgaaatggcaagatcacaaacccacacacaaagaggaatgggtttgggtttcacatcttcaatgcgaggaatggatgcagtttgaaaatgatcacacttgtaaagtttgggacttatagacttcttgttctgatgtcacgtccttgttcaccaaacagctagcactctagcttgcatgggtgttgcattgactttaatttattgaaaaatacaaatttttgtaaatatcagatcagtgatactggtgttagtgttgtaatcaggttaaacccacttccattaaacttgacaggactatagaaggat

SEQ ID NO: 12647 - protein, 203 aa, Homo sapiens
MDAQEALARRLERAKKLQEQREKEMVEKQKQQEIAAAAAATGGSVLNVAALLASGTQVTPQIAMAAQMAALQAKALAETGIAVPSYYNPAAVNPMKFAEQEKKRKMLWQGKKEGDKSQSAEIWEKLNFGNKDQNVKFRKLMGIKSEDEAGCSSVDEESYKTLKQQEEVFRNLDAQYEMARSQTHTQRGMGLGFTSSMRGMDAV

SEQ ID NO: 12648 - DNA, 1956 bp, Homo sapiens
atacttacctggcaggggagataccatgatcacgaaggtggttttcccagggcgaggcttatccattgcactccggatgtgctgacccctgcgatttccccaaatgtgggaaactcgactgcataatttgtggtagtgggggactgcgttcgcgctttcccctgccgagagatctgagcccgacagccccctgtccagctgcggccacagccagcctccttgcctccatttcccgaattgcccaggaccccagctctgtgtccccaggaggcactgggggccagaagctggcccagctcccagaacttgcttctgccgagatgagtctccatgtcatctacctgcaccagcttcaccagcagcagcagcagcaggagccgtggggtgaggctgcagcctccatcctgtccaggccctgctccagcccctcacagccaccctcgcctgatgaggagaagccatcctggtcaagtgacggctccagtcctgcctctagccccagacaacagtggggaacccagaaggcccggaatctgttccccggagggtttcaggtgaccacagacacccagaaggagcctgaccgggcctcttgcactgactgagacgactcctcagggccccactcctggcagctgagtgctgcacctgccttctcgatcacgagcctgagaactgcacgggggagcagcccagactggctggaaaccatgttttcagagtgcagggtcaagtggcgtcctctgggcagatgtgagaaggcaccacctcaagaggggaggagcggggctgatcctggtcgggcggacctgagtcgggcagccgctctcccggaactggaagggaaagccaggcggctctcaggggctgttggtgtctgagccgggagggtcgaacgcccagggcactgcgccccgcaactgacgctcctgcaaggaaaagctctggcacgccgatgacgtcgccggcctcgtccagctccatgtcgccctccgtcgccaggatgcgctgcacggtctgcaggacgttggttgccatggtaacatcgccgcagacaaacatgtggccccgctcgaggcacagcacgcggtgcacctccgcagccagctccgtcctcaggatgtcctgcacgttaccattgcgccctcagggtctcacaccttggggttgtcaggttcccgggagaaggcggtgaggactcggccaaacaccccgcgctgctgggcgttctgcacctcgtcgcggtagagatggtcaagttgggagcatcggcagccgaacaccaaagtcatgggagtgggctgcagccctgcaagcaaccccgcgcttgggaaggctcttctccggggcacagtgctagtggggcctccccacaggccaccgtcgcccagcctggcagcccagcgttttgggctgaaaccaccattactttggctgtttcatctctaagagagtgtagaatgctttcacagagaccctgcacagccctgatttacagagggaagggaagcgcgggtgaggtggtggcccctggtggagctgcgctagaatgcgcggcttcggactcagaattccatgccctttgcattgtgtgacatcgcagtccccttccccgctcccacttcgtattctcccatacttataactctcctcccagtcacagccctcttcttttgattgacagaccaccctgggcaccccatgctcaatatgaacaccttgtagcatccttaggtcttggacagacctcggtcagctctggcacagtcaagaatccaccttgggcagttcttctttgagtcttagccctaatccctttgaaaattctattttcctttgtcctcaatccagtcaacacctactatgtaccaggcaccaggaagccagaagctcagggcccagcccttgcctttggtacctgccctccccttggtctcatgagcgtcttttcagctt

SEQ ID NO: 12649 - DNA, 1916 bp, Homo sapiens
  CDS (112)..(1167)
gtgcagaccttgaatcgaaacccaggctcctgcaggcactggcacagctacagcgagggcctcggccatccaagggtctcccaggtgaccttccctccaccccaggaagctatgacagaggccgggaagctgcccctaccgctacccccacggctggactggtttgtgcacacccagatgggccagctggcccaagacggggtccccgagtggttccatggtgcaatctcaagagaggatgctgagaacttgctggagtcacagccactgggatcctttctcatcagggtcagtcacagccatgtgggctacacactctcctacaaagcccaaagcagctgctgccatttcatggtgaagctcttggatgatgggactttcatgatccccggggagaaggtggcccacacctcgctggacgccctggtcaccttccaccagcagaagccaattgagccgcgcagggagctgctgacacagccctgcaggcagaaggatcccgcaaacgtggattacgaggatctcttcctctactccaacgcagtggccgaggaagctgcctgcccggtgtctgcccctgaggaggcctccccaaagccagtcctgtgtcaccaatcaaaggaaaggaagccgtcagcagagatgaacagaataaccaccaaggaagccacttcctcctgccccccaaaatcccctcttggagagacccgccagaaactctggaggagcctcaaaatgctccccgagagaggccagagggtccggcagcagctaaaaagccacctcgccactgtgaacttgtcgtcactcttggatgtccggagatccacggtgatctcaggccctgggaccggaaaaggcagccaagatcactcaggggatcccacctcgggggacagaggctacacggatccctgtgtggccacatctctcaaaagcccctcacagccccaggcaccaaaagacagaaaggtccccaccaggaaggccgagaggtcggtcagctgcattgaggtgaccccaggggacaggagttggcaccaaatggtagtgagagccctatcctcccaggagtccaagccagagcaccagggcttggcagagcctgagaacgaccagctcccggaggagtaccaacaaccgccaccctttgcccctgggtactgctagagaacaggtccaccctggctctgggactcgctgccaggggctgccacactcctgaatgccttaacatttcttccatggccccacaccatggcatccgggggtcttcgggaacccgggaaatggaataaagatgtttttggggtctgttcctgcactcacccatggggtgagctggttattttagcaacaatcatcagagtgacgctgatggtttggggcaccagctatacatcagccccagtgccagaccttctattcattattttacgcctcagagcaaggccctcagggagggtcatcctccatgttttgaagaagagactgaggttcagagaggataagaggcgtgaccaaggccacagagctatgggtgtcagcaccaggatttgaagccaggtgaatccgagcccttttcccatatcatctgtttgttctgttgtctaaaagcacactgcaagccgggctcagtggctcatgcctgtagtcccagcactctgtggggccgaggcaggcagatcgcttgaggtcaggagtttgagaccagcctggccaacatggtgaaaccccgtctatactaaaaaattcaaaaattacccggacgtggtggcgcatgcctgtaatcccagctacttgggagcctgaggcgggagaattgcttgaacccgggaggcagaggttgcagtgagccgagatcgcatcactgcagtccagcctggatgacagagtgagactccatctcaaaaaat

SEQ ID NO: 12650 - protein, 352 aa, Homo sapiens
MTEAGKLPLPLPPRLDWFVHTQMGQLAQDGVPEWFHGAISREDAENLLESQPLGSFLIRVSHSHVGYTLSYKAQSSCCHFMVKLLDDGTFMIPGEKVAHTSLDALVTFHQQKPIEPRRELLTQPCRQKDPANVDYEDLFLYSNAVAEEAACPVSAPEEASPKPVLCHQSKERKPSAEMNRITTKEATSSCPPKSPLGETRQKLWRSLKMLPERGQRVRQQLKSHLATVNLSSLLDVRRSTVISGPGTGKGSQDHSGDPTSGDRGYTDPCVATSLKSPSQPQAPKDRKVPTRKAERSVSCIEVTPGDRSWHQMVVRALSSQESKPEHQGLAEPENDQLPEEYQQPPPFAPGYC

SEQ ID NO: 12651 - DNA, 1830 bp, Homo sapiens
  CDS (7)..(1140)
gttgccatggatcctggggacgactggctggtggaatccttgcgcttgtaccaggatttctatgcattcgacctgtcaggagccactcgagtccttgaatggattgatgacaaaggagtctttgttgctggctatgaaagcctgaaaaagaatgaaattcttcatctgaaattacctctcagactttctgtaaaggaaaacaagggcttattcccagaaagagatttcaaagtgcgccatggaggattttcagacaggtctatctttgatctaaagcatgtgccacataccagattgctggttaccagtggccttccaggttgttatctgcaggtgtggcaggttgcagaggacagtgatgtcattaaagctgtcagcaccattgctgtgcatgagaaagaggagagtctctggcctagggtggccgtcttctccacattggcacccggagtcctccatggggcgaggctccgaagtctgcaggtcgttgatctggagtcccggaagaccacgtacacctcagatgtcagtgacagtgaggagctgagtagcctgcaggtcctagatgcagacacctttgccttctgctgtgcttcgggccggctggggcttgttgacacccggcagaagtgggcaccgttggagaatcgcagccctggccctgggtctggtggaaagagatggtgtgctgaagttgggagctggggccagggccctgggcccagcattgccagccttggctcagatgggcgtctttgtcttcttgacccccgggatctctgccatcctgtgagctcagtccagtgcccagtatccgtacctagccctgacccagagctgctgcgagtgacttgggccccaggcctgaagaattgcttggccatctcaggttttgatggtacagtccaggtctatgatgccacatcttgggatggaacacggagccaagatggaacacggagccaagtagaacctctcttcactcacagaggtcacatcttcctagatggaaatgggatggaccctgctcctttggtcaccacccacacctggcatccctgcagaccaaggactttgttatcagcaacaaatgatgcctctctgcatgtgtgggactgggtggacctttgtgccccccgctgacaccagcatctttccatctaggcctctagaaaggggaggagctgctgtagtagcaagggtgctcatgtaggactcaagtgactaccagtccctgttaccagctgtgtggccttgggcaagtctgccagcgtcacttagcctcagtttccttatctgtaaaatgaggatagtaagaactacctcgtagtgatattgcgaaggttagaagaaacgcatggcataattacttggtagctattgttagatctgggagtgtgaaatggtagcgttttgtccctgtcttcacactatcatagggagaatcaaaagagctaacaaatataaacatgctttgtgaatttttttaaagaaaaaaatgtagaggggccaataaacatgaaaaaatcccagccctagtagcaattaaggaaatagcaaaacaggatttctgctcctcttgagtgggtctcatgggaacacaggtgcactttcccacacttgtccccccaggtgactaggttcaagagacatttgcttttggtggccccacaaacatttccttttgagggcccatagtgaatattaaagtgtgctggacatggtggctcatgcctgtaatcccagcactttcagaggctggggtgggcagattgcttgagctgaggagtttgagaccagcctgggcaacatagcaagatcccttccctt

SEQ ID NO: 12652 - protein, 378 aa, Homo sapiens
MDPGDDWLVESLRLYQDFYAFDLSGATRVLEWIDDKGVFVAGYESLKKNEILHLKLPLRLSVKENKGLFPERDFKVRHGGFSDRSIFDLKHVPHTRLLVTSGLPGCYLQVWQVAEDSDVIKAVSTIAVHEKEESLWPRVAVFSTLAPGVLHGARLRSLQVVDLESRKTTYTSDVSDSEELSSLQVLDADTFAFCCASGRLGLVDTRQKWAPLENRSPGPGSGGKRWCAEVGSWGQGPGPSIASLGSDGRLCLLDPRDLCHPVSSVQCPVSVPSPDPELLRVTWAPGLKNCLAISGFDGTVQVYDATSWDGTRSQDGTRSQVEPLFTHRGHIFLDGNGMDPAPLVTTHTWHPCRPRTLLSATNDASLHVWDWVDLCAPR

SEQ ID NO: 12653 - DNA, 2184 bp, Homo sapiens
  CDS (48)..(368)
ttatatgttgatttttctttctctctgatttcccagtttcagattgaatgtctgtcttgcaggcagttatttcaaaatccatagtcttttgcctttctcactggcaaaatttgaagcaatctctctcttcaatgtatgatttcaaaactaaaattttaaaagagaagaataaatatcttatccaagacttcattgcatatctagagcaagagtggcaaactttttctgtaaaggactatatagaaaatattttccacaaggtctatgttgcaacttctcaactttgccattctgctaatgcaatcttagtaaataaaagaatgaacataactgttttcctatataacttcccttacaaaaacagccagtaggccacctttgcaggtcatattttgctgacccctggtctggatgttttttaatgctagctctccatggtgtcatctttcgttttcattcatttttcaaaggtgagaatttacagtcattacatttcccactgtatcagaagtagctgtattttctacagatgtagccctgggaatggcacagtggaacaatatttaactaactcagcagacttcttgcaaatgaaaagaaaactcaaaaggtgccattaaaaagcaataccattttcaggcaacattattgcaacaacctttgtgagagaggacactagcttttcaggatatttgaaaaataatataactaacatgctattttatcttaaacagctgtgttcctgtaaaagtgttttggattagaaggtatttttaccttcatactggagtatgaactccccctgctgttcattagagtatttgcaaagattacaaaagacatcaggttaggatgtcattgtccccaaaatgaaaatatttgtatgtatttcaataagaactaaatgcagtaagcgctaattcctcattcaatattcactatattaggaaatgtaaatcatttcaaagagaacaggtagtcaggaagatgaaaattttactttaaagcaaggatttaaacaaagaaaaccataaaaacaaagtccattttatctgttttattaaagaggaagaaaaaataatattgttactttaaaactgtgattgtcaatatatataatcaggggtcttccagataatcctaaagttgatctctttgaataaaataaactccatttgtccaaaatagttaagaaagactctattgtggttacttgaaaaattcagctaaccctcttatgaaatgtgtgcaacacctattaattttgaaatgtgggatagaatacctactaaagctatatttaaggtattgtaaaatgtcattaattcagaaaggattagtatcatcctacctataagaattaaattagcaaatcaaaattatagaatgttatgaaaaatacattttattcataaattaattagattttacagcatatatgcatgcatatatatatatacacacacacacacacacacccatatatatgagagagaggaaattaggttcaacatgacctaatattagagaacatattggaaggtcactgtttgttaggataaataaatactggataacctcgttagaaaggtggaaagaggagaacgtagcaatctggctattttggacaaagggaaggttattatattcatgtttataacatgaaaatggccttatttttgtttctgacatgagacaataatgagttaaatattttattggaatttcatcaaaaccttatttttactgctccttctaaaaatttgggaggggaatatagtagtaacttctctattgacacttttacctcaccgagggggtaaaagatgtagaactgctgttccctagaatgaaggtctgttgtttggtttttaaaaaaagaagagcagaaaaagtttgacacagtattatatgattttgctggactatttcactagaaaccacgtagaataggactaactgatctcttttgaaaggggctgatttgcttattcatcaataactaatccaatatgtggacagtaatcttaatttcaaagccttttttgaggatactacggtgtagcttaagtgaatttaaaaagagtgcataaaagcttgtttttaattacttataacaaagcacaaattacttctaacaaggcaaatatttattgacatataagacattctgctaggcattgt

SEQ ID NO: 12654 - protein, 107 aa, Homo sapiens [sequence omitted]

SEQ ID NO: 12655 - DNA, 1943 bp, Homo sapiens
  CDS (139)..(843)
gaaaatgagggttatattaaaaagctcctggagctttttcatgtgtgtgaagatttggaaaatattgaaggactgcaccacttgtatgaaattatcaaaggcatctttctcttgaatcgaactgccctttttgaagttatgttctctgaagaatgtataatggacgtcattggatgtttagaatatgatcctgctttatcacaaccacgaaaacacagggaatttctaacaaaaacagccaagtttaaagaagtgattcccatatcagatcctgagctgaaacaaaaaattcatcagacatacagagttcagtatatacaagatatggttctaccaactccttcggtctttgaagaaaacatgttatcaacacttcactcttttatctttttcaataaggtagagattgttggcatgttgcaggaagatgaaaaatttctgacagatttgtttgcacaactaacagatgaagcaacagatgaggaaaaaagacaggaattggttaactttttaaaagaattttgtgcgttttcccaaacgctacagcctcaaaacagagatgcttttttcaagactttgtcaaacatgggcatattaccagctttagaagtcatccttggcatggatgatacacaggtgcgaagtgctgctactgatatattctcatacttggttgaatataatccatccatggtacgagagtttgtcatgcaggaggcacaacagaatgatgatgtaagtaagaagttaacagagcaaaaaataaccagcaaggtaaatattatttgtactaatagtaagtatttatacataggaagctataactgtttttattattcattttaagatttaattgttgctgtttgggaaaagtgtagccataatatcagacagcttattgttcccctaaattggttcctgtctcagtttatcaatttgtcctacagcaactatttatgttcatttaaattgccttttaaaatattcatgtcagtttttttttgttttgttttgttttaattctgaagtcaacttgctatattgtgttttttaaatcatttagtcaatcaattcttgtatctggggaattaagagtaagttacctaggaaaacattgactttagggtagattctcaaaatcgccaagaatgaagaaatgtagcacagtcccttaaaatatgaagggtgctgtttctttactgcctagccatagagaacaagctgttacgttgttcacaaacactcacgttagcatctgagatataccagattttaaagtagtagagaatatatcctggtaatgtgaagggtgcgcctggatcacatagtgcgtgacatgtgagagcactaaatgtgtgtgctctcctttattttaaaataattgaaccaatgattctgattttttcctgcttcccccataacaatttggaagcaactttttacgtaagaatgagtaagaaggacctgctctcaggtccttcttaagggaggaggggaataaagatcccctaaggaaaaaaaaaaaatctgtttagaattccagcctgtggtatttttacgaaataggaaaatagactgtcttactttttgaaaagatcctatttaatgtattgtgatgtcaaaaggaaatggaatgccatgtaactgctatgtttaagtttttatttttatagtgcaggataggtgcaaaaaagcaccagtttgaactgttgtgtcatgtttttcttttataaaatattaacatcggcctcagcaacatagcaagaccctcctttagtacaaaattaatttttaaaacttagatatggtggcatgcacccatagtcccagatactcaggaggatgagaaggaagagtctcttaagaccaggagtttgactctgcagtgagctatgattgctccactgcactccagtctgggtgacgaagccagaccccatctc

SEQ ID NO: 12656 - protein, 235 aa, Homo sapiens [sequence omitted]

SEQ ID NO: 12657 - DNA, 1670 bp, Homo sapiens
  CDS (16)..(567)
gaaaaaagagagagtatgtttgtcttctcttcagatgatgaagaagttacaccagcaagagctgtatctcgtcattttgaggatactagttatggctataaagatttctctagacatgggatgcatgttccaacatttcgtgtccaggactattgctgggaagatcatggttattctttggtaaatcgcctttatccagatgtgggacagttgattgatgaaaaatttcacattgcttacaatcttacttataatacaatggcaatgcacaaagatgttgatacctcaatgcttagacgggcaatttggaactatattcactgcatgtttggaataagatatgatgattatgactatggtgaaattaaccagctattggatcgtagctttaaagtttatatcaaaactgttgtttgcactcctgaaaaggttaccaaaagaatgtatgatagcttctggaggcagttcaagcactctgagaaggttcatgttaatctgcttcttatagaagctaggatgcaagcagaactcctttatgctctgagagccattacccgctatatgacctgatgcctttccttcattaaagatgattctggaatgatcagcagatatagtctacaagggggaaggtactaagccccaggaccaatggtagacaaaataattcagaaatccattgtgccatgattcctttagtttctgctatttttctgtggaaaaccactgctggcacaagcagtgactgtttggcagcttcaagtttagagctgtgaagacaggctgccattcacagtattttgctttttgacagtacaagatgctgtgtaactgttttaatacagcaaatagtaactctccaaatcctgttgcttttatgttaaataagataacaagaattggagcatgcaaagaatgggacttggataatgacttaagctttatatgtaaagaattttagaagatcttggtgctgctattcctgctggaggaatgaatagatggctgtttcagttaagctattagtaataaaagtgaacattgctactatctgagcctacatacataacttgtgtgatttcaaattaaacttgcattatgtgttaattttcttgcatctaaaaaagcatagaattcctactcacacagctcagcaacaaccattttgatggtaacagttaatttctttcattagttttttaaattcagggttctggatattaaattaaaatggcattcttaaagattttcttcaaaaagcaatcctaaatgaaagtgtgtaaattataagaagctggcgatcttttgatatgctgtttcacaggatcctgacactggagggcagctgtcttgtgcattacttgtgtttccagcaccaaagttgtgggacatgttgctgtagactgctgcgcagtcctgggtgcattcagtctctctgcctctgcctgcctcctggtccccactttaaaggctgtgcagctccttaaataataaagctggaaaatatttttagtcgggttatcaaatttgatttacaaaaacgctaactttgtttgaaatgcaaacaggtttgaaaatatgtattaagtactttgtattctggaagcgtgaattgcttttgaagtctgtcagtattactggtatttttaaataaagaagaatttttctcc

SEQ ID NO: 12658 - protein, 184 aa, Homo sapiens
MFVFSSDDEEVTPARAVSRHFEDTSYGYKDFSRHGMHVPTFRVQDYCWEDHGYSLVNRLYPDVGQLIDEKFHIAYNLTYNTMAMHKDVDTSMLRRAIWNYIHCMFGIRYDDYDYGEINQLLDRSFKVYIKTVVCTPEKVTKRMYDSFWRQFKHSEKVHVNLLLIEARMQAELLYALRAITRYMT

SEQ ID NO: 12659 - DNA, 2284 bp, Homo sapiens
ctttaaatggtggacattacaaagacaggaaaaagaattcttgtctttgtttgctcttttaacaatccaaaggtttaggaatttactttgctctaacaaccctctcgatcctcttgtgaccccgttatactcagtgttgctgaaaaagtccattttaaaataatggcacctaccacatccatttttccgtctttaggccagaccctctgatggttggtggattttagtattaaagcttgtgttgaaagtggagggggtgttactactgttgtgtctgaaacaagagttaaggttatattttatgaagcagttttggctttttcaacagatgttggccactcacttttatggatttcacattgagtagtaatgagtcataatcactacttaattttcccaaaccagagggaatatacattttattattggaccctccaggctgtcaatgaagagagaaaacctttctttggaatcaagttgaaaacctgttgttaacacctctctctgggccttctttgctctccttagcacgttcattgctaggggctgccacttccatcttctctgccttggaagcatagagtcgtttctcagcctcattctcacctttatgagttcatttaataatgtgattagaacatataaagtatgcaagaataaaatgtgtcatgatgaccttaaaacttttattattcaaagttatagaaagttacgtattttattgtagactcataataggtgaacctttctgatcttggggatttcttgtatttccttggagagtcttacataggcataagccagtgactgatttttttttttttttttgattgttttctcatactatcataggccatttgaggggaataaaacaaatactcgttgggaatctatatgtagaagatcattcaggcaaagattctggtcttaaaggtgttaaagtctactggagaacataaggacttaattataacagcagccacagcctccaccagcccctgtgataaaagcatactatgttatctcacttaatctttatgacagcccatggagggtaggtctcattatcttcatttttaatgctggagactgaagatgagagacctgtggttgcctaaggtcatatagctggtaggggcagagtttgtgtttttgccactgttcttgatagcatatttctgccatatgggggcttctcccggttccgtgagtgaggcatgccctcctgccatagcctccgttccttctgccttcaatgaatacaccttccataccactccccccaacccctcccattaaattctaatcatcatttaagtttcatctttggtggtcttaggtgtcactgttgcagacaggcatttttctggcccctgcaccagcttacagcacccccactccttgacctctataacgctcagctttatacttggttacgtttatggtgtttgttgctctgtttgtctggtgtcctggactctaagctccgcaagggcaggaattgtctggcatcattgctgcacatgacacctggtggatgtacatatttattaaatgaataaatgaatggatgttcatacttttgtccaccatgttttatgctaaatacacacagagtagataatgagagaggctctaatagcgaggtgtgtatcctttgagctatggatgacaaacttaaaaaattgcccattaagttagaaaagaattgagtatatctttttaatatatgtgtttacttaatgtacacgcatattgtaaaaatacatgatattggcattttaaaaaggatgaaaatatttaaaacaaggagtttctaatatgtttttctgtatgttagaggaccagctggtatccaggacccactaaacttggagctgggggtgccagggcaggccctgtgggaatacatgtaactaaacaagctccatggccacagtggaaccagactgcagttgatcaaagcatggttgagggtgggaagtgctgggctcatgcgagggtgtgtgagtgattgtgcatcaacatgaaggatcactgggggagtggtggggtgtaaggttcattggaagtctgggactcagctatgattgaggtcagatacctagttcaggggataagaccatatcatcttgaaatgatgggctgctgaagggtcttaaagaatcatgggtacagtggctcacggttttaatcccggcacttcgggaagccaaggcaagtggatcacttgagcccaggagttcgagaccagcctaggcaacatggcgagacctcgtctctt

SEQ ID NO: 12660 - DNA, 2223 bp, Homo sapiens
  CDS (160)..(1143)
aggcccctcctcccggcggcgcggcagagccaggccccagcgctcggccggccgcgagcccgccggccggggacgagcgtcgcagctcatgctgatcgctgtcctcctcctccccctcaggcggcgctggcggcggccctgggacccgcggaagccggcatgctggagaagctggagttcgaggacgaagcagtagaagactcagaaagtggtgtttacatgcgattcatgaggtcacacaagtgttatgacatcgttccaaccagttcaaagcttgttgtctttgatactacattacaagttaaaaaggccttctttgctttggtagccaacggtgtccgagcagcgccactgtgggagagtaaaaaacaaagttttgtaggaatgctaacaattacagatttcataaatatactacatagatactataaatcacctatggtacagatttatgaattagaggaacataaaattgaaacatggagggagctttatttacaagaaacatttaagcctttagtgaatatatctccagatgcaagcctcttcgatgctgtatactccttgatcaaaaataaaatccacagattgcccgttattgaccctatcagtgggaatgcactttatatacttacccacaaaagaatcctcaagttcctccagctttttatgtctgatatgccaaagcctgccttcatgaagcagaacctggatgagcttggaataggaacgtaccacaacattgccttcatacatccagacactcccatcatcaaagccttgaacatatttgtggaaagacgaatatcagctctgcctgttgtggatgagtcaggaaaagttgtagatatttattccaaatttgatgtaattaatcttgctgctgagaaaacatacaataacctagatatcacggtgacccaggcccttcagcaccgttcacagtattttgaaggtgttgtgaagtgcaataagctggaaatactggagaccatcgtggacagaatagtaagagctgaggtccatcggctggtggtggtaaatgaagcagatagtattgtgggtattatttccctgtcggacattctgcaagccctgatcctcacgccagcaggtgccaaacaaaaggagacagaaacggagtgaccgccgtgaatgtagacgccctaggaggagaacttgaacaaagtctctgggtcacgttttgcctcatgaacactggctgcaagtggttaagaatgtatatcagggtttaacgataggtatttcttccagtgatgttgaaattaagcttaaaaaagaaagattttatgtgcttgaagattcaggcttgcattaaaagactgttttcagacctttgtctgaaggattttaaatgctgtatgtcattaaagtgcactgtgtcctgaagttttcattatttttcatttcaaagaattcactggtatggaacaggtgatgtggcataaggtgagtgcacggtatgttcagatcacagtgccttatgtccgaatacagcaatatgtcaccgccgcagccggggcgcacgcgtgtgaaacaacaccgagcttgaatgtggaagtctttgaacctcttaccaaatcagtttgttttctttagatttgtcaaaaagttgtaatttgaatataaataattactttaaaattttaatgacacttttacacgtaagtgttttgttctgggctaccgtgtcaacgaggctgctttacaacagctttatttatttttactttcatgcaatttttttacacatcttttggtggagtaaacttcaccacatccatgaataaactctcagttattttgaaatggcaaatttctcattatttaagtttggatctggaaaggacatgacttctgaaatagccgctgctgggttttaaaagctgaggtctctcaaagtgtggaggagacgttgccgtcaggcgggagccaagtgccgggaagatgcctattttttttcttgtgtattgaaatgtaaaatcatgatgtttgttatgactgctgatgcgattgtttttgtaaattttattgtggcatatacagtattgtcatacagttgaagagaaacaatgtttcctaatgtaagtgctctgaaaatgttgacactgtatatatatatatgaggatagtttgtttttttttgttttgggtttttttttttttcagattgaaaaattaaaataaatcctactatctacc

SEQ ID NO: 12661 - protein, 328 aa, Homo sapiens
MLEKLEFEDEAVEDSESGVYMRFMRSHKCYDIVPTSSKLVVFDTTLQVKKAFFALVANGVRAAPLWESKKQSFVGMLTITDFINILHRYYKSPMVQIYELEEHKIETWRELYLQETFKPLVNISPDASLFDAVYSLIKNKIHRLPVIDPISGNALYILTHKRILKFLQLFMSDMPKPAFMKQNLDELGIGTYHNIAFIHPDTPIIKALNIFVERRISALPVVDESGKVVDIYSKFDVINLAAEKTYNNLDITVTQALQHRSQYFEGVVKCNKLEILETIVDRIVRAEVHRLVVVNEADSIVGIISLSDILQALILTPAGAKQKETETE

SEQ ID NO: 12662 - DNA, 2685 bp, Homo sapiens
  CDS (32)..(2353)
aaaaagtaaattttcgcagaaggacttagaaatgctattccatggaatgagtgctgattttacaagtgagaatttctcagcagcctggtatcttatagagaatcactcaaacaccagttttgagcagctcaaaatggcagtcaccaacctaaagagacaggctaacaagaagagtgagggcagcctggcctatgtgaaaggcggtctcagtacattcttcgaagcacaggatgccctctcagccatccatcaaaaactagaagcagatggaacggaaaaagtagaaggatccatgacgcagaaactggagaatgttctgaacagagcaagtaatactgcagacacattgtttcaagaagtattaggtcggaaagacaaggcagattccactagaaatgcactcaatgtgcttcagcgatttaagtttcttttcaaccttcctctaaatattgaaaggaatattcaaaagggtgattatgatgtggttattaatgattatgaaaaggccaagtcactttttgggaaaacggaggtgcaagttttcaagaaatattatgctgaagtagaaacaaggattgaagctttaagagaattacttctggataaattgcttgagacaccatcaactttacatgaccaaaaacgttacataaggtacctgtctgaccttcatgcgtctggtgaccctgcttggcaatgcattggagcccaacacaagtggatccttcagctcatgcacagttgcaaagagggctacgtgaaagatctgaaaggtaacccaggcctgcacagtcccatgttggatcttgataatgatacacgtccctcagtgttgggccatctcagtcagacagcgtccctgaagaggggcagcagctttcagtctggtcgagacgacacgtggagatacaaaactccccacagggtggcctttgttgaaaaattgacaaaactcgtcttgagccagctgcctaacttctggaaactctggatctcctacgttaatggaagcctcttcagtgagactgctgagaagtcaggccagattgaaagatcaaagaatgtaaggcaaagacaaaatgattttaagaaaatgattcaggaagtaatgcactccctggtgaagcttacccgcggagccctgcatcccctcagcatccgggatggggaagccaagcagtacggaggctgggaggtgaagtgcgagctctccggacagtggctcgctcacgccatccagactgtaagacttactcatgaatcgttgactgcccttgaaattcctaatgacctgttacagactatccaggatctcatcttggatctccgagtacgttgcgtaatggccacgttgcagcacacggcggaagaaataaagagattagctgaaaaagaagactggattgttgacaatgaaggactgacttctctaccatgtcagtttgaacagtgcatcgtgtgttctctgcagtcactgaagggggttctggagtgcaagccgggagaggctagtgtcttccaacaacctaaaacacaggaggaggtttgccagctaagcatcaatataatgcaggtttttatatactgtctggaacagttgagcaccaagcctgatgcagatatagatactacacatctctctgttgatgtttcttcccctgacttgtttggaagtatccatgaagacttcagcttgacctcagaacagcgccttttgatagtcctaagtaattgctgctatctagaacgtcacaccttcctaaatatcgcagaacattttgaaaagcacaacttccagggaatagaaaaaatcacacaggttagcatggcctcattgaaagaactagatcaaagactctttgaaaattacatcgagttgaaagcagatcccatcgttggctccttagaacctggaatttatgcaggatattttgattggaaggactgcctgcctccaacaggtgtcagaaactatttaaaagaagcactggtgaatataattgccgtgcatgcagaggtgttcaccatttccaaagaactggtccctcgggtactatccaaggtgatagaagcagtttctgaagagctcagtcgactgatgcagtgtgtttcatccttcagcaaaaatggagctttacaggcgagacttgaaatctgtgctttgagggacactgtggctgtttacctgacacccgaaagcaagtcaagttttaagcaggctttggaagccctgccccagctttccagtggagcagataaaaagttactggaagagctcctgaacaagttcaagagtagcatgcacttgcagctcacctgtttccaagcagcttcttcaaccatgatgaaaacataaatatctgccacataaaagaagtccaggaaaataacacaaggttgagtgctgcaggaagagctgcttctgcagggagttttctggaatggcgtggcacatattgaagcatttctcagtgtcccgttcacggaagcgcaggcagctcccacgacacacggagagactgactgatacgagatttggaaagctatgtagacatctttggagctcttactgtcctaaactgtacagctgtgcttaaaacccttatttcatataaatggccttaagttttctaattcaagcgggtttttggaaaaatttatggtctccattaaaatacatattac

SEQ ID NO: 12663 - protein, 774 aa, Homo sapiens
MLFHGMSADFTSENFSAAWYLIENHSNTSFEQLKMAVTNLKRQANKKSEGSLAYVKGGLSTFFEAQDALSAIHQKLEADGTEKVEGSMTQKLENVLNRASNTADTLFQEVLGRKDKADSTRNALNVLQRFKFLFNLPLNIERNIQKGDYDVVINDYEKAKSLFGKTEVQVFKKYYAEVETRIEALRELLLDKLLETPSTLHDQKRYIRYLSDLHASGDPAWQCIGAQHKWILQLMHSCKEGYVKDLKGNPGLHSPMLDLDNDTRPSVLGHLSQTASLKRGSSFQSGRDDTWRYKTPHRVAFVEKLTKLVLSQLPNFWKLWISYVNGSLFSETAEKSGQIERSKNVRQRQNDFKKMIQEVMHSLVKLTRGALHPLSIRDGEAKQYGGWEVKCELSGQWLAHAIQTVRLTHESLTALEIPNDLLQTIQDLILDLRVRCVMATLQHTAEEIKRLAEKEDWIVDNEGLTSLPCQFEQCIVCSLQSLKGVLECKPGEASVFQQPKTQEEVCQLSINIMQVFIYCLEQLSTKPDADIDTTHLSVDVSSPDLFGSIHEDFSLTSEQRLLIVLSNCCYLERHTFLNIAEHFEKHNFQGIEKITQVSMASLKELDQRLFENYIELKADPIVGSLEPGIYAGYFDWKDCLPPTGVRNYLKEALVNIIAVHAEVFTISKELVPRVLSKVIEAVSEELSRLMQCVSSFSKNGALQARLEICALRDTVAVYLTPESKSSFKQALEALPQLSSGADKKLLEELLNKFKSSMHLQLTCFQAASSTMMKT

SEQ ID NO: 12664 - DNA, 1766 bp, Homo sapiens
aagaaatgaaattattcatcaacaataactttggcactgcaaaagactgagtcaaaggttaaatcagtcacacagatatccaaggccaagttgaagatcacaagtatatcccatttagagatttgcatacttagagattaagcccatgttcattaattatttagttaattcaaaagccattaataaatccatgcccagcctacgcaacatagtaagacccagtctctacaaaaattttaaaaattagccagccatggtgacacgtacctgtagtcctacacacttgggaagctgaagccagaggattgcttgagcccaggaggtcgaggctgcagtgaaccgtgattgtgtcactgcactccagcctgggtgagagagcaagaccttgtctcaataaataaacccaagttacttcgatgactagatactggaggtctgaaggagaagctttaaaaatacagattgattgcttcagagaaatcctatttataattatgatctgaacttattctatgattagcaaatatatcatctgaaaataaaacaggagttctctccccagacttttgtttttcaggatggtgagttttggtctgggaccctcatggcacccattttgataaaaggaaaaagatagtaaaacaggaaataggaagtttccagagatttgggcatctcaggattccatgaaatgctgagactaacccactaaatccaaattttattggctatggtaaatctaaatctgttcagtgttctgaacagattttatgagtttatgtctaagagtttatgtctaagagaggtacataattcacaaacactatcatgctggcagctgttttgtccacatcaattcccttgatttaatgctctgatttcaatttagaaagtactgagacatgtaaagtctcaaaataggaaaaacctatcctgtttataaggtgtggtcaataaatagaccacagataatcttagtctattaattaactctcagatcatcttagactattaattaacattctgcttgctgctgattaaaaagaaaaaaaccctaaaaccttcagcaactgaagtagtaatataaaaaataacctttaatagttatggtcaaattacgcttcacttggataaacctcaaaatgtagtctgagtttttttgtgcacagtttacaaatcctgggggaaaaatcttttttccacgttatctgaaaaactatatggcgaagataccgctgaaaaataatttgttttatgaaattcctgaaaagctaattttgaattttttaaagtaactacctcccttttgtgtcctaatgtccttccttcaaagctgcttatagtttagaaatgaaagatgtcatgtctcatgctttgactggttttcggtggcatatttgatgtatttgccaagtggcattactgactttacagtaactgttacattattttgtactatattgctttatgtggttcaaaaatagtatatgccatattgaaatatgtaatcctcatgttgtgaaactcatcatgtaatacaaatgaaaatcattacttaataacttacaatttatccatatgtagtttcaatatgattgtgtctatgactgtaaaacaaaactgaaaaaatatgtaatgtatttctgttgaaagcgtgaatgtactaattttttcctaatctttgtctagaagaaagattctatgtcattcattgtacagctgctctggggtgttacacatttaaagtacaatccaacagttgtttg

SEQ ID NO: 12665 - DNA, 2567 bp, Homo sapiens
  CDS (281)..(1300)
acgtccccgccgggcccgcgcgcctcgtgcctcgcgcctcgcgcctccagccacgtccccgccccggctccggcgcgccgcggagttggctgctgggaggtgcgggactgggtgtggccggcggctctggtctcggctgtgagctgcgctctccacgccggctccgcgctccaggggctgctgagcgcccagcggacaccggcagcgcgcggtcgacgcgggcctgagctccctccagctgttttcactcattagctcctgaggtaaacaaattgaaaaaatgagcgaactggaacagttgaggcaagaagcagaacaactgcggaatcagattcaggatgctcggaaagcatgtaatgatgcaacgcttgttcagattacatcaaatatggactccgtgggtcgaatacaaatgcgaacaagacgtacactgaggggccacctagctaaaatctatgctatgcattggggatacgattccaggctgctagtcagtgcttctcaagatggaaaattaattatttgggatagctatacaacaaataagatgcatgctattcctttgaggtcctcctgggtgatgacctgtgcttatgctccctctggtaattatgttgcctgtggaggcttggacaacatctgctctatatataacttaaagaccagagagggaaatgtgagagtaagccgagagttgccaggtcacacagggtacttgtcctgctgtcgttttttagatgacagccaaattgttacaagttcaggagatacaacttgtgctttatgggacatcgaaactgcccagcagaccaccacattcactgggcattctggagatgtgatgagtctttctttgagtcctgacatgaggacttttgtttctggtgcttgtgatgcctcttccaaattatgggatattcgagatggaatgtgtagacagtctttcacgggacatgtctcagatatcaatgctgtcagttttttcccaaatggatatgccttcgccactggctctgatgatgccacttgccggctctttgaccttcgtgcagatcaagagttattattgtattctcatgacaatatcatctgtggaatcacttctgtagccttctcaaaaagtgggcgtctcttgttggctggttacgatgactttaattgtaatgtatgggacacgctaaaaggagatcgtgcaggtgtccttgctggtcatgacaaccgtgtgagctgcttaggtgtaactgatgatggcatggctgtggcaacaggctcttgggacagttttcttagaatctggaattaacagtgtcatacatatttgttctccattgatatatctggagaaatcaatgctacagcctatagctgtgaaaaaattctaccttatatttgcaggtgaagatttttctattagattatctacaaaaacaagctttcagtaaactaccaaaaaaaaagtgggggtggaggaaaaaaggcaaaggcgccttctgagatcaaaaggaccagtgtattaatttgaggggttgggttattttaaccttggtgaattgttgtgtgtactcagagtgtattttctttgtgtagaacagaatgtacacattatagcagctcgccattgtgtttgcattttttaagaagtacatttttaactttgtatacacaagaaatgtcatatttttgagttttgtaatggaagaaccaggcacagaaacagacagaaatgatactgtatgtgtgtgtatttatgtctgaagaaagtccccttgaattctgatatctctttgaatctaagagatcctgatagcttcatgtttaagagcattgacaggtggggcacctctgaggggagttcattgtttctcatgcatcatttgccatatactattaatcaaagtgcttgcttgcagtcctttgaggggacagataatctgaaggccagagattagagatttcactgatattttggacatacataagaaacatcattataattaataaaaagtaggtaatagcatataaatggttcttgacattttaaaagcctggttatgatcagttgacactttgagtacccccctaaatagctggactttccttttcatttcatatttggaactaagtttgtagcgtatactcatctttcagaagtttggtaaacattgggattgtccctgcatctgaacatctttcccagtgctatcagtatacatctagagaggaaatgcaatgtgacagtgttacatttggagagaagtgtgaaatctaaccaatcgctagcacatatttgttgtaacacggtggtttatttcatgtttgcatactataaaatctgaattgatgtgaaatatctgtgcctttaaatttcttaaacctttaagctttttgttctgttttgcaacattttgtagtatttcttcccttccttagcacaaaatactggtttctaagtggttttgcttcaaaggatgtctagatgtaagtgattccacttaaagccaaaataaaaattcctaaagcagttcttaaaggagttagagagctatattaaacagtttttctgtggt

SEQ ID NO: 12666 - protein, 340 aa, Homo sapiens
MSELEQLRQEAEQLRNQIQDARKACNDATLVQITSNMDSVGRIQMRTRRTLRGHLAKIYAMHWGYDSRLLVSASQDGKLIIWDSYTTNKMHAIPLRSSWVMTCAYAPSGNYVACGGLDNICSIYNLKTREGNVRVSRELPGHTGYLSCCRFLDDSQIVTSSGDTTCALWDIETAQQTTTFTGHSGDVMSLSLSPDMRTFVSGACDASSKLWDIRDGMCRQSFTGHVSDINAVSFFPNGYAFATGSDDATCRLFDLRADQELLLYSHDNIICGITSVAFSKSGRLLLAGYDDFNCNVWDTLKGDRAGVLAGHDNRVSCLGVTDDGMAVATGSWDSFLRIWN

SEQ ID NO: 12667 - DNA, 1726 bp, Homo sapiens
  CDS (280)..(966)
aggaaggagggtggccctaccccagcgggctcggctcggggcctccgcggcagttcggggtccttcacccgccggctccagtcctgtgccgttttccgtccgcgactcttccggcccagagctttcggagtgcggttgctcaggggaagccgtcgccgcccccgcctcggggccgagtgagagtgcccgtcgcgtcgcgccgcgtcgccccccgggccgcctccttgccgccagtggcgggctccgttctccctcgaagcactccccccagctccatgaatggaaatcggctccgcaggacccgctggggcccagcccctactcatggtgcccagaagacctggctatggcaccatgggcaaacccattaaactgctggctaactgttttcaagttgaaatcccaaagattgatgtctacctctatgaggtagatattaaaccagacaagtgtcctaggagagtgaacagggaggtggttgactcaatggttcagcattttaaagtaactatatttggagaccgtagaccagtttatgatggaaaaagaagtctttacaccgccaatccacttcctgtggcaactacaggggtagatttagacgttactttacctggggaaggtggaaaagatcgacctttcaaggtgtcaatcaaatttgtctctcgggtgagttggcacctactgcatgaagtactgacaggacggaccttgcctgagccactggaattagacaagccaatcagcactaaccctgcccatgccgttgatgtggtgctacgacatctgccctccatgaaatacacacctgtggggcgttcatttttctccgctccagaaggatatgaccaccctctgggagggggcagggaagtgtggtttggattccatcagtctgttcggcctgccatgtggaaaatgatgcttaatatcgatgaaagagacctctggcagcagtgtggagaatagatagaggagaaaaaactaatctgagaagccagttaggaggcttttcaatcactagttcaggtaagagatggtgatggtctaatgtgggatggagaggaaggattaagctgaaaaaataggtttaagaaccatgtccagaaaaaaaaaactttgggtgtagtactggtacatggaacggattggaaaaaaatagaccagagctttactagatttttgaaagaattgtttttgcaaataaactacaagcctggcatatcagtcaaggttcagaacctagagaagcagaaccagtacgaagtatagagagagagtttatgcaattgtaggggctagctaggcaagtctgaaattttgggggcaggctgtcaggaagggcagggaaattcaggcatgggctgaagcagttatctataagtggaatttcttgctctcagggaagcttcagccctacttttaagacctttcacctaattgaatcaggcccatccacattattcaggataatctccattacttaaagtcaacagattatggattttaatcacatctacaaaataccttcatagcaacacctagattagtgtttgattaaacaaatggcagctggtagcctagcaagttaacacattaaaaacaacacctgccatgatggcttacacttgtaatcccagcactttgggaggccaaagtgggaggatcacttgagattaggagtttgcgatcaggctgaacaacatagtgagacctgatctctacc

SEQ ID NO: 12668 - protein, 229 aa, Homo sapiens [sequence omitted]

SEQ ID NO: 12669 - DNA, 2334 bp, Homo sapiens
  CDS (66)..(1145)
ctttatggcgtgggagaggccacagcccggactccatcgactcccccggctcttagactaaaatcatgcccaagttcaaacaacgaagacgaaagctaaaagccaaagccgaaagattattcaaaaaaaaagaagcctctcactttcagtccaagctaattacacctcctcctccaccaccctcaccagaaagagtcggtatttcttcaatagatatatctcaaagcagaagctggctaacatcatcctggaacttcaattttcctaacatcagagatgcaataaaactttggacaaatagagtatggtctatatacagctggtgccagaactgcataacccagagtttagaagtattgaaagacaccatctttccatctcgtatctgccaccgagaactttacagtgtaaaacaacagttttgcattttggaaagtaaattatgcaagcttcaggaagcactgaagaccatctcagaaagttcttcctgtccaagctgtggtcaaacatgtcacatgagtggtaaacttacaaatgtgcctgcctgcgttctgatcacccctggagactccaaagctgtgcttcctcccacactgccacagccagccagccattttcctcctcctcctccacctccacctctgccacctcctccaccaccactagcacctgtgttgctcagaaaacccagtctcgctaaagcacttcaggctggaccattaaaaaaagatggacccatgcagataacagttaaagatctgctgactgtaaaattaaagaagacacagagtttagatgaaaagaggaagcttataccatcgccgaaagcacggaatccactagttaccgtctctgacttgcagcatgttaccctgaaacctaactccaaagtgttatcgactcgagttacaaacgtcttaatcactcctggaaaaagtcagatggatctgcggaaactgcttagaaaagtcgatgtagagaggaggccaggtggaacccctcttaccaataaggaaaatatggaaacaggaacaggactgactccagtgatgacgcaggccttaaggagaaagtttcagctggctcaccctagaagcccaactccaactctgccactttctacaagcagctttgatgaacaaaactgatgccaactctgcctcactccatgagatgatccataacaaatacagataaaaacacccagctgggtgcagtggctcgcacctgtaatcccagcactttgggaggctgaggcaggtggatcacctgaggtcgggagtttgagaccagcctggccaacatggtgaaatcccatctctactgaaaatacagaattggccgggtgtggtgtcacgcgcctgtggtcccagttacttgaacctgggaggcggaggttgcagtgagccgagattgcaacactgccactccagcctgggtgacagagcaagagaccctgtctcaaaaaaaaaaaaaaaaaaattaaatgggtagtgacgttaagagatatatatcagcttctagtaaaagtttttttttttaaacctgctagctacatttacattatgtaaaaataaatggaataatcactgagaataaagcagttgagtatttataacaataatattttatggggcgcttataatgtttataatattgtaaaccactgtgtactctattcatttaatgctaaatgacttgaccattcttgtgggataagagatcattaaaaaaatgctagggccgggcaccatggctcacgcctgtaatcccaggactttaggaggccaaggcaggtggatgacttgagctcaggagtttgagaccagcctgggcaacatgatgaaaactccgtctctaccaaaaatcaaaaaaattagccaggtgtgatgttgtgcgcctgtagtcccagctacttgtgaggctgaggtgggaggatggtttgggccccggaggtagaggttgcagtgagctgagattgtgccactgtattccatcctgggcaacagagccagaccctgcctcaaaaaaaaaaaaaaaaaaaaaaaggcctggcacagtggctcacgcctgtaatcccagcactttgggaggctgaggcgggcaaaacacttgaggtcagacgtttgagaccagcctggccaacatggtgaaaccccgtctctaccaaaaataaaaataaaaattatccaggcgtggtggcatgtgcctatagccccagctactcaggaagctagagcacgagaattatgtgcatcctggaggtgaaggttgcagtgagccaagatcacaccactccactccagtctggacaacagagtgagaccctgtgtc

SEQ ID NO: 12670 - protein, 360 aa, Homo sapiens
MPKFKQRRRKLKAKAERLFKKKEASHFQSKLITPPPPPPSPERVGISSIDISQSRSWLTSSWNFNFPNIRDAIKLWTNRVWSIYSWCQNCITQSLEVLKDTIFPSRICHRELYSVKQQFCILESKLCKLQEALKTISESSSCPSCGQTCHMSGKLTNVPACVLITPGDSKAVLPPTLPQPASHFPPPPPPPPLPPPPPPLAPVLLRKPSLAKALQAGPLKKDGPMQITVKDLLTVKLKKTQSLDEKRKLIPSPKARNPLVTVSDLQHVTLKPNSKVLSTRVTNVLITPGKSQMDLRKLLRKVDVERRPGGTPLTNKENMETGTGLTPVMTQALRRKFQLAHPRSPTPTLPLSTSSFDEQN

SEQ ID NO: 12671 - DNA, 2192 bp, Homo sapiens
  CDS (85)..(1860)
tcaccaaagttaccgcacaatgggtccacaggttccaccccactgctgaggaattctcactccaactctctaatttccgaatgcatggatagtgaagctgagaccgtcatgcagctccgaaatgagttaagagacaaggagatgaagctgacggatatccgcttagaagctctcagttctgcccaccagctggaccagctccgggaggccatgaacaggatgcagagtgaaatagagaagctgaaagctgagaatgatcggctgaagtcagagtctcaaggcagtggctgcagccgggctccttcccaagtgtccatctctgcctccccgaggcagtccatgggcctctcccagcacagcttgaacctcactgagtcaaccagcctggacatgttgctggatgacactggtgaatgctcggctcggaagggaggaggcaggcatgttaagatagttgtcagctttcaggaggaaatgaagtggaaggaggattccagaccacacctctttcttattggctgcattggagttagtggcaagacgaagtgggatgtgctcgatggggtggttagacggctgttcaaagaatacatcattcatgtcgacccagtgagtcagctagggctgaattcagacagcgttcttggctacagcattggagaaatcaagcgcagcaacacttccgaaacaccggagctgcttccttgtggctatctggttggagagaacacgaccatctcagtgactgtgaaagggctcgcagaaaacagcctggactcactggtgtttgagtccttgattcccaagcccatcctgcagcgctacgtctccctcctgatagagcaccgtcggatcattctctctggccccagcggcactgggaaaacctacctggccaaccggctgtctgagtatatagtgcttcgagagggacgggagttgacagacggggttatcgccacctttaacgtggaccataagtccagcaaggaattgcgccagtacctgtccaaccttgctgaccagtgcaacagtgagaacaatgctgtggacatgcccctcgtcatcatcctggacaacctacaccacgtgagctctctgggcgagatcttcaatgggctgctcaactgcaagtaccacaaatgcccttacataattggcacaatgaaccaggctacctcttcgactcccaacctgcagcttcaccataacttcagatgggtgctttgtgccaaccacacggagcctgtgaagggtttccttggccgattcctgaggagggagctcatggaaacagagatcagtgggcgggtgcgcaatatggagctggtaaaaatcattgactggattcccaaggtctggcatcacctcaaccgcttcctggaggctcacagttcctcggacgtcaccatcggcccccggctcttcctgtcatgccccatcgatgtggacggctcgagagtgtggttcaccgacttgtggaactattccattatcccctatctcctggaagccgtcagagaaggactccagctctatggaaggcgcgccccctgggaggatcctgccaagtgggtgatggacacatatccatgggcagccagcccacaacagcacgagtggcctcccctgctgcagttacggcctgaggatgtcggcttcgacggctactccatgcctcgggagggatcgacaagcaagcagatgccccccagtgatgctgaaggtgacccgctgatgaacatgctgatgaggctgcaggaggcagccaactactccagcccccagagctatgacagcgactccaacagcaacagccatcacgatgacatcttggactcctctttggagtccactctgtgacaggggcccggagcccagcgccctcctcttctcctcaccgcattccacctgcatcccccacatcaccctgaagatgacttcctgagccagcccccagccacagtcttagagctgcgggaacaccgagacccctcgtccttcagcctcgacctgggtgcaggcatcccgggccagctgcctgcggaccgcttccttccacagcgagaactgcactaccttctgttgtactttaattattgttttgccttgttgctgtgacctccctaagacactgaagatacttctcgggaaaggatcatcgccgttgaaatgaaaagagagacagagag

SEQ ID NO: 12672 - protein, 592 aa, Homo sapiens [sequence omitted]

SEQ ID NO: 12673 - DNA, 2226 bp, Homo sapiens
  CDS (115)..(801)
agagcccgggaagcgctcgggcgaagaggaggagccaagggtaccgagcgggtggagtcgggagccggagagcggtggaggcggatttcctgggcccggccctctggcgctaccatggcgtttggcaagagtcaccgggatccctacgcgacctccgtgggccacctcatagaaaaggctacatttgctggagttcagactgaagattggggccagttcatgcacatctgtgacataattaacactacccaggatgggccaaaagatgcagtgaaagctttgaagaaaaggatttccaaaaactacaatcataaagaaatccaacttaccttgtcacttattgacatgtgtgtgcagaactgcggtccaagcttccagtctctgattgtgaagaaggaatttgttaaagagaatttagttaagctactgaatcccagatacaacttgccattagacattcagaatagaatcttgaatttcattaagacttggtcacagggcttcccaggaggtgtggatgtaagcgaagtcaaagaagtatacctcgacctggttaagaaaggcgttcagtttcctccctcagaagcagaggctgaaacagcaagacaagagactgcccaaatctcatcaaatcctccaacatctgtccctactgcaccagctctttcttctgtaattgctccaaagaactcgactgttacattggtcccagaacagattggaaaactgcacagtgaattggatggtgaaaatgaatgtgcgagtgatgtccgccatattgatggagaatactcctgggtctgaaaaccatgaagacatagagcttctgcagaaactctataaaacaggtcgggagatgcaggagaggatcatggacctgcttgtggtggtggagaacgaagatgtaactgttgagctaattcaggtgaatgaggatttgaataatgctatccttggatatgagaggtttactagaaaccaacaaaggattttggagcaaaataagaaccagaaggaagccaccaatactaccagtgagccttctgccccatctcaagatctcctcgacctaagtcccagtccccggatgcctagggccactctgggagaactcaacaccatgaataatcaactttcaggcttaaatttcagccttccaagttctgatgtaacaaacaacttaaaacccagtcttcatccacagatgaacttgctagccttggagaatacagagatacccccgtttgcccaaaggaccagccaaaacctcacctcaagccacgcatatgataatccagttagtctacaaaccattgcagcagcaccatcaaaccagagtctgccacctttgcccagcaatcatccagcgatgacaaaaagtgatctccagccacctaattactacgaggtaatggagtttgatcccttagctcctgctgtcactacagaagctatttatgaagaaattgatgctcaccagcacaaaggagctcaaaatgatggtgactgagaagaaagtggatgatcagctcactaccacatcaaaggtgccaactctctaaaacgtagactctgtgcagctttgaagcctggaagacaatacctaccaacatgtcaaagccatggtggcacatttctgctataatgaagattaaatagaataacagttccaggataacactgattcctgacaacagcatgagatttcaacagaacttgtttggaacaaatactcacttaaaacttcagcagaagaaaaattacttagtccttaggccaaccaatttaactgcagtgtcatgtttcacaggccttcctacatttagaaatcgtcacacagctgtgataagagtagattattttactatgaaataattctgaatagatgaaagcataaaatgtgagaaactgaatgtattattcaggaagaatactgagtgccttcatttaactaaagttgaatgtaaaagtcaatttgcacttctttataatcctctggtttagaattataaattgttaaaaccttgataattgtcatttaattatatttcaggtgtcctgaacaggtcactagactctacattgggcagcctttaaatatgattctttgtaatgctaaatagcctttttttctctttttactgcaacttaatatttctatttagaacacagaaaatgaaaatatttagaataagttgtacatttgatgacaaataaatcactatt

SEQ ID NO: 12674 - protein, 229 aa, Homo sapiens
MAFGKSHRDPYATSVGHLIEKATFAGVQTEDWGQFMHICDIINTTQDGPKDAVKALKKRISKNYNHKEIQLTLSLIDMCVQNCGPSFQSLIVKKEFVKENLVKLLNPRYNLPLDIQNRILNFIKTWSQGFPGGVDVSEVKEVYLDLVKKGVQFPPSEAEAETARQETAQISSNPPTSVPTAPALSSVIAPKNSTVTLVPEQIGKLHSELDGENECASDVRHIDGEYSWV

SEQ ID NO: 12675 - DNA, 1301 bp, Homo sapiens
  CDS (158)..(685)
gaacattattcaatttgtgcatggagaggaagacctgaaggttcagcatagtagctacagacagagggcccggctgttgaaggaccagctctccctgggaaatgctgcacttcagatcacagatgtgaaattgcaggatgcaggggtgtaccgctgcatgatcagctatggtggtgccgactacaagcgaattactgtgaaagtcaatgccccatacaacaaaatcaaccaaagaattttggttgtggatccagtcacctctgaacatgaactgacatgtcaggctgagggctaccccaaggccgaagtcatctggacaagcagtgaccatcaagtcctgagtggtaagaccaccaccaccaattccaagagagaggagaagcttttcaatgtgaccagcacactgagaatcaacacaacaactaatgagattttctactgcacttttaggagattagatcctgaggaaaaccatacagctgaattggtcatcccagaactacctctggcacatcctccaaatgaaaggactcacttggtaattctgggagccatcttattatgccttggtgtagcactgacattcatcttccgtttaagaaaagggagaatgatggatgtgaaaaaatgtggcatccaagatacaaactcaaagaagcaaagtgatacacatttggaggagacgtaatccagcattggaacttctgatcttcaagcagggattctcaacctgtggtttaggggttcatcggggctgagcgtgacaagaggaaggaatggacccgtgggatgcaggcaatgtgggacttaaaaggcccaagcactgaaaatggaacctggcgaaagcagaggaggagaatgaagaaagatggagtcaaacagggagcctggagggagaccttgatactttcaaatgcctgaggggctcatcgacgcctgtgacagggagaaaggatacttctgaacaaggagcctccaagcaaatcatccattgctcatcctaggaagacgggttgagaatccctaatttgagggtcagttcctgcagaagtgccctttgcctccactcaatgcctcaatttgttttctgcatgactgagagtctcagtgttggaacgggacagtatttatgtatgagtttttcctatttattttgagtctgtgaggtcttcttgtcatgtgagtgtggttgtgaatgatttcttttgaagatatattgtagtagatgttacaattttgtcgccaaactaaacttgctgcttaatgatttgctcacatctagtaaaacatggagtatttgt

SEQ ID NO: 12676 - protein, 176 aa, Homo sapiens
MISYGGADYKRITVKVNAPYNKINQRILVVDPVTSEHELTCQAEGYPKAEVIWTSSDHQVLSGKTTTTNSKREEKLFNVTSTLRINTTTNEIFYCTFRRLDPEENHTAELVIPELPLAHPPNERTHLVILGAILLCLGVALTFIFRLRKGRMMDVKKCGIQDTNSKKQSDTHLEET

SEQ ID NO: 12677 - DNA, 1881 bp, Homo sapiens
  CDS (144)..(1280)
atctactacttcttccgagaggacaatcctgacaagaatcctgaggctcctctcaatgtgtcccgtgtggccagttgtgcaggggggaccagggtggggaaagttcactgtcagtctccaagtggaacacttttctgaaagccatgctggtatgcagtgatgctgccaccaacaagaacttcaacaggctgcaagacgtcttcctgctccctgaccccagcggccagtggagggacaccagggtctatggtgttttctccaacccctggaactactcagccgtctgtgtgtattccctcggtgacattgacaaggtcttccgtacctcctcactcaagggctaccactcaagccttcccaacccgcggcctggcaagtgcctcccagaccagcagccgatacccacagagaccttccaggtggctgaccgtcacccagaggtggcgcagagggtggagcccatggggcctctgaagacgccattgttccactctaaataccactaccagaaagtggccgtccaccgcatgcaagccagccacggggagacctttcatgtgctttacctaactacagacaggggcactatccacaaggtggtggaaccgggggagcaggagcacagcttcgccttcaacatcatggagatccagcccttccgccgcgcggctgccatccagaccatgtcgctggatgctgagcggaggaagctgtatgtgagctcccagtgggaggtgagccaggtgcccctggacctgtgtgaggtctatggcgggggctgccacggttgcctcatgtcccgagacccctactgcggctgggaccaaggccgctgcatctccatctacagctccgaacggtcagtgctgcaatccattaatccagccgagccacacaaggagtgtcccaaccccaaaccagacaaggccccactgcagaaggtttccctggccccaaactctcgctactacctgagctgccccatggaatcccgccacgccacctactcatggcgccacaaggagaacgtggagcagagctgcgaacctggtcaccagagccccaactgcatcctgttcatcgagaacctcacggcgcagcagtacggccactacttctgcgaggcccaggagggctcctacttccgcgaggctcagcactggcagctgctgcccgaggacggcatcatggccgagcacctgctgggtcatgcctgtgccctggccgcctccctctggctgggggtgctgcccacactcactcttggcttgctggtccactagggcctcccgaggctgggcatgcctcaggcttctgcagcccagggcactagaacgtctcacactcagagccggctggcccgggagctccttgcctgccacttcttccaggggacagaataacccagtggaggatgccaggcctggagacgtccagccgcaggcggctgctgggccccaggtggcgcacggatggtgaggggctgagaatgagggcaccgactgtgaagctggggcatcgatgacccaagactttatcttctggaaaatatttttcagactcctcaaacttgactaaatgcagcgatgctcccagcccaagagcccatgggtcggggagtgggtttggataggagagctgggactccatctcgaccctggggctgaggcctgagtccttctggactcttggtacccacattgcctccttcccctccctctctcatggctgggtggctggtgttcctgaagacccagggctaccctctgtccagccctgtcctctgcagctccctctctggtcctgggtcccacaggacagccgccttgcatgtttattgaaggatgtttgctttccggacggaaggacggaaaaagctct

SEQ ID NO: 12678 - protein, 379 aa, Homo sapiens
MLVCSDAATNKNFNRLQDVFLLPDPSGQWRDTRVYGVFSNPWNYSAVCVYSLGDIDKVFRTSSLKGYHSSLPNPRPGKCLPDQQPIPTETFQVADRHPEVAQRVEPMGPLKTPLFHSKYHYQKVAVHRMQASHGETFHVLYLTTDRGTIHKVVEPGEQEHSFAFNIMEIQPFRRAAAIQTMSLDAERRKLYVSSQWEVSQVPLDLCEVYGGGCHGCLMSRDPYCGWDQGRCISIYSSERSVLQSINPAEPHKECPNPKPDKAPLQKVSLAPNSRYYLSCPMESRHATYSWRHKENVEQSCEPGHQSPNCILFIENLTAQQYGHYFCEAQEGSYFREAQHWQLLPEDGIMAEHLLGHACALAASLWLGVLPTLTLGLLVH

SEQ ID NO: 12679 - DNA, 2126 bp, Homo sapiens
  CDS (1010)..(2011)
ctcccgttctccaccgtgccggctggccaggtgggctgagggtgaccgagagaccagaacctgcttgctggagcttagtgctcagagctggggagggaggttccgccgctcctctgctgtcagcgccggcagcccctcccggcttcacttcctcccgcagcccctgctactgagaagctccgggatcccagcagccgccacgccctggcctcagcctgcggggctccagtcaggccaacaccgacgcgcagctgggaggaagacagggcccttgacatctccatctgcacagaggtcctggctggaccgagcagcctcctcctcctaggatgacctcaccctccagctctccagttttcaggttggagacattagatggaggccaagaagatggctctgaggcggacagaggaaagctggattttgggagcgggctgcctcccatggagtcacagttccagggcgaggaccggaaattcgcccctcagataagagtcaacctcaactaccgaaagggaacaggtgccagtcagccggatccaaaccgatttgaccgagatcggctcttcaatgcggtctcccggggtgtccccgaggatctggctggacttccagagtacctgagcaagaccagcaagtacctcaccgactcggaatacacagagggctccacaggtaagacgtgcctgatgaaggctgtgctgaaccttaaggacggagtcaatgcctgcattctgccactgctgcagatcgacagggactctggcaatcctcagcccctggtaaatgcccagtgcacagatgactattaccgaggccacagcgctctgcacatcgccattgagaagaggagtctgcagtgtgtgaagctcctggtggagaatggggccaatgtgcatgcccgggcctgcggccgcttcttccagaagggccaagggacttgcttttatttcggtgagctaccctgaagaaggccgcccctcacctgaaagcggaggttggaaactccatgctgctgacgggccacatccttatcctgctaggggggatctacctcctcgtgggccagctgtggtacttctggcggcgccacgtgttcatctggatctcgttcatagacagctactttgaaatcctcttcctgttccaggccctgctcacagtggtgtcccaggtgctgtgtttcctggccatcgagtggtacctgcccctgcttgtgtctgcgctggtgctgggctggctgaacctgctttactatacacgtggcttccagcacacaggcatctacagtgtcatgatccagaaggtcgtcctgcgggacctgctgcgcttccttctgatctacttagtcttccttttcggcttcgctgtagccctggtgagcctgagccaggaggcttggcgccccgaagctcctacaggccccaatgccacagagtcagtgcagcccatggagggacaggaggacgagggcaacggggcccagtacaggggtatcctggaagcctccttggagctcttcaaattcaccatcggcatgggcgagctggccttccaggagcagctgcacttccgcggcatggtgctgctgctgctgctggcctacgtgctgctcacctacatcctgctgctcaacatgctcatcgccctcatgagcgagaccgtcaacagtgtcgccactgacagctggagcatctggaagctgcagaaagccatctctgtcctggagatggagaatggctattggtggtgcaggaagaagcagcgggcaggtgtgatgctgaccgttggcactaagccagatggcagccccgatgagcgctggtgcttcagggtggaggaggtgaactgggcttcatgggagcagacgctgcctacgctgtgtgaggacccgtcaggggcaggtgtccctcgaactctcgagaaccctgtcctggcttcccctcccaaggaggatgaggatggtgcctctgaggaaaactatgtgcccgtccagctcctccagtccaactgatggcccagatgcagcaggaggccagaggacagagcagaggatctttccaaccacatctgctggctctggggtcccagtgaattctggtggcaaatatatattttcactaact

SEQ ID NO: 12680 - protein, 334 aa, Homo sapiens [sequence omitted]

SEQ ID NO: 12681 - DNA, 2192 bp, Homo sapiens
  CDS (91)..(1563)
ctttaccctacatgcctgagaagccaggggccaagatggatcttctcctcgacatcagctaagcctggaggactcttcccctcagagaccatggagagggacagccacgggaatgcatctccagcaagaacaccttcagctggagcatctccagcccaggcatctccagctgggacacctccaggccgggcatctccagcccaggcatctccagcccaggcatctccagctgggacacctccgggccgggcatctccagcccaggcatctccagctggtacacctccaggccgggcatctccaggccgggcatctccagcccaggcatctccagcccaggcatctccagcccgggcatctccggctctggcatcactttccaggtcctcatccggcaggtcatcatccgccaggtcagcctcggtgacaacctccccaaccagagtgtaccttgttagagcaacaccagtgggggctgtacccatccgatcatctcctgccaggtcagcaccagcaaccagggccaccagggagagcccaggtacgagcctgcccaagttcacctggcgggagggccagaagcagctaccgctcatcgggtgcgtgctcctcctcattgccctggtggtttcgctcatcatcctcttccagttctggcagggccacacagggatcaggtacaaggagcagagggagagctgtcccaagcacgctgttcgctgtgacggggtggtggactgcaagctgaagagtgacgagctgggctgcgtgaggtttgactgggacaagtctctgcttaaaatctactctgggtcctcccatcagtggcttcccatctgtagcagcaactggaatgactcctactcagagaagacctgccagcagctgggtttcgagagtgctcaccggacaaccgaggttgcccacagggattttgccaacagcttctcaatcttgagatacaactccaccatccaggaaagcctccacaggtctgaatgcccttcccagcggtatatctccctccagtgttcccactgcggactgagggccatgaccgggcggatcgtgggaggggcgctggcctcggatagcaagtggccttggcaagtgagtctgcacttcggcaccacccacatctgtggaggcacgctcattgacgcccagtgggtgctcactgccgcccactgcttcttcgtgacccgggagaaggtcctggagggctggaaggtgtacgcgggcaccagcaacctgcaccagttgcctgaggcagcctccattgccgagatcatcatcaacagcaattacaccgatgaggaggacgactatgacatcgccctcatgcggctgtccaagcccctgaccctgtccggtgagggaatctgcactccccgctctcctgccccccagccccagcaccctctgcagccctcgcacttgtcagcatctgtcaactcatatccgggccccaaagcttctgcagggcagaagtcaaagactcttaaagatccttacatggaacacttctgttttataattagggaaactgaagcccaagggttataaataagtttgctccaaatgacacatctcacattacaaattgatgacggagtcagggcttgggtactgatcttaatcaatagattgaattctttcactggtattaactgagcacctaggggccaaacgctatggtaggcatttcacacatatgatttcatttactcttcacaaccaaccctgtggagcaggcactattattaacttcatttgacatatgaggaaatggagctttacagagagataattacctgaggccacaagtaataggtggtagctctgggattggaaccaggtcgatctgattcccaagcaatgtctccccacctggctctagactggcaaattgcttaccctgcagtcgagaacttaagctgagtacacattcaaacaactaattgctacaacgttgttgctaaggaccaaaggaggctacacaaaggaaatgctgcagaggttctcagaagatcactgtggacaggggacgtcaaagaagacttcattcattcattcattcattcattcactcatcattcatccattcactcatttgttcacttatcaaatactatatggccagccctatagtacagttgcaaatagaaataaaatacaccaagacgaccagt

SEQ ID NO: 12682 - protein, 491 aa, Homo sapiens
MERDSHGNASPARTPSAGASPAQASPAGTPPGRASPAQASPAQASPAGTPPGRASPAQASPAGTPPGRASPGRASPAQASPAQASPARASPALASLSRSSSGRSSSARSASVTTSPTRVYLVRATPVGAVPIRSSPARSAPATRATRESPGTSLPKFTWREGQKQLPLIGCVLLLIALVVSLIILFQFWQGHTGIRYKEQRESCPKHAVRCDGVVDCKLKSDELGCVRFDWDKSLLKIYSGSSHQWLPICSSNWNDSYSEKTCQQLGFESAHRTTEVAHRDFANSFSILRYNSTIQESLHRSECPSQRYISLQCSHCGLRAMTGRIVGGALASDSKWPWQVSLHFGTTHICGGTLIDAQWVLTAAHCFFVTREKVLEGWKVYAGTSNLHQLPEAASIAEIIINSNYTDEEDDYDIALMRLSKPLTLSGEGICTPRSPAPQPQHPLQPSHLSASVNSYPGPKASAGQKSKTLKDPYMEHFCFIIRETEAQGL

SEQ ID NO: 12683 - DNA, 2378 bp, Homo sapiens
  CDS (135)..(458)
actccaagaaccgggtgcccaccttggaagaggtgtcacagacactgaggagcaaaggccacgtatcaaggtccccagatgaggaggctgtggcacgggcccctgaagacagctcccctgcccccgaggtgttcatgaaccagctggaccgcatcagcgaggaatgcgagccatgggacgcccaggactaccacccactcatcttccaggacgccagcatcaccttcgtgaacacggaggctggcctctcagacgaggagacctccaagtcctcgctagaggacaacttggcaggggaggagagcccccagcagggggctgaagccaaggcgcccctgaacatgggcgagttcccctcctcctccgagtccaccttcaccagcactgagtctgagctctctgtgccttacgaacagctgatgaatgagtacaacaaggctaacagccccaagggcacatgaggcagggccggctccccaccccacctttgatggcctcttcccccctcaccctagggtgtcccgagatgaccgggacgcctggcccctggtgggggggcagcctcggaactgggagtggggggccaggggccttcctaaccttccatcatcctcagctagatgtatgcccgggacagggcctctgttctccagctgaaccataccctggctgtgggggcatctgtcctgagcttggctggtgtatctcacaatgcaaagacatgctggctggcgggacaggtgggcaggactgaccctgaggaggccttgcctgcagggtctttgtctcaccatttggtggagtatcacacggttctctgaggtctggggcctcagctgtttaagtttaccggtattactgagctcggcatttggagagggagctctgaagtgtctggggaggtaccgctgtgcgtggggtcaggtgtttccgtaccacagcaggagcagggcccgcccgcatcccagctgtgggcctgccggtcaggtcgggcacctactacaaaccgtagtggggtggaggctgctggaggtgggagtgaggagatgagggcagggtctcaaacagtcctgactcacagggcctggaaacaagtcctatgtgggcctggggcctggggtcctcatcctccttgttggtctactcaggcccagcccagagctgtgttccctgtctcaggtcaagcagtggcagacgcaaggctttctgtgggcccccaagtggtaggagggagagtagcagagcatgggttactggaagccgggactgctagggctggtggccagggagctgcaagagtgaggctcagctctggctggttctgcccttacccctcctgcccgcctgagaactgcacaccctgcccgctggccccaggacctgcactcccaatcctgctgtcttctccttccctgtgccctgaacaaggacctcactgcccgccttcccctcccaccagcccccttgggccaggcagggtgaggccaaattgctcttggcccacaaatgggtgatggtcagatatgtgaatcaagctcctttctctagctagtgtttgatgtgcacgtgtgtgtgcacagtgcgtgtgtgcacacgcacacctgtgcactcgtgtgtgtttaagaaaggaaaggatttgggctggggagcaaaagataatgtgaaactgttggtggactctctggtgaggggtgggcagaacttgctgctactagagttcttgggttctccatgatgttcaccctggggctggcccactgtgtcctgaatgtttttgttattttttgttttattttttaaacaaactgctgtttttatatacctggaatctgttgttggcttcagagccagtggttaaagagcagggtcccaaggattgggagatctagtgtctgccctcctgccctgcaactcaattgggcctttttcggtgacctcatccaaggccatgatgtcaagggccatgtccccaagcagaggtggagaaggggacactgaggtgagcaaaagcaggaaggggcatccactgcgggtgactggaggccgggcaggaagcaagtcatcagagccgctcagctccgttcactctctgccttctgccccactactgtggggcagtggggccagagcccacctccccaacatgtgaagacagtgatgggcacgtgcccacacccccacttctctagccgtttgcagaggccgccacccagcaggggcctgaaaaggagcagcctcgtatttttctgtgaaatgttttaatgaaccatgttgttgctggttgtcctggcatcgcgcacactgtatgtacatactggcaacgatgtcaaatgtaatttattttaacatttttacaataaaacatgaggtggacaggc

SEQ ID NO: 12684 - protein, 108 aa, Homo sapiens [sequence omitted]

SEQ ID NO: 12685 - DNA, 1529 bp, Homo sapiens
  CDS (60)..(668)
atagtctacacagagctccccttgctgcccagacaagctgaaggaccacaggaaaagccatggagacttcagcatcctcctcccagcctcaggacaacagtcaagtccacagagaaacagaagatgtagactatggagagacagatttccacaagcaagacgggaaggctggactcttttcccaagaacaatatgagagaaacaagtcttcttcctcctccttctcttcctcctcatcctcctcatcttcttcatcctcctcctcctcaggtcctgggcatggggagcctgacgttttgaaggatgagcttcaactctatggagatgctcctggagaggtggtaccctctggggaatcaggactccgaaggagaggctctgacccagcaagtggagaagtggaggcctctcagttaagaagactgaatataaagaaagatgatgagtttttccatttcgtcctcctgtgctttgccatcggggccttgctggtgtgttatcactattacgcagactggttcatgtctcttggggtcggcctgctcaccttcgcctccctggaaaccgttggcatctacttcggactagtgtaccgtatccacagcgtcctccaaggcttcatccccctcttccagaagtttaggctgacagggttcaggaagactgactgaggccacttccaggtgggcagcagaggcaggccccagtgtgaccaccactgcgacccctgagcccacaagggcagagcagcattctgagagacgcacaggagaccaagccagaccaataaacagaacacttttccttccatgtggtctgaatgttggcaccagcccgggcaggggcatctcatttgggcagtactgctgtgcaacccagctgcaaggatggaaggcagagggtgggtgtggggcctgaggcttcacagtacctggaccagcaggaagattctgggaggtcactgctctcagaggacagcaagggaccctgagctctgcaagctgtgatctgtctgggttcatggtttttctcaaatcccaggctatctgcatgcgctctcaggtgctaccgagccatcctgggagagatggatggtccactgctttgaggcagggagccatcgggctggggccccttggtgaacctgatgcaggtaagatgctgaggactaaaaccattttttttgcacccaaaaaaaaaggcaggaaaatgatcatcagaaactaaatggcagccaggcatgggggctcacgactgtaatcctcgcactttgggaggctcaggctaagggtcgcttgaagctgagagttcaagaccaacctgggcaacatagtgagacccccatctctacaatttttttttaatgaccaaatgtggcggtacatacctgtacatacctgcggttccagctactcaagaggctgaggcaggaggactgcttgagcccaggagttcagggctgcagtgaggtacgatcaagccactgcactccagcctgggcgacagagcaagatcgtttctctaaaatt

SEQ ID NO: 12686 - protein, 203 aa, Homo sapiens
METSASSSQPQDNSQVHRETEDVDYGETDFHKQDGKAGLFSQEQYERNKSSSSSFSSSSSSSSSSSSSSSGPGHGEPDVLKDELQLYGDAPGEVVPSGESGLRRRGSDPASGEVEASQLRRLNIKKDDEFFHFVLLCFAIGALLVCYHYYADWFMSLGVGLLTFASLETVGIYFGLVYRIHSVLQGFIPLFQKFRLTGFRKTD

SEQ ID NO: 12687 - DNA, 2162 bp, Homo sapiens
  CDS (279)..(2069)
aaaaagacggaggagatccagttcgggctgacagtgagaggatgcagcccggtgtctgggcgggctcttaccggcgaagcggatcttcacgaggtcgagcggatgcagcgcaaggttggataagacgccgccgctcacgcccgctatcaggttctcataccggacgtggcggaataccgtgctccacgccgacgacccggacgccgactggccctggcccgtcataggctcggggcccgtcgacaccacggcgcccagggccgcggaggtgggacgcgatgcagtggccgccaccgtggcgacggtcgccccttgtgagcgcaaccccacctccgggaccaacgagaggactcttatgcccaaggcgcgtgagcgaagccggagactctagtactgagggggcaagaacggggcacagccactacgtcacgccggcggaaagcgcgatggaggggaggtcccagcctctcccgagtctccgccctgcctcgcccacaaatgctccagcccacggacgcggaagcgactgcacagctaaagaaccgccccttgctaacgtttgccggcaaaactacggagcggcgcaggatccagttgagctagcaggccgccgctccgcgagtcacgtgactggaagcagtctgggaaaagcggaagtcgcctgtgggaggaggtggcggtgggcggaactcctagcggacacctcgtggagtccggccggaagagcaaccgagatgaaggtgaagatgctgagccggaatccggacaattatgtccgcgaaaccaagttggacttacagagagttccaagaaactatgatcctgctttacatccttttgaggtcccacgagaatatgtaagagctttaaatgctaccaaactggaacgagtatttgcaaaaccattccttgcttcgctggatggtcaccgtgatggagtcaattgcttggcaaagcatccagagaagctggctactgtcctttctggggcgtgtgatggagaggttagaatttggaatctaactcagcggaattgtatccgtacaatacaagcacatgaaggctttgtacgaggaatatgtactcgcttttgtgggacttcttttttcactgttggtgatgacaaaactgtgaagcagtggaaaatggatgggccaggctatggagacgaggaagagccattacatacaatattaggaaagacagtgtatactgggattgatcatcactggaaagaagctgtttttgccacatgtggacagcaagtagacatttgggatgaacaaagaactaatcctatatgttcaatgacctggggatttgacagtataagtagtgttaaatttaacccaattgagacatttctcttgggaagttgtgcatctgacaggaatatagtactgtacgatatgaggcaagctactcctttgaaaaaggttatcttagatatgagaacaaatacaatctgttggaaccctatggaagctttcatttttacagcagcaaatgaagattataacttatatacttttgatatgcgtgcactggacactcctgtaatggtccatatggatcatgtatctgcagtgcttgatgtggattactctcccactgggaaggagtttgtgtctgctagtttcgataaatctattcgaatctttcctgtagacaaaagtcgaagcagggaggtatatcatacaaagagaatgcaacatgttatctgtgtaaaatggacttctgacagcaagtatattatgtgtggatctgatgaaatgaacattcgcctgtggaaagctaatgcttctgaaaaattgggtgtgcttacatcacgagaaaaagcagccaaggattataaccagaaattgaaggagaaatttcagcattatcctcatataaaacgtatagctcgtcatcgacatctaccaaaatctatctatagccagattcaggaacagcgcatcatgaaagaagctcgtcgacgaaaggaagtgaatcgtattaaacacagcaagcctggatctgtgccacttgtgtcagagaagaagaaacacgtagtggcagttgtaaaataattggtattcctaacaatcctgatgtataattatttgttacttttgatttgagaactctacaaataaaagtgctgggactagattaattgc

SEQ ID NO: 12688 - protein, 597 aa, Homo sapiens
MQWPPPWRRSPLVSATPPPGPTRGLLCPRRVSEAGDSSTEGARTGHSHYVTPAESAMEGRSQPLPSLRPASPTNAPAHGRGSDCTAKEPPLANVCRQNYGAAQDPVELAGRRSASHVTGSSLGKAEVACGRRWRWAELLADTSWSPAGRATEMKVKMLSRNPDNYVRETKLDLQRVPRNYDPALHPFEVPREYVRALNATKLERVFAKPFLASLDGHRDGVNCLAKHPEKLATVLSGACDGEVRIWNLTQRNCIRTIQAHEGFVRGICTRFCGTSFFTVGDDKTVKQWKMDGPGYGDEEEPLHTILGKTVYTGIDHHWKEAVFATCGQQVDIWDEQRTNPICSMTWGFDSISSVKFNPIETFLLGSCASDRNIVLYDMRQATPLKKVILDMRTNTICWNPMEAFIFTAANEDYNLYTFDMRALDTPVMVHMDHVSAVLDVDYSPTGKEFVSASFDKSIRIFPVDKSRSREVYHTKRMQHVICVKWTSDSKYIMCGSDEMNIRLWKANASEKLGVLTSREKAAKDYNQKLKEKFQHYPHIKRIARHRHLPKSIYSQIQEQRIMKEARRRKEVNRIKHSKPGSVPLVSEKKKHVVAVVK

SEQ ID NO: 12689 - DNA, 1767 bp, Homo sapiens
  CDS (321)..(1145)
acttgtggtgcgctgccagggctccgcagcgttgccggttgtattcgctggataccagagggcggaagtgcagcagggttcagctccgacctccgcgccggtgctttttgcggctgcgcgggcttcctggagtcctgctaccgcgtccccgcaggacagtgtgtcaggcgggcagcttgccccgccgccccaccggagcgcggaatctgggcgtccccaccagtgcggggagccggaaggaggagccatagcttggagtaggtttggctttggttgaaataagaatttagcctgtatgtactgctttaactcctggaagaatgacagatgacaaagatgtgcttcgagatgtgtggtttggacgaattccaacttgtttcacgctatatcaggatgagataactgaaagggaagcagaaccatactatttgcttttgccaagagtaagttatttgacgttggtaactgacaaagtgaaaaagcactttcagaaggttatgagacaagaagacattagtgagatatggtttgaatatgaaggcacaccactgaaatggcattatccaattggtttgctatttgatcttcttgcatcaagttcagctcttccttggaacatcacagtacattttaagagttttccagaaaaagaccttctgcactgtccatctaaggatgcaattgaagctcattttatgtcatgtatgaaagaagctgatgctttaaaacataaaagtcaagtaatcaatgaaatgcagaaaaaagatcacaagcaactctggatgggattgcaaaatgacagatttgaccagttttgggccatcaatcggaaactcatggaatatcctgcagaagaaaatggatttcgttatatcccctttagaatatatcagacaacgactgaaagacctttcattcagaagctgtttcgtcctgtggctgcagatggacagttgcacacactaggagatctcctcaaagaagtttgtccttctgctattgatcctgaagatggggaaaaaaagaatcaagtgatgattcatggaattgagccaatgttggaaacacctctgcagtggctgagtggacatctgagctacccggataattttcttcatattagtatcatcccacagccaacagattgaaggatcaactatttgcctgaacagaatcatccttaaatgggatttatcagagcatgtcacccttttgcttcaatcaggtttggtggaggcaacctgaccagaaacacttcgctgctgcaagccagacaggaaaaagattccatgtcagataaggcaactgggctggtcttactttgcatcacctctgctttcctccactgccatcattaaacctcagctgtgacatgaaagacttaccggaccactgaaggtcttctgtaaaatataatgaagctgaaacctttggcctaagaagaaaatggaagtatgtgccactcgatttgtatttctgattaacaaataaacaggggtatttcctaaggtgaccatggttgaactttagctcatgaaagtggaaacattggtttaattttcaagagaattaagaaagtaaaagagaaattctgttatcaataacttgcaagtaattttttgtaaaagattgaattacagtaaacccatctttccttaacgaaaatttcctatgtttacagtctgtctattggtatgcaatcttgtaactttgataatgaacagtgagagatttttaaataaagcctctaaatatgttttgtcattt

SEQ ID NO: 12690 - protein, 275 aa, Homo sapiens [sequence omitted]

SEQ ID NO: 12691 - DNA, 2508 bp, Homo sapiens
  CDS (807)..(2171)
aaaaacaggagctgattcgagctggcagagctgggccatggaaccggtagagacctggacccccggaaaggtggcaacttggctgagaggtcttgacgactccctgcaggactatccctttgaggactggcagctgcctggcaagaacctgctccagctctgcccccaaagcctcgaggctctggctgtgcggtctctgggacaccaggagctcatcctgggcggggtggaacagctccaggccctgagctccaggctacagacagagaacctgcaaagcctgacagagggacttctgggggcaacccatgacttccagagcatagtccaaggctgcctgggggactgtgccaagacccctattgatgtcctctgtgcagctgtggagctgttgcatgaagctgacgccctcctcttctggctcagcaggtacctcttctcccacttaaatgatttctcagcatgccaggagatccgagacttgttggaggagctgagccaggtcttgcatgaggatggtccagcggctgagaaggagggcacagtcctgaggatcccacgtggctgggatctgccacaacatcctggtctgctgccccaaggagctgctggaacagaaggccgtgctcgagcaggtgcagctggacagtccattgggcctagaaattcacaccaccagcaattgccagcactttgtgtcccaagtggacacccaggttcccactgactcccgactgcagatccagcctggagacgaggttgtccagatcaacgagcaggtggtggtgggatggccccgtaagaacatggtgagggaactgctgcgggagccagccggactcagcttagtgctgaagaagatcccgataccggagacccccccacagacgccccctcaggtcctggactccccgcaccagaggagcccatcactgtctctggccccactgtctcccagggccccatctgaagacgtctttgcctttgacctgtcttcaaaccccagtcccggacccagccctgcctggacagactctgcctcccttggccctgagcccctgcccatccccccggaacccccagccatactcccagcaggggtagcagggactccagggctccctgaatcccctgacaagagtcctgttggtcggaagaaatcaaaaggcctggcgacccggctgagccgccggcgggtgtcatgccgtgagctgggccggccggactgtgacggctggctcctgttgcgaaaggcaccgggcggcttcatgggcccgcgctggcgccgccgctggtttgtgctcaagggacacacactctactggtaccgccagccccaggatgagaaggctgagggcctcatcaatgtctccaactatagtctggaaagtggacatgatcagaagaagaaatatgtgtttcagctcacccatgatgtgtacaaacccttcatcttcgctgctgataccctgacagatctgagcatgtgggtgcgtcatctcattacctgcatctccaagtaccagtctccaggccgggcccccccaccccgagaggaagactgctacagtgagaccgaagcagaggacccggacgatgaggctgggtcccactcagcctcgcccagccctgctcaagctgggagtcccctccatggagacacatcacctgcagccacccccacacagcgcagcccacggacctcctttggctctctgacagacagcagtgaagaggcactggaaggaatggtacgggggctgaggcagggtggcgtgtccctcctaggccagccacagcccctgacccaggaacagtggcggagctctttcatgcggcgcaaccgagaccctcagctcaatgagcgagtgcaccgtgtgcgggcgctacagagcacactcaaggcaaagctgcaggagctgcaggtcctagaagaagtgctgggtgaccctgagctgacaggagagaagttccgccagtggaaggagcagaaccgggagctgtactcagagggcctgggggcctggggagtggcacaggctggaggcagctcccacatcttgacctctgactccacagaacagtcccccaactccctgccctctgaccctgaagagcactcccatctctgccccctgacctcagagagcagcctccgacctcctgacctctgaccctggccagcactctagctcctgacctttgacccgagggccacctcaaccccagcttctgacgtgtccaggacagagcatccctggattctgttcagggtgggaagtagtactgctagtcatggtctcaccccgagctgacccctctgcctgggctttgtgccaccctctcccttgccaaagaagaaactctccccccaaatcctccaacctctggggccacagccctgcccctccagttccttggcagttctcccccaaaccaggtctgtacaggtgttctttattttacatgagggctactttccaaccaaataaagtcaatttttctaag

SEQ ID NO: 12692 - protein, 455 aa, Homo sapiens
MVRELLREPAGLSLVLKKIPIPETPPQTPPQVLDSPHQRSPSLSLAPLSPRAPSEDVFAFDLSSNPSPGPSPAWTDSASLGPEPLPIPPEPPAILPAGVAGTPGLPESPDKSPVGRKKSKGLATRLSRRRVSCRELGRPDCDGWLLLRKAPGGFMGPRWRRRWFVLKGHTLYWYRQPQDEKAEGLINVSNYSLESGHDQKKKYVFQLTHDVYKPFIFAADTLTDLSMWVRHLITCISKYQSPGRAPPPREEDCYSETEAEDPDDEAGSHSASPSPAQAGSPLHGDTSPAATPTQRSPRTSFGSLTDSSEEALEGMVRGLRQGGVSLLGQPQPLTQEQWRSSFMRRNRDPQLNERVHRVRALQSTLKAKLQELQVLEEVLGDPELTGEKFRQWKEQNRELYSEGLGAWGVAQAGGSSHILTSDSTEQSPNSLPSDPEEHSHLCPLTSESSLRPPDL

SEQ ID NO: 12693 - DNA, 2024 bp, Homo sapiens
  CDS (131)..(1408)
aatgagcgactcgctttccgtgcggtgcggcgagtgaggccccggtcttcctcctcgtcctgccgcagggccagaacccctgacggtattcagctgcgcgtaagtctggccggtgccatctgtctccgcaatgccccccaagaaacaggctcaggccgggggcagcaaaaaggcggagcaaaaaaagaaggagaagattatcgaagacaaaactttcggtttgaagaataagaaaggagcaaagcaacagaagtttatcaaggctgtcacacatcaagttaaatttggtcaacaaaatccacgtcaggtagcacagagtgaagctgaaaagaaattgaagaaggatgacaagaagaaagaattgcaggagctaaatgagctgttcaaacctgtagttgctgctcaaaaaataagtaaaggtgcagatcccaagtctgtagtatgtgcattcttcaagcaaggacggtgtactaaaggagataagtgtaagttctcccatgacttgactctggagagaaaatgtgaaaagcgaagtgtttacattgatgcaagagatgaagaacttgaaaaagatactatggataattgggatgagaaaaagctggaagaagtagtgaacaagaagcacggtgaggcggaaaagaaaaaaccaaaaactcaaatagtgtgcaagcatttcctggaagctattgaaaacaacaagtatggctggttttgggtatgccctggagggggtgatatttgcatgtatcgtcatgcacttcctcctggatttgtgttgaaaaaagataaaaagaaagaagagaaagaagatgaaatttcattagaagatctaattgagagagagcgttctgccctaggtccaaatgttaccaaaatcactctagaatcttttcttgcctggaagaaaaggaaaagacaagaaaagattgataaacttgaacaagatatggaaagaaggaaagctgacttcaaagcagggaaagcactagtgatcagtggtcgtgaagtgtttgaatttcgtcctgaactggtcaatgatgatgatgaggaagcagatgatacccgctacacccagggaacaggtggtgatgaggttgatgattcagtgagtgtaaatgacatagatttaagcctgtacatcccaagagatgtagatgaaacaggtattactgtagccagtcttgaaagattcagcacatatacttcagataaagatgaaaacaaattaagtgaagcttctggaggtagggctgaaaatggtgaaagaagtgacttggaagaggacaacgagagggagggaacggaaaatggagccattgatgctgttcctgttgatgaaaatcttttcactggagaggatttggatgaactagaagaagaattaaatacacttgatttagaagaatgacaccaaacacatcgctgaaaaaattaagtcagctcagcacgagttgaaattgactacattaatttctttccacctagaatcaacaggatgtttatttcctatgctgattctggaggagttaacctcctgcaaaaaaggcatcttgtccctacatcttctcttctgactttggctacatctcatagtaagttcagagtagttcatgataaattgaaaatataatggtcattgcagaaaatgattgatgttgtaactgtccacccaagtaagaagtgtatctgcctttccatcttttggttttcatttgggcatgtgctattaccagaaacaacaaacttatatttaaaatacccttcatttgacacagtttttaatgagtaatttaatttcctctgtatttgtatgtttagaagactgcctaaaacatgagcactgtacttcataaaggaaactgcgtatgcagattcagtattgtgtatctttggacaattagatggacatttaaaatggaacttcttttatctgacaggatcagctacaatgccctgtgttaaattgtttaaaagtttcccttttcttttttgccaataaagttgtaaataaagaccatcat

SEQ ID NO: 12694 - protein, 426 aa, Homo sapiens [sequence omitted]

SEQ ID NO: 12695 - DNA, 2453 bp, Homo sapiens
  CDS (6)..(1457)
ctattatgaaccagtatacagaaatagaaacctgtgtggagtgttcagcgaaaaacctgaagaacatatcagagctcttttattacgcacagaaagctgttcttcatcctacagggcccctgtactgcccagaggagaaggagatgaaaccagcttgtataaaagcccttactcgtatatttaaaatatctgatcaagataatgatggtactctcaatgatgctgaactcaacttctttcagaggatttgtttcaacactccattagctcctcaagctctggaggatgtcaagaatgtagtcagaaaacatataagtgatggtgtggctgacagtgggttgaccctgaaaggttttctctttttacacacactttttatccagagagggagacacgaaactacttggactgtgcttcgacgatttggttatgatgatgacctggatttgacacctgaatatttgttccccctgctgaaaatacctcctgattgcactactgaattaaatcatcatgcatatttatttctccaaagcacctttgacaagcatgatttggatagagactgtgctttgtcacctgatgagcttaaagatttatttaaagttttcccttacataccttgggggccagatgtgaataacacagtttgtaccaatgaaagaggctggataacctaccagggattcctttcccagtggacgctcacgacttatttagatgtacagcggtgcctggaatatttgggctatctaggctattcaatattgactgagcaagagtctcaagcttcagctgttacagtgacaagagataaaaagatagacctgcagaaaaaacaaactcaaagaaatgtgttcagatgtaatgtaattggagtgaaaaactgtgggaaaagtggagttcttcaggctcttcttggaagaaacttaatgaggcagaagaaaattcgtgaagatcataaatcctactatgcgattaacactgtttatgtatatggacaagagaaatacttgttgttgcatgatatctcagaatcggaatttctaactgaagctgaaatcatttgtgatgttgtatgcctggtatatgatgtcagcaatcccaaatcctttgaatactgtgccaggatttttaagcaacactttatggacagcagaataccttgcttaatcgtagctgcaaagtcagacctgcatgaagttaaacaagaatacagtatttcacctactgatttctgcaggaaacacaaaatgcctccaccacaagccttcacttgcaatactgctgatgcccccagtaaggatatctttgttaaattgacaacaatggccatgtatccgcacgtgacacaagctgaccccaagagctccacgttttggcttcgagcaagttttggtgctactgtttttgcagttttgggctttgctatgtacaaagcattattgaaacagcgatgatataaaaagaaatactgtccctaccaaaaacaaatacttttatgtacattctgaatgctttaagttctgctagaattattgagatatttatacatgcagagttactttattaatatttgtaattcatgcataagagtattttaatgatagttataactgcagtattggctagcatatggaaagaaaacagctaacagccaaactaaaatggctaaattccagaggccaaaagggaatattttgtaaatatatgtacatattcaggcaagatatggtctcccaagctgagttctagaaatgatgtttctagacatttctaagtggtattgttagtgctcacttggctcactcttctaggtttaagttagcccagagattgtatttactcatggatcactttatttatttcacatttactcagaatgatcctttgggttctataaggacataaggtacaatttgccattgtctctccatttttaaaaacatacaagtcagtgtcagcttaccaacatgacattttttcagtcagttgtggtaggccagccttgaagccatcgcacagtctagaaacttgtgtagctgagtgtgcagctcacctttaagggtgaagttaggtaaaagcaattagcagaggcgttatctatgtgattatgttgcttccttgtcagtatgttgaattttatagccctttcaatgaaataaaaaaaaaatttgtatattaccaatgtttttagtttaaataaagagtcacccttactactgttgaatttcatcccaagtgtaaatcattctataatggctgtgtctgttatagtatattacagtaactgcatgtgtcaccaagtgttctatatcaggctaggataacctagaggcagtaattttttaaatgataaaataaatctaatgaatataaactctcatgataaacctattttttccatcatcagccttttcaagtatttaaataaataactgctgtgtactgtg

SEQ ID NO: 12696 - protein, 484 aa, Homo sapiens
MNQYTEIETCVECSAKNLKNISELFYYAQKAVLHPTGPLYCPEEKEMKPACIKALTRIFKISDQDNDGTLNDAELNFFQRICFNTPLAPQALEDVKNVVRKHISDGVADSGLTLKGFLFLHTLFIQRGRHETTWTVLRRFGYDDDLDLTPEYLFPLLKIPPDCTTELNHHAYLFLQSTFDKHDLDRDCALSPDELKDLFKVFPYIPWGPDVNNTVCTNERGWITYQGFLSQWTLTTYLDVQRCLEYLGYLGYSILTEQESQASAVTVTRDKKIDLQKKQTQRNVFRCNVIGVKNCGKSGVLQALLGRNLMRQKKIREDHKSYYAINTVYVYGQEKYLLLHDISESEFLTEAEIICDVVCLVYDVSNPKSFEYCARIFKQHFMDSRIPCLIVAAKSDLHEVKQEYSISPTDFCRKHKMPPPQAFTCNTADAPSKDIFVKLTTMAMYPHVTQADPKSSTFWLRASFGATVFAVLGFAMYKALLKQR

SEQ ID NO: 12697 - DNA, 1932 bp, Homo sapiens
tatcatgcatgtgggaaggtgggtgtggtgagaaaagttttaaggcaagagtagatggccatgttcaactttacaaaatttcttggaaaactggcagtattttgaactgcatcttctttggtaccggaacctgcagaaacagtgtgagaaattaagtcctggttcactgcgcagtagcaaagatggtcaaggccatggaaaaagcagaaatttaccaagaaagctgatacccatgtatagttcccactcatctcaaatacatctgctatctttttaagctaagtcctagacatatcggggataacatgggggttgattagtgaccacagttatcagaagcagagaaatgtaattccatattttatttgaaacttattccatattttaattggatattgagtgattgggttatcaaacacccacaaactttaattttgttaaatttatatggctttgaaatagaagtataagttgctaccattttttgataacattgaaagatagtattttaccatctttaatcatcttggaaaatacaagtcctgtgaacaaccactctttcacctagcagcatgaggccaaaagtaaaggctttaaattataacatatgggattcttagtagtatgtttttttcttgaaactcagtggctctatctaaccttactatctcctcactctttctctaagactaaactctaggctcttaaaaatctgcccacaccaatcttagaagctctgaaaagaatttgtctttaaatatcttttaatagtaacatgtattttatggaccaaattgacattttcgactattttttccaaaaaagtcaggtgaatttcagcacactgagttgggaatttcttatcccagaagaccaaccaatttcatatttatttaagattgattccatactccgttttcaaggagaatccctgcagtctccttaaaggtagaacaaatactttctattttttttttcaccattgtgggattggactttaagaggtgactctaaaaaaacagagaacaaatatgtctcagttgtattaagcacggacccatattatcatattcacttaaaaaaatgatttcctgtgcaccttttggcaacttctcttttcaatgtagggaaaaacttagtcaccctgaaaacccacaaaataaataaaacttgtagatgtgggcagaaggtttgggggtggacattgtatgtgtttaaattaaaccctgtatcactgagaagctgttgtatgggtcagagaaaatgaatgcttagaagctgttcacatcttcaagagcagaagcaaaccacatgtctcagctatattattatttattttttatgcataaagtgaatcatttcttctgtattaatttccaaagggttttaccctctatttaaatgctttgaaaaacagtgcattgacaatgggttgatatttttctttaaaagaaaaatataattatgaaagccaagataatctgaagcctgttttattttaaaactttttatgttctgtggttgatgttgtttgtttgtttgtttctattttgttggttttttactttgttttttgttttgttttgttttgttttgcatactacatgcagttctttaaccaatgtctgtttggctaatgtaattaaagttgttaatttatatgagtgcatttcaactatgtcaatggtttcttaatatttattgtgtagaagtactggtaatttttttatttacaatatgtttaaagagataacagtttgatatgttttcatgtgtttatagcagaagttatttatttctatggcattccagcggatattttggtgtttgcgaggcatgcagtcaatattttgtacagttagtggacagtattcagcaacgcctgatagcttctttggccttatgttaaataaaaagacctgtttgggatgt

SEQ ID NO: 12698 - DNA, 2007 bp, Homo sapiens
  CDS (49)..(1158)
gtccgggatgaaaacgggagcttgtacccaggagtcacagctattgatatgatgtacaaggagggtctgcatggtgtggacaatgggatattaatatttgacaaggttcggatacccagggagaacctgctggataagtttggttccgtggctccagatggacagtaccattcgcctattaggaacaagagtgcaagattcaatgccatgctggcagcactgaccccttcgagattagctgtggctttccaagctatgggtgccatgaagcttgggttgacgatagccattcgctatagccacagccggaggcagtttgggcccaaaaccaaggaagaggtgaagatcattgagcaccaaacacagaccctgcggctgatgccccacctggccacagccttggccctgaccttcgtcagcaggtatgctggggccctcctggatgaggatgtcttccagggaaaggagctggtcaacagtcgctcgctgcaggctctggtggcagggctgaaggcctacagcacctgggagaacatccgctgcctgcaggactgccgcgagtgcactggaggcatgggttacatgatggaaaatcgaatctccggcttaaagtgtgacacagatgtgtttgccacttttgaaggtgacgatgttgttatgcttcaggttgtggggcgggaactgctggcccaatacaccaaacagtatgaagaaaaaccactctttggcctgctccaaaactgggctgaatctgtgggggacaagctgagaaccagtttcctggcatttaacatggacacagttgatgatctcgcctttctgttgaaagcagtgaaatttcgtgaaagggttcttcagcggggtttggtggccagaatttattataaggtaaagaccaagaaggaggattttttccatgcctggaactcgtgtctgcaccacgtggcttctctgtccctggcacacactcaccgagttaccttagagcagttctccctagcagtgaagagctgtcctgaccaagaggaccagactttgttaatgaagtttcgtctgttgtatggaaccaagctggtgtttcaggagcgggcctggtatttagaacataaatacttgactcccatggccagcacgaggatcaggaatcaggagagatgctgaaacacaaacaggtataagactcagtctccacatgaagggagctcatatccaaggacacaaaaccactttaaaaacataaatactggccaggtgcagtggctcatgcctgtaatcccagcactatgggaggctgaggtgggcagatctcctgagctcaggagttcgacaccatcttgggcaacatggtgaaaccctgtctactaaaatacaaaaaaattagctgggcgtggtggcatgtggctgtagtcccagctactcgggaggctgaggcacgagaatcgcttgagccctggagttggaggttgcagtgagcagagattgcgccactgtactccagtttggactacagagtgagactccatctcaaaacaaaacaaaacaacaacagcaaaaaacaacaaaacaaaacacaaatactctcacggggcatggaggttttcgaacgaacttggccataagaataaattcagagttgacagaacagacgtcttaggaataaatgccattcttatgctagaccttgaagagtagaaaattaagagatggtggcccaattgagaggggaaaatgcagttgaaacttcagacagggttgataaagtgaggacgatcatagacatggagtacttagacatattaataaacaataaagactttacctgtctaatggaaaacctggagaagtcgtcaggaaccagactacagtggaccctggagaaccttgaagaacatttttccttttcaggaaaacggaggttacagagaaaagtatatgtaatgatgctacagtaatgtatttctgtataacaaatgactccaaacttacgacttaaaacaaccaccactt

SEQ ID NO: 12699 - protein, 370 aa, Homo sapiens
MMYKEGLHGVDNGILIFDKVRIPRENLLDKFGSVAPDGQYHSPIRNKSARFNAMLAALTPSRLAVAFQAMGAMKLGLTIAIRYSHSRRQFGPKTKEEVKIIEHQTQTLRLMPHLATALALTFVSRYAGALLDEDVFQGKELVNSRSLQALVAGLKAYSTWENIRCLQDCRECTGGMGYMMENRISGLKCDTDVFATFEGDDVVMLQVVGRELLAQYTKQYEEKPLFGLLQNWAESVGDKLRTSFLAFNMDTVDDLAFLLKAVKFRERVLQRGLVARIYYKVKTKKEDFFHAWNSCLHHVASLSLAHTHRVTLEQFSLAVKSCPDQEDQTLLMKFRLLYGTKLVFQERAWYLEHKYLTPMASTRIRNQERC

SEQ ID NO: 12700 - DNA, 1622 bp, Homo sapiens
  CDS (567)..(1265)
aaacatggcggcattgagcggagtccgctggctgacccgagcgctggtctccgccgggaaccctggggcatggagaggtctgagtacctcggccgcggcgcacgctgcatcgcggagccaggccgaggacgtgagggtggagggctcctttcccgtgaccatgcttccgggagacggtgtggggcctgagctgatgcacgccgtcaaggaggtgttcaaggctgccgctgtcccagtggagttccaggagcaccacctgagtgaggtgcagaatatggcatctgaggagaagctggagcaggtgctgagttccatgaaggagaacaaagtggccatcattggaaagattcataccccgatggagtataagggggagctagcctcctatgatatgcggctgaggcgtaagttggacttatttgccaacgtagtccatgtgaagtcacttcctgggtatatgactcggcacaacaatctagacctggtgatcattcgagagcagacagaaggggagtacagctctctggaacatgaggtgaggccccagaaactgggggagggcaaggatgaagatgggagagaggtggagctccttgtttcccttcccagtgtcacctagctgctgctttcttcttacccagagtgcaaggggtgtgattgagtgtttgaagattgtcacacgagccaagtctcagcggattgcaaagttcgcctttgactatgccaccaagaaggggcggggcaaggtcactgctgtccacaaggccaacatcatgaaacttggggatgggttgttcctgcagtgctgtgaggaagttgctgaactgtaccccaaaatcaaatttgagacaatgatcgtagacaactgctgcatgcagctggtgcagaatccttaccagtttgatgtgcttgtgatgcccaatctctatgggaacattattgacaatctggctgctggcctggttgggggagctggtgtggtccctggtgagagctatagtgcagaatacgcagtctttgagacgggtgcccggcacccatttgcccaggcagtgggcaggaatatagccaatcccacggccatgctgctgtcggcttccaacatgctgcggcatcttaatcttgagtatcactccagcatgatcgcagatgcggtgaagaaggtgatcaaagttggcaaggtgcggactcgagacatgggcggctacagcaccacaaccgacttcatcaagtctgtcatcggtcacctgcagactaaagggagctagagccctttatttcttccaaccttgcaaggaccacactccccatacccttcagtgcagtgtaccagggaagagaccttgtgcctctaagcagtggaccatggtcaccttgctgggtagagcctaggttgtccttgggccggcttccttaggggacagactgttgggtggtgatggggattgttaggatggagcccaggccacatggatgatgatgattctcccccacaggttcgaacctctgacatgggtggctatgctacttgccatgacttcactgaggctgtcattgctgccttgccccacccataggccctgtccatacccatgtaaggtgttcaataaagaacatgaacc

SEQ ID NO: 12701 - protein, 233 aa, Homo sapiens [sequence omitted]

SEQ ID NO: 12702 - DNA, 2756 bp, Homo sapiens
tacaacaatgaaaacagaacaatctatttaggagaaacaaaaaacaattgttcatatttttttaacaaaaagaaggagtgggaatattttctttaaaatccctattggccaggggtgctggctcatgcctgtaatctcaacactctgagagactgaggcaggaagatcgcttgaggccaggagtttgagaccagcctgggcaacatagcaagtcctagtctctacaaaaataataataagaagaagaagaagaagaataaatccctttaaactacaataagcagagaccagttattcattggctatatttttaagattgccagcttttcaaatgcagcaaaataaatgaaaaaagaactttcaacagggatctagaagtcagttttcccgttgagtagatcttccagcccaatacatttattagtctataatgaaaatatctactttgatttcttagaggtttcttcaaataaatatattgaaacaattttaaaatgaccacatattatttaattttaaaagcacacttttagaaccccatttcttatgaaaggtttcatatcgagatcatttgttattgtgagactgtatctggtggaaaggaaagataggagtatttttcatatgtcaaatgagtagactaaaacatgggaggagagatttatgactttttttttacatcatccagctatggtttgggacgtgtttgttttacatttttcttccccagaatctctacactgtttgatctaatgaagtatttggcaaatctatagactatatgataatcacagtttactttgtgagggagtgtcaaattatagtgtcggtttgtctatattgatgactcgccataatccagacgctgtgcaagccatttaaacttccttagcttcattttacaggttaagtgtttaaaaattgccccttctgtagttgctgttaaaatgcaaacattaacaaaatgtaaattaataatataggccacaacaaatgcttgttgccagtctctcattttttgtttatcctttccttttttccctttcatagtaacctatggcttgaaagcaaagaaaagggtgaataagaagccaagttccatattagcatctggaatgggagcaggggatgaatggagcagattttataaatgtaattttataacatttagcctattatgataaaatgtcaattacaattattactgaaattatctcaacagctacatttgcttacattacaatataaagtcaccgacatttttcccaatttattgttttatagagcactaaacacaaaaataccaacaacctaatgaaaactgttgtttgcctgactttgtcttatctttggcaatgcaaactaccttgggacccccatgagaaccttagctgcattcattcctggttaaaaatacatgacattttaaaagcatttttccctcagttttcaaaatagaagatgcagtttgtttctcgttagggttggaattgtacagcaaagttgtctgggtagcttttaaagtgtgagggttagagtttaagaaatgagataaattttgcatttgaaacttgttagcaatttcttcagtcatcattattttaactagctgtatcagtaatcccctcgggagtgattatgctatacaaactaggaacatgccagaaaattttcctgggtctgtaagccactgagtttttaattacttggtatctatcctgatagaaagagaagctattttttccctccatttgtatcagaacacgtatgttccattgcttgttcatcttctctagtttcttcatagcttattccccagagaccagtgagaaagaatgtggcagcatcggtaattgtcagaatggaggcatctgtgatcttctgactgggcactgccagagccccccaggggttcatgggaaaacttgtgaagatagaaggaatgtctggtgccagtcagttaagttcttggggtttctaatgagaagtaaactaagtgaaagttgcatgtgtatttttcaaaatggcctttttctgaagaggtaaaagactgtgaaagctgtgtctgtatatataaaagagtacaattgttttgactgatgacatgtgtaacaacgaaataagtgatatttaaatctccaactgtgatctaagcaggacgaatcctcttacagagaaagcctttttcttctactgagcaaaaagttacaattatgtatataggtttagatgtaggagcttaggagaagttattttctctgcataacaaaatgaagaacaatagagctccttggggaaaccagggaggaagacagatgaaaattagagaagaaaagggaaggaggtagagagaaaaagaaaaaaagagatgatggataaaaatctcacaaaataccaatgagtactgtgcatagattttgtgtgtgtgtgtgtggaaaccagtgaagaggccacaattcctacatgggttaataaagcacaaaaaaaagaacctgcttgcacatgcacaaaagctgaaggcagagagtcagtgaggatgtaagtctctagggatggccagaaatcatgaggagtttattagcttctcacagttgatagaattggggagctggaaatgaagtttacttcactttctgagatgcagtaaggtccctgctggcatttcagttacttatctttgtgagcaatgttcatttatttatttaaaaactacattaaatggttgcaaggaatggcaccagacattatgatatgat

SEQ ID NO: 12703 - DNA, 2200 bp, Homo sapiens
  CDS (107)..(2005)
ttataataaggaattgcctgtgcatatctgtaatgtaatatctcctgagaagatttatgttcagtggttgttaactgaaaacttacttaatagtttagaagaaaagatgatagctgcttatgaaaactcaaaatgggaacctgttaaatgggaaaatgatatgcactgtgctgttaagatccaagataaaaatcagtggcgaagaggccagatcatcagaatggttacagacacattggtagaggtcttgctgtatgatgtgggtgttgaactagtagtgaatgttgactgtttaagaaaacttgaagaaaatctaaagacgatgggaagactctctttggaatgttctctggttgacataagaccagctggtgggagtgacaagtggacagcaacagcttgtgactgtctttcattgtacctgactggagctgtagcaactataatcttacaggtggatagtgaggaaaacaacacaacatggccattacctgtgaaaattttctgcagagatgaaaaaggagagcgtgttgatgtttctaaatatttgattaaaaagggtttggctttgagagaaaggagaattaataacttagataacagccattcattatctgagaagtctctggaagtccccctggaacaggaagattcagtagttactaactgtattaaaactaactttgaccctgacaagaaaactgctgacataatcagtgaacagaaagtgtctgaatttcaggagaaaattctagaaccaagaaccactagagggtataagccaccagctattcctaacatgaacgtatttgaggcaacagtcagctgtgttggtgatgatggaactatatttgtagtacctaaactatcagaatttgagctaataaaaatgacaaatgaaattcaaagtaatttaaaatgccttggtcttttggagccttatttctggaaaaaaggagaagcatgtgcagtaagaggatccgatactctgtggtatcgtggcaaggtgatggaggttgtaggtggcgctgtcagagtacaatatttagatcatggattcactgaaaagattccgcagtgccatctttaccctattttgctgtatcctgatataccccagttttgtattccttgtcagctccataataccacacctgttgggaatgtctggcaaccagacgcaatagaagttcttcaacaactgctttcaaagagacaggtggacattcacattatgaaaccaagatcagatcatgataaaaagtatgaagagaaacaatgggaaataaggtttgaggaattgctttcggctgaaacagacactcctcttttaccaccatatttgtcttcatctctgccttccccaggagaactctatgctgttcaagttaagcacgttgtctcacctaatgaagtgtatatttgccttgattctatagaaacttctaaccagtctaaccagcatagtgacacagatgatagtggagtcagcggggaatcagaatccgagagccttgatgaagcactgcagagggttaataagaaggtagaggcgcttcctcctctgacggattttagaacagaaatgccttgccttgcagaatatgatgatggcttatggtatagagcgaagattgttgccattaaagaatttaatcctttatctatcttagtacaatttgttgattatggatcaactgcaaagctgacattaaacagactgtgccaaattccttctcatcttatgcggtatccagctcgagccataaaggttctcttggcagggtttaaacctcccttaagggatctaggggagacaagaataccatattgtcccaaatggagcatggaggcactgtgggctatgatagactgtcttcaaggaaaacaactctatgctgtgtccatggctccagcaccagaacagatagtgacattatatgacgatgaacagcatccagttcatatgccgttggtagaaatggggcttgcagataaagatgaataagtgcctaagtgtatacagtgagagcatctatagaagcctagaagaattctgttatgtttagactatgtcttatctttagactatttcaggcttaattttcctaacttgttcagccctagtgctttacctctcatttttaattgaactgttaggaattgtgtggggaaaaaaagtaaataaatgttcgcttcc

SEQ ID NO: 12704 - protein, 633 aa, Homo sapiens
MIAAYENSKWEPVKWENDMHCAVKIQDKNQWRRGQIIRMVTDTLVEVLLYDVGVELVVNVDCLRKLEENLKTMGRLSLECSLVDIRPAGGSDKWTATACDCLSLYLTGAVATIILQVDSEENNTTWPLPVKIFCRDEKGERVDVSKYLIKKGLALRERRINNLDNSHSLSEKSLEVPLEQEDSVVTNCIKTNFDPDKKTADIISEQKVSEFQEKILEPRTTRGYKPPAIPNMNVFEATVSCVGDDGTIFVVPKLSEFELIKMTNEIQSNLKCLGLLEPYFWKKGEACAVRGSDTLWYRGKVMEVVGGAVRVQYLDHGFTEKIPQCHLYPILLYPDIPQFCIPCQLHNTTPVGNVWQPDAIEVLQQLLSKRQVDIHIMKPRSDHDKKYEEKQWEIRFEELLSAETDTPLLPPYLSSSLPSPGELYAVQVKHVVSPNEVYICLDSIETSNQSNQHSDTDDSGVSGESESESLDEALQRVNKKVEALPPLTDFRTEMPCLAEYDDGLWYRAKIVAIKEFNPLSILVQFVDYGSTAKLTLNRLCQIPSHLMRYPARAIKVLLAGFKPPLRDLGETRIPYCPKWSMEALWAMIDCLQGKQLYAVSMAPAPEQIVTLYDDEQHPVHMPLVEMGLADKDE

SEQ ID NO: 12705 - DNA, 2065 bp, Homo sapiens
  CDS (8)..(2059)
aacagcaatggcggaaggagaagatgtgccgccgctgccaacgtcgagcggcgacggctgggaaaaagatcttgaagaagctctggaagcaggaggttgtgatcttgaaacgttgagaaatataattcaaggaagaccgctgcctgctgatctgagggccaaagtttggaagattgctctgaatgttgcaggaaaaggtgattgtttggcatcatgggatggtattttagacttgccagaacagaacactattcacaaagattgcctgcagtttattgaccagctttcagtgccagaggagaaggcagcagaattacttttggatattgaatctgtaattaccttttattgtaaatcacgtaacattaaatatagcacatcccttagctggatacatctactgaaaccattggtgcatcttcaactgccacgcagcgatttatacaactgcttttatgccataatgaataagtacattcccagggattgttcccagaaagggagaccatttcatcccttcaggttgctcatccaataccatgagcctgagctttgttcttatcttgatacaaagaaaattactccagactcctatgcactcaactggcttggaagtctttttgcatgttactgttccactgaagtcactcaggcaatatgggatggatatctacaacaagcagatccattttttatttatttcttaatgttaattatccttgttaatgcaaaagaagttattttaacacaagagtcagacagcaaagaagaagttatcaagttcttggaaaatactccatccagtctgaatatagaagatatagaagaccttttctctctggctcagtattattgcagcaaaacaccggcttcttttaggaaggataatcaccatctctttggtagtactttgttgggaattaaggatgatgatgcagatctgagtcaggctctttgtctggccatctccgtgtcagagatccttcaagcgaatcagctacaaggggaaggagtccggttctttgtggtggattgccgtcctgcagaacaatataatgctgggcatttatcaactgctttccactcagattcagacctgatgcttcagaatccatctgagtttgcacagtcagtaaaatccttgctggaagcacagaagcagtccattgagtctggctccatagctggtggggagcacctctgttttatgggcagtggcagggaggaagaagacatgtatatgaacatggtcctggcacactttttacagaaaaacaaagaatatgtgagtattgccagtggaggatttatggcactgcagcagcacctggcagacattaatgtggatggaccagaaaatggatatggccattggattgctagtacctcaggctcaaggagcagtatcaattctgttgatggtgaatctcctaatggctcaagtgatagaggaatgaaatcactagtaaataaaatgactgtggctttgaagacaaaatccgttaatgtcagggaaaaagttatcagttttatagagaatacatcaactcctgtggatcggcatgtgagcagcagtgacagagtgggcaagccttaccgtggcgtaaagcctgttttcagcattggggatgaagaagaatacgacacagatgaaattgacagttcttcaatgtcagatgatgatagaaaagaggttgtaaacattcagacttggataaacaaaccagatgtcaaacatcattttccttgtaaagaagtaaaagaaagtggacacatgtttcccagtcatctgttggttactgcaacacatatgtactgtttaagggagattgtttcacggaaaggattggcttatatacagtctcgacaagcgctgaattctgtagttaaaattacatccaaaaaaaaacatcctgaactcattaccttcaagtatggaaatagcagtgcttcaggaatagaaatcttggcaatcgaaaggtatttgattccaaatgcaggggatgcaactaaagccataaaacagcagatcatgaaagttttggatgctttggaaagttaatat

SEQ ID NO: 12706 - protein, 684 aa, Homo sapiens
MAEGEDVPPLPTSSGDGWEKDLEEALEAGGCDLETLRNIIQGRPLPADLRAKVWKIALNVAGKGDCLASWDGILDLPEQNTIHKDCLQFIDQLSVPEEKAAELLLDIESVITFYCKSRNIKYSTSLSWIHLLKPLVHLQLPRSDLYNCFYAIMNKYIPRDCSQKGRPFHPFRLLIQYHEPELCSYLDTKKITPDSYALNWLGSLFACYCSTEVTQAIWDGYLQQADPFFIYFLMLIILVNAKEVILTQESDSKEEVIKFLENTPSSLNIEDIEDLFSLAQYYCSKTPASFRKDNHHLFGSTLLGIKDDDADLSQALCLAISVSEILQANQLQGEGVRFFVVDCRPAEQYNAGHLSTAFHSDSDLMLQNPSEFAQSVKSLLEAQKQSIESGSIAGGEHLCFMGSGREEEDMYMNMVLAHFLQKNKEYVSIASGGFMALQQHLADINVDGPENGYGHWIASTSGSRSSINSVDGESPNGSSDRGMKSLVNKMTVALKTKSVNVREKVISFIENTSTPVDRHVSSSDRVGKPYRGVKPVFSIGDEEEYDTDEIDSSSMSDDDRKEVVNIQTWINKPDVKHHFPCKEVKESGHMFPSHLLVTATHMYCLREIVSRKGLAYIQSRQALNSVVKITSKKKHPELITFKYGNSSASGIEILAIERYLIPNAGDATKAIKQQIMKVLDALES

SEQ ID NO: 12707 - DNA, 1969 bp, Homo sapiens
  CDS (6)..(818)
tcaacatgttgactaagaacccaccatttactaagaacatggagtctcccttatgcaatgaagccctggtagatcaactttggaaacttatgaattctggtacttcacatgactggaggttacggtgtggtgctgtggacttgtacttcacactttttggcctcagtagaccttcctgtttacccttgccagagcttgggttggttcttaatctaaaggagaaaaaagctgtcttgaatcctaccataattccagagtcagtagcaggcaaccaagaagctgcaaataatccaagcagtcacccacagctagttggatttcagaaccctttttccagttctcaagatgaggaggagattgatatggatactgttcatgatagccaggccttcatttcccatcatttaaacatgcttgaaaggccgtcaactccagggctctcgaaatatcggccagctagctcccgatctgctttaataccccagcactcagcaggctgtgacagcacacccaccacaaaaccccagtggagtttggaacttgcacggaagggaacaggtaaagaacaagcacctttggagatgagtatgcatccagcggcaagcgctccactctcagtctttactaaggaatctacagtctccaaacacagtgaccaccatcaccaccatcaccatgagcacaagaaaaagaagaagaagcataaacataagcacaaacacaagcataagcatgacagtaaagaaaaggacaaggagcctttcactttctccagccctgccagtggcaggtctattcgttctccttccctttcagactgagaaggggacaaaaagacctttcctttcatgtccagaagaatgtatgtaactaaagctttgtcctctgtgaagaattataaaagggaggggggaaaggattcgcctctcctacagaaattctgaattcatttaagttctaagcatttgatttatgttatttatacagttgggatctaattaggaaaatgtgttttgtagttctggataaactatttcatccgctgtttcctccccaaaacacacacacagagcaaactccctttcataaaagccctcatatccactggcagtccccgttcgcatcatggtctccatgtgtaccgccaaagtcaattatgtttgaaagcctttggtggatgttatggggcaaagttatgatttacacagaagcaactgccaaatctgtggtgcaaccactatctccagtgaaatattgtataacaccatttggaactactgaaaagacagtggcttttctacagtactcttccttattgcaccatttttgtattaacgtagaaactaagcatcagaatttatgaacaaagaatatgttatttttccttttgctctaaaatactgagatttggggaagcaattcttttttaaaaaaattttgaataactatcttttgataacacattcggcggttacgatgttggaatttagcagaactatcaaatccaaaattattttcaaatcaagatgtttaaattataagtttttttgttttgttttccagtaagtataaatgaaaatattcatatgtaaaatatgttttgcttaatgtggacaatttacacacccaacacatactgtttccaaaattatttctatatgacacaaagtatgatacctttaaaaaggtgagcttatatattgtttattaacctggaaatagacaatttggctctcataccataagcatttaaaaacatatgaaatattttgatttctttatatggtggtgtgtttttatttctgaattttccatgtgctttaatatttgtttaagaatattttttatatctgttcaatttttatcattccccttatcattagaaagtttgacaaaaatacttgaatcttggacctctaaatatacttttagttgtgtttaacttgtttaataaataactttttaagtt

SEQ ID NO: 12708 - protein, 271 aa, Homo sapiens
MLTKNPPFTKNMESPLCNEALVDQLWKLMNSGTSHDWRLRCGAVDLYFTLFGLSRPSCLPLPELGLVLNLKEKKAVLNPTIIPESVAGNQEAANNPSSHPQLVGFQNPFSSSQDEEEIDMDTVHDSQAFISHHLNMLERPSTPGLSKYRPASSRSALIPQHSAGCDSTPTTKPQWSLELARKGTGKEQAPLEMSMHPAASAPLSVFTKESTVSKHSDHHHHHHHEHKKKKKKHKHKHKHKHKHDSKEKDKEPFTFSSPASGRSIRSPSLSD

SEQ ID NO: 12709 - DNA, 1996 bp, Homo sapiens
ttgtatggactcatggttttcaatatatagatagatttataagtatctgtaaagtatgtaataaatagctgtaatatgtgtagatatattttgctctttatctgtatatacatagatacagatatatttttttgccattacttttagtggcaaaaaccagaattacttttgcaccaacctaatatagctatatctacatcatctctatctctatttatatagagatagagaaagagtaaaagtaatggcaaaacctgcaattacttttgcaccaacctaatggatttagactctagcttccctcctgagagacagtagcagcagtaacacctagttatggactgaatgtatcccccaacaattcatatgttgaagctctaacccccaaggtaatagtatttggaggtgaggactttgggaggtatttaggtttagatgaggtcttaaggttggagcccacatgatgtgataagtgcccttacaagaagaggaagagacaccagagcattctctcaccctccgtgtgcatgcaccaaaaatggcatgtgaacacagagagaggaggcggctgcctacaagccaggaggagtgctctcaccaggaaccgaagctgtcggcaccttgatactggaccttccagcctccagaactgtgagaaataaatgtctactgcttaaaccacccagtctatggtatattgttatggcagctcaaactaagacaaccctaataatgagcacagctattgcccatatcttggcttctagatgccattctccactaaagaacccaaagttccttgaagaaatggctgatttcagggccaggacaggaagggaaaggggcaattaaaagtggaacatcttttgaagcaaaaagcaaggaagtactaaaaaaataattgggacataccaaatgggcacaaaagccagcttgaagagaaccccactggccaaatgtgggaaaatttgagaatcataataataaaggcaataagggaataaaataagaaatcatgagctaaataacaattaaaattttgatgaggaagggtatttacataatttcaaagtactttcccacaaagtacagttgaataatgaaggcaaaatgagtaatttacagtggaaaagcctggcagatgtcaccttcatcaagtgatgaattccaatgatattccattgcagtggaataaatagaaattttattccatttaataagatgaaatgacaaactacattgttactcttgttatacttctaacaaaactgcataacatgaatctaataatgaagaaaaaacaaattgagggacatgtcacaaaaataatatccaagtctcaaggtcatgaaagtcaaggaaagacagaggatctgttctagactgaaggagcttagagacatggcaactgaatgtagtgtgtggtcctgaactggttcctttcgccataaaagactaacattactgggacaattggcaaaacttgggtggagtctgaagattagatgctatcattgttaatttctcaactttgatggcttgttgtatttatgtagaaaatattttggttgtaagaaatatacatcaaggagtgaagcagtaacctattgattcaggaaaaaaaatatttttatagtaactccagcttttctgtaagtttctgaataaattaaacttaaataaagtttatcatctatttgttactggaactgcaatgcactttcatttcaagtcacttttttctttcaaatttggtaatggccacagccacaatcctgaagttatctactaagcattttaataattatgcccaagttggaaattcaagttgtccgaaaagacttaatttcttgtttcagtcaacgcttcccatcttcaaccagaggaactaaaaactagaaattttaaaatgtgttactctaaattaacaaagctatataaatgaaaaataaatgtaagtcattacacttttaaataaaacttgtttgaaactttt

SEQ ID NO: 12710 - DNA, 2475 bp, Homo sapiens
tcttgtcagaaactagaactggccaaggccaacatgcagctcctatatgagcgtcttctcagaagaaaacagccacgaacacagaaagacaaccatctagaggaaatggatgtagaagctcgacttactgaactatgtgaagaagttaagaaaatagagaatcctgatgaactggcagaacttataaatatgaatcttgcgcaactttgctcacttttgatggctttatggggacagtttctggaagttataacgctacacgaagaactaagaatattattagcacaagagcaccatactttgagggtaagttaaagagaagtgattttagagcattttaatgagtattatttacctttagaaaatttttatgaaaacaaacctgatttttacctatatattgataaatcagaaaagagacatttgtcatattgttattgtttgacttccaaaattaataatagaatagaacaatacagttaagcatatgacctatttcaatcacaatccctgctgctaagaaaaaccacctaaaagtaagtaaaataggaaaatatatgatacagaatagaataggaacctaagaataggaattaatagccaagcctcattagggacaggaatcaggaactagagagctgtctcaaacttatatctccctcttctccttttccttcccttcttctaccactgacctaatataggaatgtgtattattaacttagcaggatggagggggcagtccacacattacacatatatgtttactgtagacctagtatggacattatgcaggtatttctatgtaattttattgtatagcatctcaagaggttttacgtgttaaataactatctttccatcttgtttccttatatactctgcatgcaccctgattttactttacgtactaggagttcctccaaacatcattaatttttttccttttttaaaaaaattttttaattataaaacataacacataaagtcagaaaatgcataaaacaggcacattttatcaaataattaaagcatacaccctttcagttattatccagatcaagaagtagaacactctcaatgctacagatgttctctctgtatcttttccaattaccatacccttcctaatacttagaagtaatcactatactgtcttttgtgatgatgagttccttccattttagttttatcacctatgtatgcacactaaatagaggttgtttccacctgttattgaattctatatagatgaaattgtacagtagtattcttctctatcttgctttttcactcaagacattaggatattaatccatcttttttgacagtacctgtagattgttcattatcattgctgtaatatatctccatttgaatatacccacatttatttatccattctactgttgatagattcttggattacttctaacttgtggctattacaaaccaagctgctatgaacattcttatgtatatgtcctggcataccagtttctctgaaatacttacctgtgaggcaaattgctgagtcataggttatgcataacttcaattttactagctaatgtgacagttttcagagttgtaccaatttttactcccaccagcacagtttgttactccacacactctccaactcttgatactggcaagctttttaaactttgccaaactgatggatgcgaaatggtatattattgtggctttaatttgcatttctctgattacccatgcagttgagcactgctttgtgtgattattggttatgtaggtttgctccatatgaagtgcctattctaatgttttgcccatttctaataagataacttttttcttctttatttctgatacttttctgtgtcctttgttatgtgtttttactaatagatcctctctcatttcatggtttattattttcattgactttatattgttttttaatgaactggaggtcttaattttagaatagaaggaaactaagagaaaggccagacatggacatagccatttttggacataacatatgtggatcggtgtaaaagatggagatttttcaataaatgatgtttgagacaattgggtatccatatggtaagtattaaataaaattcagttccaagtggattgaagatttaaatgtgaaaggcaaaactgtaaagcttctaaagtataatcagaaacttacagaagactttaaaaagttggccaggagcagtggctcacactgtcccagcactttgggaggccaaggcaggtggatcacctgaggtcaggagttcaagaccagcctggccaacatagtgaaaccccatctctactaaaaatacaaaaattatccaggcgtggtggcgagtacctgtaatcccagctacttgggaggctgaggcaggtggtagaggtggaggttgcagtgagctgagatcacaccactgcactccagcctgggcaacaagagtcaaactccatctc

SEQ ID NO: 12711 - DNA, 2342 bp, Homo sapiens
  CDS (239)..(2170)
aaaaatggcggctgccactgtggggcttctgccggccggtagtccctggcgctgctgacccagcatcggcttttctacgtcttgaacctggattcgcctaggggttgggaagggctgtggacggcgttgggggaggcctgacgagattaataaagaactcttcagaattcctggtgtttcatcatatatacgactaagatatcaactcttctagcttgctgtttctggaccaaaaaaaatgacgtctattatcaaattaactaccctttctggggtccaagaagaatctgccctttgctatcttctccaagttgatgagtttagatttttattggactgtggctgggatgagcacttttctatggatattattgattccctgaggaagcatgttcaccagattgatgcagtgctgttgtctcaccctgatcctctccaccttggtgccctcccgtatgctgtcggaaagttgggtctgaactgtgctatctatgcaaccattcctgtttataaaatgggacagatgttcatgtatgatctttatcagtctcgacacaatacagaagattttacactctttacattagatgatgtggatgcaggattgggtgtttactcattggcactcctaaataatgtcagttacaatgtggtggagttttctaagtcccaggtagaatggatgagtgataaattgatgagatgttttgaagacaaaagaaataatccgtttcagtttcgccatctctctttatgtcatggtctttctgacttggcccgtgtacctagccctaaagttgtacttgccagccaacctgacctggaatgcggattttcaagggatctctttattcagtggtgtcaggaccctaaaaactcaatcattctaacctacagaactactcctgggactttagcacgtttcctaattgataatccttctgaaaaaattacagaaatagagttgaggaaacgtgtgaagcttgaagggaaagaacttgaagaatacttggaaaaagagaaactaaagaaagaagctgccaaaaagcttgagcagtcaaaagaggcagatatagattccagtgatgagagtgatattgaggaagatattgaccagccatcagctcataagacgaagcatgacttgatgatgaaaggtgaaggcagtcgtaaaggaagttttttcaaacaggcaaaaaagtcctatcctatgtttcctgccccagaagaaagaattaaatgggatgaatatggagagattatcaaaccagaggatttcttagtgccagagcttcaagctactgaagaagaaaaaagcaaattagaatctggtttgacaaatggagatgaacctatggatcaggatttatctgatgttcctactaaatgtatttctacaacagagtctattgaaataaaagcccgggttacctacatagactatgaaggacgctctgatggggattccattaaaaaaatcattaatcagatgaaaccacgacagttgatcatcgtccatggcccaccagaggccagtcaagatctggcagagtgctgtcgcgcctttggtgggaaagatattaaagtgtacatgccaaagctacatgaaacagttgatgccactagtgaaactcacatctaccaggtgaggttaaaagactcacttgtcagctctcttcagttttgtaaggcaaaagatgctgaattagcttggatagatggtgtcttagatatgagagtttccaaagtggacacaggggttattttagaagaaggagaactaaaggatgatggagaagactcagagatgcaagtggaagctccctcagattctagcgttatagcacaacaaaaggccatgaaaagtctgttcggagatgatgaaaaagaaacaggtgaagaaagtgagatcattcctactttggaacccttgccacctcatgaggttcctggacatcagtcagtttttatgaatgaaccaaggctgtcagacttcaagcaagttctcttacgggaggggattcaagctgaatttgtaggaggtgtacttgtttgcaacaatcaagtagcagtccgcagaacggaaactggacgcattggattagagggctgcctttgtcaagatttttataggataagagaccttttatatgaacaatatgccattgtataaaggacatgatgtcaagaagtatctgcttgacctttctaagaaaaagggattcttatcttactctgagcttttgatgttttgttttgtaacatacaaaaagaatctgccagaaaaacttacatgtatcagatttttaaaaatataaatagagaacattttgcaaatgctc

SEQ ID NO: 12712 - protein, 644 aa, Homo sapiens
MTSIIKLTTLSGVQEESALCYLLQVDEFRFLLDCGWDEHFSMDIIDSLRKHVHQIDAVLLSHPDPLHLGALPYAVGKLGLNCAIYATIPVYKMGQMFMYDLYQSRHNTEDFTLFTLDDVDAGLGVYSLALLNNVSYNVVEFSKSQVEWMSDKLMRCFEDKRNNPFQFRHLSLCHGLSDLARVPSPKVVLASQPDLECGFSRDLFIQWCQDPKNSIILTYRTTPGTLARFLIDNPSEKITEIELRKRVKLEGKELEEYLEKEKLKKEAAKKLEQSKEADIDSSDESDIEEDIDQPSAHKTKHDLMMKGEGSRKGSFFKQAKKSYPMFPAPEERIKWDEYGEIIKPEDFLVPELQATEEEKSKLESGLTNGDEPMDQDLSDVPTKCISTTESIEIKARVTYIDYEGRSDGDSIKKIINQMKPRQLIIVHGPPEASQDLAECCRAFGGKDIKVYMPKLHETVDATSETHIYQVRLKDSLVSSLQFCKAKDAELAWIDGVLDMRVSKVDTGVILEEGELKDDGEDSEMQVEAPSDSSVIAQQKAMKSLFGDDEKETGEESEIIPTLEPLPPHEVPGHQSVFMNEPRLSDFKQVLLREGIQAEFVGGVLVCNNQVAVRRTETGRIGLEGCLCQDFYRIRDLLYEQYAIV

SEQ ID NO: 12713 - DNA, 1793 bp, Homo sapiens
  CDS (162)..(1610)
ggcgttgccgggctctccggaaggagacgtggcggcggttgggccggtgatacccgggcgctttatagtcccgccgcctcctcctccacctcctcctcctcctcctctcctcctggagcagaggaggttgtggcggtggctggagaaagcggcggcggaggatggaggaaggaggcggcggcgtacggagtctggtcccgggcgggccggtgttactggtcctctgcggcctcctggaggcgtccggcggcggccgagcccttcctcaactcagcgatgacatccctttccgagtcaactggcccggcaccgagttctctctgcccacaactggagttttatataaagaagataattatgtcatcatgacaactgcacataaagaaaaatataaatgcatacttccccttgtgacaagtggggatgaggaagaagaaaaggattataaaggccctaatccaagagagcttttggagccactatttaaacaaagcagttgttcctacagaattgagtcttattggacttacgaagtatgtcatggaaaacacattcggcagtaccatgaagagaaagaaactggtcagaaaataaatattcacgagtactaccttgggaatatgttggccaagaaccttctatttgaaaaagaacgagaagcagaagaaaaggaaaaatcaaatgagattcccactaaaaatatcgaaggtcagatgacaccatactatcctgtgggaatgggaaatggtacaccttgtagtttgaaacagaaccggcccagatcaagtactgtgatgtacatatgtcatcctgaatctaagcatgaaattctttcagtagctgaagttacaacttgtgaatatgaagttgtcattttgacaccactcttgtgcagtcatcctaaatataggttcagagcatctcctgtgaatgacatattttgtcaatcactgccaggatctccatttaagcccctcaccctgaggcagctggagcagcaggaagaaatactaagggtgccttttaggagaaataaagaggaagatttgcaatcaactaaagaagagagatttccagcgatccacaagtcgattgctattggctctcagccagtgctcactgttgggacaacccacatatccaaattgacaggtgaccaactcataaaagagtttcttagtggttcttactgctttcgtgggggtgtcggttggtggaaatatgaattctgctatggcaaacatgtacatcaataccatgaggacaaggatagtgggaaaacctctgtggttgtcgggacatggaaccaagaagagcatattgaatgggctaaggagaatactgctagagcttatcatcttcaagacgatggtacccagacagtcaggatggtgtcacatttttatggaaatggagatatttgtgatataactgacaaaccaagacaggtgactgtaaaactaaagtgcaaagaatcagattcacctcatgctgttactgtatatatgctagagcctcactcctgtcaatatattcttggggttgaatctccagtgatctgtaaaatcttagatacagcagatgaaaatggacttctttctctccccaactaaaggatattaaagttaggggaaagaaaagatcattgaaagtcatgataatttctgtcccactgtgtctcattatagagttctcagccattggacctcttctaaaggatggtataaaatgactctcaaccactttgtgaatacatatgtgtatataagaggttattgataaacttctgaggc

SEQ ID NO: 12714 - protein, 483 aa, Homo sapiens
MEEGGGGVRSLVPGGPVLLVLCGLLEASGGGRALPQLSDDIPFRVNWPGTEFSLPTTGVLYKEDNYVIMTTAHKEKYKCILPLVTSGDEEEEKDYKGPNPRELLEPLFKQSSCSYRIESYWTYEVCHGKHIRQYHEEKETGQKINIHEYYLGNMLAKNLLFEKEREAEEKEKSNEIPTKNIEGQMTPYYPVGMGNGTPCSLKQNRPRSSTVMYICHPESKHEILSVAEVTTCEYEVVILTPLLCSHPKYRFRASPVNDIFCQSLPGSPFKPLTLRQLEQQEEILRVPFRRNKEEDLQSTKEERFPAIHKSIAIGSQPVLTVGTTHISKLTGDQLIKEFLSGSYCFRGGVGWWKYEFCYGKHVHQYHEDKDSGKTSVVVGTWNQEEHIEWAKENTARAYHLQDDGTQTVRMVSHFYGNGDICDITDKPRQVTVKLKCKESDSPHAVTVYMLEPHSCQYILGVESPVICKILDTADENGLLSLPN

SEQ ID NO: 12715 - DNA, 1955 bp, Homo sapiens
  CDS (93)..(1349)
aagtgtcccctcctacttcttgctgcctcacggttgctgttgcagacccaggagtctctgaaggcttccgcggctttggggccggttgtgagatgccaggcagaggccgctgcccggactgcggctccacggagctggtggaagactcgcactattcgcagagccagctggtgtgctccgactgcggctgcgtggtcaccgagggggtccttaccactaccttcagcgacgagggcaatctccgagaggtaacatattcccgaagcacaggggaaaacgaacaagttagtcgcagccagcaacgaggtctccggcgagtgagagacctttgtcgagttctgcagttgccaccaacatttgaggataccgcggttgcctactaccaacaggcatatcggcactctggcatccgagcggccaggctgcaaaagaaggaggtgttggttgggtgctgcgtcttaatcacctgccgacagcataactggcccctaacaatgggggccatctgcacgctgttgtatgcagatttggatgtgttttctagcacttgcatgcagatagtgaagctcctgggactggatgtgccatctctgtgcttggcagaactggtgaagacctattgcagcagcttcaaactgttccaagcttcaccttctgtgccagccaaatacgtggaagacaaagagaagatgctgtctcgaacaatgcagttggtggagctggcaaatgagacgtggctggtgaccgggaggcatcccttgcccgtcatcactgctgcgactttcctggcttggcagtcgctgcagcctgcagatcggctttcatgttcccttgcccgattttgtaaattggcaaatgtggacctgccctacccggcgtcctcccgcctgcaggagctgctggctgtgctgctgcggatggctgagcagctggcctggttacgagttctgagacttgacaaacggtctgtggtgaagcacatcggtgaccttctccagcaccgccagtcactggtccgctctgcctttcgggatgggacagcagaagtggagacccgagagaaggagccaccggggtggggacaggggcaaggagaaggggaggtgggaaataattccttaggtttaccccaggggaagcggccggccagtcctgcccttctcttgccaccctgcatgttgaagtccccgaagcggatctgccctgtaccccctgtctccactgtcactggagatgagaacatttctgatagtgaaatagaacagtatttgcgtacccctcaggaagttagggactttcagagagcccaggctgctagacaggctgccacgagtgtccctaaccctccctgatggatatccactgggagcacttcatcctgttctgacagcttgataacattcctgttataaccaaggatggaagtgtacaccagtccgtaggtattgcttttcttgtttgaaggaaccaagaggggctctgccattagttggaccctgggtcctggagtaaagtcaggagtgcagggatgactataggtaggagagattcccatcccttggtgtgggagagcaagttgcctatgtccatgttctgtgagatggctttcctcatagatggatgggaaaatgtcaggctctttgctgctggtttgaattggacacactgctgcggctcctcctgcaggcctgagggggcttccctctgcttgtggagtggttggcattcccagcagtatcaaccctcagaggagcgggaactggggaattctggccctacgtgcattcacaggcaatgatgggtttgtgtgtatggtgtcatgagatcctctacctcataacaaaaggacagtgggtagactaaggcagtagctcaaagggctttgcaaaattttaatatattaaaacaagaggcatctgctagaaaacattctattgtataaaacccgagttctt

SEQ ID NO: 12716 - protein, 419 aa, Homo sapiens [sequence omitted]

SEQ ID NO: 12717 - DNA, 1983 bp, Homo sapiens
  CDS (103)..(1719)
aaggagaatcagttcttgctgtaggtaaggggaatgctgtgtttataaagcaaatgacatggcaactggatcttgaaggatgagttagttttcaaaaggtacatgggaaatactcctcagaaaaaagccgtctttgggcagtgtcggggtctgccatgtgttgcaccgctgctgaccacagtggaagaggctccacggggcatctctgctcgagtctggggacattttcctaagtggctcaatggctctctacttcgaattggacctgggaaattcgagtttgggaaggataagtacaatcattggtttgatgggatggcgctgcttcaccagttcagaatggcaaagggcacagtgacatacaggagcaagtttctacagagtgatacatataaggccaacagtgctaaaaaccgaattgtgatctcagaatttggcacactggctctcccggatccatgcaagaatgtttttgaacgtttcatgtccaggtttgagctgcctggtaaagctgcagccatgactgacaatactaatgtcaactatgtgcggtacaagggtgattactacctctgcactgagaccaactttatgaataaagtggacattgaaactctggaaaaaacagaaaaggtagattggagcaaatttattgctgtgaatggagcaactgcacatcctcattatgacccggatggaacagcatacaatatggggaactcctttgggccatatggtttctcctataaggttattcgggttcctccagagaaggtggaccttggggagacaatccatggagtccaggtgatatgttctattgcttctacagagaaagggaaaccttcttactaccatagctttggaatgacaaggaactatataattttcattgaacaacctctaaagatgaacctgtggaaaattgccacttctaaaattcggggaaaggccttttcagatgggataagctgggaaccccagtgtaatacgcggtttcatgtggtggaaaaacgcactggacagctccttccagggagatactacagcaaaccttttgttacatttcatcaaatcaatgcctttgaggaccagggctgtgttataattgatttgtgctgtcaagataatggaagaaccctagaagtttaccagttacagaatctcaggaaggctggggaagggcttgatcaggtccataattcagcagccaaatctttccctcgaaggtttgttttgcctttaaatgtcagtttgaatgcccctgagggagacaacctgagtccattgtcctatacttcagccagtgctgtgaaacaggctgatggaacgatctggtgctctcatgaaaatctacatcaggaggacctagaaaaggaaggaggcattgaatttcctcagatctactatgatcgattcagtggcaaaaagtatcatttcttttatggctgtggctttcggcatttagtgggggattctctgatcaaggttgatgtggtttggagagaagatggcttttatccctcagaacctgtttttgttccagcaccaggaaccaatgaagaagatggtggggttattctttctgtggtgatcactcccaaccagaatgaaagcaattttctcctagttttggatgccaagaactttgaagagctgggccgagcagaggtacctgtgcagatgccttatgggttccatggtaccttcatacccatctgatgggacaaccacaaggtctggaaactaggtttaaaataagtgtgcacttggacataaagactggagaaataaacactgaggactccaaaaggggggcaaggaggaagaggggcaggggttaaaaagctacctattgaatactatgttccctatttgggtgatgggttcgttagaagtccaaacctcagcagcacacaatatactcatgtaacaagcctgcacatgtaccccagaatctaaaataaaaataaaaagaaaaac

SEQ ID NO: 12718 - protein, 539 aa, Homo sapiens
MGNTPQKKAVFGQCRGLPCVAPLLTTVEEAPRGISARVWGHFPKWLNGSLLRIGPGKFEFGKDKYNHWFDGMALLHQFRMAKGTVTYRSKFLQSDTYKANSAKNRIVISEFGTLALPDPCKNVFERFMSRFELPGKAAAMTDNTNVNYVRYKGDYYLCTETNFMNKVDIETLEKTEKVDWSKFIAVNGATAHPHYDPDGTAYNMGNSFGPYGFSYKVIRVPPEKVDLGETIHGVQVICSIASTEKGKPSYYHSFGMTRNYIIFIEQPLKMNLWKIATSKIRGKAFSDGISWEPQCNTRFHVVEKRTGQLLPGRYYSKPFVTFHQINAFEDQGCVIIDLCCQDNGRTLEVYQLQNLRKAGEGLDQVHNSAAKSFPRRFVLPLNVSLNAPEGDNLSPLSYTSASAVKQADGTIWCSHENLHQEDLEKEGGIEFPQIYYDRFSGKKYHFFYGCGFRHLVGDSLIKVDVVWREDGFYPSEPVFVPAPGTNEEDGGVILSVVITPNQNESNFLLVLDAKNFEELGRAEVPVQMPYGFHGTFIPI

SEQ ID NO: 12719 - DNA, 2187 bp, Homo sapiens
  CDS (297)..(2186)
attacagggtgtcctcttccgccgccagaagccggaagttgtgtcccggacgtgtcaaccggggtctgagtgctcagagtacagctgcaaccgcgaccaagggcgggaagaacaagcagcgaactaaagggaacctgaggccttcaaacagtggccgagctgcagaactccttgccaaagaacagggaacagtgcctggatttattggttttggaacatctcagagtgacctaggctatgttcctgctattcaaggagctgaagaaattgacagtcttgtagattctgatttccgaatggtgctgcggaaactttcaaagaaagatgtcaccacaaaattaaaagctatgcaggaatttggaaccatgtgtacagagagagacacagaaactgtgaaaggagttcttccatattggccaagaattttttgcaaaatttcacttgatcatgaccgtcgcgtccgagaagccacacaacaagcttttgaaaaacttacccttaaagtaaagaaacagttggctccctacttaaaaagtttaatgggatattggctaatggctcagtgtgatacttacacaccagctgcgtttgcagcaaaagatgcatttgaagcggcttttcctccaagcaagcaacctgaagccatagcattttgtaaggatgaaattacaagtgtgctgcaggatcatcttataaaagaaacacctgatacactcagtgacccgcaaactgttccagaggaagaaagagaagctaaattctaccgggttgtaacttgttccttattggcattaaagagattactttgccttttacctgataatgagcttgattctctggaggagaaatttaagtctcttttatcacagaataagttttggaagtatggaaaacacagtgtacctcagattcgctcagcttattttgagttagtctctgcattgtgccagcgcattccacagttgatgaaagaggaagcatccaaagtgagcccatcagttctacttagcattgatgacagtgacccaattgtctgcccagctctctgggaagctgtactctatacacttacaactattgaggactgttggcttcatgtaaatgcaaaaaagagtgtgtttcccaagctgtcaactgtgattcgtgaaggtggtcggggtctagctactgtcatatatccttaccttctgccattcatcagcaagctccctcattccatcacaaatccaaagttggatttcttcaaaaatttcctcacgtctctagttgctgggctgtcaacagagagaactaaaaccagctcttcagagtcctcggcagtaatatctgctttttatgaatgcttacgttttataatgcagcaaaacttaggtgaggaagagattgaacagatgctcgtcaatgatcagttgatcccttttattgatgcagttctcaaagacccaggattgcaacatgggcagctatttaaccatttagcagaaactctaagttcctgggaagccaaagcagacacggaaaaagatgaaaaaacagctcacaacttggagaacgtactgatacatttctgggaaagactgtcagagatctgtgttgcgaaaatcagtgagccagaagctgatgttgagtccgttttgggtgtatctaacctattacaggtgcttcagaagccgaagagctcattgaagtcaagtaaaaaaaaaaatggtaaggttagatttgctgatgagatacttgaaagcaataaagagaatgaaaaatgtgtatcttcagaaggagagaagattgaaggctgggaattaacaactgaaccttctctcactcataattcttcaggccttttgtctcctctaaggaaaaaacctttggaagacttagtctgtaaactcgcagatataagtattaattatgtcaatgaacgaaagtcagagcaacatctaaggtttctttctactctgcttgactccttttcttcaagccgagtatttaaaatgctacttggtgatgaaaaacagagtattgtccaagccaaacctcttgaaatagccaagcttgtacaaaaaaatcctgcggtgcagtttttataccagaaactgataggttggctaaatgaagatcaaaggaaggattttggtttcctggtggacattttgtacagtgctctccggtgctgtgacaatgatatgg

SEQ ID NO: 12720 - protein, 630 aa, Homo sapiens
MVLRKLSKKDVTTKLKAMQEFGTMCTERDTETVKGVLPYWPRIFCKISLDHDRRVREATQQAFEKLTLKVKKQLAPYLKSLMGYWLMAQCDTYTPAAFAAKDAFEAAFPPSKQPEAIAFCKDEITSVLQDHLIKETPDTLSDPQTVPEEEREAKFYRVVTCSLLALKRLLCLLPDNELDSLEEKFKSLLSQNKFWKYGKHSVPQIRSAYFELVSALCQRIPQLMKEEASKVSPSVLLSIDDSDPIVCPALWEAVLYTLTTIEDCWLHVNAKKSVFPKLSTVIREGGRGLATVIYPYLLPFISKLPHSITNPKLDFFKNFLTSLVAGLSTERTKTSSSESSAVISAFYECLRFIMQQNLGEEEIEQMLVNDQLIPFIDAVLKDPGLQHGQLFNHLAETLSSWEAKADTEKDEKTAHNLENVLIHFWERLSEICVAKISEPEADVESVLGVSNLLQVLQKPKSSLKSSKKKNGKVRFADEILESNKENEKCVSSEGEKIEGWELTTEPSLTHNSSGLLSPLRKKPLEDLVCKLADISINYVNERKSEQHLRFLSTLLDSFSSSRVFKMLLGDEKQSIVQAKPLEIAKLVQKNPAVQFLYQKLIGWLNEDQRKDFGFLVDILYSALRCCDNDM

SEQ ID NO: 12721 - DNA, 1878 bp, Homo sapiens
  CDS (22)..(900)
gcgcaactcattggcgccaagatggcgatggagatgaggcttccagtggctcgcaagcctcttagcgagagactgggccgcgacactaagaaacatctagtggtgccgggggatacaatcactacggacacaggattcatgcggggccatggaacgtatatgggagaagagaagctcattgcatctgttgctggctctgtggagagagtaaacaagttgatctgtgtgaaagctttgaaaaccagatacattggtgaagtaggagacatcgtagtgggacgaatcacagaggttcaacagaagaggtggaaggtggagaccaactccaggctggattcggtcttgctgctctcgtccatgaaccttcctggaggagagctgaggagaagatctgcagaagatgagcttgcaatgagaggtttcttacaggaaggggaccttatcagtgctgaggtccaggcagtgttctctgacggagctgtctctttgcacacgaggagcctgaaatatggaaaactaggtcagggggttttggtccaggtttccccctccctggtgaaacggcagaagacccactttcatgatttgccatgtggtgcctcagtgattctcggtaacaacggcttcatctggatttacccaacacctgagcacaaagaagaggaagcagggggcttcattgcaaacctggagcctgtctctcttgctgatcgagaggtgatatcccggcttcggaactgcatcatctcgctggtaactcagaggatgatgctgtatgataccagcatcctgtactgctatgaagcatcccttccacatcagatcaaagacatcttaaagccagaaataatggaggagattgtgatggaaacacgccagaggcttttggaacaggagggataaggaggtgctccagaagcacgggactgtggaccttgcaggagtgaagactgtgatgtgtggtccccatatgtggctcagcaaagactcgagagatcatccctttgtctgcattgacggccctgtgacggcctccagcccacaggcctgctttctcctgtcctaacaccaagcctgggtggcagatgaacagtgcttccttgggttgccagctgagtcccggtattagggaatagtttcagctctttcaaagtgcacagtgttacagtcgaatgggctcccatcctggaataatatggagaatcctttgtcttccactcactgtcattcacaaggcacagtgccccatgaaattgccccaatagaaaacatggcatccctgacctccaaatggtctgttttggcctccattcctatatcctttaaatgactgagaatgcagctggtaaagttggaagaataaagttaaccaagcaggccaggcacggtggctcacgcctataatcccagcacttagggaggccaaggcgggcagatcacctgaggtcaatagttcgagaccagcctggccaacaaggtgaaaccccatctctactaaaaatacaaaaaattagccaggtgtggtggtgtgcacctgtggtcccagctatttgggaggctgaggtgggagaatcacttgaacctgggaggcggaggttgcagtgagctgaaatcgcgtaccacactccagcctgggtgacagagcgagactgtgtttcaaagaaaaaaaaaaacaagcagccttttgcttggttggaatctgattttctgttgcgtgttccttgtagccatagatgtgattatgtccacaccgggctgccttaatctgtcctgcttggagagtgacttgtaagatgctgaattattcatgataatacagtgaatgttctgggtccatgtactcagataaacatgaagaaaataagcaaagaaaaatgg

SEQ ID NO: 12722 - protein, 293 aa, Homo sapiens
MAMEMRLPVARKPLSERLGRDTKKHLVVPGDTITTDTGFMRGHGTYMGEEKLIASVAGSVERVNKLICVKALKTRYIGEVGDIVVGRITEVQQKRWKVETNSRLDSVLLLSSMNLPGGELRRRSAEDELAMRGFLQEGDLISAEVQAVFSDGAVSLHTRSLKYGKLGQGVLVQVSPSLVKRQKTHFHDLPCGASVILGNNGFIWIYPTPEHKEEEAGGFIANLEPVSLADREVISRLRNCIISLVTQRMMLYDTSILYCYEASLPHQIKDILKPEIMEEIVMETRQRLLEQEG

SEQ ID NO: 12723 - DNA, 1079 bp, Homo sapiens
  CDS (64)..(618)
ggagtcggcctgagaggtctctcgtcgctgcaggcgcctcagcccagccgcgtgccttggcccatggccgcctactcttaccgccccggccctgggcctgctgcaggcgcggcgctgccggaccagagcttcctgtggaacgttttccagagggtcgataaagacaggagtggagtgatatcagacaccgagcttcagcaagctctctccaacggcacgtggactccctttaatccagtgactgtcaggtcgatcatatccatgtttgaccgtgagaacaaggccggcgtgaacttcagcgagttcacgggtgtgtggaagtacatcacggactggcagaacgtcttccgcacgtacgaccgggacaactccgggatgatcgataagaacgagctgaagcaggccctctcaggctaccggctctctgaccagttccacgacatcctcattcgaaagtttgacaggcagggacgggggcagattgccttcgacgacttcatccagggctgcatcgtcctgcagaggttgacggatatattcagacgttacgacacggatcaggacggctggattcaggtgtcgtacgaacagtacctgtccatggtcttcagtatcgtatgaccctggcctctcgtgaagagcagcacaacatggaaagagccaaaatgtcacagttcctatctgtgagggaatggagcacaggtgcagttagatgctgttcttcctttagattttgtcacgtggggacccagctgtacatatgtggataagctgattaatggttttgcaactgtaatagtagctgtatcgttctaatgcagacattggatttggtgactgtctcattgtgccatgaggtaaatgtaatgtttcaggcattctgcttgcaaaaaaatctatcatgtgcttttctagatgtctctggttctatagtgcaaatgcttttattagccaataggaattttaaaataacatggaacttacacaaaaggcttttcatgtgccttacttttttaaaaaggagtttattgtattcattggaatatgtgacgtaagcaataaagggaatgttagacgtg

SEQ ID NO: 12724 - protein, 185 aa, Homo sapiens
MAAYSYRPGPGPAAGAALPDQSFLWNVFQRVDKDRSGVISDTELQQALSNGTWTPFNPVTVRSIISMFDRENKAGVNFSEFTGVWKYITDWQNVFRTYDRDNSGMIDKNELKQALSGYRLSDQFHDILIRKFDRQGRGQIAFDDFIQGCIVLQRLTDIFRRYDTDQDGWIQVSYEQYLSMVFSIV

SEQ ID NO: 12725 - DNA, 2049 bp, Homo sapiens
gatgaagcatgagccctgcccttgcggactccaaggccaaggccagttgaggacaggagagccagccccagggtccggagtggtggtgaagactctggaaccagctcacccactccaagaacttccctagcctcctcatacctcactctcctcctctgtggaatggacatggagaaggctacttcatcaggtgactggtggtgaagttaggccgatctatttaaggtagttagaacagtgcccagcctatggtgagctcttgttacctgcctggtgcaggctctagaaattcagaaaggaagccaagaagagtaggaaagtcttttgttaggaggtgggctttgcagaatggatctgcagagatgggggaaggcgactctgtcctgtaggtgggggaactgcgtgagcaaaggcacagaggccggatgcactgaacctgtttgttcccccagaggttctgaggccacaggaagtggctggcgtgggagtggctggtccaaggggagctgcactattaagtgtggagggggagggggacaggagcaggaccacagggaccttgaccgccaagctgggggaaggaagtgtgaataaagccccaatgccaccaggcatctctgtactgccctcctctccctccccactccagccaggcacctgccctgtttcctgggaccccctgaaggaggacatcccttagctccacaaagagccctgccctagtcttcacatagtaattgtcttgtgtgtctcacccagtgataaggggtgggcaaggggcaggggtgggggctcttgagcacccgttttatagatgaaatgcctgagaccaggcgggagcccctggggcctccctggcttcatggggcaggctcaagtccctcaagggcgcggcttccctccctctcagcagcccacacttgttctatgtccggtgatgggtccctgagggtccgctggggcgcccctccagcctcccgccagagcagggctggaagactgccatgtctggggccaggctgagctcagtgcatgcctctgcgtagtgcattattgatggggcttctaattgtgcgtttcccaaagtctacaggcttttgatgaaaaattcatggcacgcccgaggatgggagcagactcaatcgattggcgcacagcaggcaggggaggacagggccccttgcagggaggggtggtgaagcctggtctgggaggcttcttgccccaggatcttggggatagcagggggcacacacccatttccctggtggggaggctgaggggcaggagcaggaagatttaaggcccacatctcagtgccagccagtgactggtgccatccagggaggatggccgactccaccacgggcctccctttcatttccctggaggggtgctagaccctccagagcccctcatgagagttgcacagaggagggagtaatatttctggagccactcttatatgccagacgctgctcggacgtgtacactcgcagcctcatttaatccccaacagcgttatgagatgggcacagtgatgcactccattttacagaggagaaaacaggcttagagaggttaagtgacctgtccaaagtcacacagctgcttagtaacagagcccactatctttccacttcaccaggcccactcaaataagaactaataggagtatggggattgtcttgtgccactcccctacttgtccctgttgttcagaggaagtgtccccattaagaaaaagtggagtgggccaggtgcagtggctcatgcctgtaatcccagcattttgggaggctgaggcaggtggatcacgaggtcaggagatcgagagcatcctggctaacacggtgaaacccagtctctactaaaaaaatacaagaaattagccaggcatggtggcaggcacctgtagtcccagctactcgggaggctgaggcaggagaatggcatgaacccgggaggcggagcttgcagtgagcccagatcgcgccactgtactccagcctgggagacagagcaagagacagagccagactccatttc

SEQ ID NO: 12726 - DNA, 1813 bp, Homo sapiens
  CDS (144)..(467)
acttgagctcagaagatcaaagctgtagggtgcatgactgtgctctcaatagccactgcattcaaaccggggcaacacagcacaacccagtctcttaaaagagattcagcatcctggagaagccattggaaagagtagagaaaatgccacggatgaaatatccctgctgctcagactccactgacccaagtgaagttggccacagtctaacaaatgggatactgcagcggggttctggttctgaaacagatctggtgaatggtgctcgaagtgatcggctgttgaccaggtgtggcttctctgttgatgttccaaggacctcatcagcagaggaagaagcattattactaaccatctttggcaggatgaccttttgttgttgtcgttcaaccaggtctcctttattactctgcaatctctcccttttgttccctttccacctaaaactcggatgtctctgccaccgataagcacccagtggctttcccagattggaaacagcagaatcatttttcttcctcttgcttttcactggaccacaccatggataactctttaaacttgttcctatctctgaatctgcataagcaggttctgacaaagatcttcgatagcttggaggacaaggtgatgtttgtttcttaaagatgctcatcttccctgactccagtctttaacagtctctctaaactttaagattcctctactctgcagtctttgcagttgaaccacacatgtctgtgcagtccaaaacatttgactgcttaagcagctttctttgtgtggctttgaaccacagcagatgttgctgcttaagagctggtgtcatgttattacgccattttccaagatctcaaaaacttcagcagcacctaaaaacctcttgcctgaagcaaagtatcatcagagtagagacaaagtcaagatttccaaaggatcacctcacttcctgcagtaggttacatttctgtaataggctttcgggaaatgatttttttaagtgaaataaaaacaacaacaacccaccaacacctttatggaccagtagtagttaagtgttcaccatgcaaatgatagcgagttaaaaacagattgtgaagaaaatcaaattactcaagctgatattgatactttccagaagaagaaaaaaaaccttgcctagtcttggagtgacaactcttcagaagagttttgatggcctgcatttcagaagtttaatttcaagcaaatcaatgctatttatactacatctctcaaagttaatattgtttttcaaccaataggtaaaattcaaactggtactgtaagaggaggaaaaaagccaaaagaaagccaacaccatttttagtgtaaatatattacactatgaagaatttaaaaagcataaataggaagaaaaagagcagaggcagagggtatttgctataaactacagcaaaggaaaaggaaaatcttgaggcaagatcttgtggcaactggaacataggaatgtacatacttaaaaaatttctggaagaagaaagtttgctatataaatccaattgggataagttggctggaaaaatattccctatctgtttaaccaaagaaattcctttattcctctttgtgctccttacaactttaaaaaagacctgactacttaaaatttgttaaagcaagtaccttatactgaaccaagatcatgaatgccaagtttttgctggttaagttcttttcaactgcctgctcataagcccctgaaaataggggtttcaaatggaaagcctcacagacttcagactaccaataaaacagatataacagtgcaatc

SEQ ID NO: 12727 - protein, 108 aa, Homo sapiens
MPRMKYPCCSDSTDPSEVGHSLTNGILQRGSGSETDLVNGARSDRLLTRCGFSVDVPRTSSAEEEALLLTIFGRMTFCCCRSTRSPLLLCNLSLLFPFHLKLGCLCHR

SEQ ID NO: 12728 - DNA, 2783 bp, Homo sapiens
  CDS (17)..(565)
taactttgatgtcccaatggaaacaacccacggtgctccattggattctgtgggatctgatgtctggagcacagaggagccgatgccaactaaagagacgggctgggcttctttttcagagttcacgtcttccctgagcacaaaagattctttaaggagtaattctccagtggaaatggaaaccagcactgaacccatggaccctctgactcccagtgcggctgccctggcagtgcagccagaagcggcaggcagtgtggccatggaagccagctctgacggagaggaggatgcagaaagtacagacaaggtaactgagacagtgatgaatggcggcatgaaggaaacgctcagcctcactgtagatgccaagacagagactgcggtcttcaaaagtgaggaagggaaactgtctacctctcaagatgctgcttgtaaagacgcagaggagtgtcccgagactgcagaggcgaagtgcgcggcgcccaggcctcccagcagcagtcccgagcagaggactggccaaccaagcgcaccaggtgacacttcagtgaatggccctgtatgacgggtgacgtctgctgctgctgactgaggactgcagaccgccaccactcaggggctctggaggggtcagctggagcccaccaagctgtcactgctgcactcactctgcaagggatcaggaccagcaacctttatattctagattctaagacattgtacagagaaattcagaagtgtaaaaatattgcacattgacaaataccaagaatttttgcgtatgtttatattgtattgttctaaataatgggtagcctgtgaaataagatcttgccacccatgtaataatagtagtaatactatagttaaaatggctgtaagaatagttttataaaagtgaatacacagatctattgtatttgaaacataactttgacaattattagtgtgaccaaagtattaggcggttttcatacatttttcaccttgtacaaaattatgaattcatttttcctccaggccgacaaggagttgtagaatgaaaatgccctctaagtgttattttggttgttctaacttacaaaagtgattttgaataagaaatatttggtgttctttttataaccagtttttgattggtaattgttttctgtattgtttaaaacggatcaaaaatgtaagtctattggtagagattaagtaaagtatttattgctacatcatagttgataaattgatgttatcgtaaagccatatgttctgttcaagtcttgtttgcttgaaatgattattcctacaagtgaaacactagactatttggagtgtatatggcttgtgttttgggatttttttttttttttttggcttttgtttttgtttgtttttttgtttcatttggtagttcatctgccttttaacccattcaccaaaatttaccttgttaacaagcatcaccaatgaacatttcagagcaatctgcatatttaacagacctaaaataaatcctattaggcaagtcagttgaaaatgctcgtgctgctaatggaattagagtgcgttcattttacaggctagtattttaaaagtagaaatcaaaatctggcaccgaagcatgctaattgtttactgtaccttgtgaggttttcactcataaatttaaaccagtgtatttttttagaactggtttgtgtatatatatagtgattatggatactaattcaatgtaatttataattttctatgtcaatacaaaaatacatcacagccttctcaaacagctcaagcaatatattgtatattgccatatcgtctggtgaaagggttaaattacttcacctcttgcacttttagatgcaaatcagtttttcatttctgtaatagaaaattattcacgtatttttacatcatttgtttttcctgaccagtatttaaaaccaaaaggatattctgaaaaatggccaacaatttttttagaagtagcatcccaagcagcgtgcctaaacattacattgcatatggaaataaaagaatcaaacgtctaatgccttattatttctgatttcctttttcattttaagtggtgtggagattccagcactcccaggacagtggagtcagcagtaagccctggggcaggtggcaagggtgggtcccttgacctttgcacgcctcctcaggaaccccctttcccgggtgagcccctctctgaagagactgtccttgggcctcctctggaagcagcacccccagaggacagggctcctcctgcttgcctcagggctgcctgacttgaatggcgttggacctcggggattactggtagataatatgctctggtctcgcctggtggtgagttttgccagccatggccagggtttggctccactggtggcacacgtggcctccgtggtatggaccaggtggcttctccatcccactgtggcctctgtggtatggacctggtggcttctccatcctacccaaggtaacagtgtcttgcttcatcccactgactgctgggagagagcctctgggacttttctttggggcatcattttgttttgtctttcgtagcagggaaaggatatgacaatggggaggacagttcttttggaggttggaggggccaagccaaggacaggagcaagtgtgccctcattttgtttctacttttaatttctgtgtgttggccatactgaattatgagactaacagatgtctacaatacaatacctgtattcaaaataacaaaaataaagcctgattctttgtttctagac

SEQ ID NO: 12729 - protein, 183 aa, Homo sapiens
METTHGAPLDSVGSDVWSTEEPMPTKETGWASFSEFTSSLSTKDSLRSNSPVEMETSTEPMDPLTPSAAALAVQPEAAGSVAMEASSDGEEDAESTDKVTETVMNGGMKETLSLTVDAKTETAVFKSEEGKLSTSQDAACKDAEECPETAEAKCAAPRPPSSSPEQRTGQPSAPGDTSVNGPV

SEQ ID NO: 12730 - DNA, 2013 bp, Homo sapiens
ctctactaacaatacaaaaaaaaaaaaaaatagctgggcgtagaggtacacgcctgtaatcccagctactcaggaggctgaggcaggagaatcacttgaacccgggaggcggagggtgcagagccgagatcgcaccactgctctctagcctgggcaacaagagcaaagactccgtctcggaaaaaaaaaatgtggttccggggcctcccaggggacagcgtgtcataggttgctcaggcctccaagcacggtcggtgggcctccgactgcagccttggtgcccactccaccaaccggcagaagagccggccctgagtgctgatggggggatgtgtgtctgatggaggggtctcctgagaggtcagtgattgcctacgatggggcttccctcccaagtcatcaagttcatgggaggctgcatcccatgggtctctttcaacaccagccctgactgaagagctgctctcttcagcagtgtattgttggagcgagtgctggaattgagtcattgtcactggaacagctggtcaccgcccaaagacggggagcctgggtcccagagaccagtccccaacatgggtgctgggtctggggagatggcccgtgaccaggctggggtggcatttccctgacactgggcctttgtagtgacaatcccctctgtgctgacgccgcttctcaacggtgggatggctgaggcctctgactcctgggtgaggccagctgtgtccctgaccatctgcttggcctgtcagtggccagggcactctcgaggtggcctccactcttcccccagccctgggtgcaggtgggcacctctgcaggagccagtcttgtctggaggttctctgaaggcaggaacccccacaggccccagggcatagcagcgcctcaattagccgagagcaaggcctctcgtggtgatgtggctcttgttgtttgtcccgggccctggggcacccggctgagtgtcttggtccctctcccaccccacctgtgagcttggggtctcccctcagaggcctgaggagatggtgttccctgggtgctcctgagcaccagccctcactgccaggctactcttggagcagcacaaggttaggatgtgctggccaccgccttggggctggtggccgcctgggcactcagggcctcctttgggccgtcttacctcgtctctctcctccaggaggcaacgcacgggccacaggcatgttcctgcagtatacagtgccggggacggagggtgtgacccagctgaagctgacagtggtggaggacgtgactgtgggcaggaggcaggcggtggcgtggctagtggccatgcacaaggctgccaagctcctctatgaatctcgggaccagtaactctacgtggggctgagcttggagtacgtgtggtcaccaggactgagtcgcttggaacagcagagcctgctccttgcgtaccacagggattaatcctgcttgtgctgggaaatgcaactcactcatgtatttggagaaacaggagtgttcacttatctagtgcaatatgttcacagtttattaatgctttaaacagcttcatgttttagaatttgtgtattgtcaatacttaattgggggtgggagagactgagctacactactgctaaactatttttagcataatatataccatttttatgagttcgcaggtctactagaaggttctggcccatcaatattcatttcatttaattcttccacagaaccagtttgggcagtaggaactcaggcttctggtctgcagtggagcctgttcgcctctaatagccagtttacagcacttgccttagcctgtttcacagacttgtccacttaccttgtcactaatttggggcttctgggctgtgagtgatcctttgatacttcaccaaggggaacgtgggggctttgtgttttgtacttttcactcactatttcactttattaagatgactgtacagcaatttgtatataaagcttatgattaaaaactattttgaacat

SEQ ID NO: 12731 - DNA, 2550 bp, Homo sapiens
  CDS (117)..(2549)
atcatgaacctggaagagcaggtactataaaagagaattcacgctgtccgttgaatgaagaggtaattgtccaagccaggaaaatatttccttcagtgataaaatatgccgtagaaatgactatatgggaagaggaaaaagaactgcctcctgaactccagataagggagaaaaatgaaagatactattgtgtccttttcaatgatgaacaccattcatatgaccacgtcatatacagcctacaaagagctcttgactgtgagctcgcagaggcccagttgcataccactgccattgacaaagagggtcgtcgggctgttaaagcgggagcttatgctgcttgccaggaagcaaaggaagatataaagagtcattcagaaaatgtctctcaacatccacttcatgtagaagtattacactcagagattatggctcatcagaaatttgctttgcgtcttggttcctggatgaacaaaattatgagctattcaagtgactttaggcagatcttttgccaagcatgccttagagaagaacctgactcggagaatccctgtctcataagcaggttaatgctttgggatgcaaagctttataaaggtgcccgtaagatccttcatgaattgatcttcagcagtttttttatggagatggaatacaaaaaactctttgctatggaatttgtgaagtattataaacaactgcagaaagaatatatcagtgatgatcatgacagaagtatctctataactgcactttcagttcagatgtttactgttcctactctggctcgacatcttattgaagagcagaatgttatctctgtcattactgaaactctgctagaagttttacctgagtacttggacaggaacaataaattcaacttccagggttatagccaggacaaattgggaagagtatatgcagtaatatgtgacctaaagtatatcctgatcagcaaacccacaatatggacagaaagattaagaatgcagttccttgaaggttttcgatcttttttgaagattcttacctgtatgcagggaatggaagaaatccgaagacaggttgggcaacacattgaagtggatcctgattgggaggctgccattgctatacagatgcaattgaagaatattttactcatgttccaagagtggtgtgcttgtgatgaagaactcttacttgtggcttataaagaatgtcacaaagctgtgatgaggtgcagtaccagtttcatatctagtagcaagacagtagtacaatcgtgtggacatagtttggaaacaaagtcctacagagtatctgaggatcttgtaagcatacatctgccactctctaggacccttgctggtcttcatgtacgtttaagcaggctgggtgctgtttcaagactgcatgaatttgtgtcttttgaggactttcaagtagaggtactagtggaatatcctttacgttgtctggtgttggttgcccaggttgttgctgagatgtggcgaagaaatggactgtctcttattagccaggtgttttattaccaagatgttaagtgcagagaagaaatgtatgataaagatatcatcatgcttcagattggtgcatctttaatggatcccaataagttcttgttactggtacttcagaggtatgaacttgccgaggcttttaacaagaccatatctacaaaagaccaggatttgattaaacaatataatacactaatagaagaaatgcttcaggtcctcatctatattgtgggtgagcgttatgtacctggagtgggaaatgtgaccaaagaagaggtcacaatgagagaaatcattcacttgctttgcattgaacccatgccacacagtgccattgccaaaaatttacctgagaatgaaaataatgaaactggcttagagaatgtcataaacaaagtggccacatttaagaaaccaggtgtatcaggccatggagtttatgaactaaaagatgaatcactgaaagacttcaatatgtacttttatcattactccaaaacccagcatagcaaggctgaacatatgcagaagaaaaggagaaaacaagaaaacaaagatgaagcattgccgccaccaccacctcctgaattctgccctgctttcagcaaagtgattaaccttctcaactgtgatatcatgatgtacattctcaggaccgtatttgagcgggcaatagacacagattctaacttgtggaccgaagggatgctccaaatggcttttcatattctggcattgggtttactagaagagaagcaacagcttcaaaaagctcctgaagaagaagtaacatttgacttttatcataaggcttcaagattgggaagttcagccatgaatatacaaatgcttttggaaaaactcaaaggaattccccagttagaaggccagaaggacatgataacgtggatacttcagatgtttgacacagtgaagcggttaagagaaaaatcttgtttaattgtagcaaccacatcaggatcggaatctattaagaatgatgagattactcatgataaag

SEQ ID NO: 12732 - protein, 811 aa, Homo sapiens
MTIWEEEKELPPELQIREKNERYYCVLFNDEHHSYDHVIYSLQRALDCELAEAQLHTTAIDKEGRRAVKAGAYAACQEAKEDIKSHSENVSQHPLHVEVLHSEIMAHQKFALRLGSWMNKIMSYSSDFRQIFCQACLREEPDSENPCLISRLMLWDAKLYKGARKILHELIFSSFFMEMEYKKLFAMEFVKYYKQLQKEYISDDHDRSISITALSVQMFTVPTLARHLIEEQNVISVITETLLEVLPEYLDRNNKFNFQGYSQDKLGRVYAVICDLKYILISKPTIWTERLRMQFLEGFRSFLKILTCMQGMEEIRRQVGQHIEVDPDWEAAIAIQMQLKNILLMFQEWCACDEELLLVAYKECHKAVMRCSTSFISSSKTVVQSCGHSLETKSYRVSEDLVSIHLPLSRTLAGLHVRLSRLGAVSRLHEFVSFEDFQVEVLVEYPLRCLVLVAQVVAEMWRRNGLSLISQVFYYQDVKCREEMYDKDIIMLQIGASLMDPNKFLLLVLQRYELAEAFNKTISTKDQDLIKQYNTLIEEMLQVLIYIVGERYVPGVGNVTKEEVTMREIIHLLCIEPMPHSAIAKNLPENENNETGLENVINKVATFKKPGVSGHGVYELKDESLKDFNMYFYHYSKTQHSKAEHMQKKRRKQENKDEALPPPPPPEFCPAFSKVINLLNCDIMMYILRTVFERAIDTDSNLWTEGMLQMAFHILALGLLEEKQQLQKAPEEEVTFDFYHKASRLGSSAMNIQMLLEKLKGIPQLEGQKDMITWILQMFDTVKRLREKSCLIVATTSGSESIKNDEITHDK

SEQ ID NO: 12733 - DNA, 3149 bp, Homo sapiens
  CDS (424)..(1062)
ttttcctcgtccctcccttcgcggtgattttccggtcccggcgcccggcgagggcgcgcggctggtgtccgccccgcccgaaaggtgagccagccatgagagggtatcttgtggccatattcctgagtgctgtcttcctctattatgtactgcattgcatattatggggaacgaatgtctattgggtggcacctgtggaaatgaaacggagaaataagatccagccttgtttatcaaagccagcttttgcctctctgctgagtcagagctctgcatatattttaagaaaaggcattgaggaactcaatcaaaccagtattcttttcacacaggtttcatcagtttcacccttttctgtgtgcggctgattttagaaagattgcttccttgtatggtagcgataagtttgatttgccctatgggatgagaacatcagcggaatattttcgacttgctctttcaaaactgcagagttgtgatctctttgatgagtttgacaaaatgaataatggtcctgttttaggacatgaagaagaagttgggagaaggacaaccttccgacttttttatccagaatctgttttttcagatcctattcacaatgaccctaatacgacagtgattctcactgcttttaagccacatgatttaaggtggctgttggaattgttgatgggtgacaaaataaacactaatggtttttggaagaaaccagccttaaacctgatttataaaccttatcaaatccgaatattagatcctttcattatcagaacagcagcttatgaactgcttcattttccaaaagtgtttcccaaaaatcagaaacctaaacacccaacaacaggaattattgccatcacattggcgttttacataagtcacgaagttcacctagctggttttaaatacaacttttctgacctcaagagtcctttgcactactatgggaatgccaccatgtctttgatgaataagaacgcgtatcacaatgtgactgcagagcagctctttttgaaggacattatagaaaaaaacctcgtaatcaacttgactcaagattgactctacagactcagaagatgatgctaacagtgttagttttatttttgtactgcaatttttagtttaaaatatgttggatgcactcgtcaaataattatgtatactgtctgttgctgcctggtgattcataaccaccagcttaatttctgtgaatactgtatatttaacttatgaaaaccaagaaatgtaaagataacaggaaaataagttttgattgcattgtttttaaaataagctagttttctgaggtgttttcacacgtctttttatagttacttcatcttagatttttgaagggatatgacttcctactaaggatttagtttaccacaacaattctgactacaataagacattttgaggaggatatttggctactgtaaacatggctggtggaaaatcacgattgtggcttgatgtggcaagccgaaaccacttggctctggaaatctaagttcatactggtttaattaagctctctcctgacaacccccagaattaaatgaaccatgattgtgaagagtaatttggtacaatgaaggcagtgtttgtttttaagttaaaggaaatgggctaaacataaagttcttattagataagtaaataactaaagaaagaatacaattactaaactctgatggctttgtattattttaaagaaatgaagtttaactttatacaatgaagctaagctaggcaagctcaagaaggaaaaaaaaatcttgaacattatttttttttgcctgacttacttattcattaaattttgaaggttttccacttgaagtaaattaggaaaggtaaagaagataacagaacaagtaaacacttaagaaaagtcaagctgaggccgggcagggtggctcacacctgtaatcctaacaaacactttgggaggccgagggaggcagctggattgcctgaactcaggagttcaagaccagcctggccaacatggtgaaacctcatctctactaaaatacaaaataattagctgggcgtggtggtatgcgctgtagtcccaggtactcgggaggctgaggcacgagaattgcttgagcccgggaggcagaggttgcagtgagccaagatcgcgccactgcacttcagcctgggtgacagagtgaggctgtcttctaaaaaatataaaaagtgaagttgggatttttggatttaaatggtacaaaaagaatatctcattttcccatgattaaagctaatcttcagatggaaagcttgcctggctacctagggtgcaccagagaatctgatccaatgcaagccagtcaatcctacaaatgtggtgagctagtcttccttcctatattttaataaatgtaaccaaaggccatctggaggtaggggaatgagaggtgaagaaacagaaaaatagaggttataaggatggaactaaaagttgtcagaagaggtatgagctgaagaaagagttactctcttttgaccaataaatacaattgggaaacactggaaaaccatggcttgattactgacaaccaacctgcctctctaaagagggtgtataaagggtgaaatacattagatttggctcagaaacagaatgcggtacttataaagcagaataaaggggagaacagtagtagttgatctaacccagattagacatgaataccagcatatgtttgcagagtcccacagttttgattcttcttataactttttgaggtgcaaaaggaaggtaccagaactggaatcgcatgtaatcaatcagtgtgattttcccctcataccacacagccataggctgcagtgtggctgctgaagttcaattgatataaagtaaatcaggcttcaaaaagaatggtgctgtgggtacacaaggacataaagatgggaacgatagacactgaggactgcggcggggggagcgaggggagcggggagggcaagggctgaaagactatgtattgggtactatgctcacaacctggatgatgggatcattcataccacaaacctcagtatcacacaatatacccatgtaacaacctgcactctgcacatgtacccttagaatctaaaataaaagttgaaattattttttt

SEQ ID NO: 12734 - protein, 213 aa, Homo sapiens [sequence omitted]

SEQ ID NO: 12735 - DNA, 2257 bp, Homo sapiens
  CDS (119)..(1696)
aaagaaaagaaggaaaaaggaaactgatttggtggaagaacacaatggtcacatctttaaagccacccaatatagcatccctacatactgtgaatactgttcttctttgatatggataatggaccgagcctctgtttgcaaattatgcaagtatgcttgccataagaagtgctgtctgaaaaccacagccaagtgctctaaaaagtatgatccagagctgtcatctcgacaatttggggttgaactgtcccgtttgaccagtgaagaccgaactgttcctttagtagtggaaaagctcataaactacattgaaatgcatggactgtatacagaaggtatttatcgaaagtctggttcgactaataaaatcaaggagcttcggcagggtctagatacagatgctgagagtgtaaatctagatgactataacatacacgtcattgcaagtgtattcaaacaatggcttcgagatttgcccaatcctctcatgacctttgaactctatgaggaatttcttcgagctatgggccttcaggagaggaaggagacaatccgtggtgtatactctgtgattgatcaactctcccgaactcatctcaatacactggaacgcctcatctttcatctagtcaggattgctctgcaggaagacactaatcgaatgtctgctaatgctttggccattgtgtttgcgccctgcattctccgctgccctgacaccactgacccactacaaagtgtacaggacatcagtaagactaccacttgtgtggaactgattgttgtggaacaaatgaataaatacaaggctcgtctcaaagatatcagtagcttggaatttgctgagaataaggcaaagaccaggttgtcactgattcgtagatcaatgggaaaggggcgtattcgtcgaggaaactatccaggtccatcgtctcctgttgtagttcggttgccttctgtgtctgatgtctcagaggagaccttgactagtgaggcagccatggagactgacatcacagaacagcagcaagcagctatgcagcaggaggagagagtactgactgagcagattgagaacctacagaaggagaaggaggagctaacatttgagatgcttgtactggaaccccgtgcctctgatgatgaaacccttgagtctgaggcctccattgggactgctgatagctcagagaatttgaatatggagtctgaatatgctatctctgagaaatcagaaagaagcttagcccttagctccctgaagacagctggcaagtctgaaccttccagcaagttgcgaaagcaacttaaaaagcagcaagactctttagatgtcgtggactcttcggtctcctctttatgtctgtctaacacggcatcatctcatgggaccagaaaactatttcagatttattccaaatctccattctaccgagctgcctcaggtaatgaggccctgggaatggaaggaccattgggccagaccaaattcctggaagacaagcctcagttcatcagcagaggaaccttcaacccggaaaagggcaaacaaaaattaaagaatgtgaaaaactcacctcagaaaaccaaagagaccccagaggggacagtcatgtctggccgcagaaaaactgtggacccagactgcacctccaaccaacagctagcactctttggaaataatgaatttatggtctgaaccggcagatgtgtgtccctccgtggctacagagtggtaaacaaatctcacctttggggctgcgtttcatcacctcgtccacaatagtcaatcctaattgtggtcctgcctcttttctaagcatatggctaagactgtatgtgctgaattcctgggcctcctgcagaagcagaaagcctgctggggatggtgccagctgtgccttggctgttgtatttgaattgagatttttactatacaaagccacctagggcctggggatttgggtcagttgtagttgcctctcccccaccctcttttcccttcccaaaggtgggtgttgaactaggggggatattgctgtcctgagggaccctctcatttctgacatttgaagaaaacgtataaatctttcttaaccgtgaaagcaaaagcctttgggtttattttgggatagttaggagctagggtagaatataatttttttccaaaaacttacttacaaacaaaaagcctaatccctctattttaagatttctggaaaaacactccatgttatattctggggaaagcaaaaac

SEQ ID NO: 12736 - protein, 526 aa, Homo sapiens
MDRASVCKLCKYACHKKCCLKTTAKCSKKYDPELSSRQFGVELSRLTSEDRTVPLVVEKLINYIEMHGLYTEGIYRKSGSTNKIKELRQGLDTDAESVNLDDYNIHVIASVFKQWLRDLPNPLMTFELYEEFLRAMGLQERKETIRGVYSVIDQLSRTHLNTLERLIFHLVRIALQEDTNRMSANALAIVFAPCILRCPDTTDPLQSVQDISKTTTCVELIVVEQMNKYKARLKDISSLEFAENKAKTRLSLIRRSMGKGRIRRGNYPGPSSPVVVRLPSVSDVSEETLTSEAAMETDITEQQQAAMQQEERVLTEQIENLQKEKEELTFEMLVLEPRASDDETLESEASIGTADSSENLNMESEYAISEKSERSLALSSLKTAGKSEPSSKLRKQLKKQQDSLDVVDSSVSSLCLSNTASSHGTRKLFQIYSKSPFYRAASGNEALGMEGPLGQTKFLEDKPQFISRGTFNPEKGKQKLKNVKNSPQKTKETPEGTVMSGRRKTVDPDCTSNQQLALFGNNEFMV

SEQ ID NO: 12737 - DNA, 2219 bp, Homo sapiens
  CDS (56)..(2218)
tgactacctcttccaactgggatttggggagctgtggagggtgcaggaggaaggcatggactcggagattggctgcctcatccgcttctatgcaggaaaacctcacagcacgggtagctctgaacggattcagctctcaggaatgtataatgtccgtaaaggcaagatgcagttgccagtgaaccgatggacaagacgccaagtcatcctatgtgggacctgcctgatagtatcatctgtgaaagacagcttgaccggaaagatgcatgttctgccactaattggtggaaaagtagaagaagtgaaaaagcaccaacactgtttagcatttagctcctctggaccccaaagccagacttactacatttgctttgatactttcacagaatacttaaggtggctgcgacaagtctccaaggttgcatcccagcgcattagctcagtggacctctcgtgttgtagcctggaacatctgcctgccaacctcttctacagccaagacctcactcatctcaatttaaaacaaaacttcctaaggcagaaccctagccttccagctgccagggggcttaatgaactgcaaaggttcgccaagttgaagagtcttaacctttccaataatcatttaggggacttccctctggcagtctgcagtattccaaccctggcagagctgaacgtgtcctgcaatgccctgcgatcagtcccggcagccgttggagtgatgcacaacttacagacatttttgttggatggaaactttctccaatcccttcctgctgagttggagaacatgaagcagcttagttatctgggtctttctttcaatgaatttactgacattcccgaagtattggagaaattgactgctgtggataaactttgtatgtctggaaactgtgtggagacccttaggctacaggctttaagaaaaatgcctcacattaaacatgtggatctaaggttgaacgtaattaggaagctgatagcagatgaagtggactttctacagcatgttactcagcttgacctacgagacaataagcttggtgatctagatgctatgattttcaacaacattgaagttttacactgtgaaaggaatcaactggtcacattagacatctgtggctatttcctaaaagcgctctatgcctcttctaatgaacttgttcaacttgatgtttacccagttccaaattatctgtcctacatggatgtttcaaggaaccgcttagaaaatgtgcctgagtgggtatgtgaaagccgaaagctagaagttttggatattggccataatcaaatatgtgaacttcctgcccgcttattttgtaatagcagtctccggaaactactggcaggacacaaccagttggcaaggctgcctgaaaggctagaaagaacctcggtggaggtcttggatgtgcaacacaaccagctccttgagctcccacctaaccttctgatgaaggctgacagcctgagattcctgaacgcctctgcgaacaaactggaaagccttcctccagccacgctttccgaagagacaaacagtatcttacaagagttgtatttgacaaataacagcctcacagacaaatgtgtgcccttgttaacgggacacccccatttgaagatccttcacatggcctataaccgacttcagagttttccagcaagtaaaatggcgaaactggaggaacttgaagaaattgatctcagtgggaataagctgaaagccatcccaacaacgatcatgaattgcaggcgcatgcacaccgtgattgctcactccaactgcatcgaggtctttcccgaagttatgcagctcccagagatcaagtgtgtggacctgagctgtaatgagctaagtgaagtcacattaccagaaaacctgcctcccaaactgcaggagctagacctgactggaaacccgcgccttgtccttgatcacaaaaccctggaactactgaataatatccgctgtttcaagattgatcagccttctacaggagacgcttccggagccccagctgtatggagtcatggttacactgaagcttcgggggtaaaaaacaagttgtgtgtcgcagccctgtcggtgaataacttctgtgacaaccgcgaagccctgtatggtgtgtttgacggagaccggaatgtggaggtgccctaccttctccagtgcactatgagtgtcattttggctgaagagctgc

SEQ ID NO: 12738 - protein, 721 aa, Homo sapiens
MDSEIGCLIRFYAGKPHSTGSSERIQLSGMYNVRKGKMQLPVNRWTRRQVILCGTCLIVSSVKDSLTGKMHVLPLIGGKVEEVKKHQHCLAFSSSGPQSQTYYICFDTFTEYLRWLRQVSKVASQRISSVDLSCCSLEHLPANLFYSQDLTHLNLKQNFLRQNPSLPAARGLNELQRFAKLKSLNLSNNHLGDFPLAVCSIPTLAELNVSCNALRSVPAAVGVMHNLQTFLLDGNFLQSLPAELENMKQLSYLGLSFNEFTDIPEVLEKLTAVDKLCMSGNCVETLRLQALRKMPHIKHVDLRLNVIRKLIADEVDFLQHVTQLDLRDNKLGDLDAMIFNNIEVLHCERNQLVTLDICGYFLKALYASSNELVQLDVYPVPNYLSYMDVSRNRLENVPEWVCESRKLEVLDIGHNQICELPARLFCNSSLRKLLAGHNQLARLPERLERTSVEVLDVQHNQLLELPPNLLMKADSLRFLNASANKLESLPPATLSEETNSILQELYLTNNSLTDKCVPLLTGHPHLKILHMAYNRLQSFPASKMAKLEELEEIDLSGNKLKAIPTTIMNCRRMHTVIAHSNCIEVFPEVMQLPEIKCVDLSCNELSEVTLPENLPPKLQELDLTGNPRLVLDHKTLELLNNIRCFKIDQPSTGDASGAPAVWSHGYTEASGVKNKLCVAALSVNNFCDNREALYGVFDGDRNVEVPYLLQCTMSVILAEEL

SEQ ID NO: 12739 - DNA, 1788 bp, Homo sapiens
  CDS (103)..(1398)
atttcggcctgagagcgggccgaggagattggcgacggtgtcgcccgtgttttcgttggcgggtgcctgggctggtgggaacagccgcccgaaggaagcaccatgatttcggccgcgcagttgttggatgagttaatgggccgggaccgaaacctagccccggacgagaagcgcagcaacgtgcggtgggaccacgagagcgtttgtaaatattatctctgtggtttttgtcctgcggaattgttcacaaatacacgttctgatcttggtccgtgtgaaaaaattcatgatgaaaatctacgaaaacagtatgagaagagctctcgtttcatgaaagttggctatgagagagattttttgcgatacttacagagcttacttgcagaagtagaacgtaggatcagacgaggccatgctcgtttggcattatctcaaaaccagcagtcttctggggccgctggcccaacaggcaaaaatgaagaaaaaattcaggttctaacagacaaaattgatgtacttctgcaacagattgaagaattagggtctgaaggaaaagtagaagaagcccaggggatgatgaaattagttgagcaattaaaagaagagagagaactgctaaggtccacaacgtcgacaattgaaagctttgctgcacaagaaaaacaaatggaagtttgtgaagtatgtggagcctttttaatagtaggagatgcccagtcccgggtagatgaccatttgatgggaaaacaatacatgggctatgccaaaattaaagctactgtagaagaattaaaagaaaagttaaggaaaagaaccgaagaacctgatcgtgatgagcgtctaaaaaaggagaagcaagaaagagaagaaagagaaaaagaacgggagagagaaagggaagaaagagaaaggaaaagacgaagggaagaggaagaaagagaaaaagaaagggctcgtgacagagaaagaagaaagagaagtcgttcacgaagtagacactcaagccgaacatcagacagaagatgcagcaggtctcgggaccacaaaaggtcacgaagtagagaaagaaggcggagcagaagtagagatcgacgaagaagcagaagccatgatcgatcagaaagaaaacacagatctcgaagtcgggatcgaagaagatcaaaaagccgggatcgaaagtcatataagcacaggagcaaaagtcgggacagagaacaagatagaaaatccaaggagaaagaaaagaggggatctgatgataaaaaaagtagtgtgaagtccggtagtcgagaaaagcagagtgaagacacaaacactgaatcgaaggaaagtgatactaagaatgaggtcaatgggaccagtgaagacattaaatctgaaggtgacactcagtccaattaaaactgatctgataagacctcagatcagacagaggactactgttcgaagatttttggaagaatactgagaacggcataaagtgaagatcgacatttaaaaaatgaggtgaaagaaagctatagtggcatagaaaaagtataaagctcagttagtttttttattattattattattaaaagttaattcaggactgatgtgacctaccagatttcagaaatgtgttaatagtatatatgccactgaaaacttaggtcctgtatcatacttttttctttaagactttttaagaaatattacttaaacatgtggcttgctcagtgtttaattgcaagttttcaatcttggactttgaaaacaggattaaacgttagtattcgtgtgaatcag

SEQ ID NO: 12740 - protein, 432 aa, Homo sapiens
MISAAQLLDELMGRDRNLAPDEKRSNVRWDHESVCKYYLCGFCPAELFTNTRSDLGPCEKIHDENLRKQYEKSSRFMKVGYERDFLRYLQSLLAEVERRIRRGHARLALSQNQQSSGAAGPTGKNEEKIQVLTDKIDVLLQQIEELGSEGKVEEAQGMMKLVEQLKEERELLRSTTSTIESFAAQEKQMEVCEVCGAFLIVGDAQSRVDDHLMGKQYMGYAKIKATVEELKEKLRKRTEEPDRDERLKKEKQEREEREKEREREREERERKRRREEEEREKERARDRERRKRSRSRSRHSSRTSDRRCSRSRDHKRSRSRERRRSRSRDRRRSRSHDRSERKHRSRSRDRRRSKSRDRKSYKHRSKSRDREQDRKSKEKEKRGSDDKKSSVKSGSREKQSEDTNTESKESDTKNEVNGTSEDIKSEGDTQSN

SEQ ID NO: 12741 - DNA, 1921 bp, Homo sapiens
  CDS (112)..(978)
attcctgctgtggatcccaactttcctaacaaaccaccccttacatttgacataattaggaagaatgttgaaaataatcgctaccgtcggcttgatttatttcaagagcatatgtttgaagtattggaacgagcaagaaggatgaatcggacagattcagaaatatatgaagatgcagtagaacttcagcagttttttattaaaattcgtgatgaactctgcaaaaatggagagattcttctttcaccggcactcagctataccacaaaacatttgcataatgatgtggagaaagagagaaaggaaaaattgccaaaagaaatagaggaagataaactaaaacgagaagaagaaaaaagagaagctgaaaagagtgaagattcctctggtgctgcaggcctctcaggcttacatcgcacatacagccaggactgtagctttaaaaacagcatgtaccatgttggagattacgtctatgtggaacctgcagaggccaacctacaaccacatatcgtctgtattgaaagactgtgggaggattcagctggtgaaaaatggttgtatggctgttggttttaccgaccaaatgaaacattccacctggctacacgaaaatttctagaaaaagaagtttttaagagtgactattacaacaaagttccagttagtaaaattctaggcaagtgtgtggtcatgtttgtcaaggaatactttaagttatgcccagaaaacttccgagatgaggatgtttttgtctgtgaatcacggtattctgccaaaaccaaatcttttaagaaaattaaactgtggaccatgcccatcagctcagtcaggtttgtccctcgggatgtgcctctgcctgtggttcgcgtggcctctgtatttgcaaatgcagataaaggtgatgatgagaagaatacagacaactcagaggacagtcgagctgaagacaattttaacttggaaaaggtatgcagataatagccacacagaaaaaattttacatctcaaaacacctattccagaaaataaatgaataaagtattcaaacttagaaaaagagcaacaacacaaaaccttagccaaacaggaagaaggaaactataacagaaagaaatttacactttcaaaactgtacattataatttaaaagtaaatcaggccaagtgcattggttcacgcctgtaatcccagcattttgggaggccaaggcgggcagatcacgagatcaggagttcgagaccagcctgaccaacatggtgaaacctcatctctactaaaaatacaaaaattagctgggtgtggtggcgcgtgcctgtaattccagctacccaggaggctgaggcaggagaatggcgtgaacctgggaggcggaggctgcagtgagctgagaccacgccactctactccagcctgggcaacagagtgagtctctgtctcaaaaaaacaaaaaatttttttaaagtaaatctaagagctaattatttgacaagtccaattagataaactgccaactatctaataatgggaaaagaaaggggttaaacttcgacacaaaatgtggaagaaggccaggcgcggtggctcacacctgtaatcccagcactttgggaggccaagatgggtggattacctgaggtcaggagttcgagaccagcctggccaacgtggtgaaaccctgtctctactaaaaatacaaaaaattagctgggtgaggtggtgggtgcctgtaatcccaacgggaggctgaggcaggagaatcgcttgaacccaggaggcagaggttgcagtgagccgagatcgtgctattgcagtccagcctgggcaacaagagcgaaactctgtctcaaaaaataaataaataaataaatgtggaagaaatgtaaagactgtatatttctgctaataaatttgaaaacct

SEQ ID NO: 12742 - protein, 289 aa, Homo sapiens
MFEVLERARRMNRTDSEIYEDAVELQQFFIKIRDELCKNGEILLSPALSYTTKHLHNDVEKERKEKLPKEIEEDKLKREEEKREAEKSEDSSGAAGLSGLHRTYSQDCSFKNSMYHVGDYVYVEPAEANLQPHIVCIERLWEDSAGEKWLYGCWFYRPNETFHLATRKFLEKEVFKSDYYNKVPVSKILGKCVVMFVKEYFKLCPENFRDEDVFVCESRYSAKTKSFKKIKLWTMPISSVRFVPRDVPLPVVRVASVFANADKGDDEKNTDNSEDSRAEDNFNLEKVCR

SEQ ID NO: 12743 - DNA, 2076 bp, Homo sapiens
  CDS (122)..(1666)
ggttaaatttttctgctacattgtctgctcagctcgtattctggtcatagaggaacctgaagccagagaaactagacaaaaaggaacctctttcaggagctataaaagaaagggaggaatcatgtccacaattgcagctttctatggcggcaagtccattctcatcacgggggccacaggctttctgggcaaagtgctaatggagaagctgtttcgcaccagcccagacctgaaagtcatttacatccttgtgaggcccaaggctggccagacactgcagcagggggttttccagatcctagacagtaagctatttgagaaagtcaaagaagtttgtccaaatgtgcatgagaagatcagagctatttatgcagatctcaatcagaatgactttgccatcagcaaagaggacatgcaggagcttctctcctgtacaaacataatatttcactgtgcagccactgtacgctttgacgacactctcagacatgctgtgcaacttaacgtcactgccacccggcagctcttgcttatggctagtcagatgccaaagctggaagcctttatacatatctctactgcctattcaaattgtaacctgaagcacatcgatgaagttatctatccgtgccctgtggagccaaaaaaaatcattgattcccttgagtggttagacgatgctattattgacgagattacacccaagctgatcagagattggcccaatatttatacctacaccaaggccttgggagaaatggtggtgcagcaagagagcaggaacctgaacattgccatcataaggccctccattgtgggagcaacttggcaggagcctttcccaggttgggttgataatataaatggacctaatggaatcattattgcgactgggaaagggtttcttcgggccataaaagctactccaatggctgtggcagacgtaattccagttgatacagtcgtcaatctcatgctagctgtaggatggtatactgcagttcacagacctaagtcaacattagtctaccacattacatctggtaacatgaatccctgcaattggcacaaaatgggagtccaagtcttggcaacctttgaaaaaatcccatttgagagacctttcaggaggccaaatgctaattttaccagcaacagcttcacatcacagtactggaatgcggtcagccaccgggcccctgccattatctatgactgctatctgcggctcactggaaggaagcccaggatgacaaagctcatgaatcggcttttaagaactgtttccatgttggagtatttcatcaaccggagttgggaatggagcacgtacaatacagaaatgctgatgtctgagctgagtcctgaagaccagagagtattcaactttgacgtgcgccagttgaactggttggaatacattgaaaattatgttttgggagttaaaaaatacttattgaaagaggatatggctgggatcccaaaagcaaagcaacgcttaaaaaggctccgaaatattcactacctctttaatactgccctcttccttatcgcctggcgccttctcattgcaagatctcagatggctcggaatgtctggttcttcattgtaagcttctgttataaattcctctcctactttagagcatccagcacgctcaaagtttaagagcatttagccatcgccttttatctggaacctctcagatacctctaaaacagcaaactgtgattctcaagattagaaagtaacaaggaatatgcccaaactgtcaaatgtcacctgttatgtattcgtccctattccttaactatgtatttttatttcagtgagagaaggaaagttgtaaactagcccatagtcacctatattttagggaaaaaaatccaaattgtttcctaacattctattttatgcccttgcgtattaaacgtgaaagtactcccacttttctatatttagtttttcttttctctctgagatgattcatttaaactcagtaaatatggaaagatgcatggcagaagctgaaatgagctcaagcagtactaaccttggaaccattctgggtaccc

SEQ ID NO: 12744 - protein, 515 aa, Homo sapiens [sequence omitted]

SEQ ID NO: 12745 - DNA, 1943 bp, Homo sapiens
  CDS (991)..(1548)
gtcacacatggacagcctcatctattttattgacccatttccagatgctgggattaccgagttacattaatacacagctttttatggtatacagtaatgtaatatattagcctaatgtgttaggactccttaaacaagggatactgtaatcattaatacagttgatccattaggcttggcacagtgtttattttatggaaacactctaaaagaaaaacagacctgaagttcatcatgtgtaaggttacacaaatctatctttcaaatgagttcattactctaaataattgtcagaagttacatttttgtttaatataatctttgcagtaaccttccaaattagggcaatttttctgtccagatctgcctactgaactagaatatttaatgagcaacaacttctgttgtgaattaacggactgatattggggtttgataaatcagtttcctaaggtttggataagccaagagttagactctaagaatataaaaaggcctagataacatcataaaagtaaggttctagatccacaaagcagagaactagacccagattataagtcactccagaggtcccatttttctggatttgagggaggaagtgtttgatgacagtatttgaagtgattttatatccattttcttttaaaaagtaatagtttggaattagttacttgttaattaatctgtaaaatatttgctgtggtgttataatgtgaaaatgtggttgctaattttaaaataaattttgggttttttaaagtaaatttttaaaaacactttttatgtatatcacagcctcaacaagaacttgatttaaactctccacgaaataccactttggaaagacagactttctattgtgttccggtgcctggggaatctacgtgggtaaaagaagcctatgttaatgcaaaccaagctcgagtcagtccctcaacatcctacactcctagtcgccacaagaggagttatgaagatgatgacgatatggacctacagcccaataagcagaaagaccaacatgcaggtgccagacaagcagggagtgttggtggtcttcaatggtgtggagagccaaaacgtttagaaactgaagcttctactgggcaacagctgaactctctgaacttgtcttctccctttgatttgaattttccattgccaggagagaagggccctgcatgccttgtgaaggtttatgaagattgggattgtttcaaagtaaatgacattcttgagctatatggcatactgtctgtggatcctgtgctgagtatactgaataatgatgaaagggatgcctctgcactgctggatccgatggagtgcacagacacagcagaggagcagagagtacacagtcctcctgcttcattagtgccgagaattcatgtgatcttagcccagaagttgcaacacatcaacccattattgcctgcctgccttaacaaagaggagagcaaaacctgtaagtgtaagtgttacagcctagtcaactatcgactgttagcctcagtgtgtccagagctgcctgtaacgtgctcatagtggaattgagagtcaggtcttcattcctcacaataagtgttttcagtaatctctctctcgttgccccatttttctcttacattaattctcttcactgaaatgaggacaaaagagtatacaaggctgggtgcagtggctcacgcctgtaatcttagcactttaggaggccaaggtgggtggatcacctgaggtcaggagttcgagactagcctggccaatatagtgaaaccctggctctactaaaaatacaaaattagccaggtgtggtggcgtgtgcctgtaatcccagctactcgggaggctgaggcaggagaactggaggcagaggttgcggtgagctgagatggcaccattgcactccaggctaggcaaaaagagcaaaacttggtctc

SEQ ID NO: 12746 - protein, 186 aa, Homo sapiens
MDLQPNKQKDQHAGARQAGSVGGLQWCGEPKRLETEASTGQQLNSLNLSSPFDLNFPLPGEKGPACLVKVYEDWDCFKVNDILELYGILSVDPVLSILNNDERDASALLDPMECTDTAEEQRVHSPPASLVPRIHVILAQKLQHINPLLPACLNKEESKTCKCKCYSLVNYRLLASVCPELPVTCS

SEQ ID NO: 12747 - DNA, 1549 bp, Homo sapiens
  CDS (100)..(822)
gtttagttcagcgcagcgactcggggacctggagctgacgcctagacacttgtattagctttaatagaagagaaatggaggagccatagaatattaaggatgaattcaggaaggcctgagaccatggaaaacttgcctgctctctacactattttccaaggagaggttgctatggtgacagactatggggcctttatcaaaatcccaggctgtcggaagcaaggtctggtccatcgaactcatatgtcatcctgtcgggtggataagccctctgagatagtagatgttggagataaagtgtgggtgaagcttattggccgagagatgaaaaatgatagaataaaagtatccctctccatgaaggttgtcaatcaagggactgggaaagaccttgatcccaacaatgttatcattgagcaagaagagaggcggaggcgatccttccaggattacactgggcagaagatcacccttgaggctgtcttgaacactacctgcaagaagtgtggctgtaaaggccactttgcaaaagattgtttcatgcaaccaggtgggactaaatactctctgatacctgatgaggaagaggaaaaggaagaggcaaagtcagcagagtttgagaagcctgaccctacaaggaatccttctagaaaaagaaagaaggagaagaagaaaaagaaacatagagataggaagtcatctgactctgacagctcagactctgagagtgatacaggcaagagggcaaggcacacatcaaaagacagcaaggcagcaaagaagaagaaaaagaagaagaagcacaagaagaagcacaaggagtgagagtataaagagtgtagggggtggttgagagtaagaaaccaggagccttgtgccttgagactcctggaaagactcaatagtgagaatatagcctcccaccccattaacttcgctcccatgggagatggcttccccacatgcaacaggcaggtttgggagttagaggtcaaaagcagctgcctgaatgagttgttgtttccttatcactcctggtccctttgcaagtgaaccctgcagctcacccattcattcacccaacttccttcattcagcaggaggtcctattaccctctccagctgccactgccagagctggattcctgtaaaggagtccaggctagagccacagagactgttgtggagatgagttcggctgtagttagagtgattggacccttcctattggtctgtcctgggccaactggtgggtgatctctgctgcatccaacatgggagcagagactggcagcaggaggggggaacatggtgagaagtggtgctcacttttcccattcctcctaacatagttctactatgctagaagtggcatccagcggccacagctagaaaacagtctgcagtgtgacttaacttgtgtattgcattccagcagaccactgaaccagacagcgaagccaagatcattgttctactttgtatttactactgtgtgaatcagttgattctacttcaggtccttgcttaaattcctgtcactaaatgg

SEQ ID NO: 12748 - protein, 241 aa, Homo sapiens
MNSGRPETMENLPALYTIFQGEVAMVTDYGAFIKIPGCRKQGLVHRTHMSSCRVDKPSEIVDVGDKVWVKLIGREMKNDRIKVSLSMKVVNQGTGKDLDPNNVIIEQEERRRRSFQDYTGQKITLEAVLNTTCKKCGCKGHFAKDCFMQPGGTKYSLIPDEEEEKEEAKSAEFEKPDPTRNPSRKRKKEKKKKKHRDRKSSDSDSSDSESDTGKRARHTSKDSKAAKKKKKKKKHKKKHKE

SEQ ID NO: 12749 - DNA, 1963 bp, Homo sapiens
  CDS (164)..(1186)
aagtgaatgagccgtgccaaaaagacggttggatcctgcatagtggtgagaggggtgatccattctgcctcatcatttaagctgtctggagtacaagttcagggacctaactgtggaagaactaaggaatgtaaatgtatttttcccacatttcaaatattccatggacacctatgtttttaaagatagttctcagaaagacctgctgaattttactggcacaattcctgtgatgtatcagggtaatacatataacataccaattcgtttctggattttggattctcaccctttcgctccccctatttgcttcttgaagccaactgcaaatatgggaatcttagtcggaaaacatgtggatgctcaaggcagaatatatttgccctatctccaaaactggagccatcctaaatctgtcattgttggattaattaaagaaatgattgccaagtttcaagaggaacttcccatgtattctctatcatcatctgatgaggcacggcaggtagacttgctagcctatattgcaaaaatcactgaaggtgtttcagatacaaattcaaagagctgggcaaatcatgagaataaaacagtcaataaaattactgtggttggaggtggagaactcggtattgcctgcacattagcaatttcagcaaagggtattgcagacaggcttgtcctcttagacctctcagaagggactaaaggagccacgatggaccttgaaatcttcaaccttcctaatgtggagatcagcaaagatttgtctgcctctgctcattccaaggtggtgatcttcacagtcaactctttgggtagttctcagtcgtaccttgatgtggtacagagcaatgtggatatgttcagagcccttgtcccagctctgggacattatagtcaacacagtgtcctgctcgttgcatctcaaccagtggaaatcatgacctatgtaacatggaaactgagtacatttcctgcaaatcgagtgatcggaattggatgtaatctggattcacagagattacagtatattattacaaatgttttgaaggcacagacttcaggcaaagaagtatgggttattggcgagcaaggagaagacaaagtgctcacatggagtggccaagaagaagtagtgagtcttacctctcaagtgcagctgtccaacagggatattatgatataaatagtgaagtgtttttaagtttgccttgcatccttggaaccaatggagtatctgaagttatcaaaaccacactgaaagaagatacagttactgagaaactccaaagcagtgcatcctcaatccacagtctccaacaacagttaaaactttgattctcaaatgcaatttgagaggctggacttctacctaaagggaaaagtcatttaattttacctatatataggtttgaggatttctgtatcctgctacttacttttacaaactgcttggttaaagtagagggtttcttgattagctttgtgatgtaaatccttaaggagttatacaaggaggggaaaaattaattttatttggggttcttgagatatctatgctgttctttaaatctacagcaggggtaaacattcatctgcagtgtgcatcaatttaaatcatatatcctaaactaaaagcacaattcatacttcgggaatattttataagtaatatatctttaaaagaaaattaccctttgacttttataatcaacataagttccaggcccagtatggatttacaaaatctgtgtcagttgtacattcacaggatccacagcttaagttactaatgtttcttgtgtaaaatcctgttggtagtaatagtaaagcattgtatttcccttcttcaaattaattacctaccaaaaaatggaaaagaattttacatgcactttaaaatagtaaaatggaaagtgaatttttaaaatatatgcattaaaagtttactttaatttcc

SEQ ID NO: 12750 - protein, 341 aa, Homo sapiens
MDTYVFKDSSQKDLLNFTGTIPVMYQGNTYNIPIRFWILDSHPFAPPICFLKPTANMGILVGKHVDAQGRIYLPYLQNWSHPKSVIVGLIKEMIAKFQEELPMYSLSSSDEARQVDLLAYIAKITEGVSDTNSKSWANHENKTVNKITVVGGGELGIACTLAISAKGIADRLVLLDLSEGTKGATMDLEIFNLPNVEISKDLSASAHSKVVIFTVNSLGSSQSYLDVVQSNVDMFRALVPALGHYSQHSVLLVASQPVEIMTYVTWKLSTFPANRVIGIGCNLDSQRLQYIITNVLKAQTSGKEVWVIGEQGEDKVLTWSGQEEVVSLTSQVQLSNRDIMI

SEQ ID NO: 12751 - DNA, 1921 bp, Homo sapiens
  CDS (140)..(703)
cttttctcccgccggctctaacccgcgcttggctaaggtccgcgggaacccgtgagccaccgagagagcagagaactcggcgccgccaaacagcccagctcgcgcttcagcgtcccggcgccgtcgcgccactcctccgatggccacagatgtctttaattccaaaaacctggccgttcaggcacaaaagaagatcttgggtaaaatggtgtccaaatccatcgccaccaccttaatagacgacacaagtagtgaggtgctggatgagctctacagagtgaccagggagtacacccaaaacaagaaggaggcagagaagatcatcaagaacctcatcaagacagtcatcaagctggccattctttataggaataatcagtttaatcaagatgagctagcattgatggagaaatttaagaagaaagttcatcagcttgctatgaccgtggtcagtttccatcaggtggattatacctttgaccggaatgtgttatccaggctgttaaatgaatgcagagagatgctgcaccaaatcattcagcgccacctcactgccaagtcacatggacgggttaataatgtgtttgatcatttttcagattgtgaatttttggctgccttgtataatccttttgggaattttaaaccccacttacaaaaactatgtgatggtatcaacaaaatgttggatgaagagaacatatgagcacatgagttaagattgtgactgatcatgatttatttgaagatggagcactgctgatttatgaaggaaaaaagaagaattttctaaagattacacatatttcagaaagactttacccaattcagttgtcagacataatgatttatttgaaggcttgttttatttgaagaaaagcatattgccaaaaattctggttaaaagcttcctaacgggtaacagaccatgggagagatatgtggttgggtaatgcaaatgtagttatacaaagaaaaatacagatgtctccagacctgaggactttttaatagggcagttgttgtgttggtggcacattggatatttctaacatgtacaaagctatgtattttgatttactttcatttcttgctatgtatatgtacttttcttaaaatgccaagaactttctcttgctatcattgctccttttgaaacaattcaattttcatgtctacagctgactgttttgttaagattgagtcatcgacattcaggatttaagtctgaggtagtcaaccctcaggaaaaaaaatggcttatctgaaatcagtactgtggaaatgaactatattagctattatgaataatgtccagtataagaatatgcttctggaattgagttctccttttaagtaccaatgatacttaaatttctcagaaatgtaatggtgtgtcattgccttgaaatgcttgcttagggcttcttttatgttatcttaaaaagtgctggtgaattttccattttttacatccatttcacatgtaagagacaaaaaagtctagattggtcttgatattgagataataaaaagtaagtagcattaagaaaggtaacaatcttcattctacagatgaactcattgaaacaatttaggggaatgaggggcaaaaggggagaaatactgctaaagaacatgagcataaaaatgcgtgcgtttcagtgtttaagaaggcttgataaagaatgtcacttttttatttaactgataagatttttgttattttttactttgataagtaaaccaaagaatatttgtatttcaagcagtttgtgtggtgtttctatataattttctgtgtataaataataaagtaggcatttgtttattttgtaaaaaagaaatgaaaatctgctggccagctatgtcctctaggaaatgacagacccaaccaccagcaataaacatttccattgtc

SEQ ID NO: 12752 - protein, 188 aa, Homo sapiens
MATDVFNSKNLAVQAQKKILGKMVSKSIATTLIDDTSSEVLDELYRVTREYTQNKKEAEKIIKNLIKTVIKLAILYRNNQFNQDELALMEKFKKKVHQLAMTVVSFHQVDYTFDRNVLSRLLNECREMLHQIIQRHLTAKSHGRVNNVFDHFSDCEFLAALYNPFGNFKPHLQKLCDGINKMLDEENI

SEQ ID NO: 12753 - DNA, 2191 bp, Homo sapiens
gttagatatagttgttatgatttgtatcaatccattttcacactgctataaggaactacctgagactgggtaatctatgaagaaaagaggtttaattgactcacagttctgcatggctgggagtcctcaggaacttacaatcatggcagaaggggaagcaagacatttcttatatggcagcaggacagaaagagagagagtgaagggggaagtgccacacacttccaaacaaccatatcttgtggttaattaaaaagtactcattggtgtgccttgtatagaaaaaatatacactcactatcatgagaacagcaaggagggagtctgcccccaagattcaatcacctcccagtagacccctcccctgacatgtggggattacaattcaagatgagatttgggtggggaaacagagtcaaaccatatcgtgattgttctataataaagagatgcccacatgtgtttcatcagggacagtgctcattaaccagttgtcctgccgtaattattaatagtatcccctttgctttcaaaagtgtcctagtttacaaaaagtatagaaatggaggacagaatagtggttgcccaagattggaaaagggtaagggtaaagggtgcagaggtggatgtggttataaaaggcaacatgggagatcctcgtagtgaaggaactgtttagtatctccactgtggtggtagatacccgaacctaaacatgtgaaaaattgcatgaaactaaacacacacacaaacaagtacaagttaagttaggaaaatccaaataagatttctacattgtatcaataggtatatcttgattatgatattgcaagatggtactattcaaggaaactgggtagaggctacatgagactcccctgtattatttcctataactccatgtgaatctacaaggatctcaggattaaggaagatatcctagtttggaagataaaaaatatatcccagtagtaatatccactgtcccaccagggcctgactaccttctataaaaagaagtgcctttgttcccctcaagttcctttatttggttttattcttcttcacagtacctacctccacttggcagattacatttattttttcatctttcaacagctatttactgaatgcctactagatgccaggcttgagatctagcaatgaacaagatctctgtgaaacttacattccaggaggagaaataaataataaaccaaaaatataatcagtaaattatttaatatgctgggaaacaatatgtgtaatggaagaaatatgtaaagtgatggattagggttctccagagaaacagaaccaacaattgactcatgtgattatggaggctgagaagtctcaagatcacagttggcaagcttgagacacaggagagcccatggtgtgtttctgatttgagtccaaaggcctgagaaccaggagagatgatggtgtgattacagttcaaaagctggcaggcttgaggcccaggaagagctagtgttgcagttcaattccaaaggcaggaaaaggctgatatctcagctgaagcaatcagacagaaggagctctctcttactcatgggcaggtcagacttttggttctattcaggcctttaagtgattggatgaggatcatctactggggaaagaaataagctttattcagtgtactgattcaaatgttaatctcatccaaaaccatgctcacagacacacccagcataatgtttgaccaagtatctgggcaccttgtggttcagtcaaattaacacatattaactaccttagcaagatgaaaagcagtgaatgcaggatggtggttgaaattttaaatacgttggttatatagtctcattgaaaaaggaacatttgagtgaagacttgaaggggtggtggaataaaccatttatttgcttattgcctgtctccctctatcagaatgaaagcttcatgaagcgagagacttaatttttatctgttatatccctagtgcctggtgcagggtaagtactcaaaaatatttgttgagtgaataagtaatgattgaggatggggactggtttgtatctggttatatctcttgtccttagcacagtacctggcacatcctaagccatccaaaagagttggttatatgattgtctttgaattctatgactgtttataatatacagtaaacttcactgaagac

SEQ ID NO: 12754 - DNA, 1799 bp, Homo sapiens
  CDS (76)..(1734)
atatattgtcagagactgccaagcagccggacacacgggggcacagaatcactgaaggggaaaaatacagaaaatatgggtttctacggcacattaaaaatgattttttacaaaatgaaaagaaagttggaccatggttctgaggtccgctctttttctttgggaaagaaaccatgcaaagtctcagaatatacaagtaccactgggcttgtaccatgttcagcaacaccaacaacttttggggacctcagagcagccaatggccaagggcaacaacgacgccgaattacatctgtccagccacctacaggcctccaggaatggctaaaaatgtttcagagctggagtggaccagagaaattgcttgctttagatgaactcattgatagttgtgaaccaacacaagtaaaacatatgatgcaagtgatagaaccccagtttcaacgagacttcatttcattgctccctaaagagttggcactctatgtgctttcattcctggaacccaaagacctgctacaagcagctcagacatgtcgctactggagaattttggctgaagacaaccttctctggagagagaaatgcaaagaagaggggattgatgaaccattgcacatcaagagaagaaaagtaataaaaccaggtttcatacacagtccatggaaaagtgcatacatcagacagcacagaattgatactaactggaggcgaggagaactcaaatctcctaaggtgctgaaaggacatgatgatcatgtgatcacatgcttacagttttgtggtaaccgaatagttagtggttctgatgacaacactttaaaagtttggtcagcagtcacaggcaaatgtctgagaacattagtgggacatacaggtggagtatggtcatcacaaatgagagacaacatcatcattagtggatctacagatcggacactcaaagtgtggaatgcagagactggagaatgtatacacaccttatatgggcatacttccactgtgcgttgtatgcatcttcatgaaaaaagagttgttagcggttctcgagatgccactcttagggtttgggatattgagacaggccagtgtttacatgttttgatgggtcatgttgcagcagtccgctgtgttcaatatgatggcaggagggttgttagtggagcatatgattttatggtaaaggtgtgggatccagagactgaaacctgtctacacacgttgcaggggcatactaatagagtctattcattacagtttgatggtatccatgtggtgagtggatctcttgatacatcaatccgtgtttgggatgtggagacagggaattgcattcacacgttaacagggcaccagtcgttaacaagtggaatggaactcaaagacaatattcttgtctctgggaatgcagattctacagttaaaatctgggatatcaaaacaggacagtgtttacaaacattgcaaggtcccaacaagcatcagagtgctgtgacctgtttacagttcaacaagaactttgtaattaccagctcagatgatggaactgtaaaactatgggacttgaaaacgggtgaatttattcgaaacctagtcacattggagagtggggggagtgggggagttgtgtggcggatcagagcctcaaacacaaagctggtgtgtgcagttgggagtcggaatgggactgaagaaaccaagctgctggtgctggactttgatgtggacatgaagtgaagagcagaaaagatgaatttgtccaattgtgtagacgatatactccctgcccttccccctgc

SEQ ID NO: 12755 - protein, 553 aa, Homo sapiens
MGFYGTLKMIFYKMKRKLDHGSEVRSFSLGKKPCKVSEYTSTTGLVPCSATPTTFGDLRAANGQGQQRRRITSVQPPTGLQEWLKMFQSWSGPEKLLALDELIDSCEPTQVKHMMQVIEPQFQRDFISLLPKELALYVLSFLEPKDLLQAAQTCRYWRILAEDNLLWREKCKEEGIDEPLHIKRRKVIKPGFIHSPWKSAYIRQHRIDTNWRRGELKSPKVLKGHDDHVITCLQFCGNRIVSGSDDNTLKVWSAVTGKCLRTLVGHTGGVWSSQMRDNIIISGSTDRTLKVWNAETGECIHTLYGHTSTVRCMHLHEKRVVSGSRDATLRVWDIETGQCLHVLMGHVAAVRCVQYDGRRVVSGAYDFMVKVWDPETETCLHTLQGHTNRVYSLQFDGIHVVSGSLDTSIRVWDVETGNCIHTLTGHQSLTSGMELKDNILVSGNADSTVKIWDIKTGQCLQTLQGPNKHQSAVTCLQFNKNFVITSSDDGTVKLWDLKTGEFIRNLVTLESGGSGGVVWRIRASNTKLVCAVGSRNGTEETKLLVLDFDVDMK

SEQ ID NO: 12756 - DNA, 1485 bp, Homo sapiens
  CDS (21)..(842)
ttgcctaccacatcagcatcatgttctatataataggaggtgtggccactctcctcctcatccttgtcatcattgtgttcaaggagaaacctaaatatccccccagcagggcccaatccctgagctatgccttgacctctcctgatgcctcatacttaggttccatcgcccggctcttcaaaaatctcaactttgtgctgcttgtcatcacctatggtctgaatgctggtgctttttatgccttgtccactcttctgaatcgcatggtgatctggcactacccgggggaagaagtgaatgctggaagaattggcctgacgatcgtcattgcaggaatgcttggggctgtgatctcaggaatctggctggataggtccaaaacctacaaagagacaaccctggtagtctatatcatgacactggtgggcatggtggtgtacacgtttaccttgaacctgggacacctgtgggtagtgttcatcactgctggcacaatgggcttctttatgactggctatcacccactgggatttgagtttgctgtggagctcacgtacccagaatcagaaggcatctcctccggcctcctcaacatatctgcgcaggtatttgggatcatctttaccatctcccagggccagattattgacaactatggaaccaagcctgggaacatcttcctgtgtgtgttccttactcttggagcagccctcactgcattcattaaggcagatctccggagacagaaagcaaacaaagaaactcttgagaacaaactccaagaggaggaggaggagagcaacaccagcaaagtgcccactgctgtgtcagaggatcatctctgagaggaaggtggtgacaactcagggaacacgaacaccccaccttttccttcagcacagctctcaccgccagcacaaagggcttcgctagagatgtttttggagggaatcagtgggactatttgtggcatggatggcctattcctcctagaacccacgtaagagcttggatgatttagttggagaaaattgcacctatcaccaaatgcaaatttgattcccacctccacccccttttaggttatgggagttggtgttgggacagggtggcagagaatattggagtcaatcctagcttggtctcttgccttccctcttttcctccatccatcgtggacaatgcctgcaaaattttcacaggaagaaagcctattcaggatattaacttgaaatttccagtgtcctaagagcctctcatgaagcccagttctaataagtggcaagctgctctgccggggtcatctcctgggtcatcggactgattgctcaagttctgcaggagaggaagcaccattagaacaactccatcagaacagctccaccgggacttgtgggcctaaattttcctggcctaacgggtctgtctccaaaccctctttcctaagagctgagcaaaccaaccataataaacttgacaaaagac

SEQ ID NO: 12757 - protein, 274 aa, Homo sapiens [sequence omitted]

SEQ ID NO: 12758 - DNA, 2022 bp, Homo sapiens
  CDS (27)..(836)
gcgccggtggcgggactctggggaaaatggctgcgtcttcgagtggtgagaaggagaaggagcggctgggaggcggtttgggagtggcgggtggtaacagcacacgagagcggctgctgtctgcgcttgaggacttggaggtcctgtctagggaacttatagaaatgctggcaatttcaagaaaccaaaagttgttacaggctggagaggaaaaccaggtcctggagttgttaattcaccgagatggggaatttcaagaactaatgaaattggcacttaatcagggaaaaattcatcatgaaatgcaagttttagaaaaagaagtagagaagagagacagtgatattcagcagctacaaaaacagctaaaggaagcagaacaaatactggcaacagctgtttaccaagcgaaggagaaactcaagtcaatagaaaaagcaagaaaaggtgctatctcctctgaagaaataattaagtatgcacataggatcagtgcaagtaatgctgtatgtgctccactgacctgggttccaggggacccccggagaccctacccaactgatttagagatgagaagtgggttactgggtcagatgaacaatccttccactaatggcgtgaatggccatttaccaggagatgcacttgcagcaggaagattgccagatgtccttgctccacagtatccatggcagtcaaatgacatgtcgatgaatatgttaccaccaaatcatagtagtgactttttgttggaacctcctgggcataataaagaaaatgaagatgatgtagagattatgtcaacggactcctcaagcagtagtagtgagtctgattgaaaaaccttaaaagacaatatacagaattgaatactgtagaattctgtttctttaacagtagcagggaaatgtaaactacaggtgacaaaaaatacccaggtaaacactggctttggtagaattgtgcagtcattaaaagtcaaaattttttgactttctttttaaagccaaagaccatagttttagttttaagccactaggtagatatttaggggaatagtcaaaatttactgttgaaaaagcagttgctatgtgctttcttaccctgttctgttccagttttgctggatttgtacatagccattctagaaatagagtcgagggaaattatccatatacatatcactaataggcttcttggaattatttagaaaagcatttttaaactggcagtggatgactgaataggcatcatatttctttttgtgtgtcatttaaaagtaacaaaaactgccatttgacagtaaaggctcttggcttctgttggaggcatgggaaattgtctcaatttgtacagtttgtaattgtaatttttgtaaataaatttgtttgtacattgtatgctttttttttagtttaaatatactgtcagtgtaggtaggaaattatttctgtaaatccagttgcattttataatacttgagtgactaactgaattgaaacctattacaattaatagggttctcaaaggcctattcctattagaagaaataattttttttaataattgaaaaaatttaccacagccttgtctgattttaagaatagattgtgtgaagatttagaatggaaagcaaccatttcttcccttcaccttcctcttcttacagttccccaggagtcatttttaaccacttttaatttctgttggtaacctctgtgtttaggtaatatgcttatacaactatttcttgatgtatcagttttagacaatgtatcttctgatttcaaaggtaatacaacatttaatgtgaaacatttagtgaatacagtaaaggagaaaataaaattgttagcattctacccagagataatatcaattcatattgtagtgtagatttttttaaagttcacatacacttttttgtaaaatgagaataatgtttatttcctgagatactgctgtattttttaattgctaatctgtattcttcaaatgaactgagaattccatttttccatc

SEQ ID NO: 12759 - protein, 270 aa, Homo sapiens
MAASSSGEKEKERLGGGLGVAGGNSTRERLLSALEDLEVLSRELIEMLAISRNQKLLQAGEENQVLELLIHRDGEFQELMKLALNQGKIHHEMQVLEKEVEKRDSDIQQLQKQLKEAEQILATAVYQAKEKLKSIEKARKGAISSEEIIKYAHRISASNAVCAPLTWVPGDPRRPYPTDLEMRSGLLGQMNNPSTNGVNGHLPGDALAAGRLPDVLAPQYPWQSNDMSMNMLPPNHSSDFLLEPPGHNKENEDDVEIMSTDSSSSSSESD

SEQ ID NO: 12760 - DNA, 2077 bp, Homo sapiens
  CDS (131)..(2032)
tattgtttttttagcttcttcatctacaagcagagatggtaaaccttgcatatttttgaaagcatttgaagacctcaaatcaactgtttatgtttatgtcaaatctttaagagatttttctacagaatcaatgtctttggttccagcaacaaattatatatatacacccctgaatcaacttaagggtggtacaattgtcaatgtctatggtgttgtgaagttctttaagcccccatatctaagcaaaggaactgattattgctcagttgtaactattgtggaccagacaaatgtaaaactaacttgcctgctctttagtggaaactatgaagcccttccaataatttataaaaatggagatattgttcgctttcacaggctgaagattcaagtatataaaaaggagactcagggtatcaccagctctggctttgcatctttgacgtttgagggaactttgggagcccctatcatacctcgcacttcaagcaagtattttaacttcactactgaggaccacaaaatggtagaagccttacgtgtttgggcatctactcatatgtcaccgtcttggacattactaaaattgtgtgatgttcagccaatgcagtattttgacctgacttgtcagctcttgggcaaagcagaagtggacggagcatcatttcttctaaaggtatgggatggcaccaggacaccatttccatcttggagagtcttaatacaagaccttgttcttgaaggtgatttaagtcacatccatcggctacaaaatctgacaatagacattttagtctacgataaccatgttcatgtggcaagatctctgaaggttggaagctttcttagaatctatagccttcataccaaacttcaatcaatgaattcagagaatcagacaatgttaagtttagagtttcatcttcatggaggtaccagttacggtcggggaatcagggtcttgccagaaagtaactctgatgtggatcaactgaaaaaggatttagaatctgcaaatttgacagccaatcagcattcagatgttatctgtcaatcagaacctgacgacagctttccaagctctggatcagtatcattatacgaggtagaaagatgtcaacagctatctgctacaatacttacagatcatcagtatttggagaggacaccactatgtgccattttgaaacaaaaagctcctcaacaataccgcatccgagcaaaattgaggtcatataagcccagaagactatttcagtctgttaaacttcattgccctaaatgtcatttgctgcaagaagttccacatgagggcgatttggatataatttttcaggatggtgcaactaaaaccccagatgtcaagctacaaaatacatcattatatgattcaaaaatctggaccactaaaaatcaaaaaggacgaaaagtagcagttcattttgtgaaaaataatggtattctcccgctttcaaatgaatgtctacttttgatagaaggaggtacactcagtgaaatttgcaaactctcgaacaagtttaatagtgtaattcctgtgagatctggccacgaagacctggaacttttggacctttcagcaccatttcttatacaaggaacaatacatcactatggatgtaaacagtgttctagtttgagatccatacaaaatctaaattccctggttgataaaacatcgtggattccttcttctgtggcagaagcactgggtattgtacccctccaatatgtgtttgttatgacctttacacttgatgatggaacaggagtactagaagcctatctcatggattctgacaaattcttccagattccagcatcagaagttctgatggatgatgaccttcagaaaagtgtggatatgatcatggatatgttttgtcctccaggaataaaaattgatgcatatccgtggttggaatgcttcatcaagtcatacaatgtcacaaatggaacagataatcaaatttgctatcagatttttgacaccacagttgcagaagatgtaatctaatattgccatccaatttagcatacataaaatgttgccactcac

SEQ ID NO: 12761 - protein, 634 aa, Homo sapiens
MSLVPATNYIYTPLNQLKGGTIVNVYGVVKFFKPPYLSKGTDYCSVVTIVDQTNVKLTCLLFSGNYEALPIIYKNGDIVRFHRLKIQVYKKETQGITSSGFASLTFEGTLGAPIIPRTSSKYFNFTTEDHKMVEALRVWASTHMSPSWTLLKLCDVQPMQYFDLTCQLLGKAEVDGASFLLKVWDGTRTPFPSWRVLIQDLVLEGDLSHIHRLQNLTIDILVYDNHVHVARSLKVGSFLRIYSLHTKLQSMNSENQTMLSLEFHLHGGTSYGRGIRVLPESNSDVDQLKKDLESANLTANQHSDVICQSEPDDSFPSSGSVSLYEVERCQQLSATILTDHQYLERTPLCAILKQKAPQQYRIRAKLRSYKPRRLFQSVKLHCPKCHLLQEVPHEGDLDIIFQDGATKTPDVKLQNTSLYDSKIWTTKNQKGRKVAVHFVKNNGILPLSNECLLLIEGGTLSEICKLSNKFNSVIPVRSGHEDLELLDLSAPFLIQGTIHHYGCKQCSSLRSIQNLNSLVDKTSWIPSSVAEALGIVPLQYVFVMTFTLDDGTGVLEAYLMDSDKFFQIPASEVLMDDDLQKSVDMIMDMFCPPGIKIDAYPWLECFIKSYNVTNGTDNQICYQIFDTTVAEDVI

SEQ ID NO: 12762 - DNA, 1835 bp, Homo sapiens
ctccaagatgtgcatagccaaactgggatagaaggcaaactccccaaagctacctgctggttttgagaggggtggtaagacatggcaattcccaggagtagtagaaaataatatgcctgactaccaacagctcaagtatgcttatttgcacatcctagacttggtgtctgtaagactcagttaccacttttattttcctgtagctaggagttagcaaaaggaactggggccttccagccgagccactaaacctgtcttatttggaatggggattgtccagcgaagggagcaaacatgaattagatgttaagctattgagctgaagaaaagaaagcagttcacatttaggtgaaatagatgatgttatcaggaagccaggttcccaccagagtcggtgcttggtacctggtctctccagtctcaacagactcaggtcaggtctctcacccaggaagcaaccactcaataaaatagagaacatctgagaattacaaatgtctatgcttgattgctcctctaaatccagtgcataggttaaccctgcatgcccatttcttcctgggcttcttgatggcaatgtgttctaataactggtcttgtgttcatgctaaagacaaacttacatgaagtttttcagtttaagacattctagtgaatggctgctatgtgtttctggcactcattcctaaccaagtctttagagatttcagatgaccttaaagatgcaatatctttttctttctttctttctttctttttttctgagacaagagttgcgccctgtcgcccagactggggtgctggagtgcagtggtgcgatctcagctcactgcagcctctgcttcccaggttcaagtgtttctcctgcctcagccttccgagtagctggaattacaggcatgtaccactatgcctggctaattttttatttctatatttttagtagagatggggtttcatcatgtttgccaggctggtctcgaactcctggcctcaagtgatccgcccacctcagcctcccaaagtgctgggattacaggcgcgagccaccgcgcctggccaaagatgcaaattcttgtttggatttatgctctgcctcttcccagcattttcttatctgtagccctgcttgcttgagagtatacttggataagaagtattgctgttgagggagctataagaaaaggattcttcttccagaagtaaagaactcatctttagagtacctttaaatgaattttgtttttctttcttattttgaggtggattggtcttctctttttttgggtttccagctcactgggactctcagaccttacctttccagctcaaacaccattagttaaattccttcattctcattagaatgcagcctgctgagtatgtgggtttcactgccggagtccatcatttagccagtatacatagaggaactgcttcgaatcaaggcaactggtgaagggcttagcatgttggcagcaatatcccagagattgaatctgtttgcattttcctcatctaggataacagctgcttgaagccagggctcttagccctttgcattccccttgagcgaggaagccacactgcctttctgtgtctggttcagagctcttccttcttggcatgttttctggactacatgcacatgggcagctatagattaatctgcaaaacctagtcacttacctacccataatatctgggaaggtgtggtatttgttttaaagaaacattgtttctttgggagggcagtttctgtctggactttgaggtggacttagttatccctacagttctttaactctcagctttttaataaaagatgaaatcag

SEQ ID NO: 12763 - DNA, 1174 bp, Homo sapiens
gttgcaggcacccaggtgttgactgcgtgtccattgttgttatagttggttgaatctgtcccattaattctccttccccaggcaagactcgtggctgtgacccatgggcctctgaggaggcgttgtaagtccgcccagctccccacttgctgtgctctcactcaatgcgaagggaaccaaggtaccagggccaagtgggtccagacatccacacggattctgaaagggcaggtcaagcaggcacgtggggcccaggttaccccttattccccgctgtggcatgggaagctgggaagggctgggggttggggtatcatgggatgtgcttccttaacggttcctttgtgtcactgccagactttgtccagccatcagccacggcctctcgacagcaccaagatggaagtcaaaggtcagctgatcagctctcctaccttcaatgccccagctgccctgttcggagaggctgccccccaggtgaagtcagagcgtctgcgggggctgcttgaccggcagcggaccctgcaggaggccctgagcctgaaacttcaggagctccgcaaagtgtgtctccaggaggcggtgagggcctggccctaggggtatcaggcggggaggttgggaggaggtgaggagctggggcccctaggtagacagacttgggtggcaattcctcaaccacttgtcttggctgtagattccctgtcacctactttctcctcaaagctcagcttagatgtgttagaatgaatgaaataggctgggcgctatggctcacgcctgtaatcccagcactttgggaggccgaggcaggtggatcacctgaggtcgggagttccagaccagcctgaccaacatggagaaatcccgtctctactaaaaatgcaaaattaggctgggcgcggtggctcacgcctgtaatcccagcactttgggaggccgaggtgggcggaacacgatgtcaggagatcgagaccatcctggctaacacggtgtaaccccgtctctactaaaaatacaaaaaattagtcaggcgtggtggcgggcacctatagttccagctactcgggaggctgaggcaggagaatggcatgaacccgggaggcggagcttgcagtgagccgagattgcgccactgcactccagcctgggtgacagagcaagactctgtctc

SEQ ID NO: 12764 - DNA, 3208 bp, Homo sapiens
tacaaagcaaaccaggagaattttcataatacctgataactatgtaagacttggaatatttgaatttctaggacatgggattgtgcaaccattcattttatcccataatattgaaatctccctcagataagcctctcggcacctaatagagttttcttagtgaagggctacctttctgtgggtaacagggaagggcaaaataaacaaccaaataatatcataatcacgagtgtcaatgattgctggaacaggtgggggttggtcattaaattctagttgtttccactattccagtaggagttgtgtgaatgttagcaaaagaccagggtgttacgatctgactgtgtttcatcaattgccttgacttttggatgaaatgcgatttgaggacatatcattattagatttgccacagattccaatttttttctctaatatgaggctaaccatgatgtcctttcccaggaaggacaatctctcctttatcagggaaaaatcggtaggggcttcctcaattttctccttcatccccaccacagagtcatagaggtcaagtccttttcttgtgaaacctaaaaaatgcaaattccaaggttgctgctatggtgtactaattttgtcacagtgacatgccctgtcacagggcgtatgtgttctgttatacagttgaaatattggttatactattgaaatgtttttgtactgttgaaatctcaaataaacttaattctaaaagaagcatgacctcaacagcctcacacctacttatatcttgtagttctttctgtctaatgctggcaatctaagcatgttccaggcaagcaacattcaatagcgttttactgctccaataagttggttcaattagcaatgtcaaaggcagtcactaaatagatagtgtataaccttcatacaatctcgtattattttccactaattactatagaaaaatcgatgaagtttcattacaatggaataacttcaatcacacttcaaaaactacatacggaaaatagccacaacttgctgctctcaaaaaacacagagatggcatctttactttgtttcaaatccccaaccctggtggcggtccaaagttatggcagttataaccccttatgtcattataaggaggaagggtaaatattaagtcaacatcctttaaagctaagagtatgactacagtggggtggaatttgggacttcatgcccactccctgtttctgttctattttacctttcctgacctctaagccaacaggagagggggaagggccacacttttgtgacccttgttaaagaattgtgagtttaggaaacaaagatggacttctgagggggtagttgaggatgggctgaaggcacagaagaaaccagctggtgtgcccctctccccactagcagacccttcttcctcattggttcagggcaaacaaccccccaaaaattcaagaaaactaacttagagttattttctgttatttctcttttccttgatctggagccaatgcagaaagaaatctaaaggtgaagggaaggcagcgttcagcactgagcaagtccatgttggagaaagttcacagggaattggaaatccttgtcttcgtggttcctggctcagcaggacccctgtggggcctctccctctcttgggaaagagattgctctagaaggtttactacaccagtgaggagaagatgagcgcaagggtgattggccggctgagggcgaaatcaagactggagccaagtgcgctgagctctcacatgaggtcctttgctcctgttccctggaggcataagtggctggggtagagagaagcaggggtatttcttctgtcctttcttgcttagggattgggggtggaaatctccccgcatctaaggaaatttgaaaagacaaactatggctgcttcttcaagcaaaccacctcaccacactatccaggggataaaacccgcttgctgctgctaaattatgccaagagagaacattctgatatttctcctcaattctaggcatgacagcgtgacttggtgcttaaaggcatggagttttgagttgcagacctaggtttgagtgctgaatctactagcttcagggtgttaaaaaagtttcttaatctctctaaaccttatttttctcaaagataaaaaactgggtgtagttgtgagtatagtgaatgcacatagtatgtgcctttggcatgttaattcactattattctggacataatttctcctaagaaaaaggatgaactaattgcagggcctagcctaagctctgagaagtcattcgttatagcatttcagtccatagtaaacaagaagaaatgaggtaaagagtttaaaccagggaaggcatagctgcggtcaccaaacaacctgttaaaggcgagctgtaggcaccaaaaaacctattatggactgaattgtgttcctcaaattcatatgttgaagtgctaaccccaagtaccaaatgtgactgtatttggggatagggtccctgaagaagtcactcagctggaaggagtcatattggattaggtgttgggaattggctggccaagggagaaatcaaggctggaaccaagtgctgaactctcacatcaggtcctttgctcctgttccctggaccctaatccaatatgactggcatctttatatgaagaggaagaggcaccagagggtacacacgcagagaaaaggccatgtgtggacacagtaagatgacggacatctgtaagccaaggagggaaacctcagaagaaaccagtcttgcctgcaccttgatcttggaggtccagtctccagaactgtgaaaaaaataaactggtgttgtttaaatcccccagtcgtggtattttgtcatggtggccctagaagacaatatacaacccaaaggaatattctttccactttctccctcttccactttatagttttttctccttcgtttctttctttttctcttttactttccttttcttctcttctctttcctctggtttttaattttaattttaatttttggccttcctatacctccatttgcctctccaggaagctgaattccagacaattaatcattcatctcatcagttcagcaaagcaaatgccctcaatggtttcttttgtgattcgattattatgggatcagaatgtatcttattcctctgggaaaaatgaaacataaaaatttcagaaat

SEQ ID NO: 12765 - DNA, 1774 bp, Homo sapiens
  CDS (183)..(1631)
aaagcaaacctaggaagtagctttccaacataaagtggaggtttcaacacaggagactttaagcaagttccagtgtgtctatatttggtctggctgatcggctggactctggccttccccgctcacgttagcagacagctctgccctagtgggcgcttagcctgcgacggcagcccgagaggatgtctaacaagcttctttctccccacccccattcagttgttctcaggtctgaattcaaaatggcctcatctcctgctgtccttcgagcgtcccggctgtaccaatggagcctgaagagttcggcgcagttcctggggtctccacagctgaggcaggttggtcagatcattagggttcctgctcggatggcggcgacgctgatcctggagcctgcgggccgctgctgctgggacgaaccggtgcgaatcgccgtgcgcggcctagccccggagcagccggtcacgctgcgcgcgtccctgcgcgacgagaagggcgcgcttttccaggcccacgcgcgctaccgcgccgacactcttggcgagctggacctggagcgcgcgcccgcgctgggcggcagcttcgcggggcttgagcccatggggctgctctgggccttggagcccgagaaacctttggtgcggctggtgaagcgcgacgtgcgaacgcccttggccgtggtgctggaggtgctggatggccacgaccccgaccccgggcggctgctgtgccagacgcggcacgagcgctacttcctcccgcccggggtgcggcgcgagccggtgcgcgtgggccgggtgcgaggcacgctcttcctgccgccagaacctgggccctttcctgggattgtggacatgttcggaactggaggtggcctgctggagtatcgggctagtctgctggctgggaagggttttgctgtgatggctctggcttattataactatgaagacctccccaagaccatggagacgctccatctggagtactttgaagaagccatgaactacttgctcagtcatcccgaggtaaaaggtccaggagttgggctgcttggaatttccaaagggggtgagctctgcctttccatggcctctttcctgaagggcatcacggctgctgtcgtcatcaacggctctgtggccaatgttgggggaaccttacgctacaagggcgagaccctgccccctgtgggcgtcaacagaaatcgcatcaaggtgaccaaagatggctatgcagacattgtggatgtcctgaacagccctttggaaggacctgaccagaagagcttcattcctgtggaaagggcagagagcaccttcctgttcctggtaggtcaggatgaccacaactggaagagtgagttctatgctaatgaggcctgtaaacgcttgcaggcccatgggaggagaaagccccagatcatctgttacccagagacagggcactatattgagcctccttacttccccctgtgtcgggcttccctgcatgccttggtgggcagtcctattatctggggaggggagcccagggctcatgccatggctcaggtggatgcttggaaacaactccagactttcttccacaaacacttgggtggccgcgaggggacaatcccatcaaaagtgtaaattttatttgatcatgtggcctctctgttgctaatctctcctggaaacatctgccacatttagtgtgtgtatgtgtattcattcttttgtttttaataactaaagttttttcccctcattattaaaatgaatttaccagt

SEQ ID NO: 12766 - protein, 483 aa, Homo sapiens [sequence omitted]

SEQ ID NO: 12767 - DNA, 3122 bp, Homo sapiens
  CDS (28)..(1872)
actcgaacgcgcgacggcggggggaagatggcggagtccggcggtagcagcggtggtgctggtggcggcggcgctttcggcgcgggcccgggccccgagcgcccgaacagcacggccgacaagaacggggccctcaagtgcaccttctcggcacccagccacagcaccagcctcctgcagggcctggccaccctccgcgctcagggccagctcctcgatgttgtgctgactattaacagagaggcctttcctgcacacaaggtcgtcctggctgcctgcagcgactacttcagggccatgttcaccggcggcatgcgggaggcaagccaggacgtcatcgagctgaagggcgtgtcggcccgtggcctgcggcacatcatcgacttcgcctacagcgccgaggtgacactggacctggactgcgtgcaggacgtgctgggcgcggccgtgttcttgcagatgctgcccgtggtggagctgtgcgaggagttcctgaaggcggccatgagcgtggagacctgcctcaacatcggccagatggccaccaccttcagcctggcctcgctgcgagagtcggtggatgccttcaccttccggcacttcctgcagatcgccgaggaggaggatttcctgcgcctgccactggagcgcctggtcttcttcctgcagagcaaccggctgcagagctgtgccgagatcgacctgttccgcgcggccgtccgctggctgcagcatgacccggcccggcggccgcgcgccagccacgtgctctgccacattcgcttcccgctcatgcagtcgtccgagctggtggacagcgtgcagacgctggacatcatggtggaggacgtgctgtgccgccagtatctgctggaggccttcaactaccaggtgctgcccttccggcagcacgagatgcagtctccgcgcaccgccgtgcgctcggatgtgccctcgctcgtcaccttcggcggcacgccctacaccgacagcgaccgctcggtcagcagcaaggtctaccagctgcctgagccgggagcccgccacttccgcgagctcacggagatggaggtaggctgcagccacacgtgcgtggccgtgctggacaattttgtgtacgtggccggggggcagcacctgcagtaccgcagcggcgagggcgcagtggacgcctgctaccgctacgacccccacctgaatcgctggctgcgcctgcaggccatgcaggaaagccgcatccagttccagctgaacgtgctgtgcggcatggtgtacgccacgggcggccgcaaccgagccggcagcctggcctccgtggagcggtactgcccccggcgcaatgagtggggctacgcctgctcgctgaagcgccgtacctggggccatgctggggccgcctcagggggccgcctctacatctcgggtggctacgggatctcagtggaggacaagaaggccctgcactgctacgaccccgtggccgaccagtgggagttcaaggcgcccatgagcgaaccccgcgtgctacacgccatggtgggtgccggcggccgcatctatgccctcgggggccgcatggaccacgtggaccgctgcttcgacgtgctggctgtggagtactatgtgccggagacggaccagtggaccagcgtgagccccatgcgggccggccagtcagaggccggctgctgcctgctggagaggaagatctacatcgtcgggggctacaactggcgtctcaacaacgtcacgggcatcgtacaggtgtacaacacggacaccgacgagtgggagcgggacctgcacttcccggagtccttcgcaggcatagcctgcgcccccgtcctgctgccccgggccgggaccaggaggtagcccccaagacccccgggaccctggcctgaccgcatgttgtctccaagtggggcttggcgaatgcacgtctgcctgagaaccccagtgccccccttcgcccgggctgcccttgaggggcctgctgcgttgataagcccccctcccaggggtccctccctccctccttcccaaagcagatcctggctgcgagtccatccgagggagcctgccggcaaagcgtctgacatgtggtggcagcaaattcgtccccggggtggtttcctcgcctggcccccgagtccccacgggctggcgggtggaatcccaggtctccagggggtccctgtgcagctccatctcacttctctactgcctcccagccccacggtttcaggcattcagatgtgagctcatcaacattgaacccaaagtcggtggtatatgactcaccctccttccaagtctcctgcgcgcgtgtttttaaaataaactcacccgaaacgtccgtaacacacggacctccaggagcagtgagaggtggcttagaagcccctggtttggggtgggtggaggaggagggcacgtgtctgcctcccctggggtgccctccttcccccatcccaagctgctgaggggaggccctggtcatgcctcagttcctgccttcatctgctttccggaggaaaaaccatatcaactcctagaaacgctccttaggggcttgggaccttccatttggcactgagcatcttgtggggccttaactggctgagacatcccggccctctacatttgccctgttggccaggcagtccccttcccgcaattggagggcgacgctaacttcagaatcccatagtggcgcttgccgcaggtctggtggggtgtcttttttctcctccctcctttccacccctccgcgccctgccactccctggcctgccctgtttttgggtcaacattgctacggagccagcagtgaggcctttcccttcaagggctctgtggtatctctggccacatttgttctaatgtctgaacctctaaatcttttctttttgattggttttactgtttttaagaagccagcactgctgtctcatagatgggatttgtactcttggggcaacttaaagtgtctctctcgctgctaacagacgattgatgtcttgtctctgtgacccactcaccatgtaaagaattaacctcctatcttagcagacatcgtctcctaatatttccctttatttaataaaaatgttatggtg

SEQ ID NO: 12768 - protein, 615 aa, Homo sapiens
MAESGGSSGGAGGGGAFGAGPGPERPNSTADKNGALKCTFSAPSHSTSLLQGLATLRAQGQLLDVVLTINREAFPAHKVVLAACSDYFRAMFTGGMREASQDVIELKGVSARGLRHIIDFAYSAEVTLDLDCVQDVLGAAVFLQMLPVVELCEEFLKAAMSVETCLNIGQMATTFSLASLRESVDAFTFRHFLQIAEEEDFLRLPLERLVFFLQSNRLQSCAEIDLFRAAVRWLQHDPARRPRASHVLCHIRFPLMQSSELVDSVQTLDIMVEDVLCRQYLLEAFNYQVLPFRQHEMQSPRTAVRSDVPSLVTFGGTPYTDSDRSVSSKVYQLPEPGARHFRELTEMEVGCSHTCVAVLDNFVYVAGGQHLQYRSGEGAVDACYRYDPHLNRWLRLQAMQESRIQFQLNVLCGMVYATGGRNRAGSLASVERYCPRRNEWGYACSLKRRTWGHAGAASGGRLYISGGYGISVEDKKALHCYDPVADQWEFKAPMSEPRVLHAMVGAGGRIYALGGRMDHVDRCFDVLAVEYYVPETDQWTSVSPMRAGQSEAGCCLLERKIYIVGGYNWRLNNVTGIVQVYNTDTDEWERDLHFPESFAGIACAPVLLPRAGTRR

SEQ ID NO: 12769 - DNA, 1885 bp, Homo sapiens
agaccaagccctgagacacagtgttgagagccaagacataaagttgtggagattcagacccagagcccagcagggcacaggctggaggggtgatgtgagtgatcagtaacactatgaagactctgctcctggatcaggaatgcttttttgtccctgtttttggattttccaccatgatcagccaatgcagaaagaaatctaaaggtgaaggaaaggcagcgttcagcactgagcaagtccatgttggagaaagttcacagggaattggaaatccttgtcttcgtggttcctggctcagcaggacccctgtggggcctctccctctcttgggaaagagattgctctagaaggtttactacaccagtgaggagaagatgagcgcaggggggattggccggctgagggcgaaatcaagactggagccaagtgcgctgagctctcacatgaggtcctttgctcctgttccctggaggcataagtggctggggtagagagaagcaggggtatttcttctgtcctttcttgcttagggattgggggtggaaatctccccgcatctaaggaaatttgaaaagacaaactatggctgcttcttcaagcaaaccacctcaccacactatccaggggataaaacccgcttgctgctgctaaattatgccaagagagaacattctgatatttctcctcaattctaggcatgacagcgtgacttggtgcttaaaggcatggagttttgagttgcagacctaggtttgagtgctgaatctactagcttcagggtgttaaaaaagtttcttaatctctctaaaccttatttttctcaaagataaaaaactgggtgtagttgtgagtatagtgaatgcacatagtatgtgcctttggcatgttaattcactattattctggacataatttctcctaagaaaaaggatgaactaattgcagggcctagcctaagctctgagaagtcattcgttatagcatttcagtccatagtaaacaagaagaaatgaggtaaagagtttaaaccagggaaggcatagctgtggtcaccaaacaacctgttaaaggcgagctgtaggcaccaaaaaacctattatggactgaattgtgttcctcaaattcatatgttgaagtgctaaccccaagtaccaaatgtgactgtatttggggatagggtccctgaagaagtcactcagctggaaggagtcatattggattaggtgttgggaattggctggccaagggagaaatcaaggctggaaccaagtgctgaactctcacatcaggtcctttgctcctgttccctggaccctaatccaatatgactggcatctttatatgaagaggaagaggcaccagagggtacacacgcagagaaaaggccatgtgtggacacagtaagatgacggacatctgtaagccaaggagggaaacctcagaagaaaccagtcttgcctgcaccttgatcttggaggtccagtctccagaactgtgaaaaaaatgaactggtgttgtttaaatcccccagtcgtggtattttgtcatggtggccctagaagacaatatacaacccaaaggaatattctttccactttctccctcttccactttatagttttttctccttcgtttctttctttttctcttttactttccttttcttctcttctctttcctctggtttttaattttaattttaatttttggccttcctatacctccatttgcctctccaggaagctgaattccagacaattaatcattcatctcatcagttcagcaaagcaaatgccctcaatggtttcttttgtgattcgattattatgggatcagaatgtatcttattcctctgggaaaaatgaaacataaaaatttcagaaat

SEQ ID NO: 12770 - DNA, 3075 bp, Homo sapiens
aagtcatgctggaaactccggagtacagaagtaggtttacgagtgaagagaccctgatgttctgcatgagggtgatggtgggagtcatcatcctctatgaccatgtccaccctatgggagctttctgcaagacatccaagatcgatatgaaaggctgcataaaagttttgaaggagcaggccccagacagtgtggaggggctgctaaatgccctcaggttcactacaaagcacttgaacgatgaatcaacttccaaacagattcgagcaatgcttcagtagagctctgctcaaagaagaggatctatgtgctgacctcagaagatgtatatgtttacataatttaatacagattgatgttaatacttgtgtatttacataaccgtttccttcttgtcactgaaatatatggaccttaatttgtatcctgactgactcaacccagcagagcataaattgacttgagagccttacctttgatgtctgaaatgaaacccccttctccaaaggcaaaattcggagactttgatctttgctactggagtcctttaacaacacctataacgataaaaaattcctaattgtttgtggtagtattttaattctagatgtgttatctctctgggaagtatagtttatagaaacacaaaatatttgatttcctgtgtcggttcagctacaagaaacacaactgttatcttgacagaggaagagaggaatccaagaaaaatgcatgtggagaattaaacccaagtgtttcgaattcagcacaccccctctctgtcctcagactgcagtccacacgtgcaacttttctgtttgcacgtgttttattaatcagcatactccttttctgtttggatttatatccctctaatgttctcctttaatttcacatgaaaaaaaaatctgtatttttttcagttagtgggagagcagcagaaatagatagatgtgatgttgccactggactgatgaaggtggctgtcttggaactgggagacaggtcctcagaggtgcactcaggcaacaggacagccatctctctgcttcagccctctgcctacaggaattagggaaatggagctctggctttgaagttatttgtgagtttagcaaccttccagttacctgcagagttctgggtgcacagccacccctcataagagccctgttctctgaagaccattcatatgagaacaaaggtctaggatactgcattagttaccagaaaactaggggaatttagagggaaaaaaaatccatgttttctatttcccaggtttttaaaaagtagctcttccccaaccccgttgctagcttgttgcaatataaaagccctggtgcacctgaatttactcctggccttactaatgattcataatgtgatcttgagaaatgtgtttaagctttctgagtcttaacctctttgtctctaaaatgggcaattaaaacaatcttcaagagccctgtaaggttaatgccgataaaatgactgactccgcccttcttccttagtacgtagtatccagcaagcatttgccccaccttgtcttgttgatgaacaatattatgaagcctgcagtcattctctctgtacatcagagcttagttcgaatggaatcatgaaaatctctgattctgacctcctaaggaaaaatgaaacccagaggatgtggtcatacaggatggctcccatgtgggcctagaacccaggatgcttcactcttgactccatgctcttccttttataccatgtggctgtgaatacatactatgggatgggattcaacccttctaagtaaatcctcagtctggtctatattgttacttgcctgtttccactagaaggagtcacccaggcatttagtgaatgataatcctagaagttgagtctgagtacatcagagtttggcattatttgcaacatcccaggaatgagctataagactccattgctttctggactttagtgaccagctgatcttcccttggatcctccagtaaaggggaaaaaatacttgtcttatgttgttttagcaagggagttcagccaagtgacaggaaagattccctggtctgcatctaaaccttagtcaacagaaggaaaaggctcttttccttggagattttcaagttgaaaaagtacagctgcttggatggagtttctctcatcagaatagaaatatgctaggtggtcttcaagaactttttgaacctacagattctaaaccttagaggaagccagaatatgtgatcataccaggtgaggaaagttaggagatattcatcttaagagatatcctatttggcagtcacatgttacacttgagcaacaattgtctaggctagaaatatagaaccacacaatatttatcatcattgggtcaatttctccccctctatcaagtgaggagattaaggcttaaagaaaggaaaggacttgccagccaccacagggctcatgaggggcttgaacccatgtcgtgtgtctctaccacagctgactctcagctggctaatggagaaaatgtgaggaattacctgtcaaattagattgagctcagagtaaatagatgagcacatttataactctaaattagactttctatcaaatgggaccaaacatatggaaggggctgctgtcctgcctcaatttagccaagacttgtcttgtctcaaagccaagactcagcagtacatggattctgagaagtccagggtctgaattgttgtctctgattactggaaggacaggttaactgaatgtctgtgatcactaacaggtgatgggctttgtgcccactccagagatattgtgggagacaaattcttttaacagcctgtcctcccggcatcaggagtcattgaacaatcatggattgttgtgtttgggattttttttttttttggctttgtttttggtttttgtgtgtgtgtgtgtgtgctgcatgcacatgcgtccaagacttatgggtggtttaggggaaagtgctagcaacagtgtcaatgtcattgttaactatatttcatatttgaggtctcattgttttcaaataaacagtgttttccatgg

SEQ ID NO: 12771 - DNA, 2397 bp, Homo sapiens
  CDS (20)..(1432)
ctgcaccgggccaggcaagatggcggccatggagaccgagacggcgccgctgaccctagagtcgctgcccaccgatcccctgctcctcatcttatcctttttggactatcgggatctaatcaactgttgttatgtcagtcgaagacttagccagctatcaagtcatgatccgctgtggagaagacattgcaaaaaatactggctgatatctgaggaagagaaaacacagaagaatcagtgttggaaatctctcttcatagatacttactctgatgtaggaagatacattgaccattatgctgctattaaaaaggcctgggatgatctcaagaaatatttggagcccaggtgtcctcggatggttttatctctgaaagagggtgctcgagaggaagacctcgatgctgtggaagcgcagattggctgcaagcttcctgacgattatcgatgttcataccgaattcacaatggacagaagttagtggttcctgggttattgggaagcatgacactgtctaatcactatcgttctgaagatttgttagacgtcgatacagctgccggaggattccagcagagacagggactgaaatactgtctccctttaactttttgcatacatactggtttgagtcagtacatagcagtggaagctgcagagggccgaaacaaaaatgaagttttctaccaatgtccagaccaaatggctcgaaatccagctgctattgacatgtttattataggtgctacttttactgactggtttacctcttatgtcaaaaatgttgtatcaggtggcttccccatcatcagagaccaaattttcagatatgttcacgatccagaatgtgtagcaacaactggggatattactgtgtcagtttccacatcgtttctgccagaacttagctctgtacatccaccccactatttcttcacataccgaatcaggattgaaatgtcaaaagatgcacttcctgagaaggcctgtcagttggacagtcgctattggagaataacaaatgctaagggtgacgtggaagaagttcaaggacctggagtagttggtgaatttccaatcatcagcccaggtcgggtatatgaatacacaagctgtaccacattctctacaacatcaggatacatggaaggatattataccttccattttctttactttaaagacaagatctttaatgttgccattccccgattccatatggcatgtccaacattcagggtgtctatagcccgattggaaatgggtcctgatgaatatgaagagatggaagaagaggaggaggaggaagaggaggaagacgaggatgatgattcagcagatatggatgaatcagatgaagatgatgaagaggagagacggaggagagtctttgatgttcccattcgcagacgccgctgctcacgccttttttagcaagccttctgctgatggaagcactaggatgattctaggctgttaaatagatttctcaataatgtaaataactaaattgttctctgcatatagcaggaaaactagcatgaaatattgtttcaggccctgggttctatgtgacactacattaggaattggattgtttgggtttgctttgtgtttttgaggtagaggaagaaatgggaatcttttttttctcttccaggagtcagtggaagaatagttctctagctaaggaacggacatacctttgttttaaaatattttatacttacaaaaatctagaaatggagagggaactgttttgaataaggatttaaaatacctgcacaaggatagagagaaactatgtgactcattctgtgaaaagacttcttgcagttgtgagttatttagaaatgatcaaaatttgtaattaggctaatccatttagtgattcctaatattttgtactcacagagaactaattgactaaacaacttgaacgctagtggtttgtccttagacaatctgtctttgaatttaaagtctttatcgctaagaccttgactttaaatttttcatcactacaaccttgaatttaatttcaggtcttcaacatgatgaccttggatttaatttaaagtcttcaacactatgcgctttatcatattattcacagatgcatttttgaaatgtagtatgtaaaagtatgtaacgtgctgtttattaacaaaagattgttcacaacatctcatgtagtttaaatttgtaaatactgcttctgttttgtttctcctttatacacttgactgtctttgtgataagtgacatgaattttatgttaggattaagtatgttttcctgaaacttggattttttttgtaattatataattgggagttaagaatgaaatccttcaagtgttataaactcacattttaaaagcaaattttggttcc

SEQ ID NO: 12772 - protein, 471 aa, Homo sapiens [sequence omitted]

SEQ ID NO: 12773 - DNA, 1924 bp, Homo sapiens
  CDS (111)..(1688)
agtgtaataaggtcccggagaagtgtcactggccctgagtgggacccggtagcccgttcgctccgcgccggcggcctgtccccgcggcttggcgggctagggcaggggaaatgttgcaggaggagtcggacctctctctcattattgcccagatagtccaaaagctcaagggctccaatttgtactctcagctggaacggcaggcctgggccagtcttcagagacctgagattaaacttgaatcactgaaagaagatattaaggaattctttaaaatatcaggttgggagaagaaacttcagaatgctgtttatagtgaactgagtgtgtttcctttacctagtcatcctgctgcacctcctgaacatcttaaagaacctttggtatacatgaggaaagcacagggaagttgggaaaaaagaattttgaagagtttaaatagtatgtgcactgaactgagtatcccactggcacgaaagaggccagttggagaacagaaagaacttcttaataaatggaatgaaatgggaactgatgaaccagatttaagccttttcagacctgtttatgcacctaaggattttcttgaggtattaattaatcttcgcaacccaaattatgaaaacggtgattctcctagtttcaggactcatttgggtttaattcaagttccactgaaagtaaaagacatccctgaattgaaagaatgctttgtggaacttggcttaaatataggacaactgggtatagatgattctacacaagtgcctcctgaactttttgaaaatgagcatgtacgtattgggcaaaaagttctagcagaacaagatagtgctgctgctcaacagtacatcagacaaggaagtcccacggcactgagagctgaattgtgggctctcattttgaatatttccagccaacctgaggatgtcttgtattatgagcagcttaagaccaatgtgatacaacatgaccttttggtggacagtctaatctataaagatgtgaagttgacagcaagcaatgatgattattattttgtatttgaagattatttatatcaggtattactttgtttttcccgggatacatctgtgttgagtcactttgcattcaacagtgcctcgccaccaaaatcatacataagaggaaaactaggactggaagaatatgctgtcttttacccaccaaatggtgttatcccttttcatggattttcaatgtatgttgcaccactttgttttctataccatgaaccttccaaattgtatcagatattccgtgagatgtatgtgcgttttttcttcagactccattccatctcttctcatccttctggtattgtgtcactctgtctgctgtttgaaactcttcttcaaacttatcttccccaactcttttatcatctacgagaaattggggctcaaccacttcgcatatcatttaagtggatggttcgagctttctctggatacttagctacagatcagctcttgcttttatgggatagaatcctaggatacaactctctggaaattcttgctgtgctggcagctgccgtgtttgctttccgagcagtgaacctgatggaggtgacatcactggctgcagctgaagcagttcttgctgacctttctactttaaaagttatgcctcttcttcagatttttctgtttgctactgtcacctgatcttcttcacagtcactggcaacacatctagtttttcattagaaacaaatcatgaactatgcaaactctgcataaaaccaaaatgaaactttgcatataagccaataaagatcatgttccctcttcagttaaacctaagtagtttctcactttttgaaacaataactctgcaccaaatattgcatcgcatgctgctgattttcaagagagaagcaataaacacaacttctgct

SEQ ID NO: 12774 - protein, 526 aa, Homo sapiens
MLQEESDLSLIIAQIVQKLKGSNLYSQLERQAWASLQRPEIKLESLKEDIKEFFKISGWEKKLQNAVYSELSVFPLPSHPAAPPEHLKEPLVYMRKAQGSWEKRILKSLNSMCTELSIPLARKRPVGEQKELLNKWNEMGTDEPDLSLFRPVYAPKDFLEVLINLRNPNYENGDSPSFRTHLGLIQVPLKVKDIPELKECFVELGLNIGQLGIDDSTQVPPELFENEHVRIGQKVLAEQDSAAAQQYIRQGSPTALRAELWALILNISSQPEDVLYYEQLKTNVIQHDLLVDSLIYKDVKLTASNDDYYFVFEDYLYQVLLCFSRDTSVLSHFAFNSASPPKSYIRGKLGLEEYAVFYPPNGVIPFHGFSMYVAPLCFLYHEPSKLYQIFREMYVRFFFRLHSISSHPSGIVSLCLLFETLLQTYLPQLFYHLREIGAQPLRISFKWMVRAFSGYLATDQLLLLWDRILGYNSLEILAVLAAAVFAFRAVNLMEVTSLAAAEAVLADLSTLKVMPLLQIFLFATVT

SEQ ID NO: 12775 - DNA, 1881 bp, Homo sapiens
attaatatatgaagaaaactgaacagtccttaatctgtgtaggcattacatccatttgtaggaggtatttggtgacttggtacaggtttctttgttttgtgtggtttgttgaagatgcaatgaccgggatgaatgagtgaacagctgggtgaggcaggggatgggcattatgaagttgggggatatattgtagatgaaacagatgaccctaaggaggtaatgagggggtggactaaagaatgacgaatgggagaagggaaaatattgaattcatcttagcacaagtatatcatcctttgaagaataatccaaaacacattccagacattaattgtgaaattcctgaaaaatgtgggtgtgcttaacatctcccaggctatggtgcaagcagagatgatagtgttgctttagcctgtaaatacaagagggtaggaggtggtaaaatgagtggaagggaaatacatttagtgaagcgggttcctgtaacactgtgttccgtatggcacgtttggtatcaggattttggagacaccccagtaaagctcatttaattatttgagggagaaacagtagactagccaagcatgcatgaataacacattgaaagctttccttctcagaggtctaattctgcaaagctgcattttcaaagatctgacttgcctttgcatggaaatcagtcattcattcattggtcttctatgctgtacaaggccttctgctggggtgagggggaaactagggagcccggggacctctccaacatattctttgctctgtacacttaatcaagataagaaataaagacagcaagactgcaaaaagtctattatgtagacttgcaaaaagtctacataataatataaattcaagccaagtagaagtgattctgcaagtctgtatgattaattggctagtgaaatatatggataaaattagttgtaggaattaaagcatctgaagtgatctcttgaggctctggtggcaaagcagaaaggggaatttgaatttgaactaggtttaaaagtgtgagtagtagccctttcttttggcaggggaggtgatcctacccattctccttagagcctgtgcaattggtctcagtgtttctcagcatctaagaatgaagctgcattcttaatgctttagtagctgtgcttcaaaacggcaagtttccttttgagagtgattttctctttgttctagcttgtttcactaggcggataagcgtgggcagtaaactgggaggtgtccctttatcagcacctctcagcttcacccaccctgctgcttgccctgggcagtagcctggtcacatctttgaaaacctctgtttagtcaagacttcctaagtcaagacagaggaatggttgaatatacctctatgtaagaataccctcaaggtaaacactaaactcttacgtgttttatcttgggcccacatgaaaaaagtaaatgtttttaaagaacctattttcctttgttagttgcaaagtgaacaggtatcaattccttacctccctcctccagtcccggttaattccccacatgaaaatacctacatgttggtggaaaagtgtaatgttcaagaacttggggccggccgtggtgtctcatgcctgtaatcccagcactttgtggggctgaggcagatggatcgcctgaggtcaggagttcaagactagtctggccaacatggtgaaaccttgtctctactaagaatacaaaaaaattagccaggcttggtggcaggcccctgtaatcccagctactagggaggctgaggtgggagaattgcttgaacccaggaagcagaggctgcagtgagctgaaatcgcaccactgcactccagcctgggcgacaaagcaagaccctgtctc

SEQ ID NO: 12776 - DNA, 2141 bp, Homo sapiens
  CDS (91)..(1695)
gtgatccggggccccggaacccgagctggagctgaagcgcaggctgcggggcgcggagtcgggagtgcaggcctgagtgttccttccagcatgtcggagggggagtcccagacagtacttagcagtggctcagacccaaaggtagaatcctcatcttcagctcctggcctgacatcagtgtcacctcctgtgacctccacaacctcagctgcttccccagaggaagaagaagaaagtgaagatgagtctgagattttggaagagtcgccctgtgggcgctggcagaagaggcgagaagaggtgaatcaacggaatgtaccaggtattgacagtgcatacctggccatggatacagaggaaggtgtagaggttgtgtggaatgaggtacagttctctgaacgcaagaactacaagctgcaggaggaaaaggttcgtgctgtgtttgataatctgattcaattggagcatcttaacattgttaagtttcacaaatattgggctgacattaaagagaacaaggccagggtcatttttatcacagaatacatgtcatctgggagtctgaagcaatttctgaagaagaccaaaaagaaccacaagacgatgaatgaaaaggcatggaagcgttggtgcacacaaatcctctctgccctaagctacctgcactcctgtgacccccccatcatccatgggaacctgacctgtgacaccatcttcatccagcacaacggactcatcaagattggctctgtggctcctgacaccatcaacaatcatgtgaagacttgtcgagaagagcagaagaatctacacttctttgcaccagagtatggagaagtcactaatgtgacaacagcagtggacatctactcctttggcatgtgtgcactggagatggcagtgctggagattcagggcaatggagagtcctcatatgtgccacaggaagccatcagcagtgccatccagcttctagaagacccattacagagggagttcattcaaaagtgcctgcagtctgagcctgctcgcagaccaacagccagagaacttctgttccacccagcattgtttgaagtgccctcgctcaaactccttgcggcccactgcattgtgggacaccaacacatgatcccagagaacgctctagaggagatcaccaaaaacatggatactagtgccgtactggctgaaatccctgcaggaccaggaagagaaccagttcagactttgtactctcagtcaccagctctggaattagataaattccttgaagatgtcaggaatgggatctatcctctgacagcctttgggctgcctcggccccagcagccacagcaggaggaggtgacatcacctgtcgtgcccccctctgtcaagactccgacacctgaaccagctgaggtggagactcgcaaggtggtgctgatgcagtgcaacattgagtcggtggaggagggagtcaaacaccacctgacacttctgctgaagttggaggacaaactgaaccggcacctgagctgtgacctgatgccaaatgagaatatccccgagttggcggctgagctggtgcagctgggcttcattagtgaggctgaccagagccggttgacttctctgctagaagagaccttgaacaagttcaattttgccaggaacagtaccctcaactcagccgctgtcaccgtctcctcttagagctcactcgggccaggccctgatctgcgctgtggctgtccctggacgtgctgcagccctcctgtcccttccccccagtcagtattaccctgtgaagccccttccctcctttattattcaggagggctgggggggctccctggttctgagcatcatcctttcccctcccctctcttcctcccctctgcactttgtttacttgttttgcacagacgtgggcctgggccttctcagcagccgccttctagttgggggctagtcgctgatctgccggctcccgcccagcctgtgtggaaaggaggcccacgggcactaggggagccgaattctacaatcccgctggggcggccggggcgggagagaaaggtggtgctgcagtggtggccctggggggccattcgattcgcctcagttgctgctgtaataaaagtctactttttgct

SEQ ID NO: 12777 - protein, 535 aa, Homo sapiens
MSEGESQTVLSSGSDPKVESSSSAPGLTSVSPPVTSTTSAASPEEEEESEDESEILEESPCGRWQKRREEVNQRNVPGIDSAYLAMDTEEGVEVVWNEVQFSERKNYKLQEEKVRAVFDNLIQLEHLNIVKFHKYWADIKENKARVIFITEYMSSGSLKQFLKKTKKNHKTMNEKAWKRWCTQILSALSYLHSCDPPIIHGNLTCDTIFIQHNGLIKIGSVAPDTINNHVKTCREEQKNLHFFAPEYGEVTNVTTAVDIYSFGMCALEMAVLEIQGNGESSYVPQEAISSAIQLLEDPLQREFIQKCLQSEPARRPTARELLFHPALFEVPSLKLLAAHCIVGHQHMIPENALEEITKNMDTSAVLAEIPAGPGREPVQTLYSQSPALELDKFLEDVRNGIYPLTAFGLPRPQQPQQEEVTSPVVPPSVKTPTPEPAEVETRKVVLMQCNIESVEEGVKHHLTLLLKLEDKLNRHLSCDLMPNENIPELAAELVQLGFISEADQSRLTSLLEETLNKFNFARNSTLNSAAVTVSS

SEQ ID NO: 12778 - DNA, 1803 bp, Homo sapiens
  CDS (93)..(782)
atgtgactgcactgaaatctaaggatcggaaagaatctgtggttcaggaggaaaattccttttcagaaaatcagccatttccttctcttaagatggttttagagtctttgccagaagatgtagggtttaacattgaaataaaatggatctgccagcaaagggatggaatgtgggatggtaacttatcaacatattttgacatgaatctgtttttggatataattttaaaaactgttttagaaaattctgggaagaggagaatagtgttttcttcatttgatgcagatatttgcacaatggttcggcaaaagcagaacaaatatccgatactatttttaactcaaggaaaatctgagatttatcctgaactcatggacctcagatctcggacaacccccattgcaatgagctttgcacagtttgaaaatctactggggataaatgtacatactgaagacttgctcagaaacccatcctatattcaagaggcaaaagctaagggactagtcatattctgctggggtgatgataccaatgatcctgaaaacagaaggaaattgaaggaacttggagttaatggtctaatttatgataggatatatgattggatgcctgaacaaccaaatatattccaagtggagcaattggaacgcctgaagcaggaattgccagagcttaagagctgtttgtgtcccactgttagccgctttgttccctcatctttgtgtggggagtctgatatccatgtggatgccaacggcattgataacgtggagaatgcttagtttttattgcacagaggtcattttgggggcgtgcaccgctgttctgggtattcatttttcatcactgagcattgttgatctatgccttttgggcttctcagttcaatgaagcaataatgaagtatttaactctttcactacagttcttgcaagtatgctatttaaattacttggccaggtataattgccagtcagtctctttatagtgagaaaatttattggttagtaatataaatattttaaactaaatatataaatctataatgttaaacatatgttcattaaaagcatagcactttgaaattaactatataaatagctcatatttacacttacagcttttcatttgatcaggtctgaaatctttagcacttaaggaaaatgactatgcataattatacctgaccatgaaaaaaataagtacctcaaatgcatgcatttgcactggtgattccaactgcacaaatctttgtgccatcttgtatataggtattttttacatgggttgacatgcacacaacaccattttcattcagtatgaaccttgaggctgctgccatttttccacttaaccaaaccagcctgaaggtgaacctcgaaacttgtttcataaatctttcaaaagttgttttacatcaatgttaaaatttcaaaatgctgcagggtaatttaatgtataaaatattagtaagaaaaagtatgtattgcatacttagtagaatagatcacaacatacaaattcaattcagtgcatgctttaggtgttaagcatgagattgtacatgtttactgttaggtccttgcatctgtggtgctaggtgagtatgagaagatgtcaaggactggacgtattttgttgcctaaaaaaaaaaggctgtttgtaggcgttttaaatatgcttattttgtgtgtctctcactacctattacacactgttgctttgtgggtttgttttgtatgtgcgtgtgttatacagtagttaaatttccatgcagaaaaataaatgtcctgaattctc

SEQ ID NO: 12779 - protein, 230 aa, Homo sapiens
MVLESLPEDVGFNIEIKWICQQRDGMWDGNLSTYFDMNLFLDIILKTVLENSGKRRIVFSSFDADICTMVRQKQNKYPILFLTQGKSEIYPELMDLRSRTTPIAMSFAQFENLLGINVHTEDLLRNPSYIQEAKAKGLVIFCWGDDTNDPENRRKLKELGVNGLIYDRIYDWMPEQPNIFQVEQLERLKQELPELKSCLCPTVSRFVPSSLCGESDIHVDANGIDNVENA

SEQ ID NO: 12780 - DNA, 1899 bp, Homo sapiens
attaaaaatgtactcattttaggaaaattctcctaagatacttgagttataattgctatagaggacatgtacatattctcagttgatagagaatacttgtcctgaaagtgcttcatgtcctggagggactcagaggtctcatggttcaaagattcaggtggttctgagacatgatctgtttattctcttctatcccattatcgctttaactttattgtatttttactttttggaaatgagaatagtgggtctttgttactggacccgtgactttaaaaaaggaagttctttttatttattattattattatttaattcaatcctccaagacatcagaaaaaagagggagttcttgaatatcttttggcttagttattatttgatttcatatatcatctcagatttacctaaacttggataaatgtaattcatatacttatttgataaaaatgtcttttaaaaaaattttaattcaccaaactacttcaggaaataaaatgtttccttaagaaaaaatatgtttagtattgctttttctcttgaaataacagggtaaaagttctctttattgatgcaggtaataggcagttaagctctttcataccctaattggggaagaatttgtctttggtgaaattttttatcaataaaattggtttctgtattctgctacttattattactccttcaacttgattataaaatgagaacaagaaattaaaagtaacaaaaataaaaaatcacttataattataccagaaatagcttttagtaacattttattattttttcttaatagtttcctttttttaaaaaattgatatgctatatatagagaggttttgcatgttttcatttaatagtatatagacagtatttctcaaaatattagatattcctgaaataatgacttttaatgaatatataatatacttatttcaatagaggaaatgtcagagtgagtccaaacaaactctgcctggctttatttgtcagcttggtacaaataaaccccagaggagttatgtttggcctcagcctgacgtttcatttgttgaaataagccccaaaggtctatgtgattttctcattcttgtaaacgtagtcatattgaagtcgagcaattactttgcaattttgtacctgacaaggcatttccagcagaagtaaagagaaattcagatagactaaaacataaaggaaatggtttataagagtttcctaactcatacaatctttagggaagaaatagttgtatttttgtatcattaaataatttcctaaactcaaggttagaagatttctatcactcatctaatctaaaatcccatttatctggggaatgttggcaaggatgatatatttactataatcctgatgcattaaagaatttcagatgatcatcaaaatggaaatgtcatcttcatatcccaggagggtttatattctggcttttctaaagtggagagctagagaattatcatatagcagagttcagcaattctcattcgcatcagttctttcttttctgttacttaagtttcacttgctgtttacagtgttagtgattgacctcatccttgacgcaacaatagtcttagagccatgtgccagtgattatacaggtgattgtgcaaaactagtgtagtacaaacctacagttacatatcctattgataatggagtagcactgtactattactgttactctttctataaggtaagaccagccaaacaaagggtattcttagccaggagtggtagcacacacctgtagttccagctactcaggaggctgagacaggaggattgcttgagcccaggagtttgaggctgcagtgagctataattgtgccactgtactccagcctgggcaacagagtgagaccatgtttcttt

SEQ ID NO: 12781 - DNA, 1991 bp, Homo sapiens
  CDS (52)..(1371)
agggagctctcgaggcaacgccggggcgcccgaggtctggaaggcgcagaaatggagcaagagccacaaaatggagaacctgctgaaattaagatcatcagagaagcatataagaaggcctttttatttgttaacaaaggtctgaatacagatgaattaggtcagaaggaagaagcaaagaactactataagcaaggaataggacacctgctcagagggatcagcatttcatcaaaagagtctgaacacacaggtcctgggtgggaatctgctagacagatgcaacagaaaatgaaagaaactctacagaatgtacgcaccaggctggaaattctagagaagggtcttgccacttctctgcagaatgatcttcaggaggtgcccaagttatatccagaatttccacctaaagacatgtgtgaaaaattaccagagcctcagtcttttagttcagctcctcagcatgctgaagtaaatggaaacacctcaactccaagtgcaggggcagttgctgcacctgcttctctgtctttaccatcacaaagttgtccagcagaagctcctcctgcttatactcctcaagctgctgaaggtcactacactgtatcctatggaacagattctggggagttttcatcagttggagaggagttttataggaatcattctcagccaccgcctcttgagaccttagggctggatgcagatgaattgattttgataccaaatggagtacagattttttttgtaaatcctgcaggggaggttagtgcaccttcgtatcctgggtaccttcgaattgtgaggtttttggataattctctcgatacggttctaaaccgtcctcccgggtttcttcaggtttgtgactggttatatcctctagttcctgatagatctccggttctgaaatgtactgcgggagcctacatgtttcctgatacaatgctacaagcagcaggatgctttgtgggggtcgtcctgtcctctgagttaccagaggatgatagagagctctttgaggatctgttaaggcaaatgtctgaccttcggctccaggccaactggaacagagcagaagaagaaaatgaattccaaatccctggaagaactagaccctcctctgaccaactaaaagaagcctctggcactgatgtgaaacagttggaccaaggcaataaggatgtacgtcataaaggaaaacgtggaaaaagggctaaagatacttcaagtgaagaagttaacctgagtcacattgtaccatgtgagccagttccagaagaaaagccaaaagaattacctgaatggagtgaaaaagtggctcacaacattttgtcaggtattacagtaatgttaatttttttccctgtatgacattaagcctttggaaccaaataaagatattgtttattagggaatactgagaaagataatattttgtattttggttttaaatgatcaatttagaaataaatgtagaaggaactagtcttttgaaacatcagatattgtcatataagtataaattcttcctggcctattattctgttttactattgggaaaatggatagtgaaaagcttcaggaatcttcaaattcttaatagttctgaatctaaaattagttatgttcgtttcccctttgaagctccctcttaacctccccctacccctgtccctcagctgtggtctgaatgtgtcccttcaaaattcatatattgaaatcctaacccctgaggtgatggttttaggaggtggggcctttggaaggtgattaggtcatgagggaggagccctcatcaatgggattagtcccttataaaagagatcccaaagagctgccttgtccctttcactatgtgaggaagcagtaagaaggtgtcattctatgaaccaggaagtgggcccctcaccagagaccaaatgtaccagcaccttagtcttgtacttcccagcctctagaattgtgagaaataaatttttgttgttaat

SEQ ID NO: 12782 - protein, 440 aa, Homo sapiens
MEQEPQNGEPAEIKIIREAYKKAFLFVNKGLNTDELGQKEEAKNYYKQGIGHLLRGISISSKESEHTGPGWESARQMQQKMKETLQNVRTRLEILEKGLATSLQNDLQEVPKLYPEFPPKDMCEKLPEPQSFSSAPQHAEVNGNTSTPSAGAVAAPASLSLPSQSCPAEAPPAYTPQAAEGHYTVSYGTDSGEFSSVGEEFYRNHSQPPPLETLGLDADELILIPNGVQIFFVNPAGEVSAPSYPGYLRIVRFLDNSLDTVLNRPPGFLQVCDWLYPLVPDRSPVLKCTAGAYMFPDTMLQAAGCFVGVVLSSELPEDDRELFEDLLRQMSDLRLQANWNRAEEENEFQIPGRTRPSSDQLKEASGTDVKQLDQGNKDVRHKGKRGKRAKDTSSEEVNLSHIVPCEPVPEEKPKELPEWSEKVAHNILSGITVMLIFFPV

SEQ ID NO: 12783 - DNA, 1820 bp, Homo sapiens
  CDS (106)..(825)
aatgtcttagaaaaaggctttctaaaagaaaaagagcaagaggccatttcttttcaagatagatacaaagaacttcaggaaaaacataaacaagaattggaagacatgaggaaagctggtcacgaagccctcagcattattgtggatgaatataaggcactactgcagtcttcagttaagcaacaagtagaagctattgaaaaacagtacatttctgcaattgagaaacaggcacacaagtgtgaggagttgctaaatgctcagcatcagaggctccttgaaatgctagatacagagaaggaactgttaaaagaaaaaataaaggaagctttgattcagcaatctcaagaacagaaggaaatattggaaaagtgtttggaggaagaaaggcaaagaaataaagaggcattagtatccgctgcaaagcttgaaaaagaagcagtgaaggatgcagttttaaaagtcgtagaagaagaaagaaaaaatttagaaaaagcgcatgctgaagaaagggaattatggaagacagaacatgcaaaagatcaagaaaaagtatctcaggaaattcaaaaagctatacaagaacaaagaaaaataagtcaggaaactgttaaggcagcaataatagaagagcagaaacgaagtgaaaaggctgtggaagaggcagtgaaaagaacaagagatgaattgatagagtatataaaagaacagaaaaggctcgatcaagtcatccgccaaagaagcctgtccagtttggaactgttcctctcctgtgcacagaaacagttaagtgctttaatagctacggaaccagttgacattgaataaaaagaacatgacaaacccacactggcattggataaatcatattacaccttcaaaatacacactctgaattataaagatgtgtttgttttctttccaaatcatgtagaattgatttccagttcaaggataaaccaaaacaatatttagaactatcaagtgatctaatttattttcttttggtttcttctttacatttactgttattttattattattagtagtagcagcaacagagtatgatatgacccaaaagccattgtaaagtgccacattaccaaaattaattaagtaaactttatagcctgtgggagtctattatatattattttgcaaaagtagtaaatatattattgtttcatgatgactcttgatgagatgctagaatgtaaccatacatttatcttattttgaggatagaaatagcatggatttcaacatcacttatttatctgtataattggaaataaaacaccgatatgatagagaatcattccggcattacctaacctcttctgcagttggatctatgtattttcattggtctactgaaaacgaacaatacaattaaaagcactaaagattattatattaattcaactttgatctgatatatcacttaaactaaaggggtgtgtgtggtgtatgcttgtttcctatttctgctctttaaagatactttgaatcaataaaaccattagtctacaaatcaaattgtgaacttaatctctagaaagagaatataactcagccatttataggaatttaggttcaagtacaggatatatgaaatcttttcccagtatttcagaatgtacttaattcacaggcaggatgcttcaatgcaaaatcatgaatatttttaattcaaaactaaaatgtcattaatatgtatgtatgcaaatgttttatcttattttctgaaatgcatctactttcatgggctttgtacgtttctgagatttctcagtgtaataaaaagagctcccaaactt

SEQ ID NO: 12784 - protein, 240 aa, Homo sapiens
MRKAGHEALSIIVDEYKALLQSSVKQQVEAIEKQYISAIEKQAHKCEELLNAQHQRLLEMLDTEKELLKEKIKEALIQQSQEQKEILEKCLEEERQRNKEALVSAAKLEKEAVKDAVLKVVEEERKNLEKAHAEERELWKTEHAKDQEKVSQEIQKAIQEQRKISQETVKAAIIEEQKRSEKAVEEAVKRTRDELIEYIKEQKRLDQVIRQRSLSSLELFLSCAQKQLSALIATEPVDIE

SEQ ID NO: 12785 - DNA, 1701 bp, Homo sapiens
  CDS (113)..(793)
agccgcctgctagtggcgctgctagccggccggcgcaggctgccgagcgggtgagcgcgcaggccaggccaaagccctggtacccgcgcggtgcgggcctcagtctgcggccatgggggcgtccgcgcggctgctgcgagcggtgatcatgggggccccgggctcgggcaagggcaccgtgtcgtcgcgcatcactacacacttcgagctgaagcacctctccagcggggacctgctccgggacaacatgctgcggggcacagaaattggcgtgttagccaaggctttcattgaccaagggaaactcatcccagatgatgtcatgactcggctggcccttcatgagctgaaaaatctcacccagtatagctggctgttggatggttttccaaggacacttccacaggcagaagccctagatagagcttatcagatcgacacagtgattaacctgaatgtgccctttgaggtcattaaacaacgccttactgctcgctggattcatcccgccagtggccgagtctataacattgaattcaaccctcccaaaactgtgggcattgatgacctgactggggagcctctcattcagcgtgaggatgataaaccagagacggttatcaagagactaaaggcttatgaagaccaaacaaagccagtcctggaatattaccagaaaaaaggggtgctggaaacattctccggaacagaaaccaacaagatttggccctatgtatatgctttcctacaaactaaagttccacaaagaagccagaaagcttcagttactccatgaggagaaatgtgtgtaactattaatagtaagatgggcaaacctcctagtccttgcatttagaagctgcttttcctaagacttctagtatgtatgaattctttgaaaattatattacttttatttctactgattttattttggatactaaggatgtgccaaatgattcggatactaagatgcatcgtttgaaatcatctagtgtgttgtatgcagttatcctcaaaaacatcagcgatgtctgaacctttaaaacatctgttagagcaaaattaaaagagcatttggtagtaatctaactttttgttcagttaataagtggttgataaagtttccatatttttctggaaaagttaaaaagttacatgtcatttggagaaaatacgtaatcagaaatttgtgcatagattgatgccaaaaaagacatttccagcattgtggaacatggtgagacactatataaaattccagaaagaaagcaactggatttacagatttattgtgagacacaaattcactgctgcctttacactaagaaatgtatatgttaaccatatatgctgtatttattttgtcgttaagcatactttcagtttactcagaattttcaatttgctataaagatgtatcaattagcatatagaaaaatattactttaagatgacttgtttcctttgaaaatacctgtgtactgagggttatgatttgtgtcaaaaattgacataagtgcttttacaagcaccaaagttgaatgaattttcaacaaaatgtaattaaagtctatgttttcagttatgactcaggttaagaaatgtgttttaggatctacttgctggtttttctttttgatccaaatgtgtgatctgccctgataaataacaagttatagtaccatctcccccgccaat

SEQ ID NO: 12786 - protein, 227 aa, Homo sapiens; identical to SEQ ID NO: 11492

SEQ ID NO: 12787 - DNA, 2068 bp, Homo sapiens
  CDS (41)..(1864)
atccgaggcaggcgttggttctgtgcgcctcaggagtataatgtctcaggaaggcgattatgggaggtggaccatatctagtagtgatgaaagtgaggaagaaaagccaaaaccagacaagccatctacctcttctcttctctgtgccaggcaaggagcagcaaatgagcccaggtacacctgttccgaggcccagaaagctgcacacaagaggaaaatatcacctgtgaaattcagcaatacagattcagttttacctcccaaaaggcagaaaagcggttcccaggaggacctcggctggtgtctgtccagcagtgatgatgagctgcaaccagaaatgccgcagaagcaggctgagaaagtggtgatcaaaaaggagaaagacatctctgctcccaatgacggcactgcccaaagaactgaaaatcatggcgctcccgcctgccacaggctcaaagaggaggaagacgagtatgagacatcaggggagggccaggacatttgggacatgctggataaagggaaccccttccagttttacctcactagagtctctggagttaagccaaagtataactctggagccctccacatcaaggatattttatctcctttatttgggacgcttgtttcttcagctcagtttaactactgctttgacgtggactggctcgtaaaacagtatccaccagagttcaggaagaagccaatcctgcttgtgcatggtgataagcgagaggctaaggctcacctccatgcccaggccaagccttacgagaacatctctctctgccaggcaaagttggatattgcgtttggaacacaccacacgaaaatgatgctgctgctctatgaagaaggcctccgggttgtcatacacacctccaacctcatccatgctgactggcaccagaaaactcaaggaatatggttgagccccttatacccacgaattgctgatggaacccacaaatctggagagtcgccaacacattttaaagctgatctcatcagttacttgatggcttataatgccccttctctcaaggagtggatagatgtcattcacaagcacgatctctctgaaacaaatgtttatcttattggttcaaccccaggacgctttcaaggaagtcaaaaagataattggggacattttagacttaagaagcttctgaaagaccatgcctcatccatgcctaacccagagtcctggcctgtcgtaggtcagttttcaagcgttggctccttgggagccgatgaatcaaagtggttatgttctgagtttaaagagagcatgctgacactggggaaggaaagcaagactccaggaaaaagctctgttcctctttacttgatctatccttctgtggaaaatgtgcggaccagtttagaaggatatcctgctgggggctctcttccctatagcatccagacagctgaaaaacagaattggctgcattcctattttcacaaatggtcagctgagacttctggccgcagcaatgccatgccacatattaagacatatatgaggccttctccagacttcagtaaaattgcttggttccttgtcacaagcgcaaatctgtccaaggctgcctggggagcattggagaagaatggcacccagctgatgatccgctcctacgagctcggggtccttttcctcccttcagcatttggtctagacagtttcaaagtgaaacagaagttcttcgctggcagccaggagccaatggccacctttcctgtgccatatgatttgcctccagaactgtatggaagtaaagatcggccatggatatggaacattccttatgtcaaagcaccggatacgcatgggaacatgtgggtgccctcctgagaatcttgaggcactgtgaaatttaagtgtatgacattgagccacaaacatggaatctcttctttgtactggatgtccacttcccttaaagtcttatttgcacccttacaaaatctttccaaaggtcactcttatgaatggatgttggttatacttttaatggacattaacattcctaataaagtattagtttcttaattc

SEQ ID NO: 12788 - protein, 608 aa, Homo sapiens
MSQEGDYGRWTISSSDESEEEKPKPDKPSTSSLLCARQGAANEPRYTCSEAQKAAHKRKISPVKFSNTDSVLPPKRQKSGSQEDLGWCLSSSDDELQPEMPQKQAEKVVIKKEKDISAPNDGTAQRTENHGAPACHRLKEEEDEYETSGEGQDIWDMLDKGNPFQFYLTRVSGVKPKYNSGALHIKDILSPLFGTLVSSAQFNYCFDVDWLVKQYPPEFRKKPILLVHGDKREAKAHLHAQAKPYENISLCQAKLDIAFGTHHTKMMLLLYEEGLRVVIHTSNLIHADWHQKTQGIWLSPLYPRIADGTHKSGESPTHFKADLISYLMAYNAPSLKEWIDVIHKHDLSETNVYLIGSTPGRFQGSQKDNWGHFRLKKLLKDHASSMPNPESWPVVGQFSSVGSLGADESKWLCSEFKESMLTLGKESKTPGKSSVPLYLIYPSVENVRTSLEGYPAGGSLPYSIQTAEKQNWLHSYFHKWSAETSGRSNAMPHIKTYMRPSPDFSKIAWFLVTSANLSKAAWGALEKNGTQLMIRSYELGVLFLPSAFGLDSFKVKQKFFAGSQEPMATFPVPYDLPPELYGSKDRPWIWNIPYVKAPDTHGNMWVPS

SEQ ID NO: 12789 - DNA, 1849 bp, Homo sapiens
  CDS (6)..(518)
tatatatgatccccttggcattgttgctgatctttgtctacaatttcatcagacctgtgaaaggcaaggtcagcagcatccaggacagccaggagagcacagacatagatgacgaggaggatgaagatgacaaggaatctgagaaaaaggggttgattgaaagaatctatatggtacaggatattgtttcaactgttcaaaacgtcttggaggaaatagcttcttttggagaaaggattaagaacacatttaactggacggtccccttcctttcatctctggcctgtttgattctggcagcagccaccatcattttgtatttcattccactgcggtacatcattttaatctggggcataaataaatttactaagaagcttcgaaatccctattccatcgacaataatgagctactagacttcctctctagggtaccgtctgatgttcaaaaggtgcagtatgcagaattgaaactctgcagcagccacagccccctgcggaagaagcgcagcgctctctagggcacacaccgactttggacagcagcacccaatattgtgtttggttgagtagaccaatgttatggctgtttcagtggtacccaaggtgtccttctgaaatgcatgccctgtggcaccctctgtatacttcctcctccttcacgtgcacagacatacacacatgtgcacacaccctcatgcatgggtgtcctagttgcgtagagggtcagcccagcgaaaagcaacaaccccaagactgtgaaagactaacatccattctgaaataggagataacaaggctgccatggatctgaacaccaccttccttgagaacagccaggagcccacttggattcaagagtgactttgaacttgttttcacacctccaacagactctcattaagattcagttatttccgctccccagccccacactcctttcagattatcgttcatgggcgtaagtctcttctcagagttaacaagtctttggtagtcatcctctgtccaaatattgtatattattaaaaggcatttttaataattaccagaattagctcaaacctttagggatctttcagccatgattattaaggatatgtatgtgaatttttgggaaacctctcggtgctggatgccagcctacagcagggtccattgctggcaatggatggcccaggaaggtccctagagatcactcacttgaaaaatgagggtcccatgaaagtatttggttgccttctgatgccacttcttctcactttactttttgcttattttcaaaatattataaaatgtcaacatataatttcagaaaggcaggtgggggtaggggagaaatgaatgaataaattctctaggtatttagaaagataagaaactgaagaccgagagactaataaggctgcttacctaattattataatcatttcatttgcctgaatgttttaagcaggaagtagaaatactttggctgcccaaatgtatcttttgttcctcttagaagtaaaataagctacatacaataaaaatttatttcagaaccccatttctagaaaataccaccccagagtcctcatttgatagcatctgtctcctgcagacctcatcattccacagtatttccctgccatgtaaaaatcctgactttgtgcgtatataaaatgtatgcaattaagtctgtttaaatgatatttaagttttaaagactgtattttgttgacacatactttgtgcagtttttatgtatgtatgtattataaaaaaagttaaggttaaaaacatctcatttaatagtgagttcactatttttttttttttgtctctgggttgtaatttaataatcttc

SEQ ID NO: 12790 - protein, 171 aa, Homo sapiens
MIPLALLLIFVYNFIRPVKGKVSSIQDSQESTDIDDEEDEDDKESEKKGLIERIYMVQDIVSTVQNVLEEIASFGERIKNTFNWTVPFLSSLACLILAAATIILYFIPLRYIILIWGINKFTKKLRNPYSIDNNELLDFLSRVPSDVQKVQYAELKLCSSHSPLRKKRSAL

SEQ ID NO: 12791 - DNA, 1564 bp, Homo sapiens
  CDS (116)..(1210)
ctccctccacctaccacgtctgccctcgccgctctagccctgcgccccagcccggccgcggcacctccgcctcgccgccgctaggtcggccggctccgcccggctgccgcctaggatgaatatcatggacttcaacgtgaagaagctggcggccgacgcaggcaccttcctcagtcgcgccgtgcagttcacagaagaaaagcttggccaggctgagaagacagaattggatgctcacttagagaacctccttagcaaagctgaatgtaccaaaatatggacagaaaaaataatgaaacaaactgaagtgttattgcagccaaatccaaatgccaggatagaagaatttgtttatgagaaactggatagaaaagctccaagtcgtataaacaacccagaacttttgggacaatatatgattgatgcagggactgagtttggcccaggaacagcttatggtaatgcccttattaaatgtggagaaacccaaaaaagaattggaacagcagacagagaactgattcaaacgtcagccttaaatttccttactcctttaagaaactttatagaaggagattacaaaacaattgctaaagaaaggaaactattgcaaaataagagactggatttggatgctgcaaaaacgagactaaaaaaggcaaaagctgcagaaactagaaattcatctgaacaggaattaagaataactcaaagtgaatttgatcgtcaagcagagattaccagacttctgctagagggaatcagcagtacacatgcccatcaccttcgctgtctgaatgactttgtagaagcccagatgacttactatgcacagtgttaccagtatatgttggacctccagaaacaactgggaagttttccatccaattatcttagtaacaacaatcagacttctgtgacacctgtaccatcagttttaccaaatgcgattggttcttctgccatggcttcaacaagtggcctagtaatcacctctccttccaacctcagtgaccttaaggagtgtagtggcagcagaaaggccagggttctctatgattatgatgcagcaaacagtactgaattatcacttctggcagatgaggtgatcactgtgttcagtgttgttggaatggattcagactggctaatgggggaaaggggaaaccagaagggcaaggtgccaattacctacttagaactgctcaattaagtaggtggactatggaaaggttgcccatcatgactttgtatttatatacaattaactctaaataaagcaggttaagtatcttccatgttaatgtgttaagagactgaaaataccagccatcagaaactggcctttctgccaataaagttgcatggtaaatatttcattacagaatttatgttagagctttcatgccaagaatgttttcttacaaaattctctttttattgaggtttcactaataagcagcttctacttttgagcctcaacttaaagcagaactgttttctactggatttttcattaacagcaagctttttcttttatgtaaaataaatctattgtgaattg

SEQ ID NO: 12792 - protein, 365 aa, Homo sapiens
MNIMDFNVKKLAADAGTFLSRAVQFTEEKLGQAEKTELDAHLENLLSKAECTKIWTEKIMKQTEVLLQPNPNARIEEFVYEKLDRKAPSRINNPELLGQYMIDAGTEFGPGTAYGNALIKCGETQKRIGTADRELIQTSALNFLTPLRNFIEGDYKTIAKERKLLQNKRLDLDAAKTRLKKAKAAETRNSSEQELRITQSEFDRQAEITRLLLEGISSTHAHHLRCLNDFVEAQMTYYAQCYQYMLDLQKQLGSFPSNYLSNNNQTSVTPVPSVLPNAIGSSAMASTSGLVITSPSNLSDLKECSGSRKARVLYDYDAANSTELSLLADEVITVFSVVGMDSDWLMGERGNQKGKVPITYLELLN

SEQ ID NO: 12793 - DNA, 2551 bp, Homo sapiens
  CDS (4)..(2466)
gacatgcattaccgggtaaaggagaagattatcaagaagtttgagtgcaacctcctggtggtgtgtgccaatcacatcatcctgtgccaggagaaacggctgcagtgcctgtccttcagcggagtgaaggagcgggagtggcagatggagtctctcattcgttacatcaaggtgatcggtggccctcctggaagagaaggcctcttagtggggctgaagaatggacagatcctgaagatcttcgtggacaatctctttgctatcgtcctgctgaagcaggccacagctgtgcgctgcttggacatgagtgcctcccgtaagaagctggccgtggtagatgaaaatgacacttgcctggtgtatgacatcgacaccaaggagctgctttttcaggaaccaaacgccaacagtgtagcttggaacacccagtgtgaggacatgctctgcttctcgggaggaggctacctcaacatcaaagccagcaccttccctgtgcaccggcagaagctgcagggctttgtggtcggctacaatggctccaagatcttctgcctccatgtcttctccatttctgccgtggaggtgccgcagtccgctcccatgtaccagtacctggataggaaactgttcaaggaagcctaccagattgcttgcttgggtgtcacagacactgattggcgtgaactggccatggaagcgctagaaggtttagattttgaaacagcaaagaaggccttcatcagagtacaagacctccgatatttagagctcatcagcagcattgaggagaggaagaagcggggagagaccaacaatgacctgtttctggcagatgtgttttcctaccaggggaagttccatgaggccgccaaactgtacaagaggagtgggcacgagaacctcgcgcttgaaatgtacaccgacctctgcatgtttgagtatgccaaggatttccttggatctggagaccccaaagaaacaaagatgctaatcaccaaacaggctgactgggccagaaatatcaaggagcccaaagccgccgtggagatgtacatctcagcaggagagcacgtcaaggccatcgagatctgtggtgaccatggctgggttgacatgttgatcgacatcgcccgcaaactggacaaggctgagcgcgagcccctgctgctgtgcgctacctacctcaagaagctggacagccctggctatgctgctgagacctacctgaagatgggtgacctcaagtccctggtgcagctgcacgtggagacccagcgctgggatgaggcctttgctttgggtgagaagcatcctgagtttaaggatgacatctacatgccgtatgctcagtggctagcagagaacgatcgctttgaggaagcccagaaagcgttccacaaggctgggcgacagagagaagcggtccaggtgctggagcagctcacaaacaatgccgtggcggagagcaggtttaatgatgctgcctattattactggatgctgtccatgcagtgcctcgatatagctcaagcagatcctgcccagaaggacacaatgcttggcaagttctaccacttccagcgtttggcagagctgtaccatggttaccatgccatccatcgccacacggaagatccgttcagtgtccatcgtcctgaaactcttttcaacatctccaggttcctgctgcacagcctgcccaaggacaccccctcgggcatctctaaagtgaaaatactcttcaccttagccaagcagagcaaggccctcggtgcctacaggctggcccggcacgcctatgacaagctgcgtggcctgtacatccctgccagattccaaaagtccattgagctgggtaccctgaccatccgcgccaagcccttccacgacagtgaggagttggtgcccttgtgctaccgctgctccaccaacaacccgctgctcaacaacctgggcaacgtctgcatcaactgccgccagcccttcatcttctccgcctcttcctacgacgtgctacacctggttgagttctacctggaggaagggatcactgatgaagaagccatctccctcatcgacctggaggtgctgagacccaagcgggatgacagacagctagagattgcaaacaacagctcccagattctgcggctagtggagaccaaggactccatcggagatgaggacccgttcacagctaagctgagctttgagcaaggtggctcagagttcgtgccagtggtggtgagccggctggtgctgcgctccatgagccgccgggatgtcctcatcaagcgatggcccccacccctgaggtggcaatacttccgctcactgctgcctgacgcctccattaccatgtgcccctcctgcttccagatgttccattctgaggactatgagttgctggtgcttcagcatggctgctgcccctactgccgcaggtgcaaggatgaccctggcccatgaccagcatcctggggacggcctgcaccctctgcccgccttggggtctgctgggctgtgaaggagaataaagagttaaactgtc

SEQ ID NO: 12794 - protein, 821 aa, Homo sapiens
MHYRVKEKIIKKFECNLLVVCANHIILCQEKRLQCLSFSGVKEREWQMESLIRYIKVIGGPPGREGLLVGLKNGQILKIFVDNLFAIVLLKQATAVRCLDMSASRKKLAVVDENDTCLVYDIDTKELLFQEPNANSVAWNTQCEDMLCFSGGGYLNIKASTFPVHRQKLQGFVVGYNGSKIFCLHVFSISAVEVPQSAPMYQYLDRKLFKEAYQIACLGVTDTDWRELAMEALEGLDFETAKKAFIRVQDLRYLELISSIEERKKRGETNNDLFLADVFSYQGKFHEAAKLYKRSGHENLALEMYTDLCMFEYAKDFLGSGDPKETKMLITKQADWARNIKEPKAAVEMYISAGEHVKAIEICGDHGWVDMLIDIARKLDKAEREPLLLCATYLKKLDSPGYAAETYLKMGDLKSLVQLHVETQRWDEAFALGEKHPEFKDDIYMPYAQWLAENDRFEEAQKAFHKAGRQREAVQVLEQLTNNAVAESRFNDAAYYYWMLSMQCLDIAQADPAQKDTMLGKFYHFQRLAELYHGYHAIHRHTEDPFSVHRPETLFNISRFLLHSLPKDTPSGISKVKILFTLAKQSKALGAYRLARHAYDKLRGLYIPARFQKSIELGTLTIRAKPFHDSEELVPLCYRCSTNNPLLNNLGNVCINCRQPFIFSASSYDVLHLVEFYLEEGITDEEAISLIDLEVLRPKRDDRQLEIANNSSQILRLVETKDSIGDEDPFTAKLSFEQGGSEFVPVVVSRLVLRSMSRRDVLIKRWPPPLRWQYFRSLLPDASITMCPSCFQMFHSEDYELLVLQHGCCPYCRRCKDDPGP

SEQ ID NO: 12795 - DNA, 1439 bp, Homo sapiens
  CDS (11)..(1003)
atcttcaagtatggggtctgctggcttgtcgcggctgcatgggcttttcgcggtctataagcccccggggctaaaatggaagcacctgcgggatacagtggagctacaacttctgaagggtctcaatgccaggaagcctcccgctcctaaacagcgtgttcgcttcttgctgggccccatggaaggcagcgaagagaaggagctgaccctcacagccaccagcgtaccctctttcatcaaccatccactggtatgtggaccagcattcgcccatctcaaggttggcgtgggacatcggttggatgcccaggcttctggagtacttgtgctcggcgtgggacatggatgcaggctcctcaccgatatgtacaatgctcatcttaccaaggattacacagtgcgtggcctcctgggcaaagctacagatgacttccgtgaggacgggaggctggtagagaagacaacctatgaccacgtgaccagagagaagctggaccgcattctggccgttatccaaggctcccatcagaaggccctggtgatgtactccaacctcgacctgaagacccaggaggcctatgagatggccgtgagaggcctgatccggcccatgaacaagtccccgatgctgataactggcatccgatgcctctactttgcacctccggaattcctcttagaggtgcagtgcatgcatgagacgcagaaagagctgcggaagttggttcatgaaatcggcctggaactaaagaccactgctgtctgcacccaagtgcggcgcacgcgcgacggcttcttcacgctagacagtgccctcctgaggacccagtgggacctaaccaacatccaggatgctatccgggctgctacccctcaggtagctgcagagctggagaagagcttgagcccggggctggacaccaagcagctccccagtccgggatggtcctgggactcccagggcccgagctctaccttggggctggagaggggtgcggggcagtgaatgcccaggcagctcctggggcagtggatggataaatagaagaactgctatgagctggacctgatagctgtgcagaaagtgagagcaggggcaccttttctacgtaagacacaaaactcaagctgtaacagaaaggtcaatggacttgacccaactgagaaggaaaaacttctgtatggaggaaaagacagtaaacatgacagactgatagaaagtattggcagaccaggcgtggtggcgggcacttgtaatcccagctactcccaaggctgaggcaggagaattgcttgagcccaggagtttaaggttgtagtgcgctagacggcgcctgtgaatagccactgcactctagtctggggaacatatgagacccctgccatctcaaaaaaaaaaaaattctcaataaactatgtgcccacgaaaattaaaaatt

SEQ ID NO: 12796 - protein, 331 aa, Homo sapiens
MGSAGLSRLHGLFAVYKPPGLKWKHLRDTVELQLLKGLNARKPPAPKQRVRFLLGPMEGSEEKELTLTATSVPSFINHPLVCGPAFAHLKVGVGHRLDAQASGVLVLGVGHGCRLLTDMYNAHLTKDYTVRGLLGKATDDFREDGRLVEKTTYDHVTREKLDRILAVIQGSHQKALVMYSNLDLKTQEAYEMAVRGLIRPMNKSPMLITGIRCLYFAPPEFLLEVQCMHETQKELRKLVHEIGLELKTTAVCTQVRRTRDGFFTLDSALLRTQWDLTNIQDAIRAATPQVAAELEKSLSPGLDTKQLPSPGWSWDSQGPSSTLGLERGAGQ

SEQ ID NO: 12797 - DNA, 2077 bp, Homo sapiens
tcttaaaatgatttctgtctgtgctgcgaaacaaagacaaggtgaggtgtttttcttttttgtaataatataaagctgtgtgtttctgattggatgattcactatgtgcattgttttctcctaagtgcttttagtaggtagcaatcaaatggtgtaaataaggatgttcttttcctgttccttttatttttttctctctttattattcttttattgacaccactagatagctggccactggtcatgccattgccaagatgaagaaaaagcaaactacactttggcctctggttctgaattgcagaaatcaaaggatgcagtaggtgtctatgtcagaattatggatcagaggcagacaatgacgagtgaagatggttgtgaagccctcttcattcctggaggagcctgcatctcatctctcaggccctctttctctgtgggtctcatgaacagcagtggggaccattgagcacttgaatggcctgtttgtctatgggcttgcaaaggacaagcagagttcacagagctcaggatagaaacatcagagcctcctccacgggcttcagtgaaactccgatgaactgtacctgagggaattttttcttaatcaaccccttgtgtggatgaatacaggaacaacaaaacttgtgtacgtatgaaagtcatgttgttaagcagttatgatttaagaggttttaagtcagagggatcatctggaggccggctttgtgcaagcttttacagccttctgcagtgtccttaccctggctgtacatggggaagggctatgtgtaaacaagtgctttagaggcctctgagagtttttaaaaatcagacccattaacaaaagagagggtttcttaggaacaaagcaactattttgattactgagatctctgttttgtttctgtgagttactctgtattcctttccccatttcactcttgcccttcacatcttaaatgtccataagaaacccttgcatgtgttggtattctgaggcatcccgtgggaaagtcccctaagtcccattttgtacttcaacaaaaaatgactgtagcagaagataagtggagacttttatggatatactactcattttacttaaaatctacccagttcagacttgaatgtaaacttgtattaggggaaaattctccaaagagggttttctacatacacagaagcagttcaacttctcaagttaattttgataagcagaatctactactggccagagcgacaggagtggctaggggttgccagccagtccctttctgatgatcaaggccctgcacagcaggatgccacaggatgcccctgccatctagctggaagcatcaaaagtccctctgtatgacccggtgtaggaaagagggttgtcaggatgagaaagtggggctgcagggtgacgataagaccacctaaccaactccccacctccaccaccacaataagaacaaaactgtagggctctaaagagagggggtggtttacaagtttattgagcatttactaggaagtgacatggcgatgacctctgtacatgagttaggttcactttcatgtggcctcccactacagagatgcgtatgcccagaagtcagctctctgaggagacaggctactttggccccagtttgaagcattctgtccaaatgtcctgagctctccagcagtcaagtagtgaatggataccatacttattatggttgatgaaaaaaggcagagcttatcctcaattttttttagggaagagaaggaataaaataaaagtggttcaagctgggcatggtggctcacacctgtaattgcagcactttgggaggctgaggcaggcagatcacttgaggtcaggagttcaagaccagcctggccaacagggtgagaccccatctctactaaaaatacaaaaattacccaggcgtgatggtgggcgcctgtaatcccagctacacaggaagctgaggcaggaaaattgcttgaaccggggaggcggagattgcagtgagccaagattgtgccacttcattccagcctgggcgacagagcgaaactctgtcaaaggaaaggaaag

SEQ ID NO: 12798 - DNA, 1969 bp, Homo sapiens
attttgtatgcgatcgtggcaggattgcggacgggcagcactctttctgcagaaggtaaaaatcaccttgctgaggaagcttttcgtctgctgattcttctttgtgacatcggggaataaggatttatttctaacagtcttgggggctcgtctgggatcacccagtctccttcgggtcggggtctctgattcccgcccccccaccaaggggaggcgccccactgccttactgcggtggcctcagggactgggaatccggacttacctgttgtgatgaataaacccggaccctcagcaacgtggaaaacggcgaataggcttgcattgcactgcctcggggaccagataaactctgttcacagagcaaagtaaagaaacgtcgcaagggtgcgacaaagtacttgcttggtggtcgggatattctggaggttaaaagtgtgtgtgaatagtcacaagcctcactgcagctggtgttgcttgtgtaaatcatgataagtcctactgctggaccgagcgagtgagtcttgcctgcggttccgtggctacctcatacggcttaaggcggatcttgccttggggtttataccggcacgccaatgctaagaggggcctaaattcccgtgaggaaagtggccaggtaggacaaagcgagtgaagagtgtaaaaagcctccagaaagaaaaagaggagttaaatcctcctcagggaaaacgaaacctcaagcacgtaaggttaaaaatataagcaagccaggaaaaaacaggatagacaagaaatctccaggattaagaggttaagtctacctgatattcaatatgggaaaggtttctagtaaatcgggggcaaaaaaagatgcaagttatcaaatccctcccgatagtcctttaaggctcatgttaaagtattggaaagataataaaaaaactaaattaaaaaaaagcagcagataattaagtattgttgctttatttggactaaaaagccaattctcaagccagcggttttttggtcaaaatttaggtcagataaagattaaatctgtcaacttttaataatatatgtttatagcaaaagtcctgtgtcacaagaaaaattgattatgctttgtgctagcggcaagggcctatattattctttatcctttaaaaacgatcaaagggggactagaaaataaaaaacagtcaaaaatggccttatctaataagagataggaccctctagaccaccttcccccgtttcttaataacctgccgacacctccccaggtagctgctgctgtcctagatccccttctggacctgatccctgacccagctgccactccaggcccccctgccactccaggcctcccccatataacccagattcttgtgaatcccaggagcctaaaaattctaaatatccttctttaaagaaaagactccaacaaaaattaaaacaatgtaagaaggatattcagaatttcccttttcctgccccccaaaaaagttaacttcaacattctttcctttaaggaaagttccccaaggaggagaagctattggttttgtggatgctccccttactgggtctgaagtttggagtataaaaagagaactaaagccactgttaaataatcctaacagggtggcagatcaaattgatcagtttttaggcccacagttatatacttgggctgaatcagtgtgcatcctaggtattattttttcaaggaaaaaaagaaatacgatctgggaacgtaaacatcctccaggtcaaaatgttctggcagcaaatcataaattccctgctcaggacccgcagtgggataaaataatgctgcccaccgaaataatataaggaattttttaaaaaataataatcagggggattcaaaagtcagcacccagaccccaaaacctttccaaagcatttaatgtccaacaaaagaaagatgaaggacctatgaggttcatagataaattaaaag

SEQ ID NO: 12799 - DNA, 1941 bp, Homo sapiens
ttggtgatgtgcacgtttctgaatttcaagattttttttctgtgtccttcagggagaataaatttctatatagtgtcaagatgctacataatgggataaagaattatagttaagtgggtgaatctcattgtgctttttgtactgtgtagcataataccaaattcctctattcactaaataaacattgtgtgaatactgtcctaaaacagcctgttgaaggatacaaaaggatatctagaaaaagcagttgaggattggtttggattgtttcaagtgataccaaaatatttattttgaggtaaatagccacagtagtatagagccaagaggtaagcacagatcaaacatatttaagggctatctaaaaataataaggaatttggacatttttctgtaggcaacagagcaggcttttcacttaggatgctgtcattgaagaatttggccatgatcaaagtagccctttatgtagttaaatgggggtctctttaggcttcatagattttgcatgtttgggtttctatttagtttgttttctctgatggacaaaggcaggggaccagattctgtattatcctggaaggactgtgggaatgtgtcaaaggagaaccgaatttgaacactgaccttgtcattaactagctgcatggcttgagccatatcacctgtcaggatttcagcttccctatttgcaaaatgggaggtagaaggctgttggaataggtaatgttaaagcttcttagaatggtcaccttttatgatttttgtgacaatcatggacaactctcgccttttgtcttttagaagataatccagactgatattcatcccaggaaatttaaaacccaaaatatagttaaacaggactctgaaatacattttcacttaaaaacaaagcaccaggaaaaaatgagctgctactacaagttaagtgactttggaatttggacaacattgagggttactgccctaatttttaaagttttttaatgctatttaaaattaaacaaatcaatgcctgtttaacatttctaatagttcttcatacgtactaagagcccaatttaattatattcccaatagagttgttaaattatgaataagcacaatttagtttgtaaactacataacgcagtgcttgggaacatactgtatcctcgaaactgctagtttcaattcacttataggcccttctaagttgagagtatcagtgctactcggctatgcttttggatgccttcctgtaggaactgaaccttttgtgcaccacaagtggctgggcctcagttatgggcagatgagtgagtctgaaggttgcaggttatgttaagcatagtggggggcagggttagagggttgtgaggggaagagctctatagaggaagacagaaatggcaaaatgtacttgatagcctcaatttgttcttacacaatctctctggttcataaatgaggacagagacattaatcttaaagtatacacgtggaagtgcttcttttaatgattttccagttagtgtgcaatgttctcatctggtgcataagtagattttattgcaaaggccagagcccctgctggacatggatgaaacctcaacatacacaaggaaagatggaaactctcttggtggagaaaaacaaaaaaaaatactttaagaataggaaaaataggccaggcgcagtggctcacgcctataatcccagcactttgggaggtggaagcttgagcccaggagttagagaccagctcggacaacgtggcaaaactctgtctctacaaaaaaatacaaaaattggctgggtgtggtggcatgcgcctgtagtcccagctacttgagaagctgaggtgggaggatcacttgagccccaggggtggaggctgcaatgaactgtgattgcgccacagcattccagcctgggcgatggagtgagacctcacgt

SEQ ID NO: 12800 - DNA, 1808 bp, Homo sapiens
tgacaaaaaacaggttgggcacaataaacaaccaagtataaggagctcagaagatttccatctaaatagtttcaataatcctccaagacaatatcagaaaataatgaaaaggctcattaaaagatatgtactgcaggcccagatagataaggagagtgatgaagtgaacgaaggggaactgaaggaaattaagcaggacatctcaagtctccgctatgaactccttgaagaaaaatctcaaaatacagaagacctagcagaacttattagagaacttggagagaaattatccatggaaccaaatcaagaggaaaccaatagataatgcgaagacttccttagaaattcatatttatttgtccacttgaagccatattattttctgatttattttcttaagtgccaatgggcccaccttttaaacaagaaaacgttaaataacttgggccatcctatcatctggagccctagtatctaatttttttggtgattaaactccattgttcagggtaaaggctgtagataatgaggaaaattatgcccagttgtttggtgcttgttttataaactgctttcttggatataactaactcttgtgatgatgtcattgccatgtagtgtctgcctgaaaatgggtcccagcggacaggggctgacccacgttactccccatgcggtttttcctctgaagtttatttcaggttccttcttgcctgctctgtggatcccctgctggggactcccagctctgaaatttgggaaaaagtagcccatgggcctttagaatgctttaatcctttctttagaatgctgtttaaacaccatttaccctacttatccctcaatgcacatgattgataccgttcatacaaaatgggcttacatctatgtaaaattttctgattcatctatttgaaaacattacacttaacaatgaaaaaagtttttcctccactgaaccctggaaacatggtccagttttgtgtgtgtgcgtgtgtgtaaatgtgtacacacagacataaagtacttgccctatttagtttgtggctaatgtggacacacaaaagctctttatgttataaatttttattgtcactaaaaaattttactgtctaaataagtaccttttattggagaaaaatcaaaaccccaaacaaacactgtggttgtttggttccattatagcacaattttgtgccatttctgggagcatttacagatgaatccccacacttagccattgaatgtaaaggggaaaaataaggtgagaatttgtaaatacttatctgttattttcaatatgttctatccttctacccaaatatataaaacaggaatttgcattcatgtgcatttaccaagaggttgttgttgttacttactgatcatgtgaagtggtgtcttaaacaactaaaagcgatgaaggttcatatgtttactcaaagaccattggcattcagaggatgctggacattaactggaactgctacttccaattcaataatgggagatttcaaatgcaaatctttaacttcatcttaaagatgaaatggttgcagaaaatctgtttagctccaactttggcttaatttaaatcaaagaacatttatgtaaccagatcagaaaatacagctgaaaatttatattcagtgattttgtatttgtggatactacttatggaaaagttacttggtgatacataaagatcgattttcaaatattttgtgacagtatttgaatcagcagttgtaaaaaatcaacctcatactgaatgcactatcagcaaattaaaataatctaacatccac

SEQ ID NO: 12801 - DNA, 1766 bp, Homo sapiens
  CDS (30)..(485)
tattattcaagatcaaaccagaagatgccatggactttggcatctcccttctcttctatggcctctactatggagttctggaacgggactttgcagaaatgtgtgcagactacatggcatctaccatagggttctacagcgagtcgggcatgcctaccaaacatctttcagacagtgtgtgtgctgtgtgtgggcagcagatctttgtggacgtcagtgaagaggggatcattgagaacacgtataggctgtcctgcaatcatgtcttccacgagttctgcatccgtggctggtgcatcgtgggaaagaagcaaacgtgtccctactgcaaagagaaggtagacctcaagaggatgttcagcaatccctgggagaggcctcacgtcatgtatgggcaactgctggactggcttcgatacttggtagcctggcagcctgtcatcattggtgtagtccaaggcatcaactacatcctgggcctggaatagtgatgaagagcatcagtggaaaacccaccccacacgccatggacctcagggcactctcctccctgcccacaaagacctcctgggtgggaaagactcaaaggggcgcttgggccactcaggacccctccggctgtgtcggactggggagggatatgatggagagccagccagtggggctgtcagcagtggggggctttttaaaagaaaactattttgatgaatatatttaaaaaacctttttttattgtggagcataggaattgcccccctccaggcttcaccctccctgcctaagcagggtgggggcagagccatgacatttttggtttaaaggagccttctcatctctggccgagaacactgctgggctcccaggtagctgaaggcctcagcccacccactcccttcttccctgtgtggggctcaagcctggtgcacttagtatagaagagctaacgtactcaggcttgtgccacgggtgagcactgaggccccaggtgtcctccctcccccactgtctgggacacaggacaggtgttgcgtctgactctgtctccccctgtccaagagctataggctggttgaggcaagtggaaccttatcagtgacttggccaacaagggaagccttggggcctcagaattcattgaaaatttgttttgggacaactggaagaatcagcaccatggatactcgcccgtgggcagggctgtggtcagccaagaatagaggtcatatagttgggccatggggcaattgttggcagccatgactgacggccccttgtgcaagctcattcttcagtggatccttcagtggagtggtgacacgtgccagcggtcactctgccacatcacttccttcttgaaagcctaagagtgcgtatgcgtgtgtgtgtgtgtgtgtgtgtacgtgaggcagaagaatatgacagatgtcagcttctccctgtgtcagatgatatgtccttgaagctggcaggggattcccagtccagggaatatccctacatgatttttgtcattcatgggtcctccctgggcctgacaacgggagtggtgggtgggtgagaacaggttctgagagggggcttctaggaaggccccagccctagtcctaggcgacttgaataaagtgggaggtcaaacatgggccttcggcattgggtttctagggaatatggctcagtagggcctgccccttcaagggcagcaagaacgaagcaggatgttgtcactcccgtctgaataaagctccatgagctgggttggaaagctg

SEQ ID NO: 12802 - protein, 152 aa, Homo sapiens
MDFGISLLFYGLYYGVLERDFAEMCADYMASTIGFYSESGMPTKHLSDSVCAVCGQQIFVDVSEEGIIENTYRLSCNHVFHEFCIRGWCIVGKKQTCPYCKEKVDLKRMFSNPWERPHVMYGQLLDWLRYLVAWQPVIIGVVQGINYILGLE

SEQ ID NO: 12803 - DNA, 2196 bp, Homo sapiens
  CDS (30)..(416)
gaggccaagagcgcgggcggcgaggcaagatggcggcaaccaagaggaaacggcgtggaggctttgcagttcaggcgaagaagccaaaaagaaacgaaatagatgcggagccgccagctaagcggcacgccacagcagaggaggtggaggaagaagagagggaccggatcccaggccccgtttgcaagggaaagtggaaaaataaggaacggattctcatcttttcttccagaggaataaattttagaacaagacatttaatgcaggacttgagaatgttgatgcctcattctaaagcagatactaaaatggatcgtaaggataagctatttgtgattaacgaggtttgtgaaatgaagaactgtaataaatgcatctattttgaagctaagaaaaaacaggatctctatatgtggtaagagaatgtattaagattttggttaaactcatttaagtggatttgttctttgtaccttttatgttatagactcctagtgtttcatgttaagggttgagaatgaagcaaacttttgatttcacgaaacttgatacctttaaagaaaattaaatgtataaatattataagcatattatttatggtgaataggtggtaagcattgactacatttgctaattagtggaaaaagcttactccatatctttcaggctttcaaattcacctcacggaccatctgctaaattccttgttcaaaatagtaagttgactcaataaatttttttagatgaggaaattaaaagtaatcttttgaaatagttgtgcaaaagttacaactatttttgtttttgttgtaatttttctagttcataccctcgctgaactgaagatgactggaaactgtttgaaaggttctcggccccttttgtcttttgaccctgtaagtttctcattcagtgtatgaggtctaattttcttatctggcatggttgtttttagtagatatagttgtgttattcaatttagtttcacccccaccttggttttatggattatcaattctttcaggtacatttataatgaggttatagccaagttatagaaacaaatgagcaaacagttttaaacaaggcagtctactgttaaataatatgcttaccttatttttataggcttttgatgaattaccacattatgctttgttaaaagaactcttaattcaggtaaatatctttaaaattagctatccaaaatatacatgatatatcttggaataaggaactaacatacacttttttaactagatctttagtacaccacggtatcatcccaaaagccaaccatttgtggaccacgtgtttactttcaccattttggataataggatatggtttcggaactttcagatcatagaagaagatgctgctcttgtagaaataggacctcgttttgtcttaaatctcataaagattttccagggaagttttggaggaccaactttatatgaaaatcctcactaccagtcaccaaacatggtaagcggttgtgtcattcagtagtcttcaatgtaccagaaccctttggccaaaatgattctgtgaagtaattgctgttttattacctgtgaaactgaatttggtttttgctgcatagaaacttggaaattactcccttttttcatgacactggctgaaaggatatatggttcataactgaaagtctttgccttatataaaatgtttatttttatttcaaaagcatctaatcttttttttttttttttagcatcggcgtgtcataagatccatcacagctgcaaaatacagagagaaacagcaagtgaaagatgtgcaaaaactgagaaagaaagagccgaagactcttcttccacatgatcccactgcagatgtttttgtaacaccagctgaggagaaaccaatagaaatacagtgggtaaaaccagagccaaaagttgatttgaaagcaagaaagaaacggatttacaaaaggcaaagaaaaatgaaacagaggatggacagtgggaaaacaaaataagtcaatggaaacctgatttgtttttcagttactttatatttattttgtattcaatgtgtaaatacttttattatctaatactatcttacgtctaattagtgtagcatttacaagaaagaaaaattaagatcttaaaatcagtgattatctttttctaaataaaatatcaccagaattcatcagtt

SEQ ID NO: 12804 - protein, 129 aa, Homo sapiens
MAATKRKRRGGFAVQAKKPKRNEIDAEPPAKRHATAEEVEEEERDRIPGPVCKGKWKNKERILIFSSRGINFRTRHLMQDLRMLMPHSKADTKMDRKDKLFVINEVCEMKNCNKCIYFEAKKKQDLYMW

SEQ ID NO: 12805 - DNA, 1874 bp, Homo sapiens
tatcatttttaatttcaagtacatatttttgaagtaaatcaattgtatatattaactattcaactgtctcttggtcagtccattataataaccctattttaatttttctttcctttttaatgcacccaaagtcttttatttacttttttaactacagccacactttgagcaggtatggaacacaatcattgattaatctaatatatacaatagggagaaccgtaactacagatttacagattgtggagctgcagcagtttttcagtaacatgttggaggaacaccagaggatcagagttcatgccaacttacagacaataaagaatgaaaatctgaaaaacaagaagctaagtgccaggatagctgcgtggctaaggagaaacacatagcttgtggctatctttcagcactcctcttgcatattataatgtagtttgttcacagttttgtcttccaatactttgtgagtctggaaaaccacacattttatttgtatttcagtcacatttattactcagagtgccattcttctcatattgtcatgtttggccctgagggtgggtgattgctgacaattttgccaatgctgctgtatttctgggaaagatgtcacttcatgttgggttataatcccacagaatttactttaaatgtcacgtaaaaacaaattcacctaagatagtcttgcttattttgttgcgaaggccagtggaatataaaagtcaatggcattaatgaggagcacattctttgctgagggaaataacagtttttccaggccctagggtttatttagttcaacattgaagattgaaaagactaatgagaagataacatgacaatataaaaagacagaaactcaaaaagtatattcactagaagacagtggagccaaagaaaagcaagttgaaaaagaaagaggagacaatttaacgagccctaaaggcaagaagtgtgtcttctcctgcccatttctctctcccacagtacatcctgcattgaaccacgtgttgctggttactaaactttatggtgtcacaaaaagacaaatgattgtaggatccatggaagtgcacttaggcttgctgtggtggaggccatagtggagatgaaggctctgctctgaagctcttaattgtgtattcaccagtgggatggacaccctttcagcctaagcgtacgagtgaaaacaatgatgtcaaaagacaatagcaagtataggctactatttagggcaaaaggaatcttgaaatgaaagaaacagaactaaaaggctaactggagcataatccttacagttttgcactcaggggattaagtttgaaacatagtgtcttttggccaaattgaacctacttgtaatgtggaccaacttactttacacattttcatcagtcccaatgtatggaattagcttagttttctcatgcttgattaaaacaagacaactaaagctaatcattcctcttctagactttgtgtatatgatttaatcttttatttttatttttgtagaatgggggtaaaactacaaatctcctcctcagggtgatatttttaaagattaaggagtatgacatcaattaacagtctttaaagatgttacatacgctcaaagcaatgtgattaagactttttgcctatttcttgtataagttaaggcagccataaatgaaaatacaaaacaaacgtttgcttttgtatttgattcacaagaggattctccctgagtgtcaggggaggctgtgggacttcaccacgtggacaaacgaaagcacaggctactcagacttggccacaggtcataggtcagagaattttttcttcaaatgtagaaatgtaaattttcagcaataaaatatctgcatgcctac

SEQ ID NO: 12806 - DNA, 1920 bp, Homo sapiens
  CDS (1)..(549)
atggaacagcggttagctgagtttcgggcggcgcggaaacgggcgggtctggcggcccaaccccctgctgccagtcagggcgcacaaaccccaggagagaaggcggaagcagcagcgactctaaaggcagccccaggctggctaaagcggttcctggtatggaaacctaggcccgcgagtgcccgggcccagcccggcctagttcaggaagcggctcagccccagggcagcacatcagagacaccatggaacacagccattcctctgccgtcgtgctgggaccagtctttcctgaccaatatcaccttcttgaaggttcttctctggttggtcctgctgggactgtttgtggaactggaatttggcctggcatattttgtcctgtccttgttctattggatgtacgtcgggacacgaggccctgaagagaagaaagagggagagaagagcgcctactctgtgttcaatccaggctgtgaagccatccagggcaccctgactgcagagcagttggagcgcgagttacagttgagacccctggcagggagataggacccagctgtgctgtcatgcagctaacctctgatgtggtcttcctcaccattggctatggatttgatttcaggtgtataggactaagggcagcttgcgggttagctctgtgactgcatagtttttctaccttctttccctgatcttttgctgccgtttgatctttgatagttttggtgaaactctctaaaatacattcactgtgggtccgacgcaatttataaaaattatgtactcaagaagggagacctgtttgtttcatttctcatctgtttgggagatgattttagagcactagaaaggcactggggagattctcagcttaaaacatccagcagtttgaagtatgattaggtacatcagggctgcattgtcaatgttctctttaagtcttttaacatttatagcaattttttttttcccggagagtttaggttgcaagttttgggtttcttgtttgtttttgttttgcttcctgctttaattctttaattttcagtcattactggtattgaaaaataaaatatctttaaaacatctcctcttcagaaataggtccctcttcattgcccatcaccatcttccactctcctattattttgccactactcagtaaaggaaggtaggaagagacaaacgcctaagtgcaggtgtggggagggatttcacaagtggttattaacggccagttcagcaagaagtgttgagtgtgtacaaaggggagggctggaagtgttaactccagacccgttggctgcttgagttgtttcttatattctaaagcagcagtccctaacctttttggcaccagggaccagttttgtggaacacagtttttccatggacggggtggtggtggaggatgaaacttccacctcagatcatcaggcattagagtctcataaggagcacgcaacctagatccctcgcatgcgcagttcacaatacggttctaagggctttagagtaagcagccttttcacctgtgggcctctggtgagaaattctgtaaattgtgataatcaggctggattttaatgctgcttttccagtacaatgttagagtttgggttcattaaaattaggcaaactcccattgggttagggcttctctcattccattttgtggctaaccttactgtgtttcagcccttgctgaaaattcttctgatacgtgttgcccttcctcacagccctttggccattgggagtttggctgtccctcagagccatccggtcaagcagatggtctgttctatctcacagaaaagtcttttcttccatgagttctgtctgaactgaacatgtaaaaagtatgggaaacagatgaatccctattaaacatgaagttttgattgtatttaagat

SEQ ID NO: 12807 - protein, 183 aa, Homo sapiens
MEQRLAEFRAARKRAGLAAQPPAASQGAQTPGEKAEAAATLKAAPGWLKRFLVWKPRPASARAQPGLVQEAAQPQGSTSETPWNTAIPLPSCWDQSFLTNITFLKVLLWLVLLGLFVELEFGLAYFVLSLFYWMYVGTRGPEEKKEGEKSAYSVFNPGCEAIQGTLTAEQLERELQLRPLAGR

SEQ ID NO: 12808 - DNA, 2129 bp, Homo sapiens
  CDS (79)..(1299)
actaaaaaagccaatgctgaagagctagcgaataaccttaaacaggagggtcataatcttgggctgctccatggggatatggatcagagtgagagaaacaaggtcatttcagactttaagaaaaaggacatcccagtcctggtggccacagatgttgcagcccgtggtctggacattccttcaattaagactgtcattaactatgatgtggcacgagacattgatacccacacgcataggattggccgcacaggaagagcgggtgagaaaggtgtggcctataccctactcactcccaaggacagcaattttgctggtgacctggtccggaacttggaaggagccaatcaacacgtttctaaggaactcctagatctggcaatgcagaatgcctggtttcggaaatctcgattcaaaggagggaaaggaaaaaagctgaacattggtggaggaggcctaggctacagggagcggcctggcctgggctctgagaacatggatcgaggaaataacaatgtaatgagcaattatgaggcctacaagccttccacaggagctatgggagatcgactaacggcaatgaaagcagctttccagtcacagtacaagagtcactttgttgcagccagtttaagtaatcagaaggctggaagttctgctgctggggcaagtgggtggactagtgcagggagcttgaattctgttccaactaactcagcacaacagggccataacagtcctgacagccccgtcaccagtgccgccaagggcatcccaggctttggcaatactggcaacatcagtggtgcccctgtgacctacccgtctgccggagcccaaggagtcaacaacacagcttcagggaataacagccgagaagggactgggggcagcaacgggaaaagagagagatatactgagaaccggggcagcagccgtcacagtcacggagagactggcaatcggcatagcgatagtccacgtcacggagatggtggtcgccatggagatggataccgccatccagaaagcagcagccgtcatactgatggccatcggcacggggagaacagacatggaggaagcgcaggccggcatggggagaaccggggtgcaaatgatggtcggaatggggaaagcaggaaagaagcttttaatcgtgagagcaagatggagcccaagatggaacccaaagtggacagcagcaagatggacaaggtggacagcaagacagataagacagctgacggctttgctgtcccagagccgcctaaacgcaagaaaagtcgatgggacagttagaggggatgtgctaaagcgtgaaatcagttgtccttaatttttagaaagattttggtaactaggtgtctcagggctgggttggggtccaaagtgtaaggaccccctgcccttagtggagagctggagcttggagacattaccccttcatcagaaggaattttcggatgttttcttgggaagctgttttggtccttggaagcagtgagagctgggaagcttcttttggctctaggtgagttgtcatgcgggtaagttgaggttaacttgggataaagggtcttctagggcacaaaactcactctaggtttatattgtatgtagcttatattttttactaaggtgtcaccttataagcatctataaattgagttctttttcttagttgtatggccaggcagtccccattttaggagttggcttctgcaaattcaatccattgagctaactgttggggagcaatttggtagttgtagacatttgcagggaagggagatgtctgattctaaatgggagttgatgctcaggtccccagccaggtttgcatccagccctgagacatgtaggaaacacctttcagacccaggctctgaagattcccagaagccacaaggattgaagggaaaaggtgatcctggtaactgttccaggattgctccaggtttgagatggtattgctaaatttaaaattaaacaagagacccaacaacagcttttaaagtgtcttctatttcattgtattttttttaacttgccccaatgatagaaaagtcttttgctgaaatgattttgatgatttttgtttatcgtttataaaaaggaaaagaaat

SEQ ID NO: 12809 - protein, 407 aa, Homo sapiens
MDQSERNKVISDFKKKDIPVLVATDVAARGLDIPSIKTVINYDVARDIDTHTHRIGRTGRAGEKGVAYTLLTPKDSNFAGDLVRNLEGANQHVSKELLDLAMQNAWFRKSRFKGGKGKKLNIGGGGLGYRERPGLGSENMDRGNNNVMSNYEAYKPSTGAMGDRLTAMKAAFQSQYKSHFVAASLSNQKAGSSAAGASGWTSAGSLNSVPTNSAQQGHNSPDSPVTSAAKGIPGFGNTGNISGAPVTYPSAGAQGVNNTASGNNSREGTGGSNGKRERYTENRGSSRHSHGETGNRHSDSPRHGDGGRHGDGYRHPESSSRHTDGHRHGENRHGGSAGRHGENRGANDGRNGESRKEAFNRESKMEPKMEPKVDSSKMDKVDSKTDKTADGFAVPEPPKRKKSRWDS

SEQ ID NO: 12810 - DNA, 1601 bp, Homo sapiens
  CDS (40)..(1092)
agttccctcagcgcccgtagcttcggcggagtctgcgcgatgggcgacccggaaaggccggaagcggccgggctggatcaggatgagagatcatcttcagacaccaacgaaagtgaaataaagtcaaatgaagagccactcctaagaaagagttctcgccggtttgtcatctttccaatccagtaccctgatatttggaaaatgtataaacaggcacaggcttccttctggacagcagaagaggtcgacttatcaaaggatctccctcactggaacaagcttaaagcagatgagaagtacttcatctctcacatcttagccttttttgcagccagtgatggaattgtaaatgaaaatttggtggagcgctttagtcaggaggtgcaggttccagaggctcgctgcttctatggctttcaaattctcatcgagaatgttcactcagagatgtacagtttgctgatagacacttacatcagagatcccaagaaaagggaatttttatttaatgcaattgaaaccatgccctatgttaagaaaaaagcagattgggccttgcgatggatagcagatagaaaatctacttttggggaaagagtggtggcctttgctgctgtagaaggagttttcttctcaggatcttttgctgctatattctggctaaagaagagaggtcttatgccaggactcactttttccaatgaactcatcagcagagatgaaggacttcactgtgactttgcttgcctgatgttccaatacttagtaaataagccttcagaagaaagggtcagggagatcattgttgatgctgtcaaaattgagcaggagtttttaacagaagccttgccagttggcctcattggagtgaattgcattttgatgaaacagtacattgagtttgtagctgacagattacttgtggaacttggattctcaaaggtttttcaggcagaaaatccttttgattttatggaaaacatttctttagaaggaaaaacaaatttctttgagaaacgagtttcagagtatcagcgttttgcagttatggcagaaaccacagataacgtcttcaccttggatgcagatttttaaaaaacctctcgttttaaaactctataaacttgtcattggtaaatagtagtctattttcctctgcttaaaaaaaattttaagtatatcctttaaaggactgggggtttgctcaaaaggaaatccaaaacctattctaaacaatttgcatttatataattttcctgtttaacaacaagagtgtgacctaaatgcttttgtcttgtcactgaaataaaagatggcattatgtggttaagagcatggggcgaggggtcagacatgagtctaaggttctgcccttactccagtgtgtgacccttggcaagtcagttaatcttggtaaacctcggtgtacttatctttaaaatgggagtaatagtaggtcctaaattcatagagtggatattaggattaggatgcaaaaataaatgcttaaccaacactactactgttagcaccactactaattatcattcattgataatattaattgcaatgatgttgtaataaaatactctcatttcctt

SEQ ID NO: 12811 - protein, 351 aa, Homo sapiens [sequence omitted]

SEQ ID NO: 12812 - DNA, 2163 bp, Homo sapiens
agcaatgcacacgagcagacagagaagcaacatctttaaggtactgagggcaggagaagttaatgtagaatactatgccagaaaaaataaattcccaaaagtggaagtgaaataaggacatttagagatgtacaaaagctgaccgaattcactaccagtcaacccacactacaagaaacatcaaatgagtcctccaagcagaaggaatccaataccagatgaaaatccagatctccacgaggaaatgaagaacaccagaaatggatcggccctttcttcaaataagagcagttggaataacaaagctgttcagttgtacccttggaatccactgaaatcctgggtagggaagctccagtaccaccaactggaaagactgggaatgcctaatagctggtactggccattgtcgtaggctttgtccactctgacaaactgaagatggggactcgactcaccttcgccagccacaggaggacctccagacgaggttaggtcgacttcccgataactttagatcctgaaacctcacgggatttttcttctcttccctttgatctctcttccgcttgctcaacaggacaggactcgctgcctttctttcccgtcagaaagggatcccttgcggacaggacctaagtgagtagctggtttcccctacttgtccttccgggcctgggtgtctcgggggctcaggctgacgggagacctaactaccggcgagtgagaccagcaggagcctggaggggcgcgcgccaggatggaggtttggtgccgggggttgagaacaacagtcaaaccctcttcttcccctggcaccacgcacctgccccccgggatgccgaacgaagtggtccctaaagctcctctgcaggcccaaccgaaacaggcctgaagctccaggatgggcgagaggatcctctttgagcgaaaccagccttctgcctggctggccctggtcaacaccctgggaagaggccgatttggcggacagaacggaagaaaagacctaaaggtagaatctcatgatgtcgagatgttaaaacactcaaattttaaggttcgactgtgagggggagatagggggtctcgagctggatcgacccctgagccctcatctgcagagtcctgtgcaccagctcagaggacaggactatgtgcaccaatggttctcatcaggcggcaacttcaccctcacatgcctcccccatccctgctggtacacaagaccacgactaggggaagcccggagggagaatgttaacccctggcatctatctagtcagcagaggtgagggatgctgctaaacaccttacaatccaccggaggacacccgcccccaccgaccccgaagtggccattccctggaggtggggaaactcgcctgtagatcaatgcccacgcacttggcggacaggaaatcacgaattggccactaactggatcttggatctgaggaaaaaattccagcgtcagagggaactctcggagatttgcccagagcataaggaacgtactccttccctcagtgatggatcctcacatctgggggaaatcatagacaatttcttttgtagggcgaactctgctatacagtttatgatgtcagagtgaatactttctttgagttgcagtcagaaactgtagatttttaaaaatttaaaattcattattctctgtcagtattccaaagtgtatacagaaagctattgcactgttcaggagatggcgcttaacattttggaaattcaaggtgatgaatgtccagataagactatctctcctggtacaaagtttgacaatgctgaacatttttaaaggttctttttgatatacaaagtgcaccaatgagtgctttttaattcttacaataattctgggtgaggtaggtatttttccaattcccattttatgcttcggtagccctttgtatttatacttcaaaacacttggctctcttgtaattatttaagaaattagttgtgattatttgtttaatgtgcaggagttacaaaaggcaagctttagaacaagacagacctggttatgattcctggctctgaaagctgtacaccctgtgaccctagacaggtgttttaatgcctcgctgcctctgtttcttgctctgtaaaatgtgaacaataacagtattggcctcatgc

SEQ ID NO: 12813 - DNA, 1754 bp, Homo sapiens
  CDS (122)..(1564)
gtgcgctggtgaggtggcgtccgttctacccggtcgctcccgttccgcgccatgcagagcccagtctctggcacctggctgctctgatctggtctcagcgcggagggagcagagggagtccatggaggatccctccgagcccgaccggttggcgtccgcggacggcgggagcccggaggaggaggaggatggggagcgggagccgctgctaccgcggatcgcctgggcccacccgcggagaggcgccccaggcagcgccgtgaggctgctggacgctgccggggaggagggcgaggccggcgacgaggagctgcccctcccgcccggggacgtgggggtctcccggagttcgcccgccgagctggaccggagccgccccgcggtttcagtaactattggtacttcagagatgaatgcattcttggatgacccagaatttgctgatattatgctgagagcagagcaagcaatagaagttggaatttttccagaaagaatctctcaaggttcaagtggaagttactttgtgaaggatcctaagaggaaaattattggtgtgtttaaacccaaatcagaagagccttatggtcaactcaatccaaaatggaccaaatatgtccataaggtctgctgcccttgctgctttggccgaggctgcctgattcctaatcaggggtacctttccgaagcgggtgcctatcttgtggacaacaagcttcatctgagcattgtacctaaaacaaaggtggtttggcttgtcagtgagacatttaactataatgcgattgaccgtgcaaaatcaagaggcaaaaagtatgctttagaaaaagtgccaaaagtgggtagaaagtttcataggataggactccctcctaagattggttcctttcagttatttgttgaaggttacaaggaggctgaatattggcttaggaaatttgaagctgaccctttgcctgagaatattagaaaacaatttcagtcacaatttgaaagattagttattttggattacatcatcagaaatacagacaggggcaatgataattggttagtcagatacgaaaagcagaaatgtgaaaaggaaattgaccataaggaatcaaaatggattgatgatgaagaattccttattaaaatagctgcaattgataatggtctagcatttccttttaaacatcctgatgaatggagagcatatccatttcactgggcttggcttcctcaagcaaaagttcccttttctgaagaaataagaaatttgattctaccatatatttctgacatgaactttgtgcaagatttatgtgaagatctctatgaactttttaagactgacaaaggatttgacaaagccacttttgaaagtcagatgtctgtgatgaggggtcagatcttaaaccttactcaggcattgagagacgggaagagtcctttccagctagtacagataccttgtgtgattgtggaacgcagtcaaggtggaagtcagggtcggattgtccacctgagcaattcctttacccagactgtcaattgcaggaagccatttttttcctcctggtagtaaatgtcagagtaagagaaacaaactgtttagaattatcatgtttttaaaacatcatagtaatataaatctgctgttaggagctccagttgctaaaacctcaatttaagtctttaaaaggttgtattttgaatgtaaccaaaagtttacagttttttgtccaaatattaaatttctatttcaggga

SEQ ID NO: 12814 - protein, 481 aa, Homo sapiens
MEDPSEPDRLASADGGSPEEEEDGEREPLLPRIAWAHPRRGAPGSAVRLLDAAGEEGEAGDEELPLPPGDVGVSRSSPAELDRSRPAVSVTIGTSEMNAFLDDPEFADIMLRAEQAIEVGIFPERISQGSSGSYFVKDPKRKIIGVFKPKSEEPYGQLNPKWTKYVHKVCCPCCFGRGCLIPNQGYLSEAGAYLVDNKLHLSIVPKTKVVWLVSETFNYNAIDRAKSRGKKYALEKVPKVGRKFHRIGLPPKIGSFQLFVEGYKEAEYWLRKFEADPLPENIRKQFQSQFERLVILDYIIRNTDRGNDNWLVRYEKQKCEKEIDHKESKWIDDEEFLIKIAAIDNGLAFPFKHPDEWRAYPFHWAWLPQAKVPFSEEIRNLILPYISDMNFVQDLCEDLYELFKTDKGFDKATFESQMSVMRGQILNLTQALRDGKSPFQLVQIPCVIVERSQGGSQGRIVHLSNSFTQTVNCRKPFFSSW

SEQ ID NO: 12815 - DNA, 1765 bp, Homo sapiens
  CDS (188)..(1141)
agagttcatctcaaagcctggcaaggattggagaggtcaataagagtcagcgcctttaaaaagaaatctactcactcttctgtgtgcataaggccgagcagaggttcttcgtctcaagaggaactgacttctgttgagcactcaacacgccacagagaccagccatcttgcaacctcacctcacagcatggagagaggagaccaacctaagagaaccaggaatgaaaacattttcaactgcttatacaaaaaccctgaggcaacttttaagctgatttgctttccctggatgggaggtggctccactcattttgccaaatggggccaagatactcatgatttgctggaagagacagcatctcaccatgttgccaaggctggtctcaaactccggcgctcaagtgatcctcctgcttcagcctacccatgtgctggcgtgagccaccgtaggcgtgagccaccgtgcctggccaaaattcttggtctattctggattctaattttttttatgcactccttaaggcttcctggaagagaaagcagagttgaagaacctcttgaaaatgacatctcccagttagttgatgaagttgtttgtgctctgcagccagtcatccaggataaaccatttgcattttttggccacagtatgggatcctacattgcttttaggactgcactaggtctaaaagaaaacaatcaaccagaaccattgcatttatttttgtcaagtgcaactcctgtacattcaaaggcctggcatcgcattcccaaagatgatgaattgtcagaagaacaaataagtcattaccttatggaatttggaggcacccccaagcattttgctgaagccaaggaatttgtgaaacaatgtagtcccatcataagggcagatctgaacattgttagaagttgcacctctaacgtaccatctaaggctgttctttcctgtgacttgacatgttttgttggatctgaagacatagcaaaggacatggaagcctggaaagatgtaaccagtggaaatgctaaaatttaccagcttccagggggtcacttttatcttctggatcctgcgaacgagaaattaatcaagaactacataatcaagtgtctagaagtatcatcgatatccaatttttagatattttccctttcacttttaaaataatcaaagtaatatcatactcttctcagttattcagatatagctcagttttattcagattggaaattacacattttctactgtcagggagattcgttacataaatatatttacgtatctggggacaaaggtcaagccagtaaagaatacttctggcagcactttgggaggccaaggcgggcggatcacgaggtcaggagatcgagaccgtcctggctaacaccgtgaaaccccatctctactaaaaatacacaaaattagctgggcgtggtggtgggcacctgtagtcccagctactcgggaggctgaggcaggagaatggtgtgaacctgggaggtggagcttgcagtgaaccgagatcgctccactgcactccagcctgggtgacagatccagactctgtctcaaaaaaaaaaaaaaaaaatacttctggcagagtcttttatcttcctattaaaatctcacttgattctcctttatgggaagtttgtcgacaaaattcatgattagtaaattatccattttttccttcagttagtttaatggtgaagatgattaacaggggaaatgcttgaagtaaatgattgtttcaatggc

SEQ ID NO: 12816 - protein, 318 aa, Homo sapiens
MERGDQPKRTRNENIFNCLYKNPEATFKLICFPWMGGGSTHFAKWGQDTHDLLEETASHHVAKAGLKLRRSSDPPASAYPCAGVSHRRREPPCLAKILGLFWILIFFMHSLRLPGRESRVEEPLENDISQLVDEVVCALQPVIQDKPFAFFGHSMGSYIAFRTALGLKENNQPEPLHLFLSSATPVHSKAWHRIPKDDELSEEQISHYLMEFGGTPKHFAEAKEFVKQCSPIIRADLNIVRSCTSNVPSKAVLSCDLTCFVGSEDIAKDMEAWKDVTSGNAKIYQLPGGHFYLLDPANEKLIKNYIIKCLEVSSISNF

SEQ ID NO: 12817 - DNA, 1985 bp, Homo sapiens
  CDS (27)..(1772)
agaggggctaggctctgggattcaagatggaggcgctgagtcgagctgggcaggagatgagcctagcggccctgaagcaacacgacccctatatcaccagcatcgcagacctcacgggccaggtcgctctgtacaccttctgccccaaggccaaccagtgggagaagactgatatagaagggaccttattcgtatatcgaaggtcagcttccccttaccatggttttaccattgtgaatcgactaaatatgcacaatctagttgaaccagtgaataaagatttggaatttcagctccatgaaccatttcttctgtatagaaatgcaagcttgtcgatatatagtatctggttttatgacaagaatgactgtcaccgcatagcaaaactcatggctgatgtggtagaagaggagacacggcgatcccagcaagctgctcgggacaaacagagtcccagccaggccaatggctgcagcgaccacaggcccatcgacatcctggagatgctgagcagagccaaggatgagtatgagaggaatcagatgggtgactcaaatatctccagccctgggttacagccaagcactcagctctccaatctgggaagcaccgagactctagaagaaatgccctccgggtcacaggataagtctgctccatctggacacaagcatctgacggtagaagagttatttggaacctctttgccaaaggaacaaccagcagttgtgggtctggattcagaagaaatggagaggttgccaggagatgcctcccagaaagagcccaattcattcctaccatttccctttgagcagttaggaggagcccctcaatcagaaaccctgggtgtcccttctgctgcccaccattcagtccagcctgaaatcaccaccccggtgctaatcactccagcctccatcacacagtccaatgaaaagcatgctccaacctacacaatcccgttgagccctgttctcagtcccactctgccagctgaagctcctactgcacaggttccccccagcttacctcgaaacagcaccatgatgcaggcagtgaagaccacgcctagacagaggtctccactcctgaaccagccagtccctgagctaagccatgccagtctgattgccaaccagagccccttcagggccccattgaacgtgacgaacacagctggcacatccctcccaagcgttgatcttctccagaaactcaggttgaccccacagcatgaccaaatacagacacaaccacttgggaaaggtgcaatggtagccagcttttctccggcagctggtcagctagccacacctgagagcttcatagagcctccctctaagacagcagcagcaagagtggcggcctcagcctccctgagcaacatggtgcttgctccccttcagtctatgcagcagaaccaggatcctgaagtatttgtgcagcctaaggtgttatccagtgccatcccggttgcaggcgccccactggttactgcaacgaccactgcagtgtcttcagtcctgctggccccaagtgttttccagcagacagttacaagatcttcggaccttgagaggaaagccagctccccttctcctctaactattggaacgccagaaagtcagagaaagccttccattattctcagcaagtctcagctccaggatacattaatacatctaataaagaatgattccagcttcctcagtacacttcatgaagtctacttgcaggttctgaccaagaacaaagacaaccacaacctatgactggagcagaataagtctaaaggcagagccccagcctcagagacaaataggcttcatcatggaaacttctgagcagaacattgagtttgagaatcctgaaattgagcctatgagaaagagactcatttcttaagaatgttttccaagtgacattctcagtggtaatggaggtttcactgtgaagcatcaccagcagatccttgttttgac

SEQ ID NO: 12818 - protein, 582 aa, Homo sapiens
MEALSRAGQEMSLAALKQHDPYITSIADLTGQVALYTFCPKANQWEKTDIEGTLFVYRRSASPYHGFTIVNRLNMHNLVEPVNKDLEFQLHEPFLLYRNASLSIYSIWFYDKNDCHRIAKLMADVVEEETRRSQQAARDKQSPSQANGCSDHRPIDILEMLSRAKDEYERNQMGDSNISSPGLQPSTQLSNLGSTETLEEMPSGSQDKSAPSGHKHLTVEELFGTSLPKEQPAVVGLDSEEMERLPGDASQKEPNSFLPFPFEQLGGAPQSETLGVPSAAHHSVQPEITTPVLITPASITQSNEKHAPTYTIPLSPVLSPTLPAEAPTAQVPPSLPRNSTMMQAVKTTPRQRSPLLNQPVPELSHASLIANQSPFRAPLNVTNTAGTSLPSVDLLQKLRLTPQHDQIQTQPLGKGAMVASFSPAAGQLATPESFIEPPSKTAAARVAASASLSNMVLAPLQSMQQNQDPEVFVQPKVLSSAIPVAGAPLVTATTTAVSSVLLAPSVFQQTVTRSSDLERKASSPSPLTIGTPESQRKPSIILSKSQLQDTLIHLIKNDSSFLSTLHEVYLQVLTKNKDNHNL

SEQ ID NO: 12819 - DNA, 2082 bp, Homo sapiens
  CDS (132)..(992)
acattcgatttattggaggcctacttgcagcatattacctatcaggagaggagatattcaagattaaagcagtgcaattggctgagaaactccttcctgcctttaacacacctactgggattccttgggcaatggtgaatttgaaaagtggagtagggcgaaactggggctgggcatctgcaggtagcagcattctggctgaatttggtacactacatatggagttcatccacctcagctacttgacaggggacctgacttactacaaaaaggttatgcacattcggaaactacttcagaaaatggatcgtccaaatggtctttatccaaattatttgaaccccagaacagggcgctggggtcagtatcatacatctgtcggtggcctgggagacagtttttatgaatacttactgaaagcatggttgatgtcagataaaacagaccatgaggcaagaaagatgtatgatgatgctattgaggctatagaaaaacatcttattaagaagtctcgtggaggtcttacctttattggagaatggaagaatgggcacttggaaaaaaagatggggcatttggcctgctttgctgggggaatgttagcactaggagcagatggttccagagcagataaagctggtcattatttagagcttggggcagaaattgcacgtacttgtcatgagtcatatgacagaactgcattaaagctaggtcctgaatcattcaagtttgatggtgcagtggaggctgtggctgtccggcaggctgaaaagtattatatcctccgtccagaagtaattgaaacctattggtacctatggcgattcactcacgatccaagatacaggcagtggggctgggaagcagcactggccattgaaaagtattgccgagttaatggtgggttttctggagtcaaagatgtatattcctctactcctacacatgatgatgtacagcagagcttttttcttgctgaaacattaaattagcctcctaccatgagagaactgtttttccagctggatgaaaagagtagcatcaagtcccctattctgctgttttctgctcacttactcctggagacaagctaagtcaaatcaatatgtacttataagtacctgctttctcagagttgtatttgagaattaaagtatatgaaatgtatactctacccataaatagcttggagtctggtttagaaatctcttacctttaggcatggacaaatttaataaaagtacaaagtatatatgcagttggccctccatgtcaatgggttcatggattcaaccaaacatggattgaagatatagttttttaaaaattacatctgttttgagcatgtatatacctttttcttgtcattattccctaggcaatataacaactatttacatagatttaaagtatgtgggagcatatgcattggttatatgaatatactataccattttatatcaaggatttgagcattcaaggatttttgtatctgcgagaggtcctggaaccaatcccccatagatactgagggacaactgtattcagtgctaaatagaaaataaatgttttagaaattcagagaagggaattttggtgcaggccagagtagtcatgaagaaagactaaaatgatgctgaattagtaagatgttaataggtggggtaaaacagaaagtagctttgtgaaaagaaggattcagcctgaaaaaatacctttaaaaaaacactaaagaaactagaccgactaaagtacattcactaggagaagtagtaggaaataagagctctagaatcaaaatcagggaagcagcatggatgacccttgaggacattatgctaagtgaaataagtcagccataagaagacaaatatggggtgattccacttctatgaggtctctaaagtagtcacatttatggaaacaaagtagaatgttggttaccaggggcctggggaggggaatggaaatgagttttagttttgcaaagaacagtgtgaatatacttaatactactgaactatacgctgaaaaatggtgaagatggtaaactttatgtcatgtgtttattaccacaat

SEQ ID NO: 12820 - protein, 287 aa, Homo sapiens [sequence omitted]

SEQ ID NO: 12821 - DNA, 2185 bp, Homo sapiens
  CDS (1)..(492)
atgccaccctgtcatgaacatatttataatcagcgtagatacatgagatccgagctgacagccttctggagagccacttcagaagaagacatggctcaggatacgatcatctacactgacgaaagctttactcctgatttgaatatttttcaagatgtcttacacagagacactctagtgaaagccttcctggatcaggtctttcagctgaaacctggcttatctctcagaagtactttccttgcacagtttctacttgtccttcacagaaaagccttgacactaataaaatatatagaagacgatacgcagaagggaaaaaagccctttaaatctcttcggaacctgaagatagaccttgatttaacagcagagggcgatcttaacataataatggctctggctgagaaaattaaaccaggcctacactcttttatctttggaagacctttctacactagtgtgcaagaacgagatgttctaatgactttttaaatgtgtaacttaataagcctattccatcacaatcatgatcgctggtaaagtagctcagtggtgtggggaaacgttcccctggatcatactccagaattctgctctcagcaattgcagttaagtaagttacactacagttctcacaagagcctgtgaggggatgtcaggtgcatcattacattgggtgtctcttttcctagatttatgcttttgggatacagacctatgtttacaatataataaatattattgctatcttttaaagatataataataggatgtaaacttgaccacaactactgtttttttgaaatacatgattcatggtttacatgtgtcaaggtgaaatctgagttggcttttacagatagttgactttctatcttttggcattctttggtgtgtagaattactgtaatacttctgcaatcaactgaaaactagagcctttaaatgatttcaattccacagaaagaaagtgagcttgaacataggatgagctttagaaagaaaattgatcaagcagaagtttaattggaattgattattagatcctactttgtggatttagtccctgggattcagtctgtagaaatgtctaatagttctctatagtccttgttcctggtgaaccacagttagggtgttttgtttattttattgttcttgctattgttgatattctatgtagttgagctctgtaaaaggaaattgtattttatgttttagtaattgttgccaactttttaaattaattttcattatttttgagccaaattgaaatgtgcacctcctgtgccttttttctccttagaaaatctaattacttggaacaagttcagatttcactggtcagtcattttcatcttgttttcttcttgctaagtcttaccatgtacctgctttggcaatcattgcaaatctgagattataaaatgccttagagaatatactaactaataagatctttttttcagaaacagaaaatagttccttgagtacttccttcttgcacttctgcctatgtttttgaagttgttgctgtttgcctgcaataggctataaggaatagcaggagaaattttactgaagtgctgttttcctaggtgctactttggcagagctaagttatcttttgttttcttaatgcgtttggaccattttgctggctataaaataactgattaatataattctaacacaatgttgacattgtagttacacaaacacaaataaatattttatttaaaattctggaagtaatataaaagggaaaatatatttataagaaagggataaaggtaatagagcccttctgccccccacccaccaaatttacacaacaaaatgacatgttcgaatgtgaaaggtcataatagctttcccatcatgaatcagaaagatgtggacagcttgatgttttagacaaccactgaactagatgactgttgtactgtagctcagtcatttaaaaaatatataaatactaccttgtagtgtcccatactgtgttttttacatggtagattcttatttaagtgctaactggttattttctttggctggtttattgtactgttatacagaatgtaagttgtacagtgaaataagttattaaagcatgtgtaaacattgttatatatcttttctcctaaatggagaattttgaataaaatatatttgaaatttt

SEQ ID NO: 12822 - protein, 164 aa, Homo sapiens
MPPCHEHIYNQRRYMRSELTAFWRATSEEDMAQDTIIYTDESFTPDLNIFQDVLHRDTLVKAFLDQVFQLKPGLSLRSTFLAQFLLVLHRKALTLIKYIEDDTQKGKKPFKSLRNLKIDLDLTAEGDLNIIMALAEKIKPGLHSFIFGRPFYTSVQERDVLMTF

SEQ ID NO: 12823 - DNA, 1926 bp, Homo sapiens
  CDS (45)..(1031)
agagaggggtgcaagatcctgatttttcaggagttcaagcgacaatggcagcccaatacggcagtatgagcttcaaccccagcacaccaggggccagttatgggcctggaaggcaagagcccagaaattcccaattgagaattgtgttagtgggtaaaaccggagcaggaaaaagtgcaacaggaaacagcatccttggccggaaagtgtttcattctggcactgcagcaaaatccattaccaagaagtgtgagaaacgcagcagctcatggaaggaaacagaacttgtcgtagttgacacaccaggcattttcgacacagaggtgcccaatgctgaaacgtccaaggagattattcgctgcattcttctgacctccccagggcctcatgctctgcttctggtggttccactgggccgttacactgaggaagagcacaaagccacagagaagatcctgaaaatgtttggagagagggctagaagtttcatgattctcatattcacccggaaagatgacttaggtgacaccaatttgcatgactacttaagggaagctccagaagacattcaagacttgatggacattttcggtgaccgctactgtgcgttaaacaacaaggcaacaggcgctgagcaggaggcccagagggcacagttgctgggcctgatccagcgcgtggtgagggagaacaaggaaggctgctacactaataggatgtaccaaagggcggaggaggagatccagaagcaaacacaagcaatgcaagaactccacagagtggagctggagagagagaaagcgcggataagagaggagtatgaagagaaaatcagaaagctggaagataaagtggagcaggaaaagagaaagaagcaaatggagaagaaactagcagaacaggaggctcactatgctgtaaggcagcaaagggcaagaacggaagtggagagtaaggatgggatacttgaattaatcatgacagcgttacagattgcttcctttattttgttacgtctgttcgcggaagattaaacttaatgaaaatctgtttgtattttctgcatattctctggcaaccttgccccatacttacttatttagcatagtcgagtgctctagtttctgtctctcaggcactcgtaactaaggaccaccattggccattggtagatgtttgattgacttaacaagagagggacaaattttcaatttgtgaaactccaaagcagaaagtattggtgcttgctaccttgtgaattcttccttagacatgcagagaaaatgtatgcaagagaccaaaaagatggctccaagctatgtcatgttacctgtaataaaatcttttcttctagattctctctatgttggcagataatctccccttgtagcttccactcacttattcttgcattcagagtcacaatgatcatcttacccatgtggtttttgagaaagaaagatcaattctttgtttgcagtgggtaatcttagagatggagatgattgtagaattattcctagatgagtgtcaatttatttaattccattgtcatataaggagtcaaattgtttcttatcatttgttcattgaagaacagagacctgtctggaaaatcgatctctacaaattcaattaaataatgatccccaaatgctgaaaaagtgaaatacagcaattcaacagataatagagcaatgtttagtatattcagctgtatctgtagaaactctttgacgaacctcaatttaaccaatttgatgaatacccagttctcttcttttctagagaaagatagttgcaacctcacctccctcactcaacactttgaatacttattgtttggcaggtcatccacacacttctgcccccactgcattgaattttttgcttatgttgtttataataaaacttttcaattatctc

SEQ ID NO: 12824 - protein, 329 aa, Homo sapiens
MAAQYGSMSFNPSTPGASYGPGRQEPRNSQLRIVLVGKTGAGKSATGNSILGRKVFHSGTAAKSITKKCEKRSSSWKETELVVVDTPGIFDTEVPNAETSKEIIRCILLTSPGPHALLLVVPLGRYTEEEHKATEKILKMFGERARSFMILIFTRKDDLGDTNLHDYLREAPEDIQDLMDIFGDRYCALNNKATGAEQEAQRAQLLGLIQRVVRENKEGCYTNRMYQRAEEEIQKQTQAMQELHRVELEREKARIREEYEEKIRKLEDKVEQEKRKKQMEKKLAEQEAHYAVRQQRARTEVESKDGILELIMTALQIASFILLRLFAED

SEQ ID NO: 12825 - DNA, 2898 bp, Homo sapiens
  CDS (251)..(2845)
actttgttcgctcctcagtcgtccaggcggattcctttttcgccaggcaccaaggcacagcttagagtagacccgagtcctgctctgcggagttcgtcttcccagcgaaggtacagaggcggatgaactgctgagacttgattgacgtattttaagatttttttaacttctgaagtctagcaggcctgtaagaacaaaaatcattctgtaggaattaaaaacagaatccagtcttgacaacatatccacaatgtctgatgtatctactagtgtacaatcaaaatttgctagacttgcaaagaaaaaggaaaatatcacctatatgaaaagagagcagttaacagaaactgataaggacatagctccggtattagatttaaaatgcaaggacgtatcagcaattatgaataagtttaaggtcttaatggaaattcaagacctgatgtttgaggagatgagggaaactcttaaaaatgacctaaaagcagttttaggaggaaaagctacaatacctgaggtaaagaattcagagaactccagtagtaggacagagtttcagcaaataatcaatttagcattacaaaaaacagggatggtagggaaaatagaaggagaaaactctaaaataggtgatgataatgaaaatttaacctttaaattagaagtaaatgagctgagtggtaaattagacaacactaacgaatacaatagtaatgatggtaagaaattaccccagggtgaatcacgaagttacgaagtcatgggaagtatggaagaaaccttatgcaatatagatgacagagatggaaatcgcaatgtccatttagaatttacagaaagagagagtaggaaggatggagaggatgaatttgtcaaagaaatgagagaggaaagaaaatttcagaaattgaagaataaagaggaggttttaaaagcctccagagaagaaaaagtgttgatggatgaaggagcagtacttaccctggtagccgacctttcatcagcaacactggatattagtaagcaatggagtaatgtcttcaacattctgagagaaaatgattttgaacctaaatttctgtgtgaagttaaattagcatttaaatgtgatggtgaaataaagacattttcagatctgcaaagccttagaaaatttgccagccaaaaatcttctgtgaaagaattactgaaagatgtactcccacaaaaggaagaaataaatcaaggaggaagaaaatatggaattcaagaaaaaagggataaaaccctaatagactcaaagcatagagctggagaaataaccagtgatggcttgagcttcctatttcttaaagaagtaaaagttgctaagccagaggagatgaaaaacttagagactcaagaggaagagttttccgagctagaggagctggatgaagaggcctcagggatggaggatgatgaagatacctcagggctggaggaggaggaggaagagccctcagggctggaggaggaagaagaagaagaggcttcagggttggaggaggatgaggcctcagggctagaggaggaagaggaacagacttcagaacaggactcaacctttcagggtcatactttggtagatgcaaagcatgaagttgagataaccagtgatggcatggaaactactttcattgactctgtagaggattctgaatcagaggaggaagaagaaggaaagagctctgaaacaggaaaggtaaagactacctccctgactgagaaaaaagcctcacgtagacaaaaggaaattccctttagttatttggttggggactctgggaagaaaaagttggtgaaacaccaggtggtgcacaaaacccaggaggaagaggaaacagctgtgcccacaagtcaaggaactggcataccctgtctgaccttatgtttggcctctccctcaaagtcactagagatgagtcatgatgagcataaaaagcattcacatacaaatttgagtatttcaacaggagtcaccaaacttaagaaaacagaagaaaagaaacacagaactctgcacacagaagaactaacatccaaagaagcagacttaacagaggaaacagaagaaaacttgagaagtagtgtgattaatagcatcagagagataaaagaggagattggaaatttgaaaagttcccattcaggtgtcttggaaattgaaaattcagtagatgatctgagtagcagaatggacatacttgaagaaagaatagacagtctagaagatcaaattgaagaattctctaaggatacaatgcaaatgaccaaacagataattagtaaagaaaggcaaagagatatagaggagagatctagaagttgcaacattcgtttgataggaattccagaaaaggagagttatgagaatagggcagaggacataattaaagaaataattgatgaaaactttgcagaactaaagaaaggttcaagtcttgagattgtcagtgcttgtcgagtacctagtaaaattgatgaaaagagactgactcctagacacatcttggtgaaattttggaattctagtgataaagagaaaataataagggcttctagagagagaagagaaattacctaccaaggaacaagaatcaggttgacagcagacttatcactggacacactggatgctagaagtaaatggagcaatgtcttcaaagttctgctggaaaaaggctttaatcctagaatcctatatccagccaaaatggcatttgattttaggggcaaaacaaaggtatttcttagtattgaagaatttagagattatgttttgcatatgcccaccttgagagaattactggggaataatataccttagcacgccagggtgactacaaacaatatgctttcctcccccagcatgcatcc

SEQ ID NO: 12826 - protein, 865 aa, Homo sapiens
MSDVSTSVQSKFARLAKKKENITYMKREQLTETDKDIAPVLDLKCKDVSAIMNKFKVLMEIQDLMFEEMRETLKNDLKAVLGGKATIPEVKNSENSSSRTEFQQIINLALQKTGMVGKIEGENSKIGDDNENLTFKLEVNELSGKLDNTNEYNSNDGKKLPQGESRSYEVMGSMEETLCNIDDRDGNRNVHLEFTERESRKDGEDEFVKEMREERKFQKLKNKEEVLKASREEKVLMDEGAVLTLVADLSSATLDISKQWSNVFNILRENDFEPKFLCEVKLAFKCDGEIKTFSDLQSLRKFASQKSSVKELLKDVLPQKEEINQGGRKYGIQEKRDKTLIDSKHRAGEITSDGLSFLFLKEVKVAKPEEMKNLETQEEEFSELEELDEEASGMEDDEDTSGLEEEEEEPSGLEEEEEEEASGLEEDEASGLEEEEEQTSEQDSTFQGHTLVDAKHEVEITSDGMETTFIDSVEDSESEEEEEGKSSETGKVKTTSLTEKKASRRQKEIPFSYLVGDSGKKKLVKHQVVHKTQEEEETAVPTSQGTGIPCLTLCLASPSKSLEMSHDEHKKHSHTNLSISTGVTKLKKTEEKKHRTLHTEELTSKEADLTEETEENLRSSVINSIREIKEEIGNLKSSHSGVLEIENSVDDLSSRMDILEERIDSLEDQIEEFSKDTMQMTKQIISKERQRDIEERSRSCNIRLIGIPEKESYENRAEDIIKEIIDENFAELKKGSSLEIVSACRVPSKIDEKRLTPRHILVKFWNSSDKEKIIRASRERREITYQGTRIRLTADLSLDTLDARSKWSNVFKVLLEKGFNPRILYPAKMAFDFRGKTKVFLSIEEFRDYVLHMPTLRELLGNNIP

SEQ ID NO: 12827 - DNA, 2257 bp, Homo sapiens
  CDS (70)..(594)
agactgaaaactaaagcctgcagagacctctgaaggaaaacctgtcccgggctctgtcacttcacacccatggctaaccctggaggtggtgctgtttgcaacgggaaacttcacaatcacaagaaacagagcaatggctcacaaagcagaaactgcacaaagaatggaatagtgaaggaagcccagcaaaatgggaagccacatttttatgataagctcattgttgaatcgtttgaggaagcaccccttcatgttatggttttcacttacatgggatatggaattggaaccctgtttggctatctcagagactttttaagaaactggggaatagaaaaatgcaacgcagctgtggaacgaaaagaacaaaaagtacgtatgcgcacctccctggatctttgtcaatgcctactcctctctaaagtgttctcagaagtggtgatgcaggtgcagattctagaaagcatgaggtgctcaggaactattcagggcaaatttcattcatctccacctgctaaaccccattacccatgggcttatggacctgtttttacaaacatctcatgggcaactactatttgccacataccaaactaaggcttttcccataccttgtaatatttaatttttgtaacaaccccatgatatagatattaaactataattttgaagataaaaacatcaaaatataaaagcaagtgctcctgggtgggactgtactttggtcttctagttgtaagttgggtattatttatgctctatcctgaaaaggaaagtgcatttgagtgaactgggacttttttatttcatctaaatctgatttctcacctttgacactattaatattttgaaccaattttttgggcattgtaagaattttaacagcatctgaaaaatatagcattaaaccactaaagctaaggaccctgatgaagtcactgcaccctccactacctctactggaacaggcactggtatccactgctgagagacccatagacggttcacatcacaggactctgtggagacaatccccagtaccaacttggagccgggtagactcggtgggtggcgagacccagaagagagacaacaatcactgcagtcagctcacaggaagccacatccataggaaaagggggagagtaatacatcaagggaacaccccaagggacaaaagaatctgaacaacagtcttcagccctagactttcccaaatgagaaggaaccagaaaaccaaccttggtaatatgacaaaacaaggctcttcaacaccccccaaaatataatactagttcaccggcaatggatccaaaccaagaagaaatccctgatttacctgaaaaagaattcaggaggttattaagctaatcagggagaggccagagaaaggcaaagcccaatgcaagaaaatccaaaaaatgttacaagaagtgaagagagaaatattcaaggaaatagatggcttaaagtaaaaacaatcaaaaattcaagaaactttggacacacttttagaaatgcaaaatgctctggaaagtctcagcaatagaattgaactagtagaagaaaaaaattcagagcttaaagacaaggtcttcgaattaacccaattcaacaaagacaaagaaaaattaataagaaaatatgaacaaagcctccaagaagtctgggattatgttaaacaaccaaacctaagaataatcaatgttcctgaggaagaagagaattctaaaagcctggaaaacatatttgggggaataattgaggaaaacttccctggccttgctagagacctagacatccaaatacaagaagcacaaagatcacccaggaaattcatcaccaaaagatcttcacctaggtacactgtcatcaggttatccaaaggaaaccattttaagagctgtgagcagaagcaccaggtaacttacaaaggaaaaatctatcagattaacagcagatttctcagcagaaaccctacaagctaagacagaattggggccctatcttcagccccctcaaacaaaacaattatcagccaagaattttgtatacagcgaaactaagcatcatatttgaaggaaagatacagtcatcttcagacaaacaaatgccaagataattcacaccaagccaccactacaagaactgataaaaggagctctaaatattgaaacaaatcctggaaaacagagcttctttaaagcataaatcacgtgggacctattaaaaaacacacacacacaagttaaaaagc

SEQ ID NO: 12828 - protein, 175 aa, Homo sapiens
MANPGGGAVCNGKLHNHKKQSNGSQSRNCTKNGIVKEAQQNGKPHFYDKLIVESFEEAPLHVMVFTYMGYGIGTLFGYLRDFLRNWGIEKCNAAVERKEQKVRMRTSLDLCQCLLLSKVFSEVVMQVQILESMRCSGTIQGKFHSSPPAKPHYPWAYGPVFTNISWATTICHIPN

SEQ ID NO: 12829 - DNA, 2358 bp, Homo sapiens
  CDS (88)..(408)
tagatttgtcggcttgcggggagacttcaggagtcgctgtctctgaacttccagcctcagagaccgccgcccttgtccccgagggccatgggccgggtctcagggcttgtgccctctcgcttcctgacgctcctggcgcatctggtggtcgtcatcaccttattctggtcccgggacagcaacatacaggcctgcctgcctctcacgttcacccccgaggagtatgacaagcaggacattcagctggtggccgcgctctctgtcaccctgggcctctttgcagtggagctggccggtttcctctcaggagtctccatgttcaacagcacccagagcctcatctgtatcctttctgcctgcccacctttcccacacgacccacttctatcaggactcccttcagccacctgacacaatagtgtctgctgtagccaatccttccagttcaaagatcttcaacgatgtgctaaatcctgctgtttactaggcacttaaaatcccaaaatgagagtaaaatacagtttttggccaggcatgttggctcacgtctgtaatcccagcactgtgggaggcgcaggcaggaggcaacatagtgagaacccaagtctacaaaaataataggaataataaaaaccccaccgtttctttttacaatgaggaggaggtagatacaaatctgtaattcagtgtgataagcactgtgctatagaagtgtgtgaagatagaaagcacaggcagggcgcgatggctcacgcatgtaatcccagcactttgggaggccgaggcaggtggaccacctgaggtcaggagttcgagaccggcctgaccaacatggtgaaacccccgtctctactaaaaatacaaaaattagtcgggcgtggcggcgcactcctgtaatcccagctactcaggagactgaggaaggagaattgcttgaacccgggaggcagaggttgcagtgagctgagatcgtgccactgcactccagccagggcaacagagcaagactctgtcaaaaaacaaacaaaagatataaagcacaatgggaactcagaagaggcaacggaaacgagcactgggaactcagaagaggcaaaggagatgaggcacatgggtcagagaattgtggaccaggaggaccaggacactggaggctgtttccagcgcatattaagtcgctgtcagcactcctttgtggcatagcagaaggagggcctactcttacctctcatctgaaggatccaggctggcccgcagataaggggtagggtagcctgaggtccgatctgtgcagtcacttctggtctctcctcacatgactgtcctaaaattcagaagtcagagctgctgactctagcccttgaaacatggtgagggagcaagggatgaacctgaatgcagatgccagccccaccactggccttttctgacccatcactgtctgtcgatccaaagactttccttaatctcgtgccttcccaagccattggggctcactgtagtgcatccgtggccctgtccttcttcatattcgagcgttgggagtgcactacgtattggtacatttttgtcttctgcaggtgtggtagcatccaatatttggggatgagggaggaaggttggccctaaacctgaaggtttttcccctacccagccctttcctccatgtgtgagataccagatccactcaacatcctgtaggcttttaaagtttcatcccctaccccccatgccacctgccctacactttcagaggtggggtctctggtttggagatttgggtatttatactgaaagggtttctgaatctaccacttgccttggtagtgcccttccagctgtcactgaaatggctttattcgtcaccgtctttgggctgaaaaagaaacccttctgattaccttcatgacgggaacctaaggacgaagcctacaggggcaagggccgcttcgtattcctggaagaaggaaggcataggcttcggttttcccctcggaaactgcttctgctggaggatatgtgttggaataattacgtcttgagtctgggattatccgcattgtatttagtgctttgtaataaaatatgttttgtagtaacattaagacttatatacagttttaggggacaattgagatggctgaactactgaataaaaaaaaaacaacgctgttttctagtcctgcagaccgtaagatacttggtatcgcttctattttggttactacggtaggtgcctggcggaagggagtgggcggagatatgtaaataggaagtgcgtacagttagaacgtccggcacgtaactgatcggagcattctgggaagaagtaatttattccttttcggcagccgaatg

SEQ ID NO: 12830 - protein, 107 aa, Homo sapiens
MGRVSGLVPSRFLTLLAHLVVVITLFWSRDSNIQACLPLTFTPEEYDKQDIQLVAALSVTLGLFAVELAGFLSGVSMFNSTQSLICILSACPPFPHDPLLSGLPSAT

SEQ ID NO: 12831 - DNA, 1443 bp, Homo sapiens
  CDS (138)..(824)
gtagtttactctcagcagcagccaaagcacagctagcaaatcaaaacaaacttgctggtaacaacagtagcagcagtagcaattctggagctgttgccggcagtggcaacactgaaggacatagcactttaaacaccatgttccctcctactgccaacatgcttctcccaacaggtgaagggcaaagtggtcgagcagcactaagagataagctgatgtctcagcaaaaagacgcattgcggaaaagaaaacaaccacctacgacagtgttgagtttgctcagacagtctcaaatggatagttctgcagttcctaaacctggacctgacttgctaaggaagcagggtcagggttcatttcccatcagttcaatgtctcagttactacagtctatgagttgtcaaagctctcacttgagtagcaatagtaccccgggttgtggggcctcaaatactgctttgccttgctctgctaaccagctgcattttacagatcccagtatgaactctagtgttcttcagaacatacctttaagaggggaagccgtgcactgccacaatgcaaacactaactttgttcacagtaacagtccagtccccaaccaccatcttgcaggtttaataaatcagattcaggctagcgggaactgtgggatgctcagtcagtcgggcatggctttaggaaattccttacatcccaatccacctcagtcaagaatttcaacgtcctccactccagtgataccaaacagcattgttagcagctataatcaaacaagttctgaagcaggtatggttttattagaaaaaagtacccaaaggtactaaacttttctacttttttaaaaaatttgtaccaaaatatttattatgataagaaatgatcctttccccattgtgaaattctcttcatttctttagtatttataattttatttacagaatgctagggatttgtctattgggaagattaacagctaagaggatttcatgtgtttccattatttgttgtcaatctgtgtcattttgaatattgttcgactttcacttggttttataaccattggactccaaactgcaaaataagccatacgaggcagggtttcctggtttgtgagacatgtccttggtctatgccaatataaaagccatctccctagcttttgtttgtattcaggtaaatgaagtttatcttggaaaaatccaaaaaggcaaaaataaatggattttttttcttgctgctgaacagaagtaggtgaatggataggaaaaggtaactagaagttgtacgaagtagaaggctgtcttctaatgtgttttcttatcctagtttgctatccttattatttgtttgagaaaactcaaaaatggatattggctactcccttttaaaaaaaaagctaataatttaagctttctaataaaaaaaaggcttgaaaacctg

SEQ ID NO: 12832 - protein, 229 aa, Homo sapiens
MFPPTANMLLPTGEGQSGRAALRDKLMSQQKDALRKRKQPPTTVLSLLRQSQMDSSAVPKPGPDLLRKQGQGSFPISSMSQLLQSMSCQSSHLSSNSTPGCGASNTALPCSANQLHFTDPSMNSSVLQNIPLRGEAVHCHNANTNFVHSNSPVPNHHLAGLINQIQASGNCGMLSQSGMALGNSLHPNPPQSRISTSSTPVIPNSIVSSYNQTSSEAGMVLLEKSTQRY

SEQ ID NO: 12833 - DNA, 2235 bp, Homo sapiens
  CDS (209)..(535)
gtctgcgagaccgacttggacggagccgagctgaggctcggcttcctgctgatggtcagggttttggcaactccccggtgtgagaggggtagggagtgctcccggcggcgacggggccgagttcaccagccgccggggcagtagtcgaaggcccggcgcggcatgtcctgggtgccgcggtgcgggcagtgaacgcgcgccgggcgggatgggccggcgccgggcgccagagctgtaccgggctccgttcccgttgtacgcgcttcaggtcgaccccagcactgggctgctcatcgctgcgggcggaggaggcgccgccaagacaggcataaagaatggcgtggtgagagcgcagggccactggggctgggtcttgctgcgggctggcggcgattccagggtggccggggggtcgcggggcgggccacactccagcttcgggccctgcccacttctgttgggaagacccgcttgcctgacgcccaggggcgaatttcagtcgagaactcagcgggcggaggagaggcttttaaggtaaagtgaaaactgcacacagctgcagagtcgccaggaacgcttcagctccgcctcagagcagctccaggggtcttatactggccttttccgggaggtcttgcctgccctctagcagcggcgagagtggtgcatttgggtttaggctaagttccttccctctcctgagcttcaccctgttctgtaaaatagaggtaataatcccagtcctgctcactgtgtagatttgtgaggcccaaatgagagaaaaaagactcgagaaacccttgtgaactagaacgtgcagaaagcaaaggggtaagacatcagactcttccctaaacgtgctctctgggcacccctgaacttgctcatccgggttccccctcccacagcactttctgcagctagagctgattaatgggcgcttgagtgcctccttgctgcactcccatgacacagagacacgggccaccatgaacttggcactggctggtgacatccttgctgcagggcaggatgcccactgtcagctcctgcgcttccaggcacatcaacagcagggcaacaaggcagtgaaggccggtgaggagctccctctctacccccttggggaaagggttgaacgagtaaggtcactcttggtgtctctaaagaagtgggtctggaagtagggttttggtagcaagctagaagttgtatgggcacctgccatggagagaggggccagtactccttactgtagaagcctggaacctggccaagtgtttgtgttacaggttccaaggagcaggggcctcgacaaaggaagggagcagccccagcagagaagaaatgtggagcggaaacccagcacgaggggctagaactcagggtagagaatttgcaggcggtgcagacagactttagctccgatccactgcagaaagttgtgtgcttcaaccacgataataccctgcttgccactggaggaacagatggctacgtccgtgtctggaaggtgcccagcctggagaaggttctggagttcaaagcccacgaaggggagattgaagacctggctttagcttccctgcttcctgggaatcaggagcctggacactgccatctctagagcagagtggaggcctggactccctttgctcaccccattcgggtccacagctgaggttgcctctgacaagatgaatgggcactgcctgcccttctagtgaaaaggcttggctatggccctgtgtgactccaggtcccaggaaccttgccttcgtcatctgtggatccatccagaacagcggtatctgaagcccaggccatactccctgcctcctttcttctgcctaccagaggctccagagttgagcttgtccttatctagaaacatgtgaagatgcccaagagcctggaggcactgctgtccttcctgcagaaacagtttctcctcctcccctcagccttgtggccagttcctcttcacatgaagcccctggcatttgctggggaagggactggcctggtacttgctgttagggcaggaaggggcaaaaggaagacttgggtagtaatctgggggttcagatgggtagcactaagccagctggcctaaagatgcaataagttcctaggtagtctacccttaccctgaggaatgggaaaatgaacctcagcccattaggcaggaaaagttgatatttaataaacaaggaaagagtgaactgagacccc

SEQ ID NO: 12834 - protein, 109 aa, Homo sapiens
MGRRRAPELYRAPFPLYALQVDPSTGLLIAAGGGGAAKTGIKNGVVRAQGHWGWVLLRAGGDSRVAGGSRGGPHSSFGPCPLLLGRPACLTPRGEFQSRTQRAEERLLR

SEQ ID NO: 12835 - DNA, 2203 bp, Homo sapiens
  CDS (1327)..(2070)
aaactgataggtgcagatggcatcacatttgtatttgtgtttctttaattatgactcctgagttacttttgatcatccttgcttgcatggaagctttctttttaagtaacgtggacatttaccaaacatcctgcatgtgtcagtagacatgaggcagctgagactatagtgggtagaggaaaaattattggcttggaaataggcatcttggattcaagttccgtatctactgctttaattaagtggctttgaataaattgcacattatccctaaagttaccttcttcaggttttaagttagctgagactaaaatgacttgtaaagattacccaacaagaaagtctgtagtaatgccagcatgtagttcatgctcaatgatgactagctttaatatttattgagcacatactgtgtgctaaactccatgtgttttgcatatatcagtgcatttaataatcacaaaaagtatatgggttttttgaactataatttgtcaccatgttacagaagaggaaactaaggcccagagtgggataaattacttgatcgtggccagttagtagagctgagattcaaaccctggcagtcttgaatctagagcttgtgctctaaactactatagttcattcattcagttccttagaaggagaaagatcctagagcggcactgttcagtatggtagccactagccacatgtggctgttgagcacttgaaatgtggctagtctaaactgagatgtgctaaagttaaaatacaaaccgattttgaagatgtaatgtgaaatatatgtatatataaagtatctcattaatactgtttagtattggttacattttgaaatgataatgttttcggtaaataatatgttaaaattaatttcacccttaaaaacatttttaatattactagatttctattagacagcactatacaagaggaaatcactggacttgaagctttaaatgtttagcacacatctagcaaacgtctgtagccttctgtacaccaggcatatggtactgggtgagagtcttggggaataaaacagaatcagacattgcccatgaggtgcccacagactagccagacggggtgggtgtctgtgtttttggtttggttgaagttgagttgaccactttatccgctgttgatttttgctttggctaggtgtctgcctgtatcccagtgttcaggctggctagacggcggaagaagatcctattttactgtcacttcccagatctgcttctcaccaagagagattcttttcttaaacgactatacagggccccaattgactggatagaggaatacaccacaggcatggcagactgcatcttagtcaacagccagttcacagctgctgtttttaaggaaacattcaagtccctgtctcacatagaccctgatgtcctctatccatctctaaatgtcaccagctttgactcagttgttcctgaaaagctggatgacctagtccccaaggggaaaaaattcctgctgctctccatcaacagatacgaaaggaagaaaaatctgactttggcactggaagccctagtacagctgcgtggaagattgacatcccaagattgggagagggttcatctgatcgtggcaggtggttatgacgagagagtcctggagaatgtggaacattatcaggaattgaagaaaatggtccaacagtccgaccttggccagtatgtgaccttcttgaggtctttctcagacaaacagaaaatctccctcctccacagctgcacgtgtgtgctttacacaccaagcaatgagcactttggcattgtccctctggaagccatgtacatgcagtgcccagtcattgctgttaattcgggtggacccttggagtccattgaccacagtgtcacagggtttctgtgtgagcctgacccggtgcacttctcagaagcaatagaaaagttcatccgtgaaccttccttaaaagccaccatgggcctggctggaagagccagagtgaaggaaaaattttcccctgaagcatttacagaacagctctaccgatatgttaccaaactgctggtataatcagattgtttttaagatctccattaatgtcatttttatggattgtagacccagttttgaaaccaaaaaagaaacctagaatctaatgcagaagagatcttttaaaaaataaacttgagtcttgaatgtg

SEQ ID NO: 12836 - protein, 248 aa, Homo sapiens [sequence omitted]

SEQ ID NO: 12837 - DNA, 1671 bp, Homo sapiens
  CDS (119)..(1573)
aaaaagtgatgaaggcctacgagtgcggcgcggcctgaaggggcacgcgggggacctgcaaagctagtgaggggcggggcaggcggcgcggtgggggcgggccgagcccggaggccagatgagcggacacagccccacgcgcggggccatgcaggtggccatgaacggtaaggcccgcaaagaggcggtgcagactgcggctaaggaactcctcaagttcgtgaaccggagtccctctcctttccatgctgtggctgaatgccgcaaccgccttctccaggctggcttcagtgaactcaaggagactgagaaatggaatattaagcccgagagcaagtacttcatgaccaggaactcctccaccatcatagcttttgctgtagggggccagtacgttcctggcaatggcttcagcctcatcggggcccacacggacagcccctgcctccgggtgaaacgtcggtctcgccgcagccaggtgggcttccagcaagtcggtgtggtgacctatggtggtgggatctggagcacctggtttgaccgtgacctgactctggctggacgcgtcattgtcaagtgccctacctcaggtcggctagagcagcagctggtgcacgtggagcggcccattcttcgcatcccacacctggccatccatctgcagcgaaatatcaacgagaactttgggcccaacacagagatgcatctagtccccattcttgccacagccatccaggaggagctggagaaggggactcctgagccagggcctctcaatgctgtggatgagcggcaccattcggtcctcatgtccctgctctgtgcccatctggggctgagccccaaggacatagtggagatggagctctgccttgcagacacccagcctgcggtcttgggtggtgcctatgatgagttcatctttgctcctcggctggacaatctgcacagctgcttctgtgccctgcaggccttgatagattcctgtgcaggccctggctccctggccacagagcctcacgtgcgcatggtcacactctatgacaacgaagaggtggggtctgagagtgcacagggagcacagtcactgctgacagagctggtgctgcggcggatctcagcctcgtgccagcacccgacagccttcgaggaagccatacccaagtccttcatgatcagcgcagacatggcccatgctgtgcatcccaactacctggacaagcatgaggagaaccaccggcctttattccacaagggccccgtgatcaaggtgaacagcaagcaacgctatgcttcaaacgcggtgtcagaggccctgatccgagaggtggccaacaaagtcaaggtccccctgcaggatctcatggtccggaatgacaccccctgtggaaccaccattggacctatcttggcttctcggctggggctgcgggtgctggatttaggcagcccccaactggccatgcactctatccgggagatggcctgcaccacaggagtcctccagaccctcaccctcttcaagggcttctttgagctgttcccttctctaagccataatctcttagtggattgagccctcttggaaagacttctctgccatccctttgcacctgagaggggaagttctcagctgagctgaagctggattattaaagtggattgtcactc

SEQ ID NO: 12838 - protein, 485 aa, Homo sapiens [sequence omitted]

SEQ ID NO: 12839 - DNA, 2605 bp, Homo sapiens
  CDS (64)..(1347)
atacctttgagtcttgcagaagagaaactaccaacaggcattaatcctctcactctacacatcatgagaaggacaaaagaatatgtaagtaatgacgcggcacagtcagatgatgaagagaagttacagtctcagccaacagatactgatggtggaaggttaaaacagaaaacgactcaactaaagaagtttcttggaaaatcagtaaagagagcaaagcaccttgctgaggaatatggtgaacgtgctataaataaagttaaaagtgttagagatgaagtgtttcatactgatcaagatgatccttcatcaagtgatgatgaaggaatgccatacacaagaccagttaaattcaaagcagcacacggtttcaaaggaccttatgattttgatcagatcaaagtggtgcaagatcttagtggtgaacatatgggagctgtttggaccatgaaattttctcactgtggccgattacttgcctcagctggacaagacaatgtagtgagaatatgggctttaaaaaatgcttttgactatttcaacaatatgcgaatgaaatacaatactgaaggacgtgtgtccccatcaccctctcaggaaagtctaagttcatcaaaatcggatacagatacaggggtatgcagtggaactgatgaagaccctgatgataaaaacgcaccctttcggcaacggccattttgcaaatataaaggacatactgctgatctccttgatctttcatggtctaaaaactactttcttctttcttcttcaatggataaaacagtcagattatggcacatttctcgaagagaatgcctttgctgttttcaacatatagatactgccatagcttttcatccaagagatgacaggtattttctaagtgggtctttggatggaaagctccgcctttggaacatacctgacaaaaaagtggctttgtggaatgaagtagatggtcagacaaaattgatcacagctgcaaatttctgtcagaatggcaaatatgcagtgattgggacatatgatggcagatgtattttctatgatacagagcatttgaaataccatacacaaatacatgtccgatctactagagggcgcaacaaggttggaagaaaaattactggcattgagcctttacctggagaaaataagatattggtaacctcaaatgactccagaatcagactatatgatttgagagatttgtcactatccatgaagtataagggttacgtcaatagcagcagccagatcaagcaagtttcagccatgattttacttacctcgttagtggttcagaagataagtatgtttatatctggagtacctaccatgacctaagcaagtttacttcagtcaggagagatcgtaatgacttctgggaaggtattaaagcccacaatgcagttgttacatcagccatctttgcaccaaacccaagtttgatgttatctttggatgtgcaatctgaaaaatcagaagggaacgagaaaagtgaagatgctgaagttttggatgccacaccttctggtattatgaagacagataacacagaagttcttctctctgctgacttcactggagcaatcaaagtgtttgttaataaaagaaaaaatgtatcttaatttgaaatggcatttaaaataaacatatcagtaagtttctatatgtatcaaaactgaaaaaatagtgttccaggctaacatacttttttaatttttattgaaagttgttcaaatataatatattctttgagaggcagtgttaatgatctaggaaaccctgggctgatagagtagaaaggaatatggctagaataacattgccaaacattaggctttatgttttgttatgtttgtgttttcgttgtataattatgaacatgcacaagtttctgcatgaaaagatattaatatattaatcacatgtatgtgccttttggttacatgcattaaatctaacagagttaaattatttcagtggctcttttggcctcttactaggggggatagtcttgtttctagcttaaacaattttttttttgcacaaaatttcatttttaataaaagtggtatcttttgactgagttattgttttgaaaatggtatataggtttccagtaggtcaacaaccatatgtaaatggtttttataaatttctcaatttggggacaagatttttttgtggtctaaattgtgggcttaagattcttttctttatatgtgtacatataatttttttttctttgccacactggagcacaatgtttctatgtaaagaattattttcattctttatccatgagcaccaggctttgctcacttaaaaaaaaattaagccacattaaggagtgagtcttcttttttacaataatgtaaaaattaaactgtttacatttttttaaagcattgtagtttttaaaaattaagctgttttgttttgtgttgttgaatttgaaagcctttgtaaatatcaatataatgtaccaatgaaataacatctggggcaatgaaaccctgatcatgttgttgatggttagcatatgtttctgaaaattaaatatgtattattaaaagttggtctccaacacttgttt

SEQ ID NO: 12840 - protein, 428 aa, Homo sapiens
MRRTKEYVSNDAAQSDDEEKLQSQPTDTDGGRLKQKTTQLKKFLGKSVKRAKHLAEEYGERAINKVKSVRDEVFHTDQDDPSSSDDEGMPYTRPVKFKAAHGFKGPYDFDQIKVVQDLSGEHMGAVWTMKFSHCGRLLASAGQDNVVRIWALKNAFDYFNNMRMKYNTEGRVSPSPSQESLSSSKSDTDTGVCSGTDEDPDDKNAPFRQRPFCKYKGHTADLLDLSWSKNYFLLSSSMDKTVRLWHISRRECLCCFQHIDTAIAFHPRDDRYFLSGSLDGKLRLWNIPDKKVALWNEVDGQTKLITAANFCQNGKYAVIGTYDGRCIFYDTEHLKYHTQIHVRSTRGRNKVGRKITGIEPLPGENKILVTSNDSRIRLYDLRDLSLSMKYKGYVNSSSQIKQVSAMILLTSLVVQKISMFISGVPTMT

SEQ ID NO: 12841 - DNA, 1562 bp, Homo sapiens
  CDS (35)..(511)
attatgacacccgtctgtgtcactgctcttgacaatgacagaacctacaaaaggatccagggtcctcagcccccatctgcctcccagcctcacttcctgcacttccatgaaaataacctttgttccccctacaaggaacttcttgcagttatccaaatgttccctgtcctggtgcacactgaggcccctgcatggagccaatccttcacttaaatcactatgcccccatgccttcatctggagaactcacacttctgttcagaccctcagatgtgactgcttccgtgttactgctttctctgccatttcactgggcctggaaaataccttctgcaaactccagggagagttactcagctcccccttccctggtgctttgctgatgcctctgtcacagcactcagcacatgacactcggattactggctcacagtcccctgcttccaaaggctctgcctgcatgcctccaggggttatttccagagcacccagctcagtgcctgtccagtggtgaacgtccatacatgtgtgttgaatgaatgagtggacagatgtgtgcagggagaatgtgaattcactcccacaaagcttgtatgtgccaaaaaatattggttatttttcataattgagctaatcttgtttccctagccctatctcctacatggcaggagcatagagaaatttttatccagctgagtaaatgtagcccagtgctgtattttaaacagtcccttaaggtaaagtgatttgtctctcagattgcctctctcccagctcctctcttggacggagctggacacatggcggagagggactttgagatcccaggaagcagggaatgatgagggctggtcctaggagccacgcgagccctctggatgcttgctcatctctgctgcatggggctaggctgaactgctgtctgaactggtacctgctgaggtccatctggttagggcatccactgctggagtccatgcccttagggcatccactgctggagtccatgtcctctacttgcctccggccttgaaatctccacctctgctctctgacccttgagttctgttggcccactgactttagcacctctatacctcagctgaggacatggacacttccaggtccctcacactccgtggaggagctagaggagacagcagccctatgacaggctcattggcctatcggtgtcccatcacagcctctgtaacagccaggataagcttcaagccaagggctgaccttctcccagggtctgccgaggcactccaccagccccagtgttgctgggcttccccgtggccatctgggtgtttctaaagcaactccccaccaacctcttgggctgtggtgaccaagggctaaaaattaagtggggaccctggtatctgacttttgctccacttctgacaccttctttctctcccgtttcactaggactggaaaatacaggctttttttcccaatccttgtttctctcaaaccaagacctcatctacataaaacatctagggtcaggcccatccactctagctcttattacagagaaagagctccag

SEQ ID NO: 12842 - protein, 159 aa, Homo sapiens
MTEPTKGSRVLSPHLPPSLTSCTSMKITFVPPTRNFLQLSKCSLSWCTLRPLHGANPSLKSLCPHAFIWRTHTSVQTLRCDCFRVTAFSAISLGLENTFCKLQGELLSSPFPGALLMPLSQHSAHDTRITGSQSPASKGSACMPPGVISRAPSSVPVQW

SEQ ID NO: 12843 - DNA, 1980 bp, Homo sapiens
  CDS (6)..(1598)
attccatggcggcgcggcggcgacggagcaccggcggcggcagggcgagagcattaaatgaaagcaaaagagttaataatggcaacacggctccagaagactcttcccctgccaagaaaactcgtagatgccagagacaggagtcgaaaaagatgcctgtggctggaggaaaagctaataaggacaggacagaagacaagcaagatggtatgccaggaaggtcatgggccagcaaaagggtctctgaatctgtgaaggccttgctgttaaagggcaaagctcctgtggacccagagtgtacagccaaggtggggaaggctcatgtgtattgtgaaggaaatgatgtctatgatgtcatgctaaatcagaccaatctccagttcaacaacaacaagtactatctgattcagctattagaagatgatgcccagaggaacttcagtgtttggatgagatggggccgagttgggaaaatgggacagcacagcctggtggcttgttcaggcaatctcaacaaggccaaggaaatctttcagaagaaattccttgacaaaacgaaaaacaattgggaagatcgagaaaagtttgagaaggtgcctggaaaatatgatatgctacagatggactatgccaccaatactcaggatgaagaggaaacaaagaaagaggaatctcttaaatctcccttgaagccagagtcacagctagatcttcgggtacaggagttaataaagctgatctgtaatgttcaggccatggaagaaatgatgatggaaatgaagtataataccaagaaagccccacttgggaagctgacagtggcacaaatcaaggcaggttaccagtctcttaagaagattgaggattgtattcgggctggccagcatggacgagctctcatggaagcatgcaatgaattctacaccaggattccgcatgactttggactccgtactcctccactaatccggacacagaaggaactgtcagaaaaaatacaattactagaggctttgggagacattgaaattgctattaagctggtgaaaacagagctacaaagcccagaacacccattggaccaacactatagaaacctacattgtgccttgcgcccccttgaccatgaaagttatgagttcaaagtgatttcccagtacctacaatctacccatgctcccacacacagcgactataccatgaccttgctggatttgtttgaagtggagaaggatggtgagaaagaagccttcagagaggaccttcataacaggatgcttctatggcatggttccaggatgagtaactgggtgggaatcttgagccatgggcttcgaattgccccacctgaagctcccatcacaggttacatgtttgggaaaggaatctactttgctgacatgtcttccaagagtgccaattactgctttgcctctcgcctaaagcatacaggactgctgctcttatcagaggtagctctaggtcagtgtaatgaactactagaggccaatcctaaggccgaaggattgcttcaaggtaaacatagcaccaaggggctgggcaagatggctcccagttctgcccacttcgtcaccctgtaagtactcagaaccaggaggactagaagactccttttggccagataagactacgttctctattgcagcttctgaaccagagactgatgttgacacactttttttccatttggcaggaatgggagtacagtgccattaggaccagcaagtgacacaggaattctgaatccagatggttataccctcaactacaatgaatatattgtatataaccccaaccaggtccgtatgcggtaccttttaaaggttcagtttaatttccttcagctgtggtgaatgttgatcttaaataaaccagagatctgatcttcaagcaagaaaataagcagtgttgtacttgtgaattttgtgatattttatgtaataaaaactgtacaggtct

SEQ ID NO: 12844 - protein, 531 aa, Homo sapiens [sequence omitted]

SEQ ID NO: 12845 - DNA, 1208 bp, Homo sapiens
  CDS (127)..(489)
attttgactgagcaaccctagtgacaggagccgaagcagcagcgcaggttgtccccgtttcccctcccccttcccttctccggttgccttcccgggccccttacactccacagtcccggtcccgccatgtcccagaaacaagaagaagagaaccctgcggaggagaccggcgaggagaagcaggacacgcaggagaaagaaggtattctgcctgagagagctgaagaggcaaagctaaaggccaaatacccaagcctaggacaaaagcctggaggctccgacttcctcatgaagagactccagaaagggcaaaagtactttgactcaggagactacaacatggccaaagccaagatgaagaataagcagctgccaagtgcaggaccagacaagaacctggtgactggtgatcacatccccaccccacaggatctgccccagagaaagtcctcgctcgtcaccagcaagcttgcgggtggccaagttgaatgatgctgcccggggctctgccagatcctgagacgcttcccctccctgccccacccgggtcctgtgctggctcctgccccttcctgcttttgcagccaggggtcaggaggtggctcgggtgtgggctggagaggcagaagccctttcctgttggtgtcccagcacatggagccccttgggctgagcaccaagaccttgaaccttttttgttttaccttttttccaaataacagttgggagaaatatcaatgaaattctgggggtgggggtggggttgaaagggtggggtgggagatatggaggagtatgaattagggcttggagttggtaaaaacattcctgactatccttcttaaccacgtggctgatgtggggtaggtatgaggggaaggaagtggagtagcctaatgaaaaggggttctagttgagctctgtagataaatgccttgtttcagtgtggttggagacctggtgtcagataaaagaaactccatccgcacagacagatgcaaacagctcctctagttctgcagagctagttgagaactcaacattaatcattttaaaaagtactgtccttgaaatagatttgctgtgggaagaagggcagtgagtgtgggagaaaggagccgtgagcgtggggaaccccacagagcccaaaggactttttcagtattcgaaataaacaaaacaaaaacccatgaaaaaacccaacccag

SEQ ID NO: 12846 - protein, 121 aa, Homo sapiens
MSQKQEEENPAEETGEEKQDTQEKEGILPERAEEAKLKAKYPSLGQKPGGSDFLMKRLQKGQKYFDSGDYNMAKAKMKNKQLPSAGPDKNLVTGDHIPTPQDLPQRKSSLVTSKLAGGQVE

SEQ ID NO: 12847 - DNA, 1928 bp, Homo sapiens
aatttgttcaagtaggccatggccagacagacagtggggattgtgcatatttgatgacatcatagagcactgcagtccaacttcatttaaatatgtagaatattttcggtggccaatgctactaaatatgcgagataacaaccctgaagtcaggcaagctgctgcttatggcctgggtgtcatggcacagtttggtggagatgattatcgttctttatgttcagaagctgttccacttctggtaaaagttattaagtgtgcaaattccaaaaccaaaaaaaatgtcattgctacagagaactgtatctcagcaatagggaagattttgaagtttaagcctaactgtgtaaatgtagatgaagttcttccacactgattatcatggcttccactgcatgaagataaagaggaagctattcagactttgagttttctctgtgacctaattgaaagtaaccacccagttgtaattggtccaaataattccaatcttcccaaaataatcagtataattgcagaaggaaaaattaatgagactattaactatgaggatccttgtgccaaacgcctagctaatgtcgtgcgtcaggtacagacttctgaagatttatggttggaatgtgtatcacaacttgatgatgaacagcaggaagccttacaggagttgctaaattttgcttgaagcactttaatataacttgaatattatctattataaaagtaactacaaataagtgttgtgaatagattttattataaatcagagaactgttttctccctgctaagcagtttatagttcttctccatgtttctccagaattaatcagtgttagtcctctgtttatctcgcatgttttatcttccaaacacagaccttggtgataacctgtgcttcaaactgtcttaaacaatgtttgtcacctttcccctagttgatgtaaagtatataaattgttgctatttgtttgaactattattgatgctagccaagcagtatacttgatgtgaagatgtcatgctatcacaatatgctaagagctcacaaaaataagatagaatttccaggacaaacatctttggaattgtgagtgaaggatatagtggcaggcttgtccctctttaattaatactcttggtatttgtggtgatgggaggatgctgttactaggagagttttgagatactgcagtggatgtgggatgtatatgaacttcttcataatgtactcctgggaactgggtaggacatatccatattgtagttcccaaggtgtctggttgagagttagagaacttttaaatttctttagccagacaggtctctatttttttaagttatccaggactccaagaaccatagttactgaaaagggagtcctgatacatctaatattggtagcatgtaacagtgtttgacaaagagtaagtaagcagtattcttgggagtcagtgttatgtgtttcagcagagtattattttgtatatgtatgccattttctccctgcaaagcagctcaacaagagaaaaagctctagttatagggcttaaattgatttctatttcaaataatttcctaagagattctagagtagaactgaagagtattctattggaaaagtgaaaggaaagaaatgtaattttctttgaacatgaaaaagaaaacaactttgagagtagtcatttagcagtagatgtgcattattatgagaaaacagttctataagtccagggttaattatattaattggaatgtcagtctttaatgtcgagcttattgtagggtagaaaagagctttctactcagctaacgattactcattgatccaaaacttaaatacatctataatttcctggggctattgtgagtactgtgtatgtatttagcaaatatttaagacctagtaagtgctcaataaattgtagctgtt

SEQ ID NO: 12848 - DNA, 1920 bp, Homo sapiens
  CDS (355)..(864)
ggactatgtctgcatttctgacaattactggctgggaaagaagaagccctgcatcacctacggcctcaggggcatttgctactttttcatcgaggtggagtgcagcaacaaagacctccattctggggtgtacgggggctcggtgcatgaggccatgactgatctcattttgctgatgggctctttggtggacaagagggggaacatcctgatccccggcattaacgaggccatggccgccgtcacggaaatcaggagcacaagctgtacgacgacatcgactttgacatagaggagtttgccaaggatgtgggggcgcagatcctcctgcacagccacaagaaagacatcctcatgcaccgatggcggtacccgtctctgtccctccatggcatcgaaggcgccttctctgggtctggggccaagaccgtgattcccaggaaggtggttggcaagttctccatcaggctcgtgccgaacatgactcctgaagtcgtcggcgagcaggtcacaagctacctaactaagaagtttgctgaactacgcagccccaatgagttcaaggtgtacatgggccacggtgggaagccctgggtctccgacttcagtcaccctcattacctggctgggagaagagccatgaggacagtttttggtgttgagccagacttgaccagggaaggcggcagtattcccgtgaccttgacctttcaggaggccacgggcaagaacgtcatgctgctgcctgtggggtcagcggatgacggagcccactcccagaatgaaaagctcaacaggtataactacatagagggaaccaagatgctggccgcgtacctgtatgaggtctcccagctgaaggactaggccaagccctctgtgtgccatctccaatgagaaggaatcctgccctcacctcacccttttccaacttgcccagggaagtggaggttccctctttcctttccctcttgtcaggtcatccatgactttagagaacagacacaagtgtatccagctgtccacgggtggagctacccgttgggcttatgagtgacctggagtgacagctgagtcaccctgggtaagttctcagagtggtcaggatggcttgacctgcagaagatacccaaggtccaaaagcacaaggtctgcggaaagttctggttgtcggctgggcaccacggctcacacctataatcgagcactttgggaggccaagacaggaggatcacttgaggccaggagtctgagacaagcctaggcaacaaaacaagactctgtctctacaaaaagtttaagaaatgagccagacatggtggtgtatgcctgtagtcccagccactcagaaggctgaggcaggaggatcgcttgagaccaagagtttgagcctgcggtgagctgtgaatgcaccacggcactcaagcctgggcaatgtagcaagatcctgtctctacaagaaattttttaaaaatgagccaagtgtggtggtgcatgcctgtagttccagctactcaggacactgacgtaggagggttgcttgagactgagagttggaggctgcgatgagccatgaatgccccactgcactccagcctgggcgacagaacgagaccccatctcaaaaaaaataagttctggttgtcattgaattgggataaacagagagcttgatgctttctgccttctgtctcaggtgatgcattgcacatttgggatatttggaaaggaaatgaggaaagaaattagggcctcctctgatctctcgctatctgcgggtcctgtccttttctcaagaccttcaccattactggtgttttcctgtcttctctttagtatgatccctcaaaacctcactaactggaaggatgattttgtctcagtttgtactcctaaataaaaagtaaacatgacacctct

SEQ ID NO: 12849 - protein, 170 aa, Homo sapiens [sequence omitted]

SEQ ID NO: 12850 - DNA, 2035 bp, Homo sapiens
  CDS (111)..(485)
ctgaaaacagtgaaactgagttagaaaggattttgcgtcgcagaaaggtgacagcagaagcagatagcagtagtccaactgggatattagccacctcagagtccaaatccatgccagtgttgggttctgtatccagtgtaacaaaaacagccttgaacaagaaaactctggaggcagaattcaacagcccgtcccccccaacacctgagccaggtgaagggccccgtaaattggaaggatgcacaagttccaaggttacgtttcagcctcccagtagcattggatgcaggaaaaaatacattgacggtgaaaaacaagccgaaccagttgtagttttagatcctgtttctacacatgaaccccaaaccaaagaccaggttgctgaaaaagatccaactcaacacaaggaggatgaaggcgaaattcaaccagaaaacaaagaagacagcattgaaaacgtgagagagacagacagctccaactgctgatccataaaccagaagcctgacatgtttggaagtccttttcaataagcacatgattagtgttgttatattggcaagggctgtagacattctgctctggtcactgtattcagaatacaggttcttttctggtgtcacttttgtaagtagcaactataaacataagtaagctgtttagcaaaacacacattcctagtaggttttggttttttgatctttataaagatgaggtttttttcctagttactgtattaagtatgacttcttttagaaggttacaaaaaaattcagatgttgatacctttttaggaaatgtgcataccactcatcaaatggaatgctgaaagtttgaggtgcttgtatataatcggataaacaaaactgatcaacccaatgtgattttaaaagcccccaaagaagcttctgttttgggtctgatcctcttgatggagaaactgcagcagcatggaaattgttgggtactgtggcatacaagttattttctacagtagactgagataaactgaaaactcaggagctggcatcaaactcgtagtcccatagtcagtgttaattacacacattgttaactattggatgaaaaatacatgctattgattgtgtccaaagcctcccgaggacctccgtggggatgctctggtagcctgaatacagaactgaggtgaaagtccaaaccttgaattttacagtagtaagttggtaaaccatgtgctctgtgctatgagttaattatgttttcccaaatactaatgtggcacaagtaccatattttatcagagttcttatgtacagtatggtgaagataagtgacaagcacacatttttcttgcttcactgctgttctatattacacaggtttgttgttgttttttttaaaaaagaaattaagcagtagttagtctctaaaaatacaatgtttcaggctaccacagtgaataaatagaaatgtaatcagggattaaaaaaaaaacttatgcagcttttcaaagctgattgtttcaaaattggtgtttatttaaaataagtggtaatgtacttgaatgcactttttatgacaatgattcagtaatggtaattttactattaaagaaagtgaaaggtttagttttgttagcatggctcagcatgtagctgtcaggtgtttttcacctaagggcaaaagaaaatgatagtaataattgcagtagttgtattgtattgtatttttgcacgtgtggtaagcataggcttgaagaggtgggtaggcaggtacatgtacttcctaaatttggagataattatctttctgtaagttcgttatgcttgactgtttccatgttctcccaataatgattttatagttacttatcactttactcatggagaattaaaacgtaatgtttttcaactgtatctttctttaactggataatactgctatatgatatgcttactacagactgcattaattcacgaaacgaattctgttatgctgtaatttgaactctcctcaccacaacttattaaaaaggcaccaatagtttcccatt

SEQ ID NO: 12851 - protein, 125 aa, Homo sapiens
MPVLGSVSSVTKTALNKKTLEAEFNSPSPPTPEPGEGPRKLEGCTSSKVTFQPPSSIGCRKKYIDGEKQAEPVVVLDPVSTHEPQTKDQVAEKDPTQHKEDEGEIQPENKEDSIENVRETDSSNC

SEQ ID NO: 12852 - DNA, 1966 bp, Homo sapiens
  CDS (229)..(1821)
agttggtggaaccggagcttcgagtccgtccccggtgctgcctgcgcgttcacctgagtctcgctggagctcttctcgcccgcccacctcatctcaacccactttccgcggggagcggcgccaagctgggccttcctcggatcaggcgtcccctgaagtcggcacgcccctctgcgtcccccttcggtcccgctaggaccccgtccgggctgccgtcgcctcgtcgctatggcgcccaccatccagacccaggcccagcgggaggatggccacaggcccaattcccaccggactctgcctgagaggtctggagtggtctgccgagtcaagtactgcaatagcctccctgatatccccttcgaccccaagttcatcacctaccccttcgaccagaacaggatcgtccagtacaaagccacttccttggagaaacagcacaaacatgacctcctgactgagccagacctgggggtcaccatcgatctcatcaatcctgacacctaccgcatcgaccccaatgttcttctagatccagctgatgagaaacttttggaagaggagattcaggcccccaccagctccaagagatcccagcagcacgcgaaggtggtgccatggatgcgaaagacagagtacatctccactgagttcaaccgttatggcatctccaatgagaagcctggggtcaagattggggtttctgtgaagcagcagtttaccgaggaagaaatatacaaagacagggatagccagatcacagccattgagaagacttttgaggatgcccagaaatcaatctcacagcattacagcaaaccccgagtcacaccggtggaggtcatgcctgtcttcccagactttaagatgtggatcaatccatgtgctcaggtgatctttgactcagacccagcccccaaggacacgagtggtgcagctgcgttggagatgatgtctcaggccatgattaggggcatgatggatgaggaagggaaccagtttgtggcctatttcctgcctgtagaagagacgttgaagaaacgaaagcgggaccaggaggaggagatggactatgcaccagatgatgtgtatgactacaaaattgctcgggagtacaactggaacgtgaagaacaaagctagcaagggctatgaggaaaactacttcttcatcttccgagagggtgacggggtttactacaatgagttggaaaccagggtccgccttagtaagcgccgggccaaggctggggttcagtcaggcaccaacgccctgcttgtggtcaaacatcgagacatgaatgagaaggaactggaagctcaggaggcacggaaggcccagctagaaaaccacgaaccggagggggaagaggaagaggagatggagacagaagagaaagaagctgggggctcagatgaggagcaggagaagggcagcagcagtgagaaggagggcagtgaagatgagcactcgggcagcgagagtgaacgggaggaaggtgacagggacgaggccagtgacaagagtggtagtggtgaggacgagagcagcgaggatgaggcccgggctgcccgtgacaaagaggagatctttggcagtgatgctgattctgaggacgatgccgactctgatgatgaggacagaggacaggcccaaggtggcagtgacaatgattcagacagcggcagcaatgggggtggccagcggagccggagccacagccgcagcgccagtcccttccccagtggcagcgagcactcggcccaggaggatggcagtgaagctgcagcttctgattccagtgaagctgatagtgacagtgactgagtcccagggcattcagggctggttcagacaccattattgtgagcagcaaagcacttttctagtggtctgtttgtgagcctttcacttgtttgttccccacccccaaacctttgctgttaataaagtcaacttctctttaaag

SEQ ID NO: 12853 - protein, 531 aa, Homo sapiens
MAPTIQTQAQREDGHRPNSHRTLPERSGVVCRVKYCNSLPDIPFDPKFITYPFDQNRIVQYKATSLEKQHKHDLLTEPDLGVTIDLINPDTYRIDPNVLLDPADEKLLEEEIQAPTSSKRSQQHAKVVPWMRKTEYISTEFNRYGISNEKPGVKIGVSVKQQFTEEEIYKDRDSQITAIEKTFEDAQKSISQHYSKPRVTPVEVMPVFPDFKMWINPCAQVIFDSDPAPKDTSGAAALEMMSQAMIRGMMDEEGNQFVAYFLPVEETLKKRKRDQEEEMDYAPDDVYDYKIAREYNWNVKNKASKGYEENYFFIFREGDGVYYNELETRVRLSKRRAKAGVQSGTNALLVVKHRDMNEKELEAQEARKAQLENHEPEGEEEEEMETEEKEAGGSDEEQEKGSSSEKEGSEDEHSGSESEREEGDRDEASDKSGSGEDESSEDEARAARDKEEIFGSDADSEDDADSDDEDRGQAQGGSDNDSDSGSNGGGQRSRSHSRSASPFPSGSEHSAQEDGSEAAASDSSEADSDSD

SEQ ID NO: 12854 - DNA, 1498 bp, Homo sapiens
  CDS (143)..(1201)
gctgggaccctgaggcggccgtggttaggcggctccccggcggctcctccgcggcggtgacggcgaccgcactccccgcttcccgctccccgcgctcctccgcccgggtccgccagccgaggccgctcccgagcgtcggaagatgccggccgtgtccaagggggacgggatgcggggcctggcggtcttcatctcggatatccgcaactgtaaaagtaaagaagcagaaataaaaaggataaacaaggaactggcaaatatcagatcaaaatttaaaggtgacaaggctcttgatggctatagtaaaaaaaagtacgtctgcaagttgctcttcatctttctccttggtcatgacattgactttggacacatggaggctgtgaacctgctgagttcaaacagatacacggaaaagcagatcggctaccttttcatctctgtgttggtgaactcaaacagtgagctgatccgcctgatcaacaacgccatcaagaatgacctggccagccgcaaccccaccttcatgggcctggccctgcactgcatcgccagcgtgggcagccgggagatggccgaggccttcgccggggagatccctaaggtcctcgtagccggagacactatggacagcgtgaagcagagcgcggccctgtgcttgctgcgcctgtacaggacgtcccccgatcttgtccccatgggcgactggacatcccgagtggtgcacctgctcaatgaccagcacttgggtgtggtaactgcagccacaagtctgatcaccactttagcacagaagaacccagaagagtttaaaacctccgtgtctctggctgtctctaggctaagcagaatcgtgacgtctgcatccacagatctccaggattacacttactattttgtcccggctccctggctgtctgtcaaactgctgagactgctgcagtgctacccacccccagaccctgcagtgcgaggccgcctgactgagtgcctggagaccatcctgaacaaagcccaagaaccgcccaagtcgaagaaggtccagcactccaacgcgaagaatgccgtgcttttcgaggccatcagcttaatcattcaccatgacagtgagccgaacctgcaagcccagatgtaccggctcacgctgcgcacaagtaaggaagccgtttctcagagattatgtgaattgctctcagcgcagttttagtcctgaggatggaagaccaggcttgtgtgtcttgtgttgtcttcgtctgtgccgtttgtcttcgtggccatcctgcagatgagcaccgtgtccagtgccacagcacaaggcgcctccccgccccgccaccccacacctctcccctttgggctggacgggaacacacgtgtgtggctcaggaggaaaagctcagcctggactgtggcagccacggcagaaggtggatcttgggatcaatttttataaaaatcgagacagttctgtggttaaatctacaaattaaagggaaattag

SEQ ID NO: 12855 - protein, 353 aa, Homo sapiens
MPAVSKGDGMRGLAVFISDIRNCKSKEAEIKRINKELANIRSKFKGDKALDGYSKKKYVCKLLFIFLLGHDIDFGHMEAVNLLSSNRYTEKQIGYLFISVLVNSNSELIRLINNAIKNDLASRNPTFMGLALHCIASVGSREMAEAFAGEIPKVLVAGDTMDSVKQSAALCLLRLYRTSPDLVPMGDWTSRVVHLLNDQHLGVVTAATSLITTLAQKNPEEFKTSVSLAVSRLSRIVTSASTDLQDYTYYFVPAPWLSVKLLRLLQCYPPPDPAVRGRLTECLETILNKAQEPPKSKKVQHSNAKNAVLFEAISLIIHHDSEPNLQAQMYRLTLRTSKEAVSQRLCELLSAQF

SEQ ID NO: 12856 - DNA, 2167 bp, Homo sapiens
  CDS (204)..(710)
aagagacagtgtcttgctctgcctcctaggcaggagtgcggtctcacgataacagttcactgcagcctccatctcctgggctcaagcaatccacccacctcggcctcccacgtagctggggctacaggcacgcatcaccatgcctggctcttgtcagtatgaatccctgctgtgtccccagcatctagagcagagcctggcacatggcaggcccatctttgtggagtgaactgggaacaggagcgctgggatggtggagtgttctaagtgagacagccacagtgcccgtcctgtttgctcctctcgcccgaactgccactttcagtgtcaggactgggaagagcataggcagaaaggcctggaatccagggagccccaggctgcccactgcccaccgcccacctcagcctggcccagcactcagagggtctcccacctcggcctggcccagcgcacagaggcctcccacctcggcctggccaagcgcgcagaggcctcccacctcggcctggcccagcgcgcagagggcctcccacctcggccttgcccagcgtgcagagagtctccaggatcttgtgctgcagcaggtactccaggcagggccctgcctcacccgcggccgcctgctgctgctcttcatacaccaggatatccagcatctgcttcagccgccagggaatgtctgtcttcttggcgggggtgctttcatctaatgatgtttgggaaacaagggtgagtagggtaaagaggggcaccccggcttgaaaacttcaccctctcctgccaaagcccagaaaggggaggtcctgtctgggagaggtgggggaagacagctgctggcaactgggaaatggaagtttacagtgaatgcttcaatatttaagaagacaaaagtccttccaggctcaggacacagtcctctgagaacgcatgcatgcccagccctttatcagggggcagcagcatcggtttccttcaaaccctaggatgggtacagagacagggacacatggtcctgggcccacagaaggctgctgtcagctctgggcctgagtggacactgtgggctcagggctcttgtcacataacttagaagctgtaattccagcagctgcctgagagagaacctcctggggcctcccccactgacactcagagaaggcaaacctctgtttttcacaaagcagaaaaaaacatctgtgccaccaccttcaggtctgacccagtcctgctccctgtaccaacgccctgacggggaagctacttagtgggggcttttgcagtcagagtctcagtgtgtgttttaaagaaagttctggtgcttcagggctagacttggagcaccccctagctttcctttaaggaacaggagcttgagtagggcggcctgccccacgcacttccaacccttctggtctagggaccattctggaaatgaaagggctggatgggggaagccccaggtgaatttcagccagttctgatctgatcttactgagctggtggactgaggctctccttcaagagatctttaacctgaagagatggttcagaaccaggggtgcgcttttcccccccagggaacatgaggcaatgtctggagaccttcctggttgtcccaattcgggggtggggtgtgctactggcacctagtgggtagaggccagaattactgctgcacatcccacaccgcccaggacagccccgcgcagggaaggctccaggtccaatgccaactgtgccaagattgagaaacctggtctagcagaaccctcagagggtcccacagatttctgaatttcctgggctggcccgggctggaaagaaagcctgtaggaaaggtgtgggctgggatcaagccccagtatgaactccaggaagggaaaagtgagggatgcaggatatggttacctggcaaccagtccgtatccacccatggcagcctcatgactgcagagcagccactcagatgccatcccctcagtgagcggtcctgatgggaccaggtgccaaggctttggctctttggggtgtcagcttggagagagggacccaggcatgttacccaccttggttttcgttctcctcctaccccagatctctacaaggacattgcccctaagctggctcaggggaaaggggaatttattaaattcttttcttttga

SEQ ID NO: 12857 - protein, 169 aa, Homo sapiens [sequence omitted]

SEQ ID NO: 12858 - DNA, 2221 bp, Homo sapiens
  CDS (122)..(1555)
gtgctcaccgccgcttccggtccgcgtggggtgcattctcgcgccggtggcgaggttagggcccgcgttgcgacgtggtgcagcgcatactttcacaagtgggtctcccttgtccgggactatggccaccgactcgtgggccctggcggtggacgagcaggaagcggctgtcaagtcgatgaccaatttgcagatcaaggaagagaaagtcaaagcagataccaatggtattatcaaaaccagtaccactgccgagaaaacagatgaagaggagaaagaggacagagctgcccagtccttactcaacaagctgatcagaagcaaccttgttgataacacaaaccaagtggaagtcctgcaacgggatccaaactcccctctgtactcggtgaagtcgtttgaagagcttcggctgaaaccacagcttctccagggagtctatgccatgggcttcaatcgaccctccaagatacaagagaacgcattacccatgatgcttgctgaacccccacagaatctgattgcccagtctcagtctggcactggtaaaacagctgcctttgtcttagccatgctcagccgagtggagccatcagacagatacccccagtgtctgtgcctctccccaacatatgagctggcgcttcaaacaggaaaagtgattgagcagatgggcaaattttacccagaactgaagcttgcctatgccgttcgaggcaataaattggaaagaggccagaagatcagtgagcagattgtcattggcacccctgggaccgtgctggactggtgctccaagctcaagttcattgatcccaagaaaatcaaggtgtttgttctggatgaggctgatgtcatgatagccactcagggccaccaagatcagagcatccgcatccagaggatgctgcccaggaactgccagatgctgcttttctccgccacctttgaagactctgtgtggaagtttgcccagaaagtggtcccagacccaaatgttatcaaactgaagcgtgaggaagagaccctggataccatcaagcagtactatgtcctgtgcagcagcagagacgagaagttccaggccttgtgtaacctctacggggccatcaccattgctcaagccatgatcttctgccatactcgcaaaacagctagttggctggcagcagagctctcaaaagaaggccaccaggtggctctgctgagtggggagatgatggtggagcagagggctgcggtgattgagcgcttccgagagggcaaagagaaggttttggtgaccaccaacgtgtgtgcccgcggcattgatgttgaacaagtgtctgtcgtcatcaactttgatcttcccgtggacaaggacgggaatcctgacaatgagacctacctgcaccggatcgggcgcacgggccgctttggcaagaggggcctggcagtgaacatggtggacagcaagcacagcatgaacatcctgaacagaatccaggagcattttaataagaagatagaaagattggacacagatgatttggacgagattgagaaaatagccaactgagaagctccaccagccactgatgccagccctggcactgcccctgcacaggagacaagtgcatttagggcacaggccccgacatcaccccaaggacaacggcagaagtagagagaaactacctacctcacttcaaattatgtttggacttgacaaaaataggtgcaaatgatggggggcaatagaagaaaaaatttgcattttggaaaattgggtcctttccccacttttttaaagccacattcccccatctttataatattctggtcacagtggtagtcgctggccccaggaccccctcctgattttggctaggcatcgtggaaccagctccagcccctgaagaaacgatagatgtgcaggttgtgcggaagaggctgagtggaaaatggtgtgagccccaccgctgtgcatcgaatgagggaagtggcagcagagaggccagagctgccccctctctgtctcttcaatggacccttcacaagtgtttctcctgcccttggggctgtcttccttctcctgaaatccagagactttcttgctcatcccttctccctttcacttctgttctctgctgcagaaagcagacttgcatatccctgatgagcagctcggctacttttgtaaacttcagatttggagagaaacacgaaagtctgaatcctg

SEQ ID NO: 12859 - protein, 478 aa, Homo sapiens
MATDSWALAVDEQEAAVKSMTNLQIKEEKVKADTNGIIKTSTTAEKTDEEEKEDRAAQSLLNKLIRSNLVDNTNQVEVLQRDPNSPLYSVKSFEELRLKPQLLQGVYAMGFNRPSKIQENALPMMLAEPPQNLIAQSQSGTGKTAAFVLAMLSRVEPSDRYPQCLCLSPTYELALQTGKVIEQMGKFYPELKLAYAVRGNKLERGQKISEQIVIGTPGTVLDWCSKLKFIDPKKIKVFVLDEADVMIATQGHQDQSIRIQRMLPRNCQMLLFSATFEDSVWKFAQKVVPDPNVIKLKREEETLDTIKQYYVLCSSRDEKFQALCNLYGAITIAQAMIFCHTRKTASWLAAELSKEGHQVALLSGEMMVEQRAAVIERFREGKEKVLVTTNVCARGIDVEQVSVVINFDLPVDKDGNPDNETYLHRIGRTGRFGKRGLAVNMVDSKHSMNILNRIQEHFNKKIERLDTDDLDEIEKIAN

SEQ ID NO: 12860 - DNA, 1925 bp, Homo sapiens
  CDS (73)..(1140)
gcggccgtcgcgtctgacagaccactgcagaccacgggccgaggcccagcgcccgtccgcagcgcggccggcatggcggcgacaaggagccccacgcgggcaagggagcgggagcggtctggcgctcccgccgcaggaagtgaccaagttcactcctggatgctagctacaagccaagccttagacactgtctggagaatggcaaaaggctttgtgatgttggcagtttcatttctggtggctgccatctgctacttccggaggctacatttatattcagggcacaagctgaaatggtggattggatatctgcagagaaaattcaaaaggaacctcagtgtggaggcagaggttgatttactcagttattgtgcaagagaatggaaaggagagacaccccgtaacaagctgatgaggaaggcttatgaggagctattttggcggcatcacattaaatgtgttcgacaagtaaggagagataactatgatgctctcagatcagtgttatttcagatattcagccagggcatctcttttccatcatggatgaaagaaaaggacattgttaagcttcctgaaaaactgctgttttcacaaggttgtaattggattcagcagtacagttttggtcctgagaagtatacaggctcgaatgtgtttggaaaactacggaaatatgtggaattattgaaaacacagtggactgaatttaatggcattagagattatcacaagagaggaagtatgtgcaacacccttttttcagatgccattctggaatataaactttatgaagctttaaagttcatcatgctgtatcaagtcactgaagtttatgaacaaatgaagactaaaaaggtcattcccagtctttttagactcctgttttccagggagacatcctctgatcctttgagcttcatgatgaatcacctgaattctgtaggcgacacatgtggactagagcagattgatatgtttatacttggatactcccttgaagtaaagataaaagtgttcagactgttcaagtttaactccagagactttgaagtctgctacccagaggagcctctcagggactggccggagatctccctgctgaccgagaacgaccgccactaccacattccagtcttttaagtccgctgggggccgaacagcagtgctcaccagtgacggtggtcacagttgcaataaagtctctctctgaaaccaaagctagcatttcagcatggaaggaattaggaccttttcttcaggattacaggtacactggatgcagccatgcatggatggtttttctttatttttcagtgatttcctctgaagcagctgcactgatacatttgggagttggtggcttgactttgtccataaggggcgtggccacttcacatgatggcgggcctttaagagcacaaagaagtttaatatggacaacaacaggaaaaagcaagaagaaaacaagtagggaaaaacagctaacctggagagaaagaatttctttaacctttatgttcttcattaaaaatcttatcttggactgatttgagggatttttagaaacatggccttattttatataagcattaccttcccaggaatctttgttgtatattaatttttgataaccatttgattaactttaaaattaagtatatgtgtgtatatatacatatgtatgtttatatacacacatgtatctgtatagttttatatatacatatatacacatagacatacagagaaccactactttgtaatagtgtacagtttgttttatatctctttactttttttgttactattttatctggccagcgtaatagttttatttagattttttaaaattctgtagattaaagcaaatgacagttattgaactatcacaaaactattaaactgtggtacatttaatgtgt

SEQ ID NO: 12861 - protein, 356 aa, Homo sapiens
MAATRSPTRARERERSGAPAAGSDQVHSWMLATSQALDTVWRMAKGFVMLAVSFLVAAICYFRRLHLYSGHKLKWWIGYLQRKFKRNLSVEAEVDLLSYCAREWKGETPRNKLMRKAYEELFWRHHIKCVRQVRRDNYDALRSVLFQIFSQGISFPSWMKEKDIVKLPEKLLFSQGCNWIQQYSFGPEKYTGSNVFGKLRKYVELLKTQWTEFNGIRDYHKRGSMCNTLFSDAILEYKLYEALKFIMLYQVTEVYEQMKTKKVIPSLFRLLFSRETSSDPLSFMMNHLNSVGDTCGLEQIDMFILGYSLEVKIKVFRLFKFNSRDFEVCYPEEPLRDWPEISLLTENDRHYHIPVF

SEQ ID NO: 12862 - DNA, 2120 bp, Homo sapiens
  CDS (375)..(1190)
tgaaagatgtgtcatatcatgtgccctctatgaggagttttggattaaggtaagaaaatcatgtgctcttaaacttgaatatattataaacattgatctagtgactaaccttttttgtacttctgttgaatgttgttcatataactatatctgttgcattaggagatggtctgcttgcaaccagatttgactgctgcatatgccaacctcgttgcctctcttcgtccttccttacagaaactagtctagtggttcaataaaggtgctgaatgggtttaaaaatagaattttatcgttctgtcacaaatttaatggcttgttcaactgtaaattattcagtatttcctcttttctgtatgtagtatgccaagtacatggaaaaccatagcattgaaggagtgaggcatgtcttcagcagagcttgtactatacatctcccaaagaaacccatggtgcatatgctttgggcagcttttgaggaacagcagggtaatattaatgaagccaggaatatcttgaaaacatttgaagaatgtgttctaggattggcaatggttcgtttacgaagagtaagtttagaacgacggcatggaaatctggaagaagctgaacatttgcttcaggatgccattaagaatgccaaatcaaataatgaatcttcattttatgctgtcaaactagcccggcatcttttcaaaatacagaaaaaccttccaaaatcaagaaaggtgcttttggaagcaatcgaaagagacaaagagaacacaaagttatacctcaatttacttgaaatggaatatagtggtgacctcaaacaaaatgaagaaaatatcctaaattgttttgacaaagctgtacatggttcattacctattaaaatgagaattacattttctcagagaaaagtggaatttcttgaagattttggttccgatgttaataagcttctgaatgcttatgatgaacatcaaacactcctgaaagaacaggattctttaaaaaggaaagcagaaaatggatcagaagaaccagaggaaaagaaagcacatacagaagatacaacttcatcatctacacagatgattgatggtgatttacaggcaaaccaagctgtatataattatagtgcgtggtatcaagtgagtctgcataattataattctttgttcatagatgttattagcataaattaggatagtttctttttttttaaaaaaagtttttgttccaattgtgtaatacattctttggtggttaagtactagaattttagcagtgaacacttgcttgttttcttaaacatagctgctttaattatacttttacatatggaactctgccacagttctaatatgctaacatacttactttttcctttcagtacaattatcagaatccttggaattatggacaatattatcctccccctccaacctgatgggaaaaatgtaaatttcaaatgcagtgtgtgaaaagtatgaaattattattttttttaatgagggatgtaaacagtataagcttgttgtatttgataacctgtcttccttgtttctgtgtaacatgatttgtttagtaatagggggaaaatgtcaattagtagcttaccacagatactgtttcctaccatttataaaatttactttttattgaaaaactattttttgatttttgcattaagtggtctagaattcttttgcaatgcatttgcaacagaattttgtagccttaaggggtaggaagaaaaacctgactgcaaatcatgtcagtgtagtacaaaattctgaaaacacataagggctggttatttacctcccttttttttttttttttaaagaaaaaaggacttttaacctttgctgacaaggttttgtctgtttcagttatacttgtgaattgagatctaactgcagaaaggatacattattaaaatactttgccttggaatagattataaatgagaaaatggaatgtttgcatccctttaaaaatgaaaatcatatcaaaagtatgttgtttcaggagactttgtatttagaatattcatgtaaaacttgtgaacaagctttcattttgatcaaactgatcttcatttttgtaataaaacggaagactcatcc

SEQ ID NO: 12863 - protein, 272 aa, Homo sapiens
MENHSIEGVRHVFSRACTIHLPKKPMVHMLWAAFEEQQGNINEARNILKTFEECVLGLAMVRLRRVSLERRHGNLEEAEHLLQDAIKNAKSNNESSFYAVKLARHLFKIQKNLPKSRKVLLEAIERDKENTKLYLNLLEMEYSGDLKQNEENILNCFDKAVHGSLPIKMRITFSQRKVEFLEDFGSDVNKLLNAYDEHQTLLKEQDSLKRKAENGSEEPEEKKAHTEDTTSSSTQMIDGDLQANQAVYNYSAWYQVSLHNYNSLFIDVISIN

SEQ ID NO: 12864 - DNA, 1779 bp, Homo sapiens
  CDS (959)..(1777)
agttattaatgaccgctgagcaggcagcaccatgtcagtgtgacaactgatcgggtgaacgatgcaccactaaccaccatggaaacaaggaaaaataaagccagctcacagggtctctcttcactggattgagagcctcagcctgccgactgagaaaaagagttccaggaaaaagaaggaatcccggctgcagcctcctgccttcctttatattttaaaatagagagataagattgcgtgcatgtgtgcatatctatagtatatattttgtacactttgttacacagacacacaaatgcacctatttataccgggcaagaacacaaccatgtgattatctcaaccaaggaactgaggaatccagcacgcaaggacatcggaggtgggctagcactgaaactgcttttcaaggaggtgaagcattccacagataatcagctactctattcagggaaggagtgtaaacatcaccactttttgcatgtttgcataaaaaaggcccactgaatcagttaaagacgaggaagaggaggagaaagagaaagaagaggaagatgttgggcaacatttatttaacatgctccacagcccggaccctggcatcatgctgctattcctgcaaatactgaagaagcatgggatttaaatattttacttctaaataaatgaattactcaatctcctatgaccatctatacatactccaccttcaaaaagtacatcaatattatatcattaaggaaatagtaaccttctcttctccaatatgcatgacatttttggacaatgcaattgtggcactggcacttatttcagtgaagaaaaactttgtggttctatggcattcatcatttgacaaatgcaagcatcttccttatcaatcagctcctattgaacttactagcactgactgtggaatccttaagggcccattacatttctgaagaagaaagctaagatgaaggacatgccactccgaattcatgtgctacttggcctagctatcactacactagtacaagctgtagataaaaaagtggattgtccacggttatgtacgtgtgaaatcaggccttggtttacacccagatccatttatatggaagcatctacagtggattgtagtgatttaggtcttttaactttcccagccagattgccagctaacacacagattcttctcctacagactaacaatattgcaaaaattgaatactccacagactttccagtaaaccttactggcctggatttatctcaaaacaatttatcttcagtcaccaatattaatgtaaaaaagatgcctcagctcctttctgtgtacctagaggaaaacaaacttactgaactgcctgaaaaatgtctgtccgaactgagcaacttacaagaactctatattaatcacaacttgctttctacaatttcacctggagcctttattggcctacataatcttcttcgacttcatctcaattcaaatagattgcagatgatcaacagtaagtggtttgatgctcttccaaatctagagattctgatgattggggaaaatccaattatcagaatcaaagacatgaactttaagcctcttatcaatcttcgcagcctggttatagctggtataaacctcacagaaataccagataacgccttggttggactggaaaacttagaaagcatctctttttacgataacaggcttattaaagtaccccatgttgctcttcaaaaagttgtaaatctcaaatttttggatctaaataaaaatcctattaatag

SEQ ID NO: 12865 - protein, 273 aa, Homo sapiens
MKDMPLRIHVLLGLAITTLVQAVDKKVDCPRLCTCEIRPWFTPRSIYMEASTVDCSDLGLLTFPARLPANTQILLLQTNNIAKIEYSTDFPVNLTGLDLSQNNLSSVTNINVKKMPQLLSVYLEENKLTELPEKCLSELSNLQELYINHNLLSTISPGAFIGLHNLLRLHLNSNRLQMINSKWFDALPNLEILMIGENPIIRIKDMNFKPLINLRSLVIAGINLTEIPDNALVGLENLESISFYDNRLIKVPHVALQKVVNLKFLDLNKNPIN

SEQ ID NO: 12866 - DNA, 1766 bp, Homo sapiens
atttttgtaactgcattccagggcctttcagtggctttcattctgaagttcctggataacatgttccatgtcttgatggcccaggttaccactgtcattatcacaacagtgtctgtcctggtctttgacttcaggccctccctggaatttttcttggaagccccatcagtccttctctctatatttatttataatgccagcaagcctcaagttccggaatacgcacctaggcaagaaaggatccgagatctaagtggcaatctttgggagcgttccagtggggatggagaagaactagaaagacttaccaaacccaagagtgatgagtcagatgaagatactttctaactggtacccacatagtttgcagctctcttgaaccttattttcacattttcagtgtttgtaatatttatcttttcactttgataaaccagaaatgtttctaaatcctaatattctttgcatatatctagctactccctaaatggttccatccaaggcttagagtacccaaaggctaagaaattctaaagaactgatacaggagtaacaatatgaagaattcattaatatctcagtacttgataaatcagaaagttatatgtgcagattattttccttggccttcaagcttccaaaaaacttgtaataatcatgttagctatagcttgtatatacacatagagatcaatttgccaaatattcacaatcatgtagttctagtttacatgccaaagtcttccctttttaacattataaaagctaggttgtctcttgaattttgaggccctagagatagtcattttgcaagtaaagagcaacgggaccctttctaaaaacgttggttgaaggacctaaatacctggccataccatagatttgggatgatgtagtctgtgctaaatattttgctgaagaagcagtttctcagacacaacatctcagaattttaatttttagaaattcatgggaaattggatttttgtaataatcttttgatgttttaaacattggttccctagtcaccatagttaccacttgtattttaagtcatttaaacaagccacggtggggcttttttctcctcagtttgaggagaaaaatcttgatgtcattactcctgaattattacattttggagaataagagggcattttattttattagttactaattcaagctgtgactattgtatatctttccaagagttgaaatgctggcttcagaatcataccagattgtcagtgaagctgatgcctaggaacttttaaagggatcctttcaaaaggatcacttagcaaacacatgttgacttttaactgatgtatgaatattaatactctaaaaatagaaagccagtaatatataagtcactttacagtgctacttcacacttaaaagtgcatggtatttttcatggtattttgcatgcagccagttaactctcgtagatagagaagtcaggtgatagatgatattaaaaattagcaaacaaaagtgacttgctcagggtcatgcagctgggtgatgatagaagagtgggctttaactggcaggcctgtatgtttacagactaccatactgtaaatatgagctttatggtgtcattctcagaaacttatacatttctgctctcctttctcctaagtttcatgcagatgaatataaggtaatatactattatataattcatttgtgatatccacaataatatgactggcaagaattggtggaaatttgtaattaaaataattattaaacct

SEQ ID NO: 12867 - DNA, 1274 bp, Homo sapiens
gacagactgacgtgtgagctgcatcgcgggaggcgcatggcggggatggcgctggcgcgggcctggaagcagatgtcctggttctactaccagtacctgctggtcacggcgctctacatgctggagccctgggagcggacggtgttcaattccatgctggtttccattgtggggatggcactatacacaggatacgtcttcatgccccagcacatcatggcgatattgcactactttgaaatcggacaatgaccaagatgcgaccaggatcagaggttccttggggaagacccaccctacgaagttggaatgagaccatcagatgtgataagaaactcttctagatgtcaacataaccaaccttataaagactaaaattcatgagtagaacaggaaaatcatcctgactcatgtgttgtgttctttatttttaattttcaaagaggctcttgtatagcagtttttgtctattttaacattgtagtcatttgtactttgatatcagtattttcttaacctttgtgactgtttcaatattacccccgtgaaagcttttcttaatgtaactttgagtacattttaattgccttctatttttaaaactcaaaatcattagttgggctttactgttcttgctattgtatggcatatacatctgcctggatatatttctactcttgaccaaagttttgtaaagaacaatataagatttcgggtaggggtatggggagggaagatattttattgagaactacttaacaaaagatttatctgtaagcttgaactcaggagtacagttttagctatctagactctaacagcttttgctttaaaattattaaagtgtttcttaatgaaaaagaaaagatcttgctaaagttaaaataaggaacatttcaccttttaaatatttaattcttatgtggacttatttccagaaaactttggtgataattcttgagacaaaaggtggttaagtagcattattatgtaatgcttatataccatagagtttttaatagaagtgaaatccatttcctccgagggtcactattaacaatgtacttccttaaatttagtttaatgattgtaatgggtgctgcatttgcacattgcattaagttatgatgagacgaattgttgttaaaaattatagcaaaaagaaatgtaaacttggttaaaatcctttcactctttgtattgttttttttaaggtttttattccttaaatgtaaaatgactacctaattttttgatgtaaatacattgaattc

SEQ ID NO: 12868 - DNA, 1649 bp, Homo sapiens
  CDS (10)..(1212)
ttgcataaaatggttaagaaaatgtgccaagattacctcagtagttctggtctgtgttcccaggagaccctggaaataaacaatgataaggttgctgagtcattaggaatcacagaattcctacggaagaaagaaatacacccagacaaccttggacccaagcacctcagccgagacatggatggggagcagctagagggagctagcagcgagaagagggaacgtgaggctgcggaggagggactggcctcagtgaaaaggcccagaagagaagccctgtccaacgataccactgaatctcttgctgccaacagcagaggccgggagaagcccaggcccttgcatgctttggccgctggtttttcccctccagtaaatgtgactgtctctccccgttctgaagaaagccatacaacgacggtttctggtggcaatgggagcgtgttccaggcgggcccgcagcttcaggcactggctaacttagaagccaggagggggtctataggtgctgctctctcatcccgggatgtcagtgggctgcctgtttgtgctcagtcaggagagcctaggaggctgacccaggcacaggtggcagcgtttcctggagagaatgctttggaacactcttcagaccaggacacctgggacagcctgaggagcccgggtttctgcagccctttgtcatctggtggtggagcagagtccctgccgcctggggggcctggacatgcagaggcaggacacctcggcaaggtttgtgacttccacctgaaccaccagcagcccagccccaccagcgtcctgcctacagaggtggcagcccctccgcttgagaaaattttgtctgtggatagcgtggcagtggactgtgcctacaggactgtgcccaagccagggcctcagcctggcccacatggatcactattgactgaagggtgtctcagaagcctttcgggggacttgaaccggttcccctgtgggatggaggtgcactctggccagagagaactggagagcgtggttgctgtcggcgaagccatggcttttgaaatttccaatgggagccatgagttactgtctcagggacagaagcagatttttattcagacttccgatgggcttatcttgtcccctccaggtacaatagtgtctcaggaggaggacattgtcacagtgactgatgcagaggggcgtgcctgcggatgggcccgctagaaggagttcctctagaagctgtggagtcggtcgtcaccgtggagccagagccctcacagtgaagtggagtcagatcctagattcgtctgattttatccagagaaggtctatggcaagcaatgtatatttttctaatgtgaatattgcacagatgaaccttttatttataaagaataatgtctttctgccctgctgtctacatttttctatggagcttgtcataataatagcagatattacctgatcaggaatccctgtggcgcgtctgacgctcatgagtttttcatgatggtgatgagtagcactgcactgtcacctgatgattggccctgctccgtttcccttctctcctgggagatatgctgcttttccaccagacttgctccatactagaagcttcttttgggttcaattaaaaagaaaataagctagtc

SEQ ID NO: 12869 - protein, 401 aa, Homo sapiens
MVKKMCQDYLSSSGLCSQETLEINNDKVAESLGITEFLRKKEIHPDNLGPKHLSRDMDGEQLEGASSEKREREAAEEGLASVKRPRREALSNDTTESLAANSRGREKPRPLHALAAGFSPPVNVTVSPRSEESHTTTVSGGNGSVFQAGPQLQALANLEARRGSIGAALSSRDVSGLPVCAQSGEPRRLTQAQVAAFPGENALEHSSDQDTWDSLRSPGFCSPLSSGGGAESLPPGGPGHAEAGHLGKVCDFHLNHQQPSPTSVLPTEVAAPPLEKILSVDSVAVDCAYRTVPKPGPQPGPHGSLLTEGCLRSLSGDLNRFPCGMEVHSGQRELESVVAVGEAMAFEISNGSHELLSQGQKQIFIQTSDGLILSPPGTIVSQEEDIVTVTDAEGRACGWAR

SEQ ID NO: 12870 - DNA, 2094 bp, Homo sapiens
tttcagattttaccatggaagatttaggtcaggtattatttcctgacaacaagagttgttaaatcaatacctacatacattaccaagagaattatcttttccaaaggtctttaaaaatgtagtacatttttttttctctgtaattgtttaggaagcagtgcttcctgaaagaccaaaccaagatttttgcattatgtggctttgcacactagatgagcatttaataagttcaagcttaatttaaaaccatgatgacacaggtgtgaatgtcatttctctgaggagttaaaaatacaggcattgtcatactatcatacactctggaaaatggtattacatatcataaaatgttatggcttgggtagaaattgtagtttgctcttttaaaagctttagttaaattttgctcatttgttttgcaaatgattctttttaattgagtgaatcagatgcttttcagttcattgaaaatccccctttgacaaatcatgttttgatgagcttacgttctgtttctgggttcagcttctcattttagttgtcatacaaagcgttggcttatattatggttaagtatgtgctttattggaggttttgcattaccttatgagaaattatagagtgtttgtgggagaggcgttatgatttgttttaatttttttcaggatataatctaactaccactagggataatgtgtagtggtacataattatatacattatgttatatgtatgctatcctgtgaggcatccatcattggtcactgtcaaagacaggctgttagagtagatgggctattggactggactggtggtggcatgcccatgttttaaaaacaaatatttgtacaagttatttgaatttatgcaagaaattaatacagtgttatgttggagatttaatagcataaaagacaagaggttttttttttcttttttctttttttacttttggcatagctataacccctttgtatgtatttataatacactctttcagtatgagattatatattagtgtatgcagtcacacagaatgttatatatgtaagataaagagattatagataaatattttcctgaatattatttactacataatctgtcactggcccaatttcatgtgatcatgtaatgaaagatccttctgcagttaagcctattagggctttaaccctaagtctcctgaatatattttaatttctatttccaaattaatgttatattggtatggtataatagtatgtacttattttcttttgggagtgatataattatattaaaaggcaatacaattaacaaagatttttcacactggttaaaggcaaagcaagagatgtgatggaaagacatgtgaagctgggttattatactcattacataaacatagtgatcttcttcctaaatgtggttttaaaatttatccttgtgtccctttctttacaacttagatagaatgcatatgttgaaaagaaatgtgtaggctgtggaaatactggtagcagtagccagcttttagttaaagttagtagaaggagggagagaaaaagagagggtgaatacacatttccgtacaagttacaggattatttgctttttattaaaatatattaaaccttcagaaatttgggctgaggtagaggatattctgattatggacttatttttattaaaagttaaattttatggttaactatccagagtaactagagtaggttaatgaaatggcaaatagaggaagagatttcttttaatgaaatgaaagaatggcaactagtacgttaactatttcagtatataattcttaaaaatgtacagttattaaaatgaattattccgtgttctatttttaaaggctatcagatgctaattagtgttattttgttttactatttaagtattaaatgaaataatgaggtcatagagctttggatttagacagactgcttacaagcccaatttcttcattcaagagcagtgtgacatcatacaagttactttacgtttttatgcctcagtttcctgcatctggaaatcagggtaatagtttatgttggataaagctgatttaaagattaaatgagatattgtgtg

SEQ ID NO: 12871 - DNA, 2862 bp, Homo sapiens
  CDS (168)..(1919)
atggcttccagcttttcgaatctgaggctccaaaggaggaaatgaccattcagggatcttactccagcttgattacggagactgaaccttcatagggtgcgcacttaccaaggacaggaaggtttctctgtttgaagggctttaaacttataacaaagaaaataaaaatgacgacttcgtctatcagacggcagatgaaaaacatcgtgaacaattactcagaggcagaaatcaaagtccgggaagccacctccaatgacccgtggggcccgtccagttctctgatgaccgagattgccgacctgacctacaacgtggtggccttctcggagatcatgagcatggtgtggaagcggctgaatgaccatggcaagaactggcggcatgtgtacaaggcgctgaccctgctggactacctcatcaagacaggctccgaacgtgtggcccagcagtgccgggagaacatcttcgccatccagaccctgaaggacttccagtacattgaccgagatggcaaggaccagggcatcaatgtgcgtgagaagtcaaagcaactggtggctctcctcaaggacgaggaacggttgaaggctgagagggcccaggctctcaaaaccaaagagcgcatggcccaggttgccactggcatgggcagcaaccagatcacctttgggcgaggctccagccagcccaacctctccaccagccactcggagcaggagtatggcaaggccgggggctccccggcctcctaccatggctccacctccccgcgagtgtcctccgagctggagcaagcccggccccagactagtggagaagaggagcttcagctgcagctggcacttgccatgagcagagaagtggctgagcaggaagaacgcctcaggcggggtgatgacctcagattacagatggccctggaagaaagccgaagggacacagttaaaattccaaaaaagaaagagcatggctctctcccacagcagactacgctgttggatttaatggatgctctccccagctcgggccccgcggcccagaaagcagagccctggggcccgtcagcctccactaaccagaccaacccctggggcgggccagcggctcctgcgagtacttcagacccctggccatcgtttggtaccaagccagctgcctccattgacccatggggggtgcccactggagccaccgcacaatctgtccccaagaactcggacccctgggcagcttcacagcagcctgcctccagtgctgggaaaagagcttctgacgcgtggggcgcagtctccaccaccaagcccgtgtctgtctctgggtcctttgagctcttcagtaatctgaatggtacaattaaagatgacttttctgaatttgacaaccttcggacttcaaaaaaaacagccgaatctgtgacctctctgccatcccaaaacaatggaactaccagccctgacccctttgagtctcaacccctgactgtcgcctcaagcaagcccagcagtgcccggaaaacacctgagtccttcctgggccccaacgcggccctggtgaacctggactcactggtgaccaggcctgccccaccagcccagtccctcaaccctttcctggcaccaggtgctcccgccacctcggcccctgttaaccctttccaggtgaaccagccccagccgctgacactgaaccagcttcgggggagcccagtcctggggaccagcacatcctttgggcctggcccaggagtggagtccatggctgtggcctcgatgacctccgcggccccacagccagctctgggggccactggttcctctctgacaccactgggccctgcaatgatgaacatggtgggcagtgtgggtatacccccatcagcagcccaggccactggcacaaccaaccctttccttctctagtgcctgggcctgggacccacccagagcacctgtgctggaggatgccgagcagggactctcgtctgtgggacgggatccaagagtttggggattaggggtattagggcttttcagctccagcttcctgatgaaagggctgtctttacagccccaaccctcagaccctcgccttccaaggcaggcccctcagcctggcctgctctcaccacctcctccaaagcactgaggtcctggcagggctcctctgaggccttggacgaggacgtggagtcatcagtgttgcccttgcccctaacctcagcccgagggtctccaggatgttgcctggcccaggacttgggacagtggccttgtctttgtcctccccaccccccagccctagggacaccccaggcagtcctgggtgtggacacgatgaagcaccggctccataagacaccttttggggaagtggttgtgcatattttatttttctttgactcgtgtgagttcaaagtaaacaccaccaccgtggacaactcttgaattaaatccactagagcgagctttaaaactaatctgagcataacccccaacgtggctctatgcttgtgtacctttgcacatattttgtttagtacagtttcatatttgagtttgcagaattatctaatagtctttttttggctaatatttttataacgtggttcttatttaactgtctagttttgatagaatttaccaggtctggctgaatgaagatgttggcacgtgtcattttagtggtttaaatcctcttatttatggttttaactctaagaaaattttaaaaggaagagatgtttggatgacaaaaaaatgccttattgaaaaactaaagcaaattctttataggaagaaaatatgggaatttgattacacatagatgatgatgtttatttaaaaaaaaaacaacagcaac

SEQ ID NO: 12872 - protein, 584 aa, Homo sapiens
MTTSSIRRQMKNIVNNYSEAEIKVREATSNDPWGPSSSLMTEIADLTYNVVAFSEIMSMVWKRLNDHGKNWRHVYKALTLLDYLIKTGSERVAQQCRENIFAIQTLKDFQYIDRDGKDQGINVREKSKQLVALLKDEERLKAERAQALKTKERMAQVATGMGSNQITFGRGSSQPNLSTSHSEQEYGKAGGSPASYHGSTSPRVSSELEQARPQTSGEEELQLQLALAMSREVAEQEERLRRGDDLRLQMALEESRRDTVKIPKKKEHGSLPQQTTLLDLMDALPSSGPAAQKAEPWGPSASTNQTNPWGGPAAPASTSDPWPSFGTKPAASIDPWGVPTGATAQSVPKNSDPWAASQQPASSAGKRASDAWGAVSTTKPVSVSGSFELFSNLNGTIKDDFSEFDNLRTSKKTAESVTSLPSQNNGTTSPDPFESQPLTVASSKPSSARKTPESFLGPNAALVNLDSLVTRPAPPAQSLNPFLAPGAPATSAPVNPFQVNQPQPLTLNQLRGSPVLGTSTSFGPGPGVESMAVASMTSAAPQPALGATGSSLTPLGPAMMNMVGSVGIPPSAAQATGTTNPFLL

SEQ ID NO: 12873 - DNA, 1551 bp, Homo sapiens
aacaaaatatgcacaagatttatgtgagaaaaactataaaactctgctgaaagaaatcaaataactaaataaaatggagatatattccatagtcattcataggaagatccgatattgtcaatatattggttcttgctaacttgatctataatttcaatgcaatcccaatggtataagttggatgtttgtctcctttaaatctcatgctaaaatactattcccagtgttggaggtggggcctgggaggtgattggattgtgggggcggatgtctcaagaatgttttatcactttcccattggtgagaattgaattcttgctcaagatctggttgcttaaaaatctaggccctcccccactggctcacttgctgttactctagtcatgttacatgcctgctcccacttcgccttatgccatgattgtaagcttcctgaagtcctcaccagaagccaagcagatgttggtgccatgcttttatagcctgcagaactgtgagccaattaaacctcttttcttcataaattactcagtctgaggtattcctttacaccaaagcaagaatggccaagtacacccaaccaatatcccagcaagttattttctgcatattgccaaactgattctaaaatttatatggagaggcaagagacaggatagccaacacaatattgaaggaggagaacatagttggaagactgacattacccaacttcaagactaattattaaagctacactaatcaagacagtatggtattggtgaaagaatagacaaatatgtcaatggaacagaatagagcccagaaatagagccaaataaatacagtcaactgacctttgacaaagcgacaaagcaatacaatgaagcaaagatattgttttcaacaaattgcgctgaagaactggccaaacacttgaaaaaacatctaggcaaagatcttacgtgtttcacaaaaattaactcaaaatggattataggcccaaatgtaaaatgcaaaatcatagaactcctagaagacaacaagagaaaatctgtgtgacattgggtattgggtattagttatggtgaagacttttttacatgaaacaccaaaggcacaacccatgaaataaataattgataagctgggattcattaaaattttaaaagttctgttctgtgaaagaccctgttaacagaatgagaagacaagccaaggatgcaagaaaatatctgcaaaagacatagttgataaactgttgttatccaaaatatacaaagaactcgtaaggctgggtgcggtggctcacgcctataatcccagcacttcaggaggctgaggcgggcagatcacaggtcaggagagcaagaccatcctggccaacacagttaaaccccacctctactaaaaatacaaaaaattaggtaggcatggtggcgggcgcttgtagtcccagctactctggaggctgaggcaggagaatggcatgaaccctggaggcggaggttgcagtgagccaagattgcgccactgcactccagcctgggcgacagagcaagactctgtctc

SEQ ID NO: 12874 - DNA, 1768 bp, Homo sapiens
  CDS (310)..(807)
tcaaggaacgaaggggccactgactcagagcggcaagtacagcgagtagtccgagagcgcccaccggcgggcggggcggctggtacggccgatcatgggcagtttctgcacgtagcgcgaggccgggctaggcccgtacggcgcggggaaggcagtctggaaaaggcgcccgcggcagcgcctcccagcctgccgcccggctatgatgaaacgaaagtgcggggcgccgcgcggggcgaaacggctcttctggaaaacgtcgcgggtgccggtcccggggccctgctgccggggtgccccgcgcgcccgatgcacgcgcggcaagggcctgctctcagaggcggcgggcccagaggccggcgcggggccgcctccgccgctgccccgggggctctcgtcgccgtgcgggctgactatggcgcttgccgtcagctgcggcatcttccgcaccgagtccggggctgccgccggctccttcttgtccccgggcggccgcggagccgtgggtgcaggctggccggtgccaaagcgtgtggccaagctgtcaccgaagaaggcgtagagctcccggtagatgtcggccagggtcaccgaaagagaagggtcctccggccccgcgccccctggcggcagcgggaggccggacccaaagctgggttctgcaccgcccccggaggacgactcttgaaagagaaggctgtcccatggcaggtcgtccaggcgccggcaccccctgccacctgggccacccctgttgggctctgctgcctgggccttcatcttcagcagtcgctctaccgccacctgtaagagccaaggactaagataggcaaaaaattcgaggaacctgggcccatcaaatattccaaagtaagcctgcttggctgctaagctcatgcagggaagggaggctggaaggggacggtactcaccagaatggctccatagactttgtgtccatctgctttgacctgggcattagatactgaataatcatccagcacagcctgcaagtttgtccagtaggtggacaggtgtgggtacaggactcgttctactgcctggaaggaagagaaggaatacagttagcatgtctttgatacttattccctctcaaggaccctttcccatgaaagacctacctttatctctgatcctagacagggctcaatcctcctaaattccctgattggcatattcaaccatatatttatttggaacctactgtatacctaagctaggcattgggaataaagataaggtacaaagggagacaataaaaaatatacccaatatcactgccctgtgtgctaaataatgctcattactgacaactccaaaatttagtttgcatactgctaccctatacaatcaggcaagtactggcttcacttagatgtaaactgagactcagttcaaacaatctgcataaaaacaaccaaccagagacttggactctgattatacaatttaaaatcctgtgattggacaggcgctgtggctcacgcctgtaatcccagcactttgggaggccgaggccagtggatcacctgaggtcaggagttcaagaccagcttggccaagatggtgaaaccccatctctactaaaaatacaaaaattagctgggcgcagtagcagttgcctgtaatctcaactacttgggaggctgaggcaggagaatcacttgaactcggggggcagaggttgcagtgagccgagatcacaccaccgcactccaccctgggaagcaaagtgagactccgtctc

SEQ ID NO: 12875 - protein, 166 aa, Homo sapiens
MHARQGPALRGGGPRGRRGAASAAAPGALVAVRADYGACRQLRHLPHRVRGCRRLLLVPGRPRSRGCRLAGAKACGQAVTEEGVELPVDVGQGHRKRRVLRPRAPWRQREAGPKAGFCTAPGGRLLKEKAVPWQVVQAPAPPATWATPVGLCCLGLHLQQSLYRHL

SEQ ID NO: 12876 - DNA, 1907 bp, Homo sapiens
  CDS (234)..(1211)
gtgagggggcttggggggcctcgcctgagagagtgaggacaggctgcgggaggagctgcaggactgaggtacagaggccaggggcccagggcaggacccagcctggacttgactccctgggatcccaggaagggcacaccctttcctcaccacccgagtgagcgctgccccctcacagagacctctttgccccctgggccaggcagagcaggcgctgcggtccgggaggccccatggaggtggcggtgcccgtgaagcaggaggccgagggcctggcgctggactccccgtggcaccgcttccgccgcttccacctgggcgacgcgccgggcccgcgggaggcgctggggctgctccgcgccctgtgccgggactggccgcggcccgaggtgcacaccaaggagcagatgttggagctgctggtgctggaacagttcctgagcgcgctgcccgccgacacgcaggcctgggtgtgcagccggcagccgcagagcggggaggaggcggtggccctgctggaggagctctgggggccagcagcctcccccgatgggtcgtcagcaacgagggtgcctcaggatgtgacgcagggccctggggccacaggtggaaaggaggacagtgggatgattcccttaggcaccgcccctggggctgaggggccggcgcctggggactcccaggctgtgcgcccctacaagcaggagcccagcagccccccgctggcgcctggcctgcccgccttcctagcggccccgggcaccacgtcctgccccgagtgcggcaaaacgtccctgaaaccagctcacctgctgcgccaccggcagagccactcgggcgagaagccgcacgcctgccctgagtgcgggaaggcctttcggcgcaaggagcacctgcggcgccaccgcgacacgcaccccggcagccccggcagccccgggcccgcgctgcgccctctgcccgcccgtgagaagccccacgcgtgctgcgagtgtggcaagaccttctactggcgcgagcacctggtgcgccaccgcaagacgcactcgggagcgcggccctttgcctgctgggagtgtggcaagggctttgggcgccgcgagcacgtgctgcgccaccagcgcatccacggccgggcagcggccagcgcgcagggggcggtagctccgggcccggatggtggaggccccttcccgccctggcccttgggttagccgcctcccggccagcgccatctcccgcccttggtgctgcccccgggcggtacctgctctctcccagcgccacttggcctcttcctctcctccttccctcccatcgtcctcctccacctgcgcctcccttgtctgaacttcccaacgccttcctattcctttccaactccttttcccccaaatttcactttccttctcaggtctcacctcagccccccccttctccctgatttctcggcctctctctctgtgtgaaggggcctctccctaatgtctcctccttcccccctcttctctctcctgcggcccagcctccctctccctcctccattcctctctccctgcccttttcctgcctgaagagcagaggtgaggacctgggacccctgaggggcaggccaggaggagcttgggcgcaggccaggcccccttggtgaagcagaggctgaaggaaaggggtctgggtcttgtccctaggaattctcctccctcaggagattgggggttgggggaggcagcgggtgatggctctgaagctgaacccagggcctggctgtggtcttcttggtcttgctgccccctgtgacccaaaggcatgggatggacagagatgcctgcccccgtgaagctggttggggagggcagttcaccagcatccatagagtaataaagtcactgtgtgtagacccggac

SEQ ID NO: 12877 - protein, 326 aa, Homo sapiens
MEVAVPVKQEAEGLALDSPWHRFRRFHLGDAPGPREALGLLRALCRDWPRPEVHTKEQMLELLVLEQFLSALPADTQAWVCSRQPQSGEEAVALLEELWGPAASPDGSSATRVPQDVTQGPGATGGKEDSGMIPLGTAPGAEGPAPGDSQAVRPYKQEPSSPPLAPGLPAFLAAPGTTSCPECGKTSLKPAHLLRHRQSHSGEKPHACPECGKAFRRKEHLRRHRDTHPGSPGSPGPALRPLPAREKPHACCECGKTFYWREHLVRHRKTHSGARPFACWECGKGFGRREHVLRHQRIHGRAAASAQGAVAPGPDGGGPFPPWPLG

SEQ ID NO: 12878 - DNA, 2363 bp, Homo sapiens
  CDS (250)..(1203)
aacaactttttgcatgagatacatgatcctcagcatttagaaactgcagatgcttcattgtcaaagcatagttctgtttttcattggactgatttgtctcttgagaagaaatcgtgtccttactgcccagcaacatttgaaacaggtgttgggttatcaaatcatgtcagggggcatcttcacagagcaggattaagctatgaagccagtcatgttgtatcaccagaacaaatagccacaagtgacaaaatgcagcatttcaaaagaactggcacaggaacacctgttaaacgagttagaaaagctatagagaagtctgaaaccacttctgaacacacttgtcagctctgtggtggttggtttgatactaaaattggattatcaaatcatgttagaggccacttgaaaagacttggaaagacgaaatgggatgctcacaaatctccaatctgtgttctgaatgagatgatgcaaaatgaagaaaaatatgaaaaaatcttaaaggcattgaacagtcgtcgtattattcccagaccatttgtagctcaaaaacttgcatcaagtgatgactttatatctcaaaatgttatacctcttgaagcataccgtaatggcctaaagactgaagctctgtcagtgtctgcatcagaagaagaagggctgaatttcttaaatgaatatgatgaaacaaaaccagaactgcccagtgggaaaaagaatcagtctcttacactcatagaacttcttaaaaataaaaggatgggagaagaaaggaattctgctatttctcctcaaaagatccataatcagacagcaagaaagagattcgttcagaaatgcgttcttccattaaatgaggatagtccgttgatgtatcagccacaaaaaatggacttgactatgcactcagccttagattgtaagcaaaagaaatcaaggtcaagatctggaagcaagaagaaaatgctaacattacctcatggtgctgacgaggtttacattctccgatgcaggttttgtggcctagtctttcgaggacccttgtctgttcaggaagactggattaagcacttacaacgacatattgtaaacgctaatcttccacggactggagctggcatggtggaagtcacgtcactacttaaaaagcctgcctccattacagaaacttcattttctctactaatggccgaagcagcttcatagaaccaggaaaccttttaaatagccagtttgaattggatgtaaatttgaaattctttttttttaagccacattaaattatctgtttataaatactaaagcaggaaaatggggggaaagtgaattacagtgacatcagagcaaattgaatacttaaaacagtaagtagtctatatattttatatagggtggaagatgtgtttttaaggtttatgaagttttgttggttaactgtgttcactcagtaaaagagcagtacatgtaagcagccattaataaactgttgcacatggatacttatagacagacttattggacaattatgttttttgcagtgttaccagaatcaaggctctgtttattccccacaagacttgcatagaaaaataagatattatattttgtttgtatgtatttagtgttttgtataataccaagaaccgctgactaaatttactcaaattagggcattaaatatcatgtacttcatagtttgagactgttcactcaaatagggcagagtactattctatctagatgtgtaagtgttttttttaaaatcacatggaacggttttttttatactaaaaagtggagggagatttgtttaaacaagtatttctaaaagaaatatgtacatagttctggaaattatttgtggtaaggaaatattctttactccagttgcatttctcagacaataaagtggtgcatccatgctacctcctactttgtcaacaaagatgctatttaccctttacatttttgtatcataatagattttaaaaatctaatgttctttattgcaagacattcttttgttaacaggtttgtttctttttaatgttttacctaaaatttgacatgcttacaggacaggtttgcctcttactttatttaacattgtagaaatgtaattaataaacaatgctcactacacagtttagaatagacgttctcatttatattatcttccaaatttgatcagttagcaaaacttaatacaccaattaaaatatttctacatatgagaatgtttacaatttaaattttagaacttgttttggatgtgattatatgtacgaaaatcgtgtaacactatgctcatgctaagaaccgacataacagaattactgaaataaatgtgctgtgaggaatgg

SEQ ID NO: 12879 - protein, 318 aa, Homo sapiens
MQHFKRTGTGTPVKRVRKAIEKSETTSEHTCQLCGGWFDTKIGLSNHVRGHLKRLGKTKWDAHKSPICVLNEMMQNEEKYEKILKALNSRRIIPRPFVAQKLASSDDFISQNVIPLEAYRNGLKTEALSVSASEEEGLNFLNEYDETKPELPSGKKNQSLTLIELLKNKRMGEERNSAISPQKIHNQTARKRFVQKCVLPLNEDSPLMYQPQKMDLTMHSALDCKQKKSRSRSGSKKKMLTLPHGADEVYILRCRFCGLVFRGPLSVQEDWIKHLQRHIVNANLPRTGAGMVEVTSLLKKPASITETSFSLLMAEAAS

SEQ ID NO: 12880 - DNA, 2284 bp, Homo sapiens
ccctccaataacaagcccctctgtggctctctgcctgtggtccaccttcccactgtgaaccatgctggcaaggagctggggttatgaagggaaagagcagggcacaaggcaagtagggctcgtgacttttcccctttcattatgtgtgtccaccgagctgtcctgcttctgttttgtaatgggttcttccatggcaagctgacctttcggctgaataggtcaaactcccactgagcgttaaccctcagccctcctcacgtgagtgcctcccctgaggtgaggagcactggttaggaatatgactgggagggcctggtgtattccccaaagaagggttgccttttactgcactgaattaattctcagagaccaccgtgtgaggttatgctgaaggatccagattagaactttcctgctgacattgtggaggggcaaaactaattcttcagatacatgttttagactgtggttcccctgtgtatcttcccctttttaatgagagaaaggccaaatgcacagtcttagtgattcatcggatcattttggatttctgagacaatcagaattttcctagatgattttttaaaaaaccaataaacccttctccctgtatttctcttccatttaaagtctcttaaaactctaggtgttttatttttaacccttgtaaaacatgaaatagtagagttgtggtgtgtgttgataattatatactggacctacttttgttttaaatgtcataaaacattttttggactatttattaagttttgcaacactaattcccttatagtagctagaaattttcaacatcaaataggcatttagtcatgttgaattgaattttaagttgaattcctgtggcttgggctttcttttttatactagtttgtataaactgttcaactcctatagctcttacgtctcactctcagtgagctggtaacagaatcttcacagacaagtggttgcacattccatttatttagcaatgccctctgtgtgtgtgtgtgtgtgtgtgtgtgtgtgtgttgtgtgtgtgtgtataggttaattttgttagtgttctttaaatttcagaaaatagtcttttagttgaacaaacaaataaatgaaatatgtcagtagatcagatgaaactgtgacccgttcggcaatagtaagtatacagtgtgtctgggctaccagatggttttagaaactgtcaatttccaaaatacagaaatctgagagagcttcataaacaatgtattgctttgctgaagatgacagatcccattgaggaaatgcccctttagttgttttagatcattaatgatactctataaacataataagattaacacggagaaacaaaatacctgtgtttgcggtattctttagttatcagattattgtctcagttctcaaaatgccaaatgtgataggataagtgcaagataagaagtacatttttaacatctattcagttagcattaatgctcaagttaaagctgggctcctaccagggacataatgggctcctgtttaacatatttatgttggttgtaaaattaggaactgtctttgcagcccacatcacctgcataagtgcaaaacatataaatcaagagaagttccagtgacataaaaatgccatcgaatagaatagcatgaaactacttgcaagatacttgtatattatgctagggtgtatgggggtacacactcagatttctagggggtttggagaacaaagaataactatacagatagaactcatggatgaagacatttcctcagagcacagcctgaaccctagtggagaaacagcgggaaaagaaaggccatcagtagccagacttgaataaccgccccaccccccacacccccactgaagacaacagcgtctatgctttcagaaggcatttgagcagctttatgttgttactggagcttgcatcttgggcctcctaagtcagtgaacttttctgtgatgttttagggttccttataacctggtggctattactcccttgccccctcataatccagttctttgtagaatgatttctgttatctaaaattagtccttttttctttttttgggggaggggggaggggacgtgcagtgatttattttgaactttgtaattggagtccctgaagtgcccccccaaattatgagctattaataaggagctttctgaatcctaattactgtctcaaaaacagagtggacacttgagaagtttttcaactcccccgcttctccctcccaaaagccacccacccccataatctc

SEQ ID NO: 12881 - DNA, 2088 bp, Homo sapiens
  CDS (254)..(745)
agtaattccggggagctcgccttacaactccgcgcggcctcggtcccctgcgccgcccgccccacaacaaaactcagcgcagcgctcccgggcgcccggttcagagcgacctgcggctcagagcggaggggagactgaccggagcgcggatcgggacagcggccgggacagcggcgagacgcgcgtgtgtgagcgcgccggaccaagcgggcccagaagcgggtctgcagcccagagggcaccttctgcaaacatgtctgtggatcccctatccagcaaagctctaaagatcaagcgagagctgagcgagaacacgccgcacctgtcggacgaggcgctgatggggctgtcggtgcgcgagctgaaccggcatctgcgcgggctctccgccgaggaggtgacacggctcaagcagcggcgccgcacactcaaaaaccgtggctacgccgccagctgccgcgtgaagcgcgtgtgccagaaggaggagctgcagaagcagaagtcggagctggagcgcgaggtggacaagctggcgcgcgagaacgccgccatgcgcctggagctcgacgcgctgcgcggcaagtgcgaggcgctgcagggcttcgcgcgctccgtggccgccgcccgcgggcccgccacgctcgtggcgccggccagcgtcatcaccatcgtcaagtccaccccgggctcggggtctggccccgcccacggcccggaccccgcccacggcccggcctcctgctcctagtgcccgcccccgccatgcctcagccacgcccctccggcctcagctccctccccaaagtgcctgagcgccgcctctgtgcccaggtcccatttctctgcagcactggccccttggtgcacacacattcccttcgtgggccctgtcttcctcttgcagccccccaaactgggaccgaatgaccctgggaaggggaacttgggtaggttggggatggggcagaggtctggatctgggatcgcccttggctgaaagtttagcctttttagattgagagatacagagccggcttagagaacagctgttgggggagaagagggcacccctcatcttggaaactgctcttattgtgccaatatgccctccaaaccctcccaggattcaaagctaggtttggctgtctgtgacttacgggaccgtcctgctgagaaattgcactgaagagatgcccccacctctggttgggcctgggggtgcctggccttccgaaactaaaagagtgggtgggaagactagtgaaacccagttcacggatggggaaacaggcctgaggtcacatttcacttagtggttgtgttgggaccaaaacctgggtgtcctcactgctgccctgagtccagccatggttttcagggggacagtggacagggactcagaaatgtggtgggagggcctccctggcttgggagaccgctctctgcaagggagggggagagaagcagagggagagagaaggtgacacggatggaagagtgggaaggagctggcctggctcagccctaggctgtccctgcagccagggtgtccgggggctggccagtcagagaaagggggccatggactgctgtggcaaatagggagacaaggagacagaccctgcagtcctactacagtctggagtggggtcctaagaagaagggtcccacctcaacccctgtcagtgtccactgtggggtgggggctgacccctgcctttgattgtcattctcctgggaagcccagtctcagtccctcccccaacactgtccacactgcccctccccactgtttatttattgcacggatctaagttattctccccagccagagcccgagctcctgctccctgggaaaagtggcgtatggccctgagctgggctttatattttatatctgcaaataaattacattttatcttatatttagggaaagccggagagcaacaacaaaaaatgtttaagccgggcgcggtggctcacatctgtaatcccagcactttgggagtccaaggagggggatcgcttgagtccaggagtttgagaccagcctggacaacatggtgaaaccccgtctctacaaaaaag

SEQ ID NO: 12882 - protein, 164 aa, Homo sapiens
MSVDPLSSKALKIKRELSENTPHLSDEALMGLSVRELNRHLRGLSAEEVTRLKQRRRTLKNRGYAASCRVKRVCQKEELQKQKSELEREVDKLARENAAMRLELDALRGKCEALQGFARSVAAARGPATLVAPASVITIVKSTPGSGSGPAHGPDPAHGPASCS

SEQ ID NO: 12883 - DNA, 1974 bp, Homo sapiens
  CDS (36)..(1142)
ccctatcccgtcttgctctgcggcgcaggggcaagatggctgctgagaagcaggtcccaggcggcggcggcggcggcggcattggcggcggcggtggcagtggcggcggcggtagcggcggtggacgtggtgccggaggggaagaaaataaagaaaacgaacgcccttcggccggatcgaaggcaaacaaagaatttggggatagcctgagtttggagattcttcagattattaaggaatcccagcagcagcatggtttacggcatggagattttcagaggtacaggggctactgttcccgtagacaaagacgtcttcgaaaaacactcaacttcaagatgggtaacagacacaaattcacagggaagaaagtgactgaagagcttctgaccgataatagatacttgcttctggttctgatggatgctgaaagagcctggagctacgccatgcagctgaaacaggaagccaacactgaaccccgaaaacggtttcacttgttatctcgcctacgcaaagccgtgaagcatgcagaggaattggaacgcttgtgtgagagcaatcgcgtggatgccaagaccaaattagaggctcaggcttacacagcttacctctcaggaatgctacgttttgaacatcaagaatggaaagctgccattgaggcttttaacaaatgcaaaactatctatgagaagctagccagtgctttcacagaggagcaggctgtgctgtataaccaacgtgtggaagagatttcacccaacatccgctattgtgcatataatattggggaccagtcagccatcaatgaactcatgcagatgagattgaggtctgggggcactgagggtctcttggctgaaaaattggaggctttgatcactcagacacgagccaaacaggcagctaccatgagtgaagtggagtggagagggagaacggttccagtgaagattgacaaagtgcgcattttcttattaggactggctgataacgaagcagctattgtccaggctgaaagcgaagaaactaaggagcgcctgtttgaatcaatgctcagcgagtgtcgggacgccatccaggtggttcgggaggagctcaagccagatcagagagacctcctcctcccaagtcaaggacaataagcctctggttgaacggtttgagacattctgcctggacccttcccttgtcaccaagcaagccaaccttgtgcacttcccaccaggcttccagcccattccctgcaagcctttgttctttgacctggccctcaaccatgtggctttcccaccccttgaggacaagttggaacagaagaccaagagtggcctcactggatacatcaagggcatctttggattcaggagctaaccaggctcttcctcgggggcgggggagattctgactcttaatctgtattgtgagaaaatcccagcaagttccatgatattaaatccaggtctgcattggcccggggcaagagtttaacatcttcggccctgcattcctacatcttgtgtctgtacacgttcttaagcagcgtgtcaggagagcaccctgttgtcttctggtaaatgtgtgcagggtcatcctgtctcctgtacctcctgggaaaggggccgctgctgtctggtgccctgtgagctgtgattgattgcctttggtcagtaatgcgttcaggagtccacaccaggcacagatggggccttgaaacgctttgtcatgcttcttcagtaccatggatttgaaatgaactcatccttgctgtgagcatccaggagcccttgagaagtttatctatgactatgaaactggcaacgtcaccccagaattacggtcagccttattccccttcacctcccagtgaacgctaagaagtttcagacaagcagagagctctatttttagaagaaatatgttacactcagaaatgatgaaaccaaatcttatattaaaaggcaaagatgacgg

SEQ ID NO: 12884 - protein, 369 aa, Homo sapiens [sequence omitted]

SEQ ID NO: 12885 - DNA, 2648 bp, Homo sapiens
  CDS (159)..(809)
aagtctaactacatggattggtttctgttttgtgcaggttactgtttttgtatctcaaagccaaaagccacaggcatggccacagttactgttcatctcagggatgtgaaagagtcaagatccaagcagccacagactcaaaggacatcagtaactgcatggccaaagcatacccacagtactacagaaagccgtcagtggtcaagcggatgccggccatgctcactggactctgtcaaggctgtggcactcggcaggtggtgtttactagtgatcctcataaaagttacctccctgtgcaattccagtcacctgataaagcagaaacccagcgtggagacccgtctgttatttctgtcaatggcactgactttaccttccgaagtgcaggcgtcctcctccttgttgtggatccgtgcagcgttccattccgcttgacggaaaaaacggtttttcctcttgctgatgtcagtcgcattgaagagtatttaaaaacaggcatccctccaaggtccattgttctgttgagcacaagaggagaaataaagcagttaaacatttcacacttactagtacctctgggattagccaaaccagctcatctttatgacaaagggagtaccatatttttgggattcagtggaaactttaaaccatcatggactaagctatttaccagtcctgctggacagggccttggggtgcttgaacaattcatacctttgcagctggacgaatatggttgtcccagagccaccactgtccgcagaagagacctggaactgctaaagcaagcttcaaaagcacattagagactaactgtaacttaagtgctgggggaaaaaaaatgtgaactaacttatttaatttatggcattttaaaatgacactgttaacccaacggaaccattttccagtttgatacagaatggggagaaaagaaagcgtttgaaattattgcttggataccagcttcatgcaccttctagttgtacaaaatgttaaagacgttgtttgtatttgtaaggctggtgtattcagagagcagatctcttattcctcactttccacccccgtattttgtaatgaccatgagcaatgtttttactttttgtataatggggtggggtggagtgggggcttctgagagtcagcctgaggtctttagaggaccagctattgtagcaccttggatacttgaagtttaatgctcagttgggtcgggtggcagttgacttggtggctggcatgttcagcagtgcctggggccctgtttctgggcagcctttgaggattttctatgatattgaatgacagttttaagtggcaactcaggcccagctcatgcccttttttgcctggacatgtgctatttttattcacttatatatcaattacttgtaagggttaaactttcaaacaggaagtatattgggacaaaagggctcttggggattagatatccctttaatctgtgaccattgggcaaaaaattttcctgcagcaaaagtctgaggctgttgggaccatttttgcagctttaatccttagcctcttttgactgtatatttgtgtttaaaatgcagagctcaactgaatatttccttttttgttttgttttgttttgttttaagaagtaggttgttttcctgaaccgtaaacttgtatcattttaacttgcacaaaggaagtctgttcttggtattgctcttgcacttgggttttttgttattgttttgtgtggattttttaaagcttttctgttcaccctcctgccaggaaaatcccagaaagcttaatgataccccaaaatgattacacccagggaggaaaaaaaggagcgctttctagggtcagaatcgtggagagaatactcagaaatgaacctctttaaagccttgcaggaatgagtcactcttacttaatgaaatgttaaagccaattaaaaagcatgctgtgatgcccagcttccctttccacagggtgcatgcgtctcctgctggtgaatcacatgcggcaagaggcaactggctccacagcctgggatgctgccgtaccaagaggaaagaagcagcaaaatgcctttacgttgttctaaacccccgacgcataaagtgtagaggagggatggccaagggtgggtggtagaaagtgtgttcaggctgacactggcaatgagtacagataatttcactttcctcttccaggggcaaaggctgatggcctctacctttgtatccaggagaaactgcagagcagccctgtgactttacaaaatatgctacctcaaagtgctaccgataaacctttctaattgtaagtgcccttactaagggcacatgtcttaatcaaagttagttttttgttttctggtttgtttttttttttttgtatattgatgaatgagatcttacctattaaatatattattggattatggttcctgaaggtcattaaagtttgagtgtgtgtgtgtgtgtgtgtgtgtgtgtgtgtgtgttttatgacttaaatatctttacgtgtgttttttagagcttggttctttaaagatttggagaagatatgtaaattaccaaggcacttggtttttctgttttatatactaataatcagggcctaagttaaataaaaatatgtgtgcatgt

SEQ ID NO: 12886 - protein, 217 aa, Homo sapiens
MAKAYPQYYRKPSVVKRMPAMLTGLCQGCGTRQVVFTSDPHKSYLPVQFQSPDKAETQRGDPSVISVNGTDFTFRSAGVLLLVVDPCSVPFRLTEKTVFPLADVSRIEEYLKTGIPPRSIVLLSTRGEIKQLNISHLLVPLGLAKPAHLYDKGSTIFLGFSGNFKPSWTKLFTSPAGQGLGVLEQFIPLQLDEYGCPRATTVRRRDLELLKQASKAH

SEQ ID NO: 12887 - DNA, 1968 bp, Homo sapiens
  CDS (49)..(387)
gctacaagtccacccgtttcaagcctacccgcatcatcttctaccgagatggggtgcctgaaggccagctaccccagatactccactatgagctactggccattcgtgatgcctgcatcaaactggaaaaggactaccagcctgggatcacttatattgtggtgcagaaacgccatcacacccgccttttctgtgctgacaagaatgagcgaattgggaagagtggtaacatcccagctgggaccacagtggacaccaacatcacccacccatttgagtttgacttctatctgtgcagccacgcaggcatccagggcaccagccgaccatcccattactatgttctttgggatgacaaccgtttcacagcagatgagctccagatcctgacgtaccagctgtgccacacttacgtacggtgcacacgctctgtctctatcccagcacctgcctactatgcccgcctggtggctttccgggcacgataccacctggtggacaaggagcatgacagtggagaggggagccacatatcggggcagagcaatgggcgggacccccaggccctggccaaagccgtgcaggttcaccaggatactctgcgcaccatgtacttcgcttgaaggcagaacgctgttacctcactggatagaagaaagctttccaagccccaggagctgtgccacccaaatccagaggaagcaaggaggagggaggtggggtagggaggagtgtaggatgccttgtttccttctatagaggtggtgtaagagtggggaacagggccagcaagacagaccaccagccagaaatctctgatatcaacctcatgtcccccacccctcaccccatcttgtcacatctggccctgaccccactggaccaaaaggggcagcactggtgcccaccatacacacaggtgtctcatgtgactcacagtgctaaagactcatgcttgacagcttggtaaggtcaactctgtagccctgcagacaaaagctggttaggtttgggtttgatactttagatgggaaagtgaggggcttgagaaagtgggtgggaggagggaaggattttttaggagccttaatcagaaaaggactagatttgtttaagaagaaaaatgaaaccagacccagatcaatattttaggatactagatgttttaatgggttcagaatccagtttgtaggaagattttttaatggttttggttgctcctcccccagctgccaccccccaccttacccttattcctctctgtccacattttctgccccaccttacttctcctccctgacagacatccagcccctagtaatacttaaggcactatggcacttagctttgaagtgacacgaccctgtcttccttccgcccgctggtgggtaaccagtgccttccctgtaacggtaatgctgcagaactgcaaccttttgtacctttctttggggaatggggtgggggtgggagaggaggtagatggggaagaaataccccagacccaacaaacctccagccagaaagccagctattttgcatttgaaggaattgacttcctcattcattgagctttttaaaagatcacaacctcaagatggtcaaaatccattgacatttgcactttcaaacatgacaagtctcggagctgctgagatgacaggcccctggcctttccacttatgcctccttttctccttattcctcctacctcccgccccgcccaggtctggagttactttcatagcatttttcactcttggcttcttttctcccttgatggtcaagtctcttatgtttcaatatttcttaactggggtgtcttataacaaaaaactcttaggtctaaaatgagaaaaaagagagaaaacaaaatgttatttttataccataacttgagtgtattgccaaaatttggaaatccttcccatgcctgatgagtttatatcccagaaacattgagccatc

SEQ ID NO: 12888 - protein, 113 aa, Homo sapiens
MGCLKASYPRYSTMSYWPFVMPASNWKRTTSLGSLILWCRNAITPAFSVLTRMSELGRVVTSQLGPQWTPTSPTHLSLTSICAATQASRAPADHPITMFFGMTTVSQQMSSRS

SEQ ID NO: 12889 - DNA, 2218 bp, Homo sapiens
  CDS (54)..(1256)
tcgatgcagaactccgtctccttagacatcagaaactaaaactagatactcagatgaaattatctgacctgcaccatgtcaccttatttcaagaaatacttctcctgaagaattttgaaaaacaggagaacatacttcaagaacgtgttaattccttagacaaagaggaacagtacatgcaatggaaaataaatgaaactcttaaagagatggaagagaaaaagaatgaaatcaccaaactccaggagcaagaaaaggcactctatgctggttttcaagcagccattggagaaaacaataaatttgcaaacttcctcatgaaggtcctaaagaagaggattaaacgggtaaagaaaaaagaagttgaaggagatgctgatgaagatgaggagagtgaggaatcaagtgaagaagaatctagcttggagagtgatgaagatgagtctgaatcagaagatgaggtttttgatgattctatttgcccaacaaattgtgatgtggctctttttgagctggcccttcaccttcgagagaaaaggctggacattgaggaggctttagttgaagaaaagaaaattgttgataacctcaaaaaggaatatgatacattgtcaaaaaaagtgaaaattgtggcaactaatctgaatgcagcagaggaggccctggaggcttatcagcgagagaagcagcagcggctgaatgaactgctagttgtgattccgctcaagctccaccagatagagtatgtggtatttggagaaatacctagcgatctttctggtactttggtcttctctaaccatgccttgagacggctgcaagaacgaatccgtgagctccaggaggaaaattccaagcagcaaaaacttaacaaagaatggagagagagacgtaaacagctcatccgagaaaagagagaaatgacaaaaaccatacacaaaatggaggaaacagtccggcagctcatgatcagcaagtttggccgtgtggtaaatctagaagcccttcaaacgctttctgttaatacaacacttgaagaactgaagatcagaaaacttcgaaaggagctagcaaatgcgaaagagatgaagatgtgggaggaaaagattgctcaaatgcgatgggaactgatgatgaagacaaaagaacacaccagaaagctttatcagatgaatgatttgtgtattgaaaagaagaaacttgattctcggttgaatacactacagaatcagcagaaccctggaaatggtctaagctaagtgttccaacagtttggtcctctgaagaagagcatcagcatcacctgggaacttgtttaaaatggcaatgccttccagggccctcgggaagcagatgttgtggcaagagaggaggtcactgaattgatccaactccaggcggaaaggatttcggccttaaaggaggagattgctcttttgcgtaggaaaggcggtcttatcctcccacccattcagtctccacgagagaaagagatacagcccgcagacctttgagtttgctattttctcaaacccatacaaaatttctgacataactcactggaagttctgtctcctcatcacctccaacaatcttattactttaaactgaacttgcctgaaagtgtaaaaccagatccagtcacgttaagtcactttaagaatctctctacaatttggttatcttagaactgactgcagcacccaacctctgttatgaaactgaatcattttagatgtttcgaacctactagattgaatatgaagtctcggaaggctgtgtttcatgattgcagcaaatcacctgtaatatattttgttttaggaaaatttgatttgggggtatcctgaatttttagcccttggcaagaaaaactatcattcagcaattcatgagaaaactttgttttcttgatccttagaaaataaacttagatgttattaagtgttctctgagaggatgcaggagaaaaggacattttgtcagctatatcttagaatagaaatgcaaatttcagttttggcattgttgacttcataaagcagtgttttgagggctcaggattcaggaaatacaaacagacatggcagagcagtttgctttgggttggcagaaagcaggaaaataaccagccttcttggattgcccacagtttttgtagactcctcagttctgagtggagcagaggggcatgcttaataaaacagtcaataaagag

SEQ ID NO: 12890 - protein, 401 aa, Homo sapiens
MKLSDLHHVTLFQEILLLKNFEKQENILQERVNSLDKEEQYMQWKINETLKEMEEKKNEITKLQEQEKALYAGFQAAIGENNKFANFLMKVLKKRIKRVKKKEVEGDADEDEESEESSEEESSLESDEDESESEDEVFDDSICPTNCDVALFELALHLREKRLDIEEALVEEKKIVDNLKKEYDTLSKKVKIVATNLNAAEEALEAYQREKQQRLNELLVVIPLKLHQIEYVVFGEIPSDLSGTLVFSNHALRRLQERIRELQEENSKQQKLNKEWRERRKQLIREKREMTKTIHKMEETVRQLMISKFGRVVNLEALQTLSVNTTLEELKIRKLRKELANAKEMKMWEEKIAQMRWELMMKTKEHTRKLYQMNDLCIEKKKLDSRLNTLQNQQNPGNGLS

SEQ ID NO: 12891 - DNA, 2180 bp, Homo sapiens
cctcaatgtgcctgaataaatgcttgttcagacactggatgtgaagtccgattctccactggatacccaaactgcaggaggtaggtggttcccatctggacccgagttgcctaccagaccattgtcagaaacacagctggacgtgagttaaagtggtgaaaaaacagattttattcagtaactactgaaagtagggaaggagctgagcttattccgatttcggcagaggtgatttgggtgttttaaagaaagaatgagggagacgggaataaaggagctccgaagtgtcggggaagtgaaaaagtgcaaaggggagcttccggatagcgaagcacgtggaggttcctggagggtgtcctcccagagaggacgtggaaccttcccgctcccaccgcgcacttgccctgtgtatctcttccctttggctgttcatctacatacgtggtagtttcctttatagtaaactaataaacggaaatttgcagcagctgtgaaaaacttcaattttctgaatccacttttgatttttagtggcgattgcttaaatgcctcagttttaagtatcataacgaaaggaaagcatacgattcctatattaatgaatcggaagtaccttttgcagtttttgttttgctttttcagacaaggtcttattctgtcatccaggctggagtgcattggtgggaacacagctcgctgcctactcagcctcctgggctcaagcgatcctcccgcctcagcctctcaagtggctaggaccacaggcacccacgcactacaccgcctaactaatgttttgttttatattatattattttattttatagagacagaggtctcaccatgtcgaccgggctggttttgaactcctggcctcaagcagtcctcctcccacctcagcctcccaaagtgctaaaatgataggtgtgagccactgcacccggtgattttgcagtttttggaaaccacaagtttgatttcggtgtgaatattttggaagaatctatgaaacaaatgcacttcatctgatttctcagtaatgttgatgatagatttacttctgaacctcttggacgtgtgtatgttagaagttctccacccaattgatacggaattaaatagctgtgaaattactgtaagaagaaccgaagcaacgttggaaatttggtaactaatgccacgttggaagctattcatgccaatgtagcattgcttcatacaggtacttccagatctaattgaatacatccagtgggaaatttcgctttgcgtgattttttggctatccttctcataatggaccccagttttagttgtcagagtaacacaggcacagctgcttgaaggtcttgaaaatgaggttaacaaatattcagcttttggtgggagtttttctcaagttgttggaatagaatttggactcaattcagatgcggaactgggacactgaatgatagataacagatactgtgaaagttcaaggaccatacgaaaaaaatttaccttcttgctgctataaacaatatattgcgcatgggaaagatagttacgttatgcctgatagttgttcttgaatgtttgacacagaaactgtacaagtaccttccacagtcatcatgaatcacttttaatcgataaaaattttgtagggaaggaagcagtgtctttcaggccattgaatgaatttgattactactacgaacaaatcatcactattaacagccttcgaggaagaatcagataagccatcagcagtaattgcagtacctggcatagaagggtgaatttgccatatttctcagcacatgaaagaacatttgtaccaacttagagccggaggggaacaaggtttaagaacttttcccgttattagtggtaatgcatctgaaaattttgattctgattgaaatactatatgggtaatatataatcaatgcccaactgaatggagaaaacctacactttttgcattgttaagcacagtaatataattttggctctttggcattgttctagaattaattttaattctagggatattgctctaaatgtgcttcttatcacttttgactcttcggtgtgttatccaggaaacaatatatatacacttgtgaactgttgtttgtgatttaagcatatatattgaataatgtttccagattaaatgacttccaagctcc

SEQ ID NO: 12892 - DNA, 2476 bp, Homo sapiens
  CDS (489)..(821)
aactcctcgctagctctccctctcacacacgctcacacccggctcgagatggcggcggcggcggcggcggcgggggactcggactcctgggacgccgacgctttctccgtggaagacccagtgcggaaggtggggggcggcggcactgccggcggggaccgctgggaaggcgaggacgaggacgaggacgtcaaggataactgggatgacgatgatgatgaaaaaaagaggaagcagaagtaaaaccagaggtaaaaatttcagaaaagaaaaaaatagcagagaagataaaagagaaagaacggcaacagaagaaaaggcaagaagaaattaaaaagaggttagaagaacccgaagaacctaaagtgctaacaccagaagaacaattagcagataaactgcggctaaagaaattacaggaagagtcagacctcgaattagcaaaggaaacttttggtgttaataatgcagtttatggaatagatgctatgaacccatcttcaagagatgactttacagagtttggaaagttactaaaagataaaattacacaatatgaaaagtcactatattatgccagttttttggaagtcttagttcgagatgtgtgtatttcattggaaattgatgacttgaaaaaaattaccaattcactgactgtgctttgcagtgaaaaacagaagcaagaaaagcaaagcaaagccaaaaagaagaagaaaggtgtggttcctggagggggattaaaagccaccatgaaagatgatctggcagattatggtggttatgatggaggatatgtacaagactatgaagacttcatgtgacattttatcttttcttggtgtcatctttatgttgcccacaatcccttgaacatgtagcacaacttcctttcctttcagttctgccaaatgctacaatcagaagtgcagtatcttttgtgctggttatttaaccccttgacacttaggtgctaatgtgcaaatgagggaacttggatcttgctgccaaggggttaaaattgggaacctaagttgctactaaatcatagttcaaaacctaataatgttgtcgttgttgctatctgatttcatagcagcagtcactaaattggaaacaaaaggttgcaacgtgacaaaaaaaattgtgtagtatttaccagcaccattcagtaatacagccttaaccatacctccttgaactacttcataacttgtcaagaaaagcagtttgcagcaagggcatgtggtgtgcacctagtattaaaattgctttgtcttaaaattgaacatgaggatattaaaaatacattgtgaagaagactgcttatctcagagtgaagatactgcggctgaaaagcactagtttgatataaaattaaaatgaccaaaaccctccaactttgaagctaaagaaggtaaacctttccattattgcattacatgttgtggaatctctcgagtgcaaagactgtctagttatttatcaggctatttctactgatgaactgcttcaggtgggggagggaaacttatttttatttgcctgatttaagtgtctgagaaacaaatctttgttctcttaggctgcaatggaacaactttaccagggttttggcatttcctttcctttcctttataaaacatgctcagcaaactgcaccagttaactacagtttggtaaattgttatgttaacaattatgacatctgcaatgttttataaagcaactaatttaataaaatcactgttgtgaggacttaaattttgtgttacctcccaagagatactttttgagagtatagaacacagctcttgggagtacagttctctacgttctctactaaatcttaataaatgcttgacatagttacagctttaaaacatgagtgatttgccaggtccttatgttgtcaccatagagcaacaaaggtatagggctgccttcctcttatttatttggggacattattttgttatttagataccaaggcctaattaattaagtacctataagaactatttatttggagtaactgagcctgtaactcaggtttatggctgttaagtatagattggggaatctttattatgtcttctcctaagcagtttaaccaaatgtgtggttagtgtttttttattcccctaagacagaaagaacaaaaaatgttttaaatttctcttatataggaaataataggaacgtcaaagctctgtatacctactaagtggaaaacaagaccatcatctaagtgatttgagaaattaacaaaagtagtgactacacagcaataattacagtaaattaaataaagattcctttaaggcagacaagggctaagatttccttagcagtaataatgacatacactgaattgaaaatctattttattacagaaagatcagtttctaacaaatgaaaatgtatcacctgttccttaactgtgtaaataataattaaatttctttgaaactgg

SEQ ID NO: 12893 - protein, 111 aa, Homo sapiens
MNPSSRDDFTEFGKLLKDKITQYEKSLYYASFLEVLVRDVCISLEIDDLKKITNSLTVLCSEKQKQEKQSKAKKKKKGVVPGGGLKATMKDDLADYGGYDGGYVQDYEDFM

SEQ ID NO: 12894 - DNA, 1760 bp, Homo sapiens
  CDS (66)..(1727)
gaagcaaaaaggtcagcaactgtaatctgtatcgccttggaaaaaagaagggactacccagccgcatggtggtgtcaatatttgatccccctgtgaattggcttcctcctggttatgtagtaaatcaagacaaaagcaacacagataaatgggaaaaagatgaaatgacaaaagactgcatgctggcgaatggcaaactggatgaggattacgaggaggaggatgaggaggaggagagcctgatgtggagggctccgaaggaagaggctgactatgaagatgatttcctggagtatgatcaggaacacatcagatttatagataatatgttaatggggtcaggagcttttgtaaagaaaatctctctttctcctttttcaaccactgattctgcatatgaatggaaaatgcccaaaaaatcctccttaggtagtatgccattttcatcagattttgaggattttgactacagctcttgggatgcaatgtgctatctggatcctagcaaagctgttgaagaagatgactttgtggtggggttctggaatccatcagaagaaaactgtggtgttgacacgggaaagcagtccatttcttacgacttgcacactgagcagtgtattgctgacaaaagcatagcggactgtgtggaagccctgctgggctgctatttaaccagctgtggggagagggctgctcagcttttcctctgttcactggggctgaaggtgctcccggtaattaaaaggactgatcgggaaaaggccctgtgccctactcgggagaatttcaacagccaacaaaagaacctttcagtgagctgtgctgctgcttctgtggccagttcacgctcttctgtattgaaagactcggaatatggttgtttgaagattccaccaagatgtatgtttgatcatccagatgcagataaaacactgaatcaccttatatcggggtttgaaaattttgaaaagaaaatcaactacagattcaagaataaggcttaccttctccaggcttttacacatgcctcctaccactacaatactatcactgattgttaccagcgcttagaattcctgggagatgcgattttggactacctcataaccaagcacctttatgaagacccgcggcagcactccccgggggtcctgacagacctgcggtctgccctggtcaacaacaccatctttgcatcgctggctgtaaagtacgactaccacaagtacttcaaagctgtctctcctgagctcttccatgtcattgatgactttgtgcagtttcagcttgagaagaatgaaatgcaaggaatggattctgagcttaggagatctgaggaggatgaagagaaagaagaggatattgaagttccaaaggccatgggggatatttttgagtcgcttgctggtgccatttacatggatagtgggatgtcactggagacagtctggcaggtgtactatcccatgatgcggccactaatagaaaagttttctgcaaatgtaccccgttcccctgtgcgagaattgcttgaaatggaaccagaaactgccaaatttagcccggctgagagaacttacgacgggaaggtcagagtcactgtggaagtagtaggaaaggggaaatttaaaggtgttggtcgaagttacaggattgccaaatctgcagcagcaagaagagccctccgaagcctcaaagctaatcaacctcaggttcccaatagctgaaaccgctttttaaaattcaaaacaagaaac

SEQ ID NO: 12895 - protein, 554 aa, Homo sapiens
MVVSIFDPPVNWLPPGYVVNQDKSNTDKWEKDEMTKDCMLANGKLDEDYEEEDEEEESLMWRAPKEEADYEDDFLEYDQEHIRFIDNMLMGSGAFVKKISLSPFSTTDSAYEWKMPKKSSLGSMPFSSDFEDFDYSSWDAMCYLDPSKAVEEDDFVVGFWNPSEENCGVDTGKQSISYDLHTEQCIADKSIADCVEALLGCYLTSCGERAAQLFLCSLGLKVLPVIKRTDREKALCPTRENFNSQQKNLSVSCAAASVASSRSSVLKDSEYGCLKIPPRCMFDHPDADKTLNHLISGFENFEKKINYRFKNKAYLLQAFTHASYHYNTITDCYQRLEFLGDAILDYLITKHLYEDPRQHSPGVLTDLRSALVNNTIFASLAVKYDYHKYFKAVSPELFHVIDDFVQFQLEKNEMQGMDSELRRSEEDEEKEEDIEVPKAMGDIFESLAGAIYMDSGMSLETVWQVYYPMMRPLIEKFSANVPRSPVRELLEMEPETAKFSPAERTYDGKVRVTVEVVGKGKFKGVGRSYRIAKSAAARRALRSLKANQPQVPNS

SEQ ID NO: 12896 - DNA, 2348 bp, Homo sapiens
aaacgcggaaccatggccgctgtggttgctgtttgcggtggtctagggaggaagaagttgacacacttggtaacggctgctgtcagccttacacatcccgggactcacacggtgctttggagaagaggttgttcacaacaggtatccagcaatgaggacctggtaagaatttttttttctattagtaaggcctttgcaaatatgaccaaaatgtttttctttttaaaacgagatctggtattagactctaacatcttttattttagctacttgaatagagttctgccgtaggacaaaacaatttgataattactctgagttcagaaatgatgatgaattgattgtagtcatgtagtcagttgagttttgaagtaggggaattcctagattagaagcaaagctgctataataccatatttttcttcctagatcttaaatttaaggatatgtgatttgggaattgttttttttttttttacatagccctttgtaagcaaatgatatgggaattttaaaaggtagtttgggtgagcagaattttagataactgaaaagagactgtacaaagcttagctataggttggctatagtattaacatggactttctgaaagcacaggttcttgctacatgcaaaggtattttgacactaattagaccatacaaagcacttggcacagagctgaagagtagttacgtgagctgaatgtaaattggaaagtttgaggaattggaaaaaacaaaagaacttgtctagtttctctgagcatctgtcttggtaatctaatccatgcaccatactttaagaaagtaaagggacattatttcttttttagttcataaatcccactttgtctctaatcaaagttatggaccctctccacagaaaaaggcacacagtcccattcatttgaagttttgcatacgattacagggagtcatgggcttcaaagccatttctagattaagaacctctatcctggagacagccatactgactgtaggaaggaggcactgtgacaaaagcattagaggcagtggtggtaacagaaaagccaaaaagactgatacaaacttatatagtagcctggggtgataaagtcaaagaaccttttattacagtaagtcatgggccattatctgtgtataaaaatagtgataaaatacttgatagagacatggggatggataaattagggattgtactcatttaagaatggcatatgttatctattgtgttgtaagtttccttaaatctaaaaattttttcattatctacaatctgagcaaagcattggaacactttcttatcagacatcatttttgttctgccataaaattttattctatgaagattgtactttattccagaatcttcccatgcgttaatccgtaggctaaactaaaacaaaataaagtgcttatacaaaatatgtacacagtaagaaaggtataactaatcctttgaatggatttgaatgtagaatagtaaccttttaaaattcagaattaacacatcctattatcagacttttcgtttttttccctagcccatttcaatggaaaatccttataaagaacctcttaagaaatgtatcttgtgtggaaagcatgtagattataagaatgtacaggtgagatctggttttacttcactatattttagggttttgcttctgatagatctgcttaaagagaatcaagtcagtttatagcaggcttttgtagaggtaactgttttagcaacttcataatttcaaatttggttataattctatgtataagcttatctctgctttattcaagtaaaagcaccttggctttcccccacttactgttatttccactctgtttttttcactaccccaaacatcttaatagctccctgtggcagtaattctcaattggtgagggtcagaactttggaaaaagctcatctggtgaagctgatctctttatctcaccacccatatcactgattcacatattacttatctcttgtctaactctcagcaagttagaagttgcaaatttggggcaagtgaatagcgctagaattctgtatgttggctgggtgtggtggctcacgcctgtaatcccagcactttgggaggccaaggcgggcggatcacctgaggtcaggagtttgagaccagcctggccaatgtggtgaaaccccgtctctattaaaaatacaaaaattagctgagtgtggtggtgcatgcctgtaatcccagccacttgggaggctgaggcaggagatttgcttgaacccaggaggcggaagttgcagtgagctgagatcgtgccattgcactccagcctgggtgacaagagtaaaactctgtc

SEQ ID NO: 12897 - DNA, 2442 bp, Homo sapiens
  CDS (6)..(1124)
ttattatggaagtctccaaaagcagtagccaagaaaaaaatggaaaaggggaagtaataatacccaaagagaagttctggaagatatctacccctcccgaggcatactggaaccgagagcaagagaagctgaaccggcagtacaaccccatcctgagcatgctgaccaaccagacgggggaggcgggcaggctctccaatataagccatctgaactactgcgaacctgacctgagggtcacgtcggtggttacgggttttaacaacttgccggacagatttaaagactttctgctgtatttgagatgccgcaattattcactgcttatagatcagccggataagtgtgcaaagaaacctttcttgttgctggcgattaagtccctcactccacattttgccagaaggcaagcaatccgggaatcctggggccaagaaagcaacgcagggaaccaaacggtggtgcgagtcttcctgctgggccagacacccccagaggacaaccaccccgacctttcagatatgctgaaatttgagagtgagaagcaccaagacattcttatgtggaactacagagacactttcttcaacttgtctctgaaggaagtgctgtttctcaggtgggtaagtacttcctgcccagacactgagtttgttttcaagggcgatgacgatgtttttgtgaacacccatcacatcctgaattacttgaatagtttatccaagaccaaagccaaagatctcttcataggtgatgtgatccacaatgctggacctcatcgggataagaagctgaagtactacatcccagaagttgtttactctggcctctacccaccctatgcagggggaggggggttcctctactccggccacctggccctgaggctgtaccatatcactgaccaggtccatctctaccccattgatgacgtttatactggaatgtgccttcagaaactcggcctcgttccagagaaacacaaaggcttcaggacatttgatatcgaggagaaaaacaaaaataacatctgctcctatgtagatctgatgttagtacatagtagaaaacctcaagagatgattgatatttggtctcagttgcagagtgctcatttaaaatgctaaaatagatacaaactcaattttgcatagaaaggtgtattttgaatagttcccatgttgtgttctcacattagagtaatttctgtattaaaccatgaaaattgcctttatgagtgatacccatttgagggcctctaaacccttcaatttggtactcacgtgaagagggaaagcggaagatggtaatttttttttacggatgatatggcaggatgattggttctgatcttaccggctagtggtcatttttaaaaaacttgtaccctcttatctgaaatcctgtttctggaatttggccattttaagtgattttgtttgccctcttctataatattcctacttcccataataatgactgatttatttgtaattcaggtatttataaacctattggctacaaagactttgttaaacattatccagtggttttcgtgaaatggaattatgtttatttttatgggatttgggtaaattttaaattgtctagaaaactgaaatttcagttgtcagttgtggaattcagtttttcaattgtggaaatttcctgccaccccaacagtatttttgtgtgttaattaattttgcaaaatgagaatcatggtgtgacactcatctaatttatcttgttgtgatgttatggtcataataaggagaaagagggtttaatttttcttgtatttggtttcctggtggtatcatagtgtaattttagtatttgaaaatcagtgtgattccttaatggccaactgaagattgaattgccgctaacaaccatatcgtgttagtgaattttcaatatggaccaggaaggcatatgtattttgaacttgagtgaaaaggttgaagttacagacttttgcatagatggtttgtcagtttaaaattccagaatttgttattgccatattttcacatgctgcttatacaagattattattgagtagtaactgcttccctgtctatgtagaagtgcctgtgtttttatttattgttcagatcaaagaccaaaacattttcttaaatatattttatgtaatattttatttgtatacagtgttgttgatgaaatatttaactagagcatgatattttaaatgttaaggtgtaacatatgttaaataaaactgttatttttgaattttaaaatttgttttttgggggtatgaactactagagtttaaaattctgccaaactattacttatatgtactattgtgtaacatactttcttgagatatttttgtttatagaattgaaggttcttatcagatgggatactggggactataaacaatggaaataaagccactgtattttt

SEQ ID NO: 12898 - protein, 373 aa, Homo sapiens
MEVSKSSSQEKNGKGEVIIPKEKFWKISTPPEAYWNREQEKLNRQYNPILSMLTNQTGEAGRLSNISHLNYCEPDLRVTSVVTGFNNLPDRFKDFLLYLRCRNYSLLIDQPDKCAKKPFLLLAIKSLTPHFARRQAIRESWGQESNAGNQTVVRVFLLGQTPPEDNHPDLSDMLKFESEKHQDILMWNYRDTFFNLSLKEVLFLRWVSTSCPDTEFVFKGDDDVFVNTHHILNYLNSLSKTKAKDLFIGDVIHNAGPHRDKKLKYYIPEVVYSGLYPPYAGGGGFLYSGHLALRLYHITDQVHLYPIDDVYTGMCLQKLGLVPEKHKGFRTFDIEEKNKNNICSYVDLMLVHSRKPQEMIDIWSQLQSAHLKC

SEQ ID NO: 12899 - DNA, 2083 bp, Homo sapiens
  CDS (251)..(895)
tagactgtctctttctgaaatattaagcaatatcagatcatgtcgactacagtgtttccagccaaggctactaaatttacaggacagtgatagtgaagaatgtacctcaagaaaaccagggcagactgtgaacaataaaagagtttctgcagcatctgtagctttattgaacaccagcaagaatggcatatcagtaacagggggtatcacagaagagcagtttcagacacatcagcagcagttagttcagatgcaaaggcagcaacttgcccagcttcagcagaaacagcaatctcagcattcctcgcaacagacacatccaaaagcacagggctcaagcacctctgactgtatgtctaaaacacttgactcagccagcgcccactttgctgcatctgcagtggtcagtgcacctgttccaagtcgcagtgaggtagccaaggaacagaacactggccacaacaacataaacggcgttgtccagccttcaggaacctctaaaacattatactccaccaatatggctttatcatccagcccagggatttcagctgtacagcttgtaaggacagttggccacaccactacaaaccacttaatcccagcattgtgcacaagcagtcctcagacacttcccatgaacaattcctgcctgacaaatgcagtgcacctcaataatgtcagtgttgtttctccagtcaatgtgcatatcaatacacggacttcagcaccatcgccaacagccttaaaacttgccacagttgctgccagtatggacagagtgccaaaggttactcccagcagtgccatcagcagcatagcaagagagaaccacgaaccagaaagattgggcttaaatggaatagcagagacaacagtagctatggaagtgacataacctaaaacacgtggctctgacctgtgctgatggtgtgcagtcattcatattccagctgaatgcaaaaggcaacactctgtggatcacagagtgtaacaatggacctaaatggactatagtatattggatgttaaatccatatatgatgtatattttgtaaaattgggaaaatcactaccttgtaaaatagtttatttgtatcatcaatattatttctgttacttgaatagtagatattcatcatcatgcttttgcacttgaatttgcaactgaatggattttaaaaaataattctttaatgggatcatgagcatgaaatgggatcctgcatcacttgttttaactatttattttgccatgtttacattttgtatcttgtaaaaataaatccaactttgtgtctaaaaagttaaagattcatagctaggaaatgaaattcttgtaatttttttctaaaggaactgtaaagttttcacttggttcattttgtttcacaatttgactagatggactttttggtaaatactttagcggcatttcactgtcaaatatgaagttcaaggcaaaatagtattttctattactgtgcaggggaaagggatggatcgatacatgcaaatttaatgtagtaactcacttttccatatattttgaatgtatatttctatttatgataccaatttataaataattacacagaaaaaatggaataggaaaaattatgcatctagcacatttaaactgtgcaaatatgaaaatttttcgaggattacattttatctgaaggctgcatattttaactggctttaaaactgtaacacatcacataaaagaactttaccaggtatgtattgcattatatcattgcaataattattggaagtctagatatcgagccatcccaggtgttgggcggggggagggttgtggcaagattgtcttttcaattttggagagttttcctgtggctacaaggcaagtaacgggttggaaaaagtctgactgtaagcgttggacaccttcatagtgtagtgttttagtgactttttttatacggttcttgtaaattagatacgtgtagtggtgtttcagaatgtttgtttatgcactagttcagacaaccttccctgttacttgttcttgataagtgaaaactgcagggaaataaaaaatacatatcaaaac

SEQ ID NO: 12900 - protein, 215 aa, Homo sapiens
MQRQQLAQLQQKQQSQHSSQQTHPKAQGSSTSDCMSKTLDSASAHFAASAVVSAPVPSRSEVAKEQNTGHNNINGVVQPSGTSKTLYSTNMALSSSPGISAVQLVRTVGHTTTNHLIPALCTSSPQTLPMNNSCLTNAVHLNNVSVVSPVNVHINTRTSAPSPTALKLATVAASMDRVPKVTPSSAISSIARENHEPERLGLNGIAETTVAMEVT

SEQ ID NO: 12901 - DNA, 1592 bp, Homo sapiens
  CDS (314)..(799)
aagggagcgcacgccggcggcgcggaggccggctctgcgcttcgggccgccccctccccccaccccgctcacactcggcacttacttcggctgtctccgctgccctccagcggagacgcagctcctcaggcgcccggcggtatttgttgggtcggcggcgtcagggattcgcagtggcctgtggtcggcgtcgtccggccactggtgcgcccccgcggcaggcagagctcacgctcctgtcccccggctggtccggggtctgggcgccgcgtcgacggcggccccgcaggacgcgcagaccgggccgcagcccatgccccgagcggactgcattatgaggcacctgccttacttctgccggggtcaagtggtgcggggcttcggccgcggctccaagcagctgggcatccccacagctaattttcctgagcaagtggtagataatcttccagctgatatatccactggtatttactatggttgggccagtgttggaagtggagatgtccataagatggtggtgagcataggatggaacccatattacaagaatacgaagaagtctatggaaacacatatcatgcataccttcaaagaggacttctatggggaaatcctcagtgtggccattgttggctacctgagaccagaaaagaactttgattctttagagtcacttatttcagcaattcaaggtgatattgaagaagctaagaaacgactagagttaccagaacatttgaaaatcaaagaagacaatttcttccaggtttctaaaagcaaaataatgaatggccactgatgaaaaattgtattatttattcattcactgttttctagtgtttctgtgtttattactgttcagcatcatcttggttatatactgaaaatcaaacactttactacagttgtgaattagtttaaaccgtacaatgttgttatcatatcatgcttcaactattaaattaagcccatcatatcatagcactaaaaagattgagttaaaaataagatttaaaaaatatatattgattaaaatgtaccactagaaaggtattacatgtgtataagtatgggtaaaaaggcaagtcactagtttgagacgaaaactaaaattttcatggtaaaatgccagcatgtatgtacttgtgtagtgtgtacttctaaacagagaaggcttataaaagtaaatgcattaaggccaagtgcagtggctcacaccggtaatcccagcactttgggaggccgaggtgggaggattgcttgagctcatgagttcaagaccagcctgggcaacatagcgagactccatctctataaataaaaaaaaaggaaatgcattaaatagaaggttgatagtttatcataaacctgcggggaagaaactcagactttctatttttgatattttgtgcattaatacattacaaacatgaagatgtttgtaaagttttgttttagtcattttctttgcagtcacatcattgtaccaccttcattattgtatagagctgcttcaattctgagtcctctggacttcccctgcctatctgtttgttgttgttgttgaagacagtaaaataagtgttttc

SEQ ID NO: 12902 - protein, 162 aa, Homo sapiens
MPRADCIMRHLPYFCRGQVVRGFGRGSKQLGIPTANFPEQVVDNLPADISTGIYYGWASVGSGDVHKMVVSIGWNPYYKNTKKSMETHIMHTFKEDFYGEILSVAIVGYLRPEKNFDSLESLISAIQGDIEEAKKRLELPEHLKIKEDNFFQVSKSKIMNGH

SEQ ID NO: 12903 - DNA, 1842 bp, Homo sapiens
  CDS (18)..(1682)
acactggaaattccaacatgcctggggggctcccaaggcaagcttacacccagaaaacaacacagctggagcacaagtcacaaatgtaccaagttgaaatgaatcaagggcagtcccaaggtacagtggaccaacatctccagttccaaaaaccctcacaccaggtgcacttctccaaaacagaccatttaccaaaagctcatgtgcagtcactgtgtggcactagatttcattttcaacaaagagcagattcccaaactgaaaaacttatgtccccagtgttgaaacagcacttgaatcaacaggcttcagagactgagccattttcaaactcacaccttttgcaacataagcctcataaacaggcagcacaaacacaaccatcccagagttcacatctccctcaaaaccagcaacagcagcaaaaattacaaataaagaataaagaggaaatactccagacttttcctcacccccaaagcaacaatgatcagcaaagagaaggatcattctttggccagactaaagtggaagaatgttttcatggtgaaaatcagtattcaaaatcaagcgagttcgagactcataatgtccaaatgggactggaggaagtacagaatataaatcgtagaaattccccttatagtcagaccatgaaatcaagtgcatgcaaaatacaggtttcttgttcaaacaatacacacctagtttcagagaataaagaacagactacacatcctgaactttttgcaggaaacaagacccaaaacttgcatcacatgcaatattttccaaataatgtgatcccaaagcaagatcttcttcacaggtgctttcaagaacaggagcagaagtcacaacaagcttcagttctacagggatataaaaatagaaaccaagatatgtctggtcaacaagctgcgcaacttgctcagcaaaggtacttgatacataaccatgcaaatgtttttcctgtgcctgaccagggaggaagtcacactcagacccctccccagaaggacactcaaaagcatgctgctctaaggtggcatctcttacagaagcaagaacagcagcaaacacagcaaccccaaactgagtcttgccatagtcagatgcacaggccaattaaggtggaacctggatgcaagccacatgcctgtatgcacacagcaccaccagaaaacaaaacatggaaaaaggtaactaagcaagagaatccacctgcaagctgtgataatgtgcagcaaaagagcatcattgagaccatggagcagcatctgaagcagtttcacgccaagtcgttatttgaccataaggctcttactctcaaatcacagaagcaagtaaaagttgaaatgtcagggccagtcacagttttgactagacaaaccactgctgcagaacttgatagccacaccccagctttagagcagcaaacaacttcttcagaaaagacaccaaccaaaagaacagctgcttctgttctcaataattttatagagtcaccttccaaattactagatactcctataaaaaatttattggatacacctgtcaagactcaatatgatttcccatcttgcagatgtgtaggtaagtgccagaaatgtactgagacacatggcgtttatccagaattagcaaatttatcttcagatatgggattttccttctttttttaaatcttgagtctggcagcaatttgtaaaggctcataaaaatctgaagcttacattttttgtcaagttaccgatgcttgtgtcttgtgaaagagaacttcacttacatgcagtttttccaaaagaattaaataatcgtgcatgtttatttttccctctc

SEQ ID NO: 12904 - protein, 555 aa, Homo sapiens
MPGGLPRQAYTQKTTQLEHKSQMYQVEMNQGQSQGTVDQHLQFQKPSHQVHFSKTDHLPKAHVQSLCGTRFHFQQRADSQTEKLMSPVLKQHLNQQASETEPFSNSHLLQHKPHKQAAQTQPSQSSHLPQNQQQQQKLQIKNKEEILQTFPHPQSNNDQQREGSFFGQTKVEECFHGENQYSKSSEFETHNVQMGLEEVQNINRRNSPYSQTMKSSACKIQVSCSNNTHLVSENKEQTTHPELFAGNKTQNLHHMQYFPNNVIPKQDLLHRCFQEQEQKSQQASVLQGYKNRNQDMSGQQAAQLAQQRYLIHNHANVFPVPDQGGSHTQTPPQKDTQKHAALRWHLLQKQEQQQTQQPQTESCHSQMHRPIKVEPGCKPHACMHTAPPENKTWKKVTKQENPPASCDNVQQKSIIETMEQHLKQFHAKSLFDHKALTLKSQKQVKVEMSGPVTVLTRQTTAAELDSHTPALEQQTTSSEKTPTKRTAASVLNNFIESPSKLLDTPIKNLLDTPVKTQYDFPSCRCVGKCQKCTETHGVYPELANLSSDMGFSFFF

SEQ ID NO: 12905 - DNA, 1776 bp, Homo sapiens
  CDS (356)..(673)
acaagcagagagacaaatcatgagtgaactcccattcacaactgctacaaagataataaaatacccaggaatacaactcacaagggatgtgaagaactacaaacaactgctcaaggaaataagagagtacacaaacaaatggaaaaacattccatgctcatggataggaaaaatcaatatcatgaaaatggccatactgcccaaagttatttatagattcaatgctatccccatcaagccatgattgacattcctcacaggattagaaaaaactactttaaatttcatatggaaccaaaaaagagtccaaatagccaagacaatcctaagcaaaaggaacaaaactggaggcatcatgctacctgacttcaaactataccacaaggctacagtaaccaaaacagcatggtactggtaccaaaacagatatatagaccaatggaacagaacagatgcatcagaaataatgctgcacatccacaaccatctgatctttgataaatctgacaaaaacaagaaatggggaaaggattccctatttaataaatggtgttgggaaaactggctagccatatgcagaaaactgaaactggacccctttcttacaacttatacaaaaattaactcaagatggattaaagacttaaatttaagacctaaaactataaaaacctagaagaaaacctaggcaatgccattcaggacataggcatgggcaaagacttcatgactaaaatgccaaaagcaatggcaacaaaagccagtagtgacaaaagggatctaattaaactaaagagcttctgcacagcaaaagaaactatcatcagagtgaacaggaaacctacagaatggaagagaattttctatccagctgacaaagggctaatatccagaatctacaaggaacttaaacacatttacaagaagaaaaacaaccccatcaaaacatgagtgaaggatatgaacagacacttctcaaaagaagacatttatgtggccaacaaatatatgaaaaaacaccttatcaacactggttattagagaaatgcaaatcaaaaaccacaatgagataccatctcacgccagttagatggcaatcattaaaaagtcaggaaacaacagatgctggagaggatgtggagaaacaggaatgcttttactcttttggtgggagtgtaaattagttcaaccattgtggaagacagtgtggcgattcctcaaagatctagaaccagaaataccatttgacccagcaatcccattactgggtatatacccaaaggattataaataattctactataaagacacatgcacacgtatgtttattacagcactatttgcaataacaaagacttgaaaccaaccagtttatcaatgataaactggataaagaaaatgtggcacatatacaccatggaatactatgcagccataaaaaaggatgagttcttgtcctttgcagggacatggatgaagttggaaaccatcactctcagcaaactaacacaggaacagaaaaccaaacgctgcatgttctcacttataagtgggagttgaacaatgagaacacatggacacagggaggggaagatcacacaccagggcctgttgctgggtgggggcaaagggagggatagcattcagagaaatacctaatgtagatggttgacaggtgcagcaaaccaccatggcacatgtatacctatgtaacaaacctgcatgttctgcacatgtatcccagaatttaaagtataataaaaattatttttcttt

SEQ ID NO: 12906 - protein, 106 aa, Homo sapiens
MLPDFKLYHKATVTKTAWYWYQNRYIDQWNRTDASEIMLHIHNHLIFDKSDKNKKWGKDSLFNKWCWENWLAICRKLKLDPFLTTYTKINSRWIKDLNLRPKTIKT

SEQ ID NO: 12907 - DNA, 1918 bp, Homo sapiens
  CDS (168)..(1625)
gcggtcatcgccgcctcggcccgggagctcagcattgcagccgcaccggaggcctgaaaccgtctcctccgctaccgccgccgccgccgccgccgccggaccgagggatacgacggttcccgagacagcggaacctgcggcccggggcggccgtcagatataaagtcatgaagaactggggagttataggtggaattgctgctgctcttgcagcaggaatatatgttatttggggtcccattacagaaagaaagaagcgtagaaaagggcttgtgcctggccttgttaatttagggaacacctgcttcatgaactccctgctacaaggcctgtctgcctgtcctgctttcatcaggtggctggaagagttcacctcccagtactccagggatcagaaggagcccccctcacaccagtatttatccttaacactcttgcaccttctgaaagccttgtcctgccaagaagttactgatgatgaggtcttagatgcaagctgcttgttggatgtcttaagaatgtacagatggcagatctcatcatttgaagaacaggatgctcacgaattattccatgtcattacctcgtcattggaagatgagcgagaccgccagcctcgggtcacacatttgtttgatgtgcattccctggagcagcagtcagaaataactcccaaacaaattacctgccgcacaagagggtcacctcaccccacatccaatcactggaagtctcaacatccttttcatggaagactcactagtaatatggtctgcaaacactgtgaacaccagagtcctgttcgatttgatacctttgatagcctttcactaagtattccagccgccacatggggtcacccattgaccctggaccactgccttcaccacttcatctcatcagaatcagtgcgggatgttgtgtgtgacaactgtacaaagattgaagccaagggaacgttgaacggggaaaaggtggaacaccagaggaccacttttgttaaacagttaaaactagggaagctccctcagtgtctctgcatccacctacagcggctgagctggtccagccacggcacgcctctgaagcggcatgagcacgtgcagttcaatgagttcctgatgatggacatttacaagtaccacctccttggacataaacctagtcaacacaaccctaaactgaacaagaacccagggcctacactggagctgcaggatgggccgggagcccccacaccagttctgaatcagccaggggcccccaaaacacagatttttatgaatggcgcctgctccccatctttattgccaacgctgtcagcgccgatgcccttccctctcccagttgttcccgactacagctcctccacatacctcttccggctgatggcagttgtcgtccaccatggagacatgcactctggacactttgtcacttaccgacggtccccaccttctgccaggaaccctctctcaactagcaatcagtggctgtgggtctccgatgacactgtccgcaaggccagcctgcaggaggtcctgtcctccagcgcctacctgctgttctacgagcgcgtcctttccaggatgcagcaccagagccaggagtgcaagtctgaagaatgactgtgccctcctgcaaggctagagctgatggcactgtctgcactgtccaggaaaaaagtaaaactgtactgttgcgtgtgcaagcggccccactagagccttccagccttctggtgtgttctaagagcaggctccacctgggagccagccccagttcacaccaaaccaggctccctgaacagtcctgttcatgtgtgtaggtggttctgttgtgttaagaaagcattcattatgtccggagtgtctttttactcatctgatacaggtaattaaaagaactcagattcttg

SEQ ID NO: 12908 - protein, 486 aa, Homo sapiens
MKNWGVIGGIAAALAAGIYVIWGPITERKKRRKGLVPGLVNLGNTCFMNSLLQGLSACPAFIRWLEEFTSQYSRDQKEPPSHQYLSLTLLHLLKALSCQEVTDDEVLDASCLLDVLRMYRWQISSFEEQDAHELFHVITSSLEDERDRQPRVTHLFDVHSLEQQSEITPKQITCRTRGSPHPTSNHWKSQHPFHGRLTSNMVCKHCEHQSPVRFDTFDSLSLSIPAATWGHPLTLDHCLHHFISSESVRDVVCDNCTKIEAKGTLNGEKVEHQRTTFVKQLKLGKLPQCLCIHLQRLSWSSHGTPLKRHEHVQFNEFLMMDIYKYHLLGHKPSQHNPKLNKNPGPTLELQDGPGAPTPVLNQPGAPKTQIFMNGACSPSLLPTLSAPMPFPLPVVPDYSSSTYLFRLMAVVVHHGDMHSGHFVTYRRSPPSARNPLSTSNQWLWVSDDTVRKASLQEVLSSSAYLLFYERVLSRMQHQSQECKSEE

SEQ ID NO: 12909 - DNA, 2845 bp, Homo sapiens
  CDS (95)..(1036)
aaaaaagcgggacaggtccagcggttgttctgtgtgaagtcgcgcggcttccacccacgcagtgttctaagtgaaggccagaaactcgctcgccatgtcggctgcagaggcggggggtgttttccacagagccaggggcaggaccctggacgcgtttcccgcagaaaaggaaagcgaatggaaaggcccattctacttcatcctgggcgcagacccacagtttgggctgatcaaggcctggtccactggggactgtgacaatggcggcgacgaatgggaacaggagatccgtctaactgagcaagccgtccaggccatcaacgagctgaaccccaaacccaaattcttcgttctgtgcggcgacctcatccacgccatgccagggaagccgtggcggacggagcagacggaggacctgaagcgagtgcttagggcagtggacagggccatcccactggtccttgtcagcggcaaccatgacattggcaacacccccacggccgagaccgtcgaggagttctgccggacttggggagatgactacttcagcttctgggtcgggggcgtcctgttcctggtcctcaactcccagttctacgagaacccctccaaatgccccagcctgaagcaggctcaggaccagtggctggacgagcagctgagcatcgcgaggcagcggcactgccagcatgccatcgtcttccagcacatcccgctgttcctggagagcatcgacgaggacgacgactactacttcaacctcagcaagtccactcggaaggagttggcagacaagttcatccacgcaggtgtcagagtcgtgttctcaggccactaccacaggaatgccgggggtacctaccagaacctcgacatggtggtgtcatctgccattggatgccagctgggcagagacccccacgggctccgagtcgtggtggtcaccgccgagaaaattgttcaccgatactacagtctagatgagctgagtgagaaaggaatagaagacgatctcatggatttgatcaagaaaaaatgacgctccttcccgttcccgttcacttttcacttgcactatttttttattttgccagaaacagcagctgcacacaacctcttgctgaaatataaaaatagcccaggcaggtttgtgaatttatgtccttttgcataaatcagagagctggggccctgtcctgaattatattcaaaatagaactgcatttcctttaaaatggagcgaatgatcctggaaatcagtttttaaaatattagactatctctgcatggatgtttgaataaattctcctaatgctgtgtttctcaactccacttttgaattggattgtattctggttagcatatggtcaaagtctgcctatcgacctcaattccaatctgacagccaagtatgatctttgataattccttaaacaaactacacctgattgtattaaattgtggtcacgattcccaaaacgctaggcaaaacaaagttcatctcctttcctttccagcggaacgaacagctgtctgccttgttgtgagagccatgcagacttattttgacaaggagccaagtaggcaccatttactgttcaattctgagacttctgatgataggaacagaatgcagttgatacagctcggagcttaaatttgccttcctgggtgcctagaaaagtcacctttgcacataaattggccatttctgaaaatctcctccaagagactgaaaccaaagctctaaaacgccgcttcttcagtctctggggagcacgttgagttggttcacatccacattctggctgtgtagccactccacagatgggtggtctcttgggatcagaatgcccctccactcatgagactctccattttgtccactttgacaggaaaagtgggaatgtatgcagagctctcaaaagaaacaaaaaaggccaaaacggtgccttcagccacatcctctgaattggccctgacttggactaaatgcactaatgcgaaatcccttgacaaaagcgcataggttatttcaaaccagcattgttttttatgtaacctgttttaccgcatcttctcagcagcttctgaccactgctcaattttctcctttacagccattgttctggtggacaaataacctaggtactccaaatcctggcaggaaaaatatacagcattatgaaacagcactcagtaatcctaaaatgatttccaaagctggttacacatgacctgcaaagtctattaaattaaaagactttctcattacagagtttagtcaacgtagcaaaaccatgggaaattaaatggaaagataattaaatatgtaaattcataaggaacaaaagacgagaagttaattatacaataggctggtgacaccagagttcattgttatgtgccacaagaaaattaaattttttaaaaaactagaacgctcttcttttagtgttttgctgaaatcctgttttgtatttgtttctttacaacaggtgtaggtataggaggtcaagaaaaggagttcggtaaagggcatagctaataacaaccacacattgggccaggcgcagtggcttacgcctgtaatcccagcactttgggaggctgagacgggcagatcacctgagatcaggagtttgagaacagcctggccaacatggtgaaactccatctctactaaaaatacaaaaattagccaggcatgctggtgcacacctgtaatcccagctactcgggaggctgaggcaggagatcgctggaactcaggaggcagaggttgcagtgagccaagatcatgccactgcactccagcctgggcaacagagcaagactctgtctc

SEQ ID NO: 12910 - protein, 314 aa, Homo sapiens
MSAAEAGGVFHRARGRTLDAFPAEKESEWKGPFYFILGADPQFGLIKAWSTGDCDNGGDEWEQEIRLTEQAVQAINELNPKPKFFVLCGDLIHAMPGKPWRTEQTEDLKRVLRAVDRAIPLVLVSGNHDIGNTPTAETVEEFCRTWGDDYFSFWVGGVLFLVLNSQFYENPSKCPSLKQAQDQWLDEQLSIARQRHCQHAIVFQHIPLFLESIDEDDDYYFNLSKSTRKELADKFIHAGVRVVFSGHYHRNAGGTYQNLDMVVSSAIGCQLGRDPHGLRVVVVTAEKIVHRYYSLDELSEKGIEDDLMDLIKKK

SEQ ID NO: 12911 - DNA, 2069 bp, Homo sapiens
  CDS (34)..(2067)
attcacgcgcgccgcagcggggcaccggaagttatggaggtattaataggggaccctattaccacatgtctttctccctcagtgtatgatataatttgtaatcttgggtttcaactcagagaaaattgtgatatcaatagcattgtaactcagaatggtgaagtatgctggaaaacaatcacagactgtgtgagctacacagagtcagagcagggtctggattactggggaagcgtgaggctgctgggccctgtgtgtgaggctgtccattcacatttcttatctctgaccaaggggcaatttgaaattcgatatgcaccgtggttccagtggacaagttttccagagttatttcctgaaatatttgatgccttggaaagtctacaatctcctgctatttctcttagcttaatgaaactgacatcgtgtctagaacgagccttgggtgatgtatttttactgattgggaaggaatgcccctttcttttaagagatctgctttcatctgaggagcttgctcaagtcttcagtcagtctgtgatgaacgtgctaaaagtcttcgttggctctccgtgtggtctcaacctgcgtaacgtcttatggcatgggtttgcgtcacctgaagaaattcctccaaaatactgttcaatgatgatactgttgacggcaggattgggtcagttactgaagagttaccttcaaaacactaaacttacattggcacatcgctctttcatatctcttacaaacctcgaggatttgattgtttttcctgatgttacttatgaggtgctttcagtattagaagaagtgatgatgaaatctgcttttatattaaaaatcatgttaccatattggggagttgcactggtcaagttcaagtcacacaggtttgctgactgcgccatattgttgctgacacaactggagactggacttaggaatgtttttgccacacttaacagatgtccaaaaagactcctgactgctgagtcaacagctctttataccacctttgatcaaatattggcaaaacacttgaatgatggtaaaatcaatcagcttcctcttttccttggagagcctgctatggaatttctctgggatttcctgaaccatcaggagggtccccgcataagagatcatttaagccacggggagatcaacttacatgaattttcaaaagaaacaactaatcagttgcttgcattttctcttgtactgctactcagattcgttgatgactgtctgctatcagtttttaaggaaaaatcagccgtagaattgttgattagtcttgcagaaggctatagttctcgctgtcatccggtttttcagcttaaaaaacaggtgctgagctgtgaggagagcatcagggtttgggctctgctgcctttccccgaagaactcactcggcaagccgtcagattagaagataattctgaaacaaatgcctgccactctttgattacaaaaatgacggatgagctgtatcaccatatgcctgagaatcgttgtgtgttaaaggacttggatcgtcttcctactgagacgtggccccagcttctccgtgagctctgcagcacacctgttcccaccctgttctgccccaggattgtgctggaagtgctggttgtgctccgaagcatcagcgaacagtgccgccgtgtgtccagccaggtcaccgttgcctcagagctgagacacaggcagtgggtggaaaggacgctgcggtctcgccagcggcagaactacctgcgtatgtggagtagtatcagactactgtcccctgtgctcagcctgatactgttactcattgcgctggagttggtcaacattcatgctgtttgtgggaagaatgcgcatgagtatcagcagtacctaaagtttgtaaagtcgatcttgcagtacacggagaacctggtggcttacaccagttacgaaaagaacaagtggaatgaaactatcaatcttacacatacagctttgttgaaaatgtggacttttagtgagaagaaacaaatgttaatacatttagccaagaaatccacaagtaaagtactcttatg

SEQ ID NO: 12912 - protein, 678 aa, Homo sapiens
MEVLIGDPITTCLSPSVYDIICNLGFQLRENCDINSIVTQNGEVCWKTITDCVSYTESEQGLDYWGSVRLLGPVCEAVHSHFLSLTKGQFEIRYAPWFQWTSFPELFPEIFDALESLQSPAISLSLMKLTSCLERALGDVFLLIGKECPFLLRDLLSSEELAQVFSQSVMNVLKVFVGSPCGLNLRNVLWHGFASPEEIPPKYCSMMILLTAGLGQLLKSYLQNTKLTLAHRSFISLTNLEDLIVFPDVTYEVLSVLEEVMMKSAFILKIMLPYWGVALVKFKSHRFADCAILLLTQLETGLRNVFATLNRCPKRLLTAESTALYTTFDQILAKHLNDGKINQLPLFLGEPAMEFLWDFLNHQEGPRIRDHLSHGEINLHEFSKETTNQLLAFSLVLLLRFVDDCLLSVFKEKSAVELLISLAEGYSSRCHPVFQLKKQVLSCEESIRVWALLPFPEELTRQAVRLEDNSETNACHSLITKMTDELYHHMPENRCVLKDLDRLPTETWPQLLRELCSTPVPTLFCPRIVLEVLVVLRSISEQCRRVSSQVTVASELRHRQWVERTLRSRQRQNYLRMWSSIRLLSPVLSLILLLIALELVNIHAVCGKNAHEYQQYLKFVKSILQYTENLVAYTSYEKNKWNETINLTHTALLKMWTFSEKKQMLIHLAKKSTSKVLL

SEQ ID NO: 12913 - DNA, 1977 bp, Homo sapiens
  CDS (57)..(857)
cagtgggtgcgtcggccacgaccttttggccaggttagggagggggcgacgctgagatgggggcggcggcggcggaagcggatcgcactctctttgtgggcaaccttgaaacgaaagtgaccgaggagctccttttcgagcttttccaccaggctgggccagtaataaaggtgaaaattccaaaagataaggatggtaaaccaaagcagtttgcgtttgtgaatttcaaacatgaagtgtctgttccttatgcaatgaatctacttaatggaatcaaactttatggaaggcctatcaaaattcaatttagatcaggaagtagtcatgccccacaagatgtcagtttgtcatatccccaatatcatgttggaaattcaagccctacctccacatctcctagcagcaggtacgaaaggactatggataacatgacttcatcagcacagataattcagagatctttctcttctccagaaaattttcagagacaagcagtgatgaacagtgctttgagacaaatgtcatatggtggaaaatttggttcttcacctctggatcaatcaggattttcaccatcagttcaatcacacagtcatagtttcaatcagtcttcaagctcccagtggcgccaaggtacaccatcatcacagcgtaaagtcagaatgaattcttatccctacctagcagatagacattatagccgggaacagcgttacactgatcatgggtctgaccatcattacagaggaaagagagatgatttcttctatgaagacaggaatcatgatgactggagccatgactatgataacagaagagacagtagtagagatggaaaatggcgctcatctcgacactaacacatgttaaaaggacattgtttttatagggtcattttaggccctttgactaagttgatatggaaatattttgttgaaaaactgtacagagcagctttacaagttgtcacattcctttataaatttttttaaagctacagtttaatacaaaatgaattgcggttttattacattaataacctttcacctcagggttttatgaagaggaaagggttttatgcaaaagaaagtgctacaattcctaatcattttagacactttaggagggggtgaagttgtatgataaagcagatattttaattatttgttatctttttgtattgcaagaaatttcttgctagtgaatcaagaaaacatccaggttgacagtctaaaatggctactggtattttagttaattcaaaaatgaaacttttcagtgattcactttactaacattctatttgagaaggcttattggtaaagtttggggataaaggcattgcttaacttcttatataatttaggtataaattctgtgacatgctcttgagctttaccctagttgaacatacatgtgtagatttacacatactgtttcattctaaaatttagaaattgttcattaaatcccatttgaggtataagtcactcaggaagttaaaatatctctacacgtatatttttacattaaaaatacagtgttagcataaatccccttttcaggaagaacaaaaatgtcagtgcatagttagataaaatggtaaaatgttttactgaaagcatacttttttggaaaatagattcatgaagcctttaagtgctgcttctgtcagtcaaacgttaaaaactttaacattttcaaagtgcccagactgtgtacaaagacacatgtaatggagattgtacaggttgtttttttgtttgaacctttgaaagagtttaatcttaacgttttctaattttaaaattttaaaatcttgtttaacaaaagcttgtattaagatactgttttcatttcattacagaattgtttataaaagttcatttgttgaaaaataaggatcctttttaataccacagcatttgtactgttcctttttaatatactgaaaatataaaaggaagggtgtgtgtt

SEQ ID NO: 12914 - protein, 267 aa, Homo sapiens [sequence omitted]

SEQ ID NO: 12915 - DNA, 1997 bp, Homo sapiens
ctacaatttttggactcaagcaaaaagccagattttttggaaccaactgaggaattctgtacacaaagcttcagcaaacacttagagaaaacaaacaaacaaacaaactgggtccttggaaacagttctggcacacaggcagaacactggaggccacctcaaaggacagaggccatgctttcgcatttggaatgtggctctgccacacagctcactcctatggtggggtcagaggtcagaacacaaaccacccatgtgggctctgctccctcccaacactctgtgttcccacagggcttctctgcgggcagccaggcacctgtcaggcttgggcaggggcctgctgagaatctgtgaatgcagaggggagggctcatggccaggattccagccagagatgaatttccatgctctgggccagggctctgtgccggcccctcatgaggtggctggctgcattatggggagatgctgcccacggcggagatggtggcagtggctgtgaagaacagaggtacctgaattctgtgtcctcagctgtcactttccggtgagacaagtggagcagggcctttgatcactgtggtcacagacctggtactgggttttgcccttgtgtgctcaaacatttctaaggtgtcccaagccctggaaatagggaagggaagggtggaggcttggatctgaggtcttgctgtccactccctgcctgcctgcccgcatctcaggcatggccaacagcagcccgttgaggggggcttgtctggacagttgcgtgtgatggtgttgagccatcacagggcagaggtcacttgtgtcacccccatagtcattgggttgcaggccatggaggagggacctccactccatggggcctattctccattaaggtggaagtgtccactgtgggcctagcacagtgcaggaaccaggccagggggtctatctcatacctctggggacaggaaaggtagaggatgaggaggttggacgtggtggtggctttgccttggatattcctcttcctctatcaaggccttctcttcttctctgtgtcccacaactctggcctcatcgccctgggactcccatctgctaagatagtggctttggaggttctggaagggcttagtgaggaggccagaagtatcagggaaagttgctggtgatggggtgggcggtgtcagaagcagccactgttttcccctcttcagacactgagagattaatcagggaatgaaatccaggtggaaattatttattgtgaagcagacgactgtctgtcctgtttatgacaaacccaaatgagaattggagggactaccagtaagtggtctcttcatgctctccccatcccagtttttaggatgaaatttagagcctggccttttgtgttgcttgcaccaaatctgtatgtctcaggtgaaactcactgttccatgagtggtcatcctttttttttttttttttggaaccagcccctttcaccctttcatccgtcttttttttttaggaaaataacccttcttgcttcagcacttctccctggtccttgctgaaagacagagataaaaatccattctctgagccttgcttggttgtcagaggccatgagaggtgccagttataggtggatgtgccaagatgctggtgaacttggtcttcagctatacccaggctcagaaagggcaagagccatgctgcagcgtaggtgactttggaggtgcacttggggcccagggctttgagtgttgcgggtgtgcctgtccctccagatagtgctctgtttctctctgttgtccccctgcctggtcctctggggccactgtgctttctgctgtgtgcatttataaatgatgtgtattttatatagacctgcttgcattggctgatgctcctctaattccctgagtttgattcaaccacccttgggttgttttgctatggccttagcctttgaaaatattttaaaataaaaaacttgatttttctagtgt

SEQ ID NO: 12916 - DNA, 2552 bp, Homo sapiens
  CDS (425)..(1459)
ttgttggcctactggtcgaaatgcacctcatgcactctaattagcacgtcaaattagtctctccgtttcagaggtgtagggcctttgtggagccttctcaataaaataatttgccactcttgaaggttagacattctcttctatcaatgtacacataaaggttttgttttgctttgcttgttgtgaattaaaatggggagaaaatgatgtgttagctattacccagtcatgtgtctttttagtcataggttagcttttcaagacacttcctgcatctctgacctgttgcacctctgttatcttggcacctctgttatcttagcagcaagcacctgcctcagctgacccttgagccataacccataagctcctgaaaagtacatcaagtctaaagtgaaccagctaactcattaagactggaatcatgagcaacaatggagcagacctaacctttggttacatctcctgttttgtagctatccttttgtttggctcaaattttgtgccacttaaaaaatttgatactggtgatggaatgtttctccagtgggttctttgtgctgccatatggttggttgccttggttgtcaatctgatattacattgtccaaagttttggccttttgcaatgcttgggggctgcatttgggcaacagggaacattgctgttgtcccaattatcaaaaccgttggtttaggccttggaatcttaatctggggatcatttaatgccttaactggctgggcaagctcaaggtttggctggtttggattggatgcagaagaagtatcaaatccgctgctaaattacattggagctgggctatcagtagtaagtgctttcatatttttgttcatcaaaagtgaaataccaaataacacgtgttccatggataccactccattaataacagagcatgtgatcaacacaacccaagacccctgttcctgggtggataaactttctacagtacaccaccgcatagtgggctgcagtcttgcagtgatatctggagtactctatggatctacatttgtgccaatcatctacatcaaggaccacagcaaaagaaatgatagtatatatgcaggggcaagccaatatgatttagactatgtgtttgcgcacttcagtggcatctttcttacaagtactgtctactttctggcctactgcatagccatgaaaaatagtcctaaactatatcctgaagcagtcctaccaggattcctgtcaggagtactttgggctatagctacctgctgttggttcatagcaaatcactctctgagtgctgtggtcagttttccaataatcactgctggtccaggatttatagctgcaatgtggggtatcttcatgtttaaggaaataaagggtctacaaaactacctattaatgatacttgcattttgcatcatcttgactggagccttatgcactgctttttctgaaatctaacaatgacaaaaccagcaggtggcagcagtagttaagagaacgcgtctatcggacagcggagagatcatgctgagaaaagagtgcattttcatatagcaaatggatctcagccactgttggagtgggtaaatgatttttttccccaaaaatgtgagaatgaaggaagattgagtttcattcaagtataaaaatgaaaatttcttctgatgaactgtttatgaaggtagtactttactgggtgactaaaatgtctacattattatagcattacatacgaggatgctctttttaccacagtatgtacctagtgttgcataatctagaacacagtatagagtccatatacaaagaagttacagcccatatttctcacctattaccccagtgaagtgaggcagaaataccttgggcgaggagggagagccttaccttctaatggaattagattccaaagatatttggatcctttgtttcataaagtaaatgcatagttggtaactaaatgttaaaaaggccattttattattgttagccaaaacttctgtttatttcaagttaatatcgcccaactctacatcatctacccattttagctcataatgcttttgattatcgccagataaagtccattctcagagaacaaaaatttttcatcattgagaaaatgtgcataacataatacatacatacacaagtatattcacgtacataaatacacacagatatgttgctaaagtgagattgtaggttatcagtaacaatttaaaggaaacaaccactcttttgaatgtacaatttttttttctgaaatacacttttctaaaaccctcttaactggaggtttcctgttttcttcttgttttaactggtggtttccagtaggcaaaataaaatgacaggcatgctagttttttttgttttttttttttaagaaaactgaaattaagccaggcagggtggcgcactactataatcccagctgctggggcggctgaagtaggagggtcacttagcccaagagtgcaaatctgccagcctaggcaacatagcaaggtcccatctctaaaaaagaaatttaatttaaatttgt

SEQ ID NO: 12917 - protein, 345 aa, Homo sapiens
MSNNGADLTFGYISCFVAILLFGSNFVPLKKFDTGDGMFLQWVLCAAIWLVALVVNLILHCPKFWPFAMLGGCIWATGNIAVVPIIKTVGLGLGILIWGSFNALTGWASSRFGWFGLDAEEVSNPLLNYIGAGLSVVSAFIFLFIKSEIPNNTCSMDTTPLITEHVINTTQDPCSWVDKLSTVHHRIVGCSLAVISGVLYGSTFVPIIYIKDHSKRNDSIYAGASQYDLDYVFAHFSGIFLTSTVYFLAYCIAMKNSPKLYPEAVLPGFLSGVLWAIATCCWFIANHSLSAVVSFPIITAGPGFIAAMWGIFMFKEIKGLQNYLLMILAFCIILTGALCTAFSEI

SEQ ID NO: 12918 - DNA, 2487 bp, Homo sapiens
  CDS (67)..(2271)
atagagccctcagtgggatgaggatgaaactgctattgccggcggctcctgttttaccgcgtcagcatgctggtgcatttatttcgggtcgggattcggggtggcccattcccaggcaggctgctaccgcccctccgcttccagacattctcagctgtcagaaacacatggcgtaatgggaaaactggacagttacacaaggcagaaggagagtactctgatggctaccgcagctcctccctcctccgggccgtggcccacctgcggtcccagctctgggcccacctccctcgagcccccctagctcccagatggagcccctctgcctggtgctgggttgggggagccctgctaggccccatggtactgagtaagcatccccacctctgccttgtggccctgtgtgaggcagaagaggcccctcctgccagctccacaccccatgtcgtggggtctcgctttaactggaagctcttctggcagtttctgcacccccacctgctggtcctgggggtagccgtcgtgctggccttgggtgcggcactcgtgaatgtacagatccccctgctcctgggccagctggtagaggtcgtggccaagtacacaagggaccacgtagggagtttcatgactgagtcccagaatctcagcacccacctgcttatcctctatggtgtccagggactgctgaccttcgggtacctggtgctgctgtcccacgttggcgagcgcatggctgtggacatgcggagggccctcttcagctccctgctccgacaagacatcaccttctttgacgccaataagacagggcagctggtgagccgcttgacaactgacgtgcaggagtttaagtcatccttcaagcttgtcatctcccaggggctgcgaagctgcacccaggtggcaggctgcctggtgtccctgtccatgctgtcgacacgcctcacgctgctgctgatggtggccacaccagccctgatgggagtgggcaccctgatgggctcaggcctccgaaaattgtctcgccagtgtcaggagcagatcgccagggcaatgggcgtagcagacgaggccctgggcaatgtgcggactgtgcgagccttcgccatggagcaacgggaagaggagcgctatggggcagagctggaagcctgccactgccgggcagaggagctgggccgcggcatcgccttgttccaagggctttccaacatcgccttcaactgcatggtcttgggtaccctatttattgggggctcccttgtggccggacagcagctgacagggggagacctcatgtccttcctggtggcctcccagacagtgcaaaggtccatggccaacctctctgtcctgtttgggcaggtggtccgggggctgagtgcaggtgcccgggtctttgagtacatggccctgaacccctgcatcccactgtctgggggctgctgcgtccccaaagagcagctgcgtggctccgttacatttcagaacgtctgcttcagctacccctgccgccccggcttcgaggtgctgaaagacttcaccctgacgctgccccctggcaagatcgtggccctcgtgggccagtctggcggaggaaagaccaccgtggcttccctgctggagcgcttctacgaccccacggcaggcgtggtgatgctggatgggcgggacctgcgcacccttgacccctcctggctccggggccaggttgtcggcttcatcagccaggagcccgtcctgtttgggacgaccatcatggaaaacatccgctttgggaagctggaagcttccgatgaagaggtgtacacagccgcccgggaagcgaatgctcacgagttcatcaccagcttccccgagggctacaacacggtcgtcggtgaacggggcactaccctgtctgggggccagaagcagcgcctggccatcgcccgagcccttatcaagcagcccacggtgctgatactggatgaagctaccagcgcgctggatgcagagtccgagcgggttgtacaggaggccctggaccgggccagtgcaggccgcacggtgctggtaattgcccaccggctcagcactgtccgtggggcccactgcattgtcgtcatggccgatggccgtgtctgggaggctgggacacatgaagagctcctgaagaaaggcgggctatacgccgagctcatccggaggcaggccctggatgccccgaggacagcggccccaccgcccaaaaagccagaaggccccaggagccaccagcacaagtcctgagaagggccccctgaggtgtggtcgctgccaagcatcagtgttagggctggggctcagcctgggggagcctactggggactgagcccccaggagggccagcatgtggagagtcgctgcggctgctcctgctcacaataaagccggggccgagcagctggcaggggaggccaatccctccctcccctccccagtcctgccggctgcctccctccc

SEQ ID NO: 12919 - protein, 735 aa, Homo sapiens [sequence omitted]

SEQ ID NO: 12920 - DNA, 1945 bp, Homo sapiens
  CDS (230)..(1945)
agtagggaaagacccaggctgcgggacgcggtgcaggctgcggcgctgacggcctctgctccttccgcgggtttccgactccctgccctagattttctgcttagcgacttggggtcccctctcgtttgcttctggtaggagtcgcaatcccagcagcaatagcccagaagaggacacggttcccgtaccgaagggttcagtaccagcagcccgaccatcacgcggcgggatgtctgtggttggcattgacctcggctttctcaactgctacattgctgtcgcgagaagtggcggcatcgagaccatcgccaatgagtacagcgacaggtgtaccccggcctgtatatcattgggatcaagaactcgagccattggaaatgcagcaaagagccagatagtcacgaacgtaagaaatacaattcatggcttcaaagagcttcatgggcgatcatttgatgatcccattgtgcaaactgaaaggatcaggcttccctatgaactgcagaaaatgcctaatggaagtgcaggagttaaggtccggtacttagaggaagagagaccttttgcaattgagcaagttactggaatgctgttagccaagcttaaagagacttcagaaaatgctttgaagaaaccagtggctgactgtgtgatttcaattcctagcttttttactgatgccgagagaagatctgtgatggctgcagcccaggttgcaggcttaaattgtttaaggttgatgaatgaaactactgcagttgcactggcgtatggaatttataaacaggatcttcccccattagatgagaaaccaagaaatgtagtatttattgatatgggacattctgcctatcaggtctcggtttgtgcttttaacaaaggaaaacttaaagtcttggctactacctttgatccatatttgggtggcaggaactttgatgaggctttagtagactacttctgtgatgagttcaagaccaaatataagataaatgtgaaagaaaactctcgggccttgttgcgtttatatcaggaatgtgaaaaactaaagaagctaatgagtgcaaatgcatcagatcttccattgaacattgagtgtttcatgaatgaccttgatgtttctagtaaaatgaacagggctcaatttgaacaactgtgtgcttcccttttggccagggttgaaccacctttaaaagcagtaatggaacaagctaacttacaacgtgaagacattagtagtatagaaattgtaggaggagcaacacgaattcctgcagtgaaagaacaaatcactaaattctttcttaaagacataagtaccacattaaatgctgatgaagctgttgcaagaggatgtgcgttacagtgtgcgattctctcaccagcatttaaagtgcgtgaattttccataacagaccttgttccctattcaatcacattaaggtggaagacctcttttgaggatggaagtggggaatgtgaagttttctgtaagaaccatcctgccccattctcaaaagtcattactttccacaagaaggaaccatttgaactagaagcattttatactaatttacatgaagtgccttatcctgatgcaagaattgggagcttcactattcagaatgtttttccacagtctgatggtgatagttccaaagtgaaggttaaagttcgtgttaacatccatggaatcttcagtgtggctagcgcatcagtaattgagaagcaaaatttggaaggcgatcacagtgatgctccaatggagacagaaacttcatttaaaaatgaaaacaaagataatatggataaaatgcaggttgatcaagaagaagggcatcaaaaatgtcatgctgaacacactccagaagaggaaattgatcatacaggagccaaaacaaagtcagctgtctcagacaaacaagaccgattaaatcagacactc

SEQ ID NO: 12921 - protein, 572 aa, Homo sapiens
MSVVGIDLGFLNCYIAVARSGGIETIANEYSDRCTPACISLGSRTRAIGNAAKSQIVTNVRNTIHGFKELHGRSFDDPIVQTERIRLPYELQKMPNGSAGVKVRYLEEERPFAIEQVTGMLLAKLKETSENALKKPVADCVISIPSFFTDAERRSVMAAAQVAGLNCLRLMNETTAVALAYGIYKQDLPPLDEKPRNVVFIDMGHSAYQVSVCAFNKGKLKVLATTFDPYLGGRNFDEALVDYFCDEFKTKYKINVKENSRALLRLYQECEKLKKLMSANASDLPLNIECFMNDLDVSSKMNRAQFEQLCASLLARVEPPLKAVMEQANLQREDISSIEIVGGATRIPAVKEQITKFFLKDISTTLNADEAVARGCALQCAILSPAFKVREFSITDLVPYSITLRWKTSFEDGSGECEVFCKNHPAPFSKVITFHKKEPFELEAFYTNLHEVPYPDARIGSFTIQNVFPQSDGDSSKVKVKVRVNIHGIFSVASASVIEKQNLEGDHSDAPMETETSFKNENKDNMDKMQVDQEEGHQKCHAEHTPEEEIDHTGAKTKSAVSDKQDRLNQTL

SEQ ID NO: 12922 - DNA, 2138 bp, Homo sapiens
gaatacatgatcttgaacagctcctgtacttgctctttgtaaaaaaaataaaattattttgaattattctacctttgtaaacaattggctaaaagaatcatctttaagaaattaagccatttacatgtttgtgtttttctatagcagagcattatattttgcattatatgtttcaacctagtctaagtgggtcttttttacatttttcaagaacggatttcctggaatacagcgatataattttggttgtcaaattcctaatgcaaccatttagtctaaacttagtcatttatttgtgacaataagatgtgttcaggggctccctgtttttaagagactcttttaaaaaaaaaaaaacctaatgtttttatcttgagtcaatatgattaggtattttggatttacttttaatcttaaaatactgcatttttatagcttctcagagcatgtggatgggatgggattttcgttattttgctgggtcagcttatctttaatatatggactattcctataaaccaaagtctctgacaagtgcacctaatttatattgtattttaactacagtgtaagtttccattaacaaaaccatcctaaagcgttaactgctcataattttaatcagctacagttatgaaaaaggaagaattttgctctaaagattattaataagcttagaaaatcctgcttttacctaacagaatgaagtggggttgaggggcggtagtatgaacagtgattctaactctatggcgtaaattactttgaagagttcattttggaagtaagggaatcccgcttcccttggcgttgaagatctgcatctgattttgaaacgtccagatttagctttcaaggtgcgtgcatgttgaatgatccagaagcaacgaaaactctggggtgagggattgaaaaaatctgaaatcacagttggatttttaaattcaaccatcaaaagtatgtactatcagtttttttttacattgatgtgaaataagcaaattttcatgataattaagctgcaaaatttaaagttatcaagtaaataggtcctctgtgttctgtttcatgtgatggagtgggtttcagtctgtgttcttggagccaaagggttcctcaggggtgcctcaggagtaatggtttaagagaagaggggcaatgagagggagcgagggggaaggcctagttggtatttgagcaggggccttaggctccatatccccaccccctttacccagaacagcccatttttcttatgtatattggaatttcaagtaagctttcatggggtgcagtggggcggggaggaatggatgggataaaaaaagtggagattttgctgctttaaaaaagttgagaactacttgtgtagtttttaagtattttaatgtatttcatttggccaaattcaactgccacaagcaagctagtcatagttgtaactgtgcagtggtaatatgcttatgcctacctttttcctctcaaacaatttgttttttttacattgcattctgagtactgaagagcatcttgaaatgtatggaagtggtttctatgctatttgataatcagtaatgttcagctgtcatgatagtactttactggttgcagacccatctctcttttatattaaagcactagtgcagtttataattgtgcctacttttaaaatctttcagtaaaaaagtacataatgaatacagaaatcataactgacagggatacagtaataatgaaatgctactatcacttattttaatatacaatataaagcaggcaaataccattgctttttgagtgcctttttaactttatactaatgacttaatagagctttaaaagaaagaaattggctgggcatggtggctcacacctgtaatcccagcactttgggaggccgaggtgggcggatcacctgaggtcaggagttcgagaccagcctggccaacgtggtgaaaccctgtctctactaaaaatacaaaatttagccgggcatggtggcgcactcctgtaatccaactacttgggaggctgaggcaggagaattgcttgaatctgggaggcagagattgcagtgagccgagatcgcaccactgcactccagcctgggcgacaagagtgagactccgtccccgccc

SEQ ID NO: 12923 - DNA, 1665 bp, Homo sapiens
  CDS (7)..(978)
aactttatggacttcccaaaacataaccagatcataactgaagaaacaggctctgcagttgaaccaagtgatgaaataaagagagccagtggagatgtccaaactatgaaaatttcatctgtgcctaatagtttatcaaagcgaaatgtgtctttgactcgaagtcacagtgttggaggcccattgcagaatattgactttacccagcgaccgtttcatggcatctcaacagttagtcttccaaatagtctgcaggaagttgtggatcctttaggaaaaagacccaatcctccccctgtttctgtgccctacttgagtcctctagtactccgtaaagaacttgaatcattgctagaaaatgaaggtgatcaggtgattcatacatcttctttcatcaatcaacatccaatcattttctggaacctcgtttggtatttcagacgtttggaccttcctagtaacttgccaggacttatcctcacatctgaacattgtaatgaaggtgtacagcttcctctgtcatctctgtcccaggatagcaaacttgtgtatattcacctgttatgggataatatcaaccttcatcaggaaccaagagaacctctgtatgtctcatggaggaattttaattctgaaaagaaatcatctctcctgtcagaggaacaacaagaaacaagcactttagtagaaaccatcaggcagagtattcagcacaataatgttcttaaacccatcaacctactttcacagcaaatgaagccaggcatgaaaagacaaaggagtttatacagagaaatcctcttcttatcattagtgtctctaggaagagagaatattgatattgaggcatttgacaatgaatatggaattgcatacaatagtctgtcttcagagattcttgaaaggttgcagaaaattgatgctccaccaagtgccagtgtcgagtggtgcaggaagtgttttggagcgcctctcatttaaatagagattcactagaatgttgacacacaaggcttggggattagatttcatctggaaacattcaagttttttttccaaatcgtaagaactggtgaatacggaattgaagtaactcttggggacaatatataatgaattatgattcatattgcattaccttgaaatatgaagtgccatttgaatgtcccagggcttattaatattgaagattttcaacccctgaactgcttttctgcctctgtggaaaactactttgggattcttcagtatttgtagtagtttgatagaaataatgaggaaccatattcattctaggcattgtttatatttgaagttactgagtttgaggaatggcaaattaaatttgcctaacccccaaaacaaatgaaatatctcaattataaaagcaacatggccgggcacggtggctcaggcctgtaatcccagcactttgggaggctgagcaaggtgggtggatcacttgaggccaggagttcgagaccagcctggccaacacggtgagaccctgtctttactaaaaatacaaaaattagccaggcgcaccactgtagtcccagctactcaggctgaggcaggagaatcgcttgaactgaggcagaggctacagtgagtggagatcacgccactgcaactccagcttgggtgacagagtgagaccgtctc

SEQ ID NO: 12924 - protein, 324 aa, Homo sapiens [sequence omitted]

SEQ ID NO: 12925 - DNA, 1832 bp, Homo sapiens
  CDS (50)..(1705)
gctttgcggctgtcgtcggagaggcatctgggttcggactggggccgccatggggaaagtgaatgtggccaagttgcgttacatgagccgagatgacttcagggtcttgaccgcggttgaaatgggcatgaagaaccatgaaattgttcccggcagtttgattgcttctatagccagccttaaacatggtggctgtaataaagttttaagagaattagtgaaacataaactcatagcttgggagcgtaccaaaactgtccagggctatcggttgacaaatgcaggatatgattacctagctttgaaaacactttcttctaggcaagtagttgagtctgttggaaaccagatgggtgttggcaaagaatcagatatttacattgttgcaaatgaagaaggacaacaatttgcattaaagcttcacagactaggaagaacctcgtttcgaaatttgaaaaacaaacgcgattatcataaacataggcacaatgtgtcttggctttatttatctcgtctctctgccatgaaggaatttgcctatatgaaggcattgtatgagaggaaatttccagttccaaagccaattgattacaatcgtcatgcagtggtcatggaactcataaatggttatccactatgtcagatacaccatgttgaagatcctgcatcagtatatgatgaagctatggaactaattgtcaaacttgcaaatcatgggctgattcatggagattttaatgaatttaatctcattttggatgaaagtgaccatatcaccatgattgattttccacagatggtttcaacttctcatcccaatgctgagtggtattttgacagagatgttaaatgcattaaagatttctttatgaaacgtttcagctacgaaagtgagctttttccaacttttaaggatatcaggagagaagacactcttgatgtggaggtttctgccagtggctacacaaaggaaatgcaggcagatgatgaactgcttcatccattaggtccagatgataaaaatattgaaacaaaagagggatctgaattctcattttcagatggagaagtggcagaaaaagcagaggtttacaggtcagaaaatgaaagtgaacggaactgtctagaagaatcagagggctgctattgcagatcatctggagaccctgaacaaataaaggaagacagtttatcagaagagagtgctgatgcacggagttttgaaatgactgaattcaatcaagctttagaagaaataaaagggcaggttgttgaaaacaactctgtaactgaattttctgaggagaaaaacagaactgaaaattacaacaggcaagatggtcagagagttcaaggaggagtccctgctggctctgacgagtatgaagatgaatgccctcatctaattgccttgtcgtcattaaatagagaattcaggcctttcagagatgaagaaaatgtgggagctatgaatcagtatagaacaagaactctgagtatcacttcttcaggcagtgctgtaagctgttcaacaattcctccagaactggtgaaacagaaggtgaaacgtcagttgacaaaacagcaaaaatcagctgtcagacgtcgattgcagaaaggagaagcaaatatatttaccaagcaacgtagggaaaacatgcaaaatatcaaatcaagtttggaagcagctagcttttggggagaataatatatttaggatcttggatatgtttaatatattttttaaagttactgtaattcctttttgagccctcatttgtcttttttgagccaaggctatcatatattaataaataaaccctctttcatct

SEQ ID NO: 12926 - protein, 552 aa, Homo sapiens
MGKVNVAKLRYMSRDDFRVLTAVEMGMKNHEIVPGSLIASIASLKHGGCNKVLRELVKHKLIAWERTKTVQGYRLTNAGYDYLALKTLSSRQVVESVGNQMGVGKESDIYIVANEEGQQFALKLHRLGRTSFRNLKNKRDYHKHRHNVSWLYLSRLSAMKEFAYMKALYERKFPVPKPIDYNRHAVVMELINGYPLCQIHHVEDPASVYDEAMELIVKLANHGLIHGDFNEFNLILDESDHITMIDFPQMVSTSHPNAEWYFDRDVKCIKDFFMKRFSYESELFPTFKDIRREDTLDVEVSASGYTKEMQADDELLHPLGPDDKNIETKEGSEFSFSDGEVAEKAEVYRSENESERNCLEESEGCYCRSSGDPEQIKEDSLSEESADARSFEMTEFNQALEEIKGQVVENNSVTEFSEEKNRTENYNRQDGQRVQGGVPAGSDEYEDECPHLIALSSLNREFRPFRDEENVGAMNQYRTRTLSITSSGSAVSCSTIPPELVKQKVKRQLTKQQKSAVRRRLQKGEANIFTKQRRENMQNIKSSLEAASFWGE

SEQ ID NO: 12927 - DNA, 2011 bp, Homo sapiens
  CDS (43)..(1233)
ctactgccatggaacttctttatcactgccaaggagtactggatgttcaaactccgcaactcctccagcccagccaccggggaggaccctgagggctcagacatcctgaactactttgagagctaccttgccgttgcctccgccgtgccctccatgctgtgcctggtggccaacttcctgcttgtcaacagggttgcagtccacatccgtgtcctggcctcactgacggtcatcctggccatcttcatggtgataactgcactggtgaaggtggacacttcctcctggacccgtggcttttttgcggtcaccattgtctgcatggtgatcctcagcggtgcctccactgtcttcagcagcagcatctacggcatgaccggctcctttcctatgaggaactcccaggcactgatatcaggaggagccatgggcgggacggtcagcgccgtggcctcattggtggacttggctgcatccagtgatgtgaggaacagcgccctggccttcttcctgacggccaccatcttcctcgtgctctgcatgggactctacctgctgctgtccaggctggagtatgccaggtactacatgaggcctgttcttgcggcccatgtgttttctggtgaagaggagcttccccaggactccctcagtgccccttcggtggcctccagattcattgattcccacacaccccctctccgccccatcctgaagaagacggccagcctgggcttctgtgtcacctacgtcttcttcatcaccagcctcatctaccccgccgtctgcaccaacatcgagtccctcaacaagggctcgggctcactgtggaccaccaagtttttcatccccctcactaccttcctcctgtacaactttgctgacctatgtggccggcagctcaccgcctggatccgggtgccagggcccaatagcaaggcgctcccagggttcgtgctcctccggacctgcctcatccccctcttcgtgctctgtaactaccagccccgcgtccacctgaagactgtggtcttccagtccgatgtgtaccccgcactcctcagctccctgctggggctcagcaacggctacctcagcaccctggccctcctctacgggcctaagattgtgcccagggagctggctgaggccacgggagtggtgatgtccttttatgtgtgcttgggcttaacactgggctcagcctgctctaccctcctggtgcacctcatctagaagggaggacacaaggacattggtgcttcagagcctttgaagatgagaagagagtgcaggagggctgggggccatggaggaaaggcctaaagtttcacttggggacagagagcagagcacactcgggcctcatccctcccaagatgccagtgagccacgtccatgcccattccgtgcaaggcagatattccagtcatattaacagaacactcctgagacagttgaagaagaaatagcacaaatcaggggtactcccttcacagctgatggttaacattccaccttctttctagcccttcaaagatgctgccagtgttcgccctagagttattacaaagccagtgccaaaacccagccatgggctctttgcaacctcccagctgcgctcattccagctgacagcgagatgcaagcaaatgctcagctctccttaccctgaaggggtctccctggaatggaagtcccctggcatggtcagtcctcaggcccaaggctcaagtgtgcacagacccctgtgttctgtgggtgaacaactgcccactaaccagactggaaaacccagaaagatgggccttccatgaatgcttcatcccagagggaccagagggcctccctgtgcaagggatcaagcatgtctggcctgggttttcaaaaaaagagggatcctcatgacctggtggtctatggcctgggtcaagatgagggtctttcagtgttcctgtttacaacatgtcaaagccattggttcaagggcgtaataaatacttgcgtattc

SEQ ID NO: 12928 - protein, 397 aa, Homo sapiens
MFKLRNSSSPATGEDPEGSDILNYFESYLAVASAVPSMLCLVANFLLVNRVAVHIRVLASLTVILAIFMVITALVKVDTSSWTRGFFAVTIVCMVILSGASTVFSSSIYGMTGSFPMRNSQALISGGAMGGTVSAVASLVDLAASSDVRNSALAFFLTATIFLVLCMGLYLLLSRLEYARYYMRPVLAAHVFSGEEELPQDSLSAPSVASRFIDSHTPPLRPILKKTASLGFCVTYVFFITSLIYPAVCTNIESLNKGSGSLWTTKFFIPLTTFLLYNFADLCGRQLTAWIRVPGPNSKALPGFVLLRTCLIPLFVLCNYQPRVHLKTVVFQSDVYPALLSSLLGLSNGYLSTLALLYGPKIVPRELAEATGVVMSFYVCLGLTLGSACSTLLVHLI

SEQ ID NO: 12929 - DNA, 2072 bp, Homo sapiens
  CDS (2)..(319)
aatgccttgcgcgccgcgggcccagagacgtgaggctgtcggcgtcctggtggccccgcctcgtgtccccccccggaccccacgccgcgggagcttgggggctgcggtcttctcttcctccgacctcaccttcgatgcggaagcgcaggggcaggtgcgccgccctcggcccgcgcaggcggtgggcccgtctggggcaaggcgcccggaagcgcctggttggttcagaaaatcggaccgcagcgggagggcgggcaccggcgcgtggtctcagtggccccaggcgaaccctgatgagcagcagccgcaagtggcttactaaaggagccactttctacgtttgtctggaatttacgtgaattaagctggcgggcgggcggccaggcctgtagtctcagcactttgggaggctcagcacttcgggaggctgtggcgggcggatcacctgagcctgggagttggagaccagcctgcgcaacgtagcaagaccctatctctaaaacagattcattaatacttagccaggcgcggtggctgaggtcccagctactcggcaggcccaggctggcctgagccagaccgctctggactgttttaattttttcagccttaatacctgccagaattttttttttactatgtatctttgtccttacgtatataaattttatgtacaattgagattatcctgtatttgcttttcccccctcacttttatatggtgacttttctcatgttaggctgaatactaacattttggaaactgtcggcctgaaaacgagcggagacacagtttctctaagtagagagtttatttgggccacacttgagcacaaattcaaggcgccctgaatgtgtactccgattagcagttaacagtggattttaaaggcaaaaaagggggccagggagtggactaataggaacttgtttgtgaggaattctcactggtttacagaaataacattgattagtgactgactatatgttgttcagctattgagtgtgggtatagtgtccattgtggcgtcattaggttaatttatagctgtttgtggcgctgttgccaccagtagcagtttaaagaggtgaacacaggtcaaggggtagtagggcgcgattgtcgcctcatttgaatgtctctctcggcctgataattaaaagaactcgcgttcctcagataaaaattctcttttctcaaaaccatttaaatgtggtaattagaatggcccagaaggggcacagtgccttttagccctcgccattacttgctcttaggagtgcattttttgtagctgtgggtttttgactatctctgctgctttctccagcccctaccctcgtgactacaagggaaaacgtgcggcgctcacgagagagcctttatgggatttttaaaaaatggggattgtgggaaaatggctccagcagtcacagtttttcagtttctcacaatcccataaaaacagagcaaccaggtaacaaaactaaagcatgggcaacatttacagaccgctggatggtgaagaattcccatgaacccctggttcacaccgtaaggacacactactcagcatgggcaacatttacagactactggatgtgaagaattcccatgaacccctggttcacactgtaaggacagactactcagcatgggcaacatttacagaccactggatgatgaagaattcccatgaactcctggttccaactgtaaggacacactactcagctgtagcctgaagccgcctccttacatactgtaagtttagcctataggtttctccatacgtagtgaacagtcatctaattggatgtgtggacactgtaacctactcttgaatcagtcacaggcagcagcacttcaaactctgtttcaataagccagacacgagctgtagccaccctgctgtttgcaggcctcacctctgccttctgtgcctcactcccttttctgtccgtaagtctttggccacacagtggcactggagtctctctgagcctattctggtttgaggggttccctgattcctgaatcattctttgctcaattaaactctgtaaaattt

SEQ ID NO: 12930 - protein, 106 aa, Homo sapiens
MPCAPRAQRREAVGVLVAPPRVPPRTPRRGSLGAAVFSSSDLTFDAEAQGQVRRPRPAQAVGPSGARRPEAPGWFRKSDRSGRAGTGAWSQWPQANPDEQQPQVAY

SEQ ID NO: 12931 - DNA, 2448 bp, Homo sapiens
  CDS (628)..(2211)
aagatggcggctggcggagctgtcgctgcggcgcccgagtgccggcttctcccctacgcgctacacaagtggagctccttttcctccacctaccttcccgagaacattttagtggacaaaccaaatgaccaatcttcaagatggtcttcagagagcaactatcctccccagtacttgattctaaagctcgaaaggcctgctatagttcagaatatcacatttggaaaatatgagaaaactcatgtttgcaatttgaagaaatttaaagtctttggtggaatgaatgaagaaaatatgacagagctgttgtccagtggcttaaagaatgattataacaaagaaacattcaccttgaagcataaaattgatgaacagatgttcccttgtcgattcattaaaatagttccactcttgtcctggggacccagctttaactttagcatctggtatgttgaacttagtggcattgatgatcctgatatagtacaaccttgtctcaactggtatagcaagtagtaccgtgaacaggaagctattcgcctttgcctaaaacacttcagacaacacaactatacagaagcttttgagtcactgcaaaagaaaaccaagattgcactggaacatcccatgttaacagatattcatgacaagctggtgttgaagggtgattttgatgcttgcgaagagttgattgaaaaggctgtaaatgatggcttgttcaatcagtatatcagtcaacaggaatataagccacgatggagtcaaatcattcccaaaagtaccaaaggtgatggggaagataaccgtccaggaatgagaggaggccatcagatggttattgatgttcaaacagagactgtttatttgtttggtggctgggatggaacacaagatcttgctgacttctgggcgtacagtgtgaaggagaaccagtggacatgtatctctagagacactgaaaaagagaatggtcctagtgccagatcgtgtcataaaatgtgcattgatattcaacggaggcaaatctacacattggggcgttacttggattcctctgtgaggaacagcaaatctctgaaaagtgacttctatcgttatgacattgatacaaacacatggatgttactaagtgaggatactgctgctgatggagggccgaaattggtgtttgatcatcagatgtgtatggactcagaaaaacatatgatctacacttttggtggtagaattttgacttgtaatggcagcgtagatgacagcagagccagtgaaccacaattcagtggcttgtttgctttcaactgtcaatgtcaaacctggaaacttcttcgagaggactcctgtaatgctgggcctgaggacatccagtctcgaataggacactgcatgttattccactcaaaaaatcgttgcttatatgtatttggtggccagcgatcaaagacctatttgaatgatttctttagttatgatgtggactctgatcatgtagacataatatcagatggcaccaagaaagactctgggatggttccaatgacaggatttacacagagagcaactattgatccagaactgaatgaaatacacgtcttatctggactcagcaaagataaggaaaagagggaagaaaatgttagaaattcattctggatttatgacattgtgaggaatagttggtcttgtgtctataagaatgatcaagctgcaaaggataatccaactaaaagtcttcaggaagaagaaccatgtccaaggtttgcccatcagcttgtatacgatgagctacacaaggttcattacttatttggtgggaatccaggaaaatcttgctctccaaagatgagattagatgacttctggtcactgaagttgtgtagaccttcaaaagattatttactgaggcattgcaagtacctcataagaaaacacaggtttgaagaaaaggcccaagtggatccccttagtgctctgaaatatttacaaaatgatctttatataactgtggatcattcagacccagaagagacaaaagagtttcagctcctggcatcagctctattcaaatctggttcagattttacagctctgggcttttctgatgtggatcacacctatgctcaaagaactcagctctttgacaccttagtaaatttctttcctgacagcatgactcctcctaaaggcaacctggtagacctcatcacactgtaactgaagagtcactggacacagaaatggaaaacaggagtcgattttccgtcttttggattgcagctccactgactgacagtaaagctgcagtgattggggactgcaccagagttctgaagggatcttaaccatcacaagtttttaccctcttccttcatgcctgacctcaaccccgctctcctcatcctattcctaaattaggctaataaagtgaaattggtatactttccagtt

SEQ ID NO: 12932 - protein, 528 aa, Homo sapiens
MLTDIHDKLVLKGDFDACEELIEKAVNDGLFNQYISQQEYKPRWSQIIPKSTKGDGEDNRPGMRGGHQMVIDVQTETVYLFGGWDGTQDLADFWAYSVKENQWTCISRDTEKENGPSARSCHKMCIDIQRRQIYTLGRYLDSSVRNSKSLKSDFYRYDIDTNTWMLLSEDTAADGGPKLVFDHQMCMDSEKHMIYTFGGRILTCNGSVDDSRASEPQFSGLFAFNCQCQTWKLLREDSCNAGPEDIQSRIGHCMLFHSKNRCLYVFGGQRSKTYLNDFFSYDVDSDHVDIISDGTKKDSGMVPMTGFTQRATIDPELNEIHVLSGLSKDKEKREENVRNSFWIYDIVRNSWSCVYKNDQAAKDNPTKSLQEEEPCPRFAHQLVYDELHKVHYLFGGNPGKSCSPKMRLDDFWSLKLCRPSKDYLLRHCKYLIRKHRFEEKAQVDPLSALKYLQNDLYITVDHSDPEETKEFQLLASALFKSGSDFTALGFSDVDHTYAQRTQLFDTLVNFFPDSMTPPKGNLVDLITL

SEQ ID NO: 12933 - DNA, 1964 bp, Homo sapiens
ctcatcgatgacctgcaacactgtctggtcaacaagatgtgccccaattatttcatccctcagtgcaacatgctggaacatctgtctgaggagacagtcatgcttcacgcccggaagctgtcctctgtgcgctcagacccggcagagcacttgcgcaccgccattgagcatgtcaaggcagccaaccggctgacactggagctccagaggcgaggtagcaccaccagcatcccctctccacagtctgacggaggggaccccaaccagcctgatgaccgtttggcaaaaaaactgcagcagctagtgactgagaacccgggaaagtcaatctctgtctttatcaatcctgacgatgtcacaaggccccatttcagaattgatgacaaatttttctgagtgttagctgacttttttttttcctgattcttaaactctgataatgtgtcgtgtggtttgtgatgctatctttctgttttttacatatccagcctagattggatttgttaagaacaaattttaagtttcctggttctgcaggatggtgcaggctctgaaacagtatattactatttcatattctgcctctgatttcgttgtttactttttgtagttattgtcatgctctttagtttgttggagttttttttctttttaaggagatcttaagccatagatgaaaatgcccatgaatcctcttgcttttttctgtttcatacttggtgcaaatttgttcatgggtatggggaaacaaatctctttctgatgcttaacgattctatcctattatttttattattttgtttttgtcttttttcttatgagctttcaccactactgatatttgagaatcatatgaacctgggaactacttggcatgttagctggatttatttattttggccagtgaccagagtagtttccccccttttccaccaaacaatgtaaactttgaaagtgataatactacaaattgtgttttggagcaacttcattgaatgtaattgtcctcaaatcagagaacactgggtggtttgaagggtgtctttgacagttttccaagcagaattaaggtttccaaatgttaattttagcatatgtaattatttgaagccttatttaaatcctatcaaagaacataccattataattattatttgcactaatctttgccattgtcagaattgcaaagtgtgtttcaatataaattaacaaccactctcgaaattctatcattttttcattttgcccatttctatcagtgaaatgattctttgcatttgcttagttctccttcagttgtggggtcctgctttgccctctttgatattcctggttcctgtcttactgagagaagttgttaaagctttatacatgttgaccccatctaaagctggggaaaatatacacttgatgaagtaggtgtctttgtatttatttcttttggggtcatagaggtaagcttttttgcaaaatctctactcttcctgagagttttgagaaaaactggcaggaagaacttataatccccaaatagaagataccacgtctgttcaaaagcaggtattgctatagagcagcacccaggaaatatctgtgggtggcagccttggtatagaggtgtcctgtcttcatgagtgaagttacttgcctgattaggtgctggaaggtattggctccctgttttggtgtggactcatggcaagctggtgtttaagaggtcaggaggcctgctgatctttcaaaggacacccatgatgtctactcatagaaagggcaagtaacgtgttcattttggtcttgaatgtccaaactcaagggttggattttggccaattgaaatcagacatatgcgatcttgggtttttgcatggaaattaatgtaatgcttataaatgaaaaatgaaaacatttcaaccatctaagtcaaacacaaaaataataaaaaaagaaacatactggccttg

SEQ ID NO: 12934 - DNA, 2499 bp, Homo sapiens
  CDS (57)..(1382)
gtgatccctgcgcgcgtctcctgctcgggtcagtgcgccgcgctgcgctgggcgccatggcgctccccggagcccgggctcgcggctgggcggcagcagccagagcggcccagaggcgccgccgcgtggagaacgcaggagggtccccgagtcctgagcctgcgggccggcgcgcggcgctttacgtacactggccttactgcgagaagcgctgcagttactgcaacttcaacaagtacatccctcgccgcctggaggaggctgccatgcagaagtgtctggtgaccgaagctcagacgctgctgcggctcagcggggtgcaacgggtggagtctgtgttctttggtggggggacccccagtctagccagtccccacacggtggctgctgtcctggaggctgtggcacaggcagcccacctgcctgcagacttggaagtcacattggaggctaatcctacttcagctccgggctccagactggcagagttcggggcagcaggggttaacaggttgtctataggcctccagtccctagatgacactgagctccggctgttgggacggacgcactcggcctgcgatgctctgcggacgctggcagaggcccggcgcctctttcccgggcgcgtgtctgtagacttgatgctggggctgccggcacagcaggtggggccgtggcttgggcagctgcaggaactgctgcaccactgtgatgaccacctctccctctaccagctgtccctggagcggggcaccgcactcttcgcccaggtgcagcggggtgcccttccagcccctgacccggagctcgcagctgagatgtaccagaggggccgggctgtccttcgggaggctggcttccaccagtatgaggtctccaactttgcccggaatggggcgctcagtacccacaattggacttactggcagtgtggtcagtaccttggcgttgggcctggggcccatggacgatttatgccccagggggctggaggccacacccgggaggctcggatccagacactggagcctgacaactggatgaaggaggtgatgctgtttggccatggcacccggaagcgtgtccccctgggcaggctggagctgctggaggaagttttggccctggggctacgcaccgatgtggggatcactcaccagcactggcagcagtttgagccccagctgaccctgtgggatgtgtttggagcgaacaaggaggtgcaggagctgctggagcggggcctactgcagctggatcacaggggtcttcggtgttcctgggagggtctggctgtgctggactctctcttgctgaccctcctgcctcagctccaagaagcctggcagcagagaaccccctcccctgtgccaggaggatgacaaaaatgttcctgtgttccagggtaatgccaggtgggttttgagagctgggtcggtactgcagacatctcttctccgttgtcgggtgccgtctctgctccttgtggttattgctcagccctggcatccccaggggaatggcagcagtgaggtagatgggaggacatttctggtcagggaactggcatcccattcagcatctcaggactcacaggccaacatgtgttccatggctgggaattgcctaccacccacatcagcttctgtttacctttttggcatcaaataatgaacagtgtttggaaatctttctacaggcaattacctccccaagagaagccttccttattttggagtaaggtcctaagatagctggatgaatcaggaaaaccatgtcccctctaggtattattaatattagcaggaagggatctactataggaatgaagtatttataaaccactgaaagggatagagaagtgaacattggagaaagccagtagcaactgtgagaaatcagcaacttgcaggaggcacagaaaactcctgctgatggtctcagcttccagcagcacaaaagcagatgatgtactggaaaatgctcagaagatgctacaaaacctcatgcctactgtctgccactgctggagaaggaatcatggtttctagaagtgcctctcattagtggactttaaagcaaatcctggctggcaggaaattctgaggaatatagctcttaggcttccagcctctaccatgcaggagagaacacagaaggactgatgtatgttggtggatccatgtatgtgtccagcacagcggcctgctggactctgagaactgggaaagatcagagcaagccttgcctcttatcttcgggaaaccagaatatgtttggggtggtaggagccacacagactcttctgagccccctcactcacttccttccccctgtgcctttcctttgagagtgaaggtgggtggagttgaccagagaaaggggagagaattcgggaaagacccaaagtgtttgtaattcttctttgtccttttacctacagaaatggtcacatggttctatttaaatagcctaataaacacatctggagcctgt

SEQ ID NO: 12935 - protein, 442 aa, Homo sapiens
MALPGARARGWAAAARAAQRRRRVENAGGSPSPEPAGRRAALYVHWPYCEKRCSYCNFNKYIPRRLEEAAMQKCLVTEAQTLLRLSGVQRVESVFFGGGTPSLASPHTVAAVLEAVAQAAHLPADLEVTLEANPTSAPGSRLAEFGAAGVNRLSIGLQSLDDTELRLLGRTHSACDALRTLAEARRLFPGRVSVDLMLGLPAQQVGPWLGQLQELLHHCDDHLSLYQLSLERGTALFAQVQRGALPAPDPELAAEMYQRGRAVLREAGFHQYEVSNFARNGALSTHNWTYWQCGQYLGVGPGAHGRFMPQGAGGHTREARIQTLEPDNWMKEVMLFGHGTRKRVPLGRLELLEEVLALGLRTDVGITHQHWQQFEPQLTLWDVFGANKEVQELLERGLLQLDHRGLRCSWEGLAVLDSLLLTLLPQLQEAWQQRTPSPVPGG

SEQ ID NO: 12936 - DNA, 2511 bp, Homo sapiens
  CDS (22)..(570)
gagcaggtctccaggggagcgatggcagccgggggtctgagccgctccgagcgcaaagcggcggagcgggtccggaggttgcgggaggagcagcagagggagcgcctccgccaggtgtcgcgcatcctgaggaaggcggcggcggagcgcagcgccgaggagggccggctgctggccgagagcgcggacctggtaacggagctgcagggccggagccggcggcgcgagggcctgaagcggcggcaggaggaggtgtgcgacgacccggaggagctgcgggggaaggtccgggagctggccagcgccgtccggaacgccaaatacttggtcgtctacacaggcgcgggaatcagcacggcagcgtctatcccagactaccggggccctaatggagtgtggacactgcttcagaaagggagaagcgttagtgctgccgacctgagcgaggccgagccaaccctcacccacatgagcatcacccgtctgcatgagcagaagctggtaagagccctgggtggctggtacacttgccagggaccaggcagagcaccttggtgcccagtgggcaactaactgcacccgccctctgtctgccagttgactcccatgatgagcacccaccaagcgggttaggccgcgggtttgatcctcctgtgcttgactctccaggacagaaggggagctccccctctgaaccatcccatccgcagccagcctcagccttagagctgctggtggcctttcccctttgtgattcccttgcatttttctgtggacctcagaagccatcctagtcacaggggaggcttataggacatctctggggaccttctgctgaacaccctcaaccaatggggtgtagtggttgatctgcctaggtccccagggacctgaaatgtcatgacccaagagagcatggatctggggcagagtggcccttgccaaaccccgagccacttcccaaccttgccgggacggtgcaacctcttgccctcccagccactccaggtgcatcagggctggaggaaggacagcccctccccaccacaggccctcttgactcctggtggttggacctgttgtgtgttttactttctaaggctctctggggggacggagctgcccctggttttgggagccatcggcggggctcagaacagcctcgctgtggccgggtactgacctccccaccaccactggcagccatccctccccttgccacccgttctgccttccaggtgcagcatgtggtgtctcagaactgtgacgggctccacctgaggagtgggctgccgcgcacggccatctccgagctccacgggaacatgtacattgaagtgagcagtcctgcagggacccagggtctccatgggcaggcgggtcccactcactgtgccctcttgcctctaggtctgtacctcctgcgttcccaacagggagtacgtgcgggtgttcgatgtgacggagcgcactgccctccacagacaccagacaggccggacctgccacaagtgtgggacccagctgcgggacaccattgtgcactttggggagagggggacgttggggcagcctctgaactgggaagcggcgaccgaggctgccagcagagcagacaccatcctgtgtctagggtccagcctgaaggttctaaagaagtacccacgcctctggtgcatgaccaagccccctagccggcggccgaagctttacatcgtgaacctgcagtggaccccgaaggatgactgggctgccctgaagctacatgggaggtgtgatgacgtcatgcggctcctcatggccgagctgggcttggagatccccgcctatagcaggtggcaggatcccattttctcactggcgactcccctgcgtgctggtgaagaaggcagccacagtcggaagtcgctgtgcagaagcagagaggaggccccgcctggggaccggggtgcaccgcttagctcggcccccatcctagggggctggtttggcaggggctgcacaaaacgcacaaaaaggaagaaagtgacgtaatcacgtgctcgatgaagaacagttggcactttgcagatggccagtgtcacggtgaaggctgggttgcccccacgggtctagggagaacgaactctttggggatgacattttcaccgtgacatttttagccatttgtccttgaggaagccccttgcactgctgcggttgtaccctgatacggcctggccatcgaggacacctgcccatccggcctctgtgtcaagaggtggcagccgcacctttctgtgagaacggaactcgggttatttcagccccggcctgcagagtggaagcgcccagcggcctttcctcgctcaccaggccagtctcagggcctcaccgtatttctactactacttaatgaaaaagtgtgaactttatagaatcctctctgtactggatgtgcggcagaggggtggctccgagcctcggctctatgcagacctttttatttctattaaacgtttctgcactggc

SEQ ID NO: 12937 - protein, 183 aa, Homo sapiens
MAAGGLSRSERKAAERVRRLREEQQRERLRQVSRILRKAAAERSAEEGRLLAESADLVTELQGRSRRREGLKRRQEEVCDDPEELRGKVRELASAVRNAKYLVVYTGAGISTAASIPDYRGPNGVWTLLQKGRSVSAADLSEAEPTLTHMSITRLHEQKLVRALGGWYTCQGPGRAPWCPVGN

SEQ ID NO: 12938 - DNA, 1427 bp, Homo sapiens
  CDS (443)..(1258)
agggtttaaccgaaaccgaacattaaccgtagccctaacgcggctgagggatccaggccttgcctctgggccgggtgagagacagacactcgccaaccagtccgcagtggctccccgtgtgtgcgaggctcccgcctgcgtgtgtgcgtgtgcatgtgtgcctgcgcacaggggagggaaagttcttcagctgccgagggcgggagtaggggctggagcagcaccttgcggggaggccccacaggagaatcgatggttctgatgctgtcagcctctgggtgcaaattctgagggcccgggagcgtctggcggccctgagcagcttgctggggaagctccgtggaggaggaagtccggaggcatgtgatgtgaatcagctgacatcatcttgacgggagccctgtgaggcggacacttaactccagtttcacaggagggagccatggatttgctgcgggagctgaaggccatgcctatcacgctgcacctgctccagtccacccgagtcgggatgtctgtcaacacccttcggaagcagagctcggatgaggaggtcattgcactggccaagtctctcatcaagtcctggaagaagctcctggatgcttccgatgccaaagccagggagcgggggaggggcatgcctctgcccacgtcctcgagggatgcctcagaggccccggatcccagccgcaagaggccggagctgcccagggcaccgtcgactccgaggatcaccacatttcctccggtgcctgtcacctgtgatgccgtgcgcaacaagtgccgcgagatgctgaccgctgccctgcagacggaccatgaccacgtggccatcggtgcggactgcgtgcgcctgtcggctcagatcgaggaatgcatcttccgggacgttggaaacacagacatgaagtataagaaccgtgtacggagtcgtatctccaacctgaaggatgccaagaaccctgacctgcggcggaatgtgctgtgtggggccataacaccccagcagatcgctgtgatgacctcagaggagatggccagtgatgagctgaaggagatccgtaaggccatgaccaaggaggccatccgagagcaccagatggcccgcactggcggcacgcagacagacctgttcacctgcggcaagtgcaggaaaaagaactgcacctacacacaggtgcagacccgcagctctgatgagcccatgaccacctttgttgtctgcaacgagtgtggaaaccgctggaagttctgctgacccctcgtgtagatgtgctgcagccttgggccctccccggcccacgtcctccgttgacacagcttctctggagaccctagaaggcggcatgtcctgccctcaacctgcctgcctggattgcacctttctgccctttccccctcattattagatgtttctttttgcc

SEQ ID NO: 12939 - protein, 272 aa, Homo sapiens [sequence omitted]

SEQ ID NO: 12940 - DNA, 2577 bp, Homo sapiens
cattgcaaatgtccttaatgccactgaactgtacacttaaaaatggctaagttgggctgggcgtgagccaccacacccagccagatctgcctcttagaacaatgctatggaagttgattttggggaatgggtggaagaggcagaggtcaggcagagtgttcaataaagaggatcagacaggccaggtaggagaagctgatgcctagcctaggacagggcaggtagctcagcaagtgtgagcacctctcagtgtaagagctgaggtgggagaggggcagatgggctgtggagctggccacactaaaggcagctgtgtgtttgcagggctcaggaccaaagggaggctgagtcaggaaggcactcctgggcttctggcttgagcaggctcaaagtcaacagatgcagctgcatctgtgtctagcgattgggaaggtccacagcaggactccagctcatacctgggagtcagggcaaagtccagcctagggaagagcccccaagagccaggctgggtgtcaggtggggcccttgtcctgaagggagaagagactacaaggtagagcaccaagcacacctggctctggcacctttacgtctctggccacttctctcttatggctccctgtaacaatgagatacggacacctggaggcacctggggctagtttcttcctcatacctgccccgctccgatgaggctccctccaggctccgcatcttgacttagttacaacctgatcctgagctgggacccaagggtgtcctgctcctggctccaatctcctggtgaggatgaactttggtttggctccacctgctcaagtgccttcggaagtgtgcccaccttgccagcctcgtcagaatgcagtctcaggatgatgaaagagttcaggaaatgccaccccaaggtacgtcactttggacttcaaactgagagcatttgaggaacagcaaatgcagggagggactttctctgaacttcccttatctgcttcaagataaatcctccaaaaggaactcaatggttataactcccctccccaggaacctcatcaaccagagaagagtaaactcagatcacaggacaggagactgggggtcaacaccacccccagacagactttatcacatatcacctattcttctgaaggcccattcatctttcctccaaatcatttactctctcctaagttgcctgaaccctccctccgctcaccccctttaagaggtatatatgctctcactgaggtttaggacatttgcttttctttcatgtgatgcccccatgcatgtagtatatttgtgtaccttttcttctgtaactctttcttctactgtcagtttatttcatagagtcaattaccgaaccctcagagggtagaggggaaatcttccctcccctgcagtgatgctctgggactgccagacacctggtgtctaatagacaccagaactcactcccaacagcccatttgggcaattagtcgctcatatgataaacatttttttaaacccccaaagtgtaccagtccttggactgaaagctggatttacaaggtcaaatcagattcagtccttgtgatagaagagttcataatacagtggagccaaacgcatgaaacataacacagcctattacaacacaacgcgacatgacagcttcacacatcccaacacaggatacaagggctcaggtctggtttctaacttctggggcctcagctgagaaaagggcagctcccagtgaaaggaggcttattaattagggagggagcttattggaatgtcagcagtggaatgcagaggggaagagactctaagtcagactagctgcttcagtcctggcaccataatcttggatggatgacagaactctctgtgccttagtttccacatctacaaaatggagagaataatagtgtgtatgtcatagggcttaaggattaattgagataatacacgcaaagtgcctggcacagtgcctagaaggtatagcaagcagaatagcattagctgtgtggttcttgttgccatagaattatagaacctgattatactcttaggttcttggagtcagagaactgtagaatcatagaaccctaggaccttagaaccttagacatagaggtttataaatatatataaatataacgtgcaccagaatattagctaggagggtgaagaagggagatctccccattccttcagattgaggcgaaatgtcctctaatgcctgagttccagggctgtcacattcagttgctcaggttgtacctaatatacctctaaagaaggccattcacatagacttcgatgtgaatggagttccttagacgcagcatgacatgcaccattgcgtgagaaagcccacatttctcccagagaagtcggctaagtcccagggggcttacacttagtaccataatctctgcctccagcaaaacatgctggctttgtcctgagccacactgacctgaatgtgatgaaactgaaacttggattccatataaaaataaaatcactcctgcacgttgtgcacatgtaccctaaaatttaaagtataataataataaagtt

SEQ ID NO: 12941 - DNA, 2491 bp, Homo sapiens
  CDS (259)..(1719)
ataattgagggaagaaggccagcggaaggaacaggaagaaggaacagcaaatatttattgagtgtctactgtgtgccaggcactatatctatgtgcatagaaaaaccctggaaggccatacaacaatatatatagagtgatcgtctctgcttgctgagctaacaggggtgtcaagcttccattttggtatctacttctaaatacactcagaacaggagaaatttggactaattttcaaactacagacactttctaatcatgatgcatttcaaaagtggactcgaattaactgagttgcaaaacatgacagtgcccgaggatgataacattagcaatgactccaatgatttcaccgaagtagaaaatggtcagataaatagcaagtttatttctgatcgtgaaagtagaagaagtctcacaaacagccatttggaaaaaaagaagtgtgatgagtatattccaggtacaacctccttaggcatgtctgtttttaacctaagcaacgccattatgggcagtgggattttgggactcgcctttgccctggcaaacactggaatcctactttttctggtacctttgacttcagtgacattgctgtctatatattcaataaacctcctattgatctgttcaaaagaaacaggctgcatggtgtatgaaaagctgggggaacaagtctttggcaccacagggaagttcgtaatctttggagccacctctctacagaacactggagcaatgctgagctacctcttcatcgtaaaaaatgaactaccctctgccataaagtttctaatgggaaaggaagagacattttcagcctggtacgtggatggccgcgttctggtggtgatagttacctttggcataattctccctctgtgtctcttgaagaacttagggtatcttggctatactagtggattttccttgagctgtatggtttttttcctaattgtggttatttacaagaaatttcaaattccctgcattgttccagagctaaattcaacaataagtgctaattcaacaaatgctgacacgtgtacgccaaaatatgttaccttcaattcaaagaccgtgtatgctttacccaccattgcatttgcatttgtttgccacccgtcagtcctgccaatttacagtgagcttaaagaccgatcacagaaaaaaatgcagatggtttcaaacatctcctttttcgccatgtttgttatgtacttcttgactgccatttttggctacttgacattctatgacaacgtgcagtccgacctccttcacaaatatcagagtaaagatgacattctcatcctgacagtgcggctggctgtcattgttgctgtgatcctcacagtgccggtgttatttttcacggttcgttcatctttatttgaactggctaagaaaacaaagtttaatttatgtcgtcataccgtggttacctgcatactcttggttgttatcaacttgttggtgatcttcataccctccatgaaggatatttttggagtcgtaggagttacatctgctaacatgcttattttcattcttccttcatctctttatttaaaaatcacagaccaggatggagataaaggaactcaaagaatttgggctgcccttttcttgggcctgggggtgttgttctccttggtcagcattcccttggtcatctatgactgggcctgctcatcgagtagtgacgaaggccactgaaacccgccgagaaaaagaaacatccctgttgtctgctcagtcaagtccccacacatcagcaatctctcaccacttcttttgcaagtttacagaagcaaacagaaatgtacaggatacttaaaatggaataactttttggttgcaaaacagagacgtggttctataatgcttcatgtccctccaagatttgagatcaatttagggattgtgaattttttttttcaaatttcatacaatcatatttcccagtacttttcacaatcattttttacccatctaactctatgttttgtggcttcccggtctcttagaactttgaaaacatgatatacaataatgtttatttattatacatccagattctgaaataattttcctactgatgttcagctcacactatctgtacctttttagaagagaaaagaatcttgaattgtatatatttattttgctttacagaaaaaaatggtttcgtaaataatttgcctattttggttaacatagcacatggagataatcatctgaaagttatagggcactgccactgctgaatcagagcatgcccaatatttgaggtggctctgatttcctggcagctgaactcgggtagtccagtggcctagctggtaccacatctattcccatccagagacattctctggcaagtgttctcagctgaaaagtggttggggatgattcttaccttggtaattaaatgaagctacacatttgggtaatctagcaaatgaagtattttttccctcttggc

SEQ ID NO: 12942 - protein, 487 aa, Homo sapiens [sequence omitted]

SEQ ID NO: 12943 - DNA, 2051 bp, Homo sapiens
  CDS (55)..(1956)
tattataaaataattgaggaatgtgtttcacagatagtgctacactgcagtggtatggatccagacttcaaatacaggcaaagattagacatcgatttaactcatctgatagattcttgtgtgaacaaggcgaaagttgaagaaagtgaacaaaaagctgcagagttttcaaagaagttcgatgaagaattcacagctcgacaggaagctcaagcagagcttcaaaaaagagatgagaaaatcaaagaacttgaagcagaaatccagcaacttcgaacccaggcacaagtactctcaagttcatcaggaattccaggtcctcctgcagcacctccattgccaggtgtagggccgcctccaccaccacccgcgccacctctacccggaggagctcctcttcctcctccaccacctcctttacctggaatgatggggataccaccaccacccccaccaccacttttatttgggggacctcctccaccaccaccccttggaggagttcctcctcccccaggaatatcacttaatctaccttatggaatgaagcagaaaaaaatgtataaacctgaagtgtccatgaagagaatcaattggtcaaagattgaacccacagaattatctgagaactgtttctggttaagagtcaaagaagacaagtttgagaatccagatctctttgccaaattggcattgaattttgctactcagataaaagttcaaaagaacgcagaagcattagaagaaaagaagactgggcctacaaagaagaaagtgaaagaactgagaattttggatcccaaaacagctcagaatctgtccatctttctgggatcatatcgcatgccatatgaagacataagaaacgttattctggaggttaatgaagacatgctgagtgaggctttaattcagaaccttgtgaaacatcttcctgagcagaagatactcaacgaattagcagagcttaagaatgaatatgatgacctctgtgagcctgaacaatttggagttgtgatgagctctgtgaaaatgttacagcctcgtctcagtagtatcctgttcaagctcacatttgaagaacacataaacaacaccaaaccaagcatcatagcagtaactcttgcctgtgaagaactgaagaaaagtgaaagctttaacagacttttagagttagttcttcttgttggaaactacatgaactcaggctcaagaaatgcccagtctttgggatttaagatcaacttcctttgtaagatcagagatactaaatcagcggatcaaaaaacaacccttttgcattttattgccgacatttgtgaggaaaaatatcgagatatcctaaaatttcctgaagaactggaacacgtagaaagtgcaagcaaagtttcagctcaaattctcaagagcaaccttgcatcaatggaacaacaaattgttcatctggaacgtgacatcaagaaattcccccaagcagaaaatcaacacgataagtttgtggaaaagatgaccagctttacaaagactgcccgagaacagtatgaaaaactctccaccatgcacaacaacatgatgaagctctatgagaatcttggagaatacttcatttttgactcaaagacagtgagcatagaagagttctttggtgatctcaacaacttccgaactttgtttttggaagcagtgagagaaaacaataagagaagagaaatggaagagaagaccaggagggcaaaacttgcaaaagagaaagctgaacaagaaaagttagaacgccagaagaaaaagaaacaactcattgatataaacaaagagggtgatgagactggtgtgatggataatcttctagaagccctacaatcaggtgcagcattcagagaccgtcgaaagcggattccaaggaatccagtggtaaatcatccctgtgcaacaagggctaatccaagatcagctacataaacggcctgagtgctgttttaaacaggattgggtgatggtacaacatgactttttaagataatcaagtagtaaaggtttctagtggaaacatg

SEQ ID NO: 12944 - protein, 634 aa, Homo sapiens [sequence omitted]

SEQ ID NO: 12945 - DNA, 1832 bp, Homo sapiens
  CDS (220)..(819)
attgctctcctgccacggaggggagcgcttggtggcagtccgcgggcccggacggaaggctgaggcgacgcctcgacgacagcggaccggagctgcaggggcaacacattcagggcggggtgccccatttaggcctggctcaccggagtaagaaactacaacccccgaagtgccttgcgcctcaaggttacggaggcagtgaccacccaccctggagccatggtccacgccttcctcattcacaccttgagggccccgaatactgaggacacgggcctttgccgagtgctgtactcctgcgtcttcggtgctgagaagtcacctgatgacccacggccgcatggtgccgagagggacaggcttctccggaaggaacagattttagctgtggccaggcaggtagagtcaatgtgtcggctgcagcagcaggcatctggccggccccccatggacctgcagccgcaatcctcagatgagcaagtgccgctgcacgaggccccacgtggggctttccgcctggcagcagagaaccctttccaggagccacggacggtggtgtggctgggcgtgctctcgttaggctttgccctggtgctggatgcccatgagaacctgctactggctgagggcacgctccggctgctgacacgcctcctccttgaccacctccggctgctggcgcccagcaccagccttctgctgcgggctgaccgcattgagggcatcctcacccgcttcctgccacatggtcagctgcttttcctcaacgaccagtttgtccaaggcctggagaaggaattcagtgccgcttggccccgctgattcctcgttgggatggtgcttctgagggcaggcagagggtagacacacagccagatgaagcttggcatctccctcctacccagcagctctgatgtgctgctataccaggacaagtgggtgacacaagcctgcagaaagggggctgggcagagggtggaggaggtcctgcctgtcctcaggttagtggaaccacagaacttcctgagcctagagctgctgtgttacttagaccgctgccgtgcggcagccacgcttgtccttgaacccaccttcctccatccctgccagccgatagtgctagggtgaggagctgcctggagctcaccccgctcttcttccaaacccacagtcaaggccaggcgcggtggctcacgcctgtaatcccagcactttgcggggctgaggtggttggaccacctcaggtcgggagttcaagaccagcctggccaacatagtgaaaccccatctctactaaaaatacaaaaattagctgggtgtatggcgcccacctgtaatcctagctgctcagggggctgagtcatgggaatcacttgaacctgggaggcagagtttgcagtgagccgagagtgcgccacttcactccagcctgggcaacagagtgagactccatctcaaaaaaaaaaaaaaaatcccacagtcatcgaaacacaaaaggggtctcagactcccctgagggtggaggagctgtgcctgcatgctggcaggccacagcccctggctttgtgcccacttaggcagtattatcaacaaggtcctgctcagtgtccagcccccgctgagttcagaaatgcatctgccaatcagcagcaggattctgcagctccttttgtgccaagcccgttcccaccaggcaggctcgagataaagtcatcacagccttccctcatctgcagggagagaagttgctgtcagatgaatgtgagcagtctagcctggatgacatatttttcgttttgaattaaaagcactggctgtgtgattttaccctc

SEQ ID NO: 12946 - protein, 200 aa, Homo sapiens
MVHAFLIHTLRAPNTEDTGLCRVLYSCVFGAEKSPDDPRPHGAERDRLLRKEQILAVARQVESMCRLQQQASGRPPMDLQPQSSDEQVPLHEAPRGAFRLAAENPFQEPRTVVWLGVLSLGFALVLDAHENLLLAEGTLRLLTRLLLDHLRLLAPSTSLLLRADRIEGILTRFLPHGQLLFLNDQFVQGLEKEFSAAWPR

SEQ ID NO: 12947 - DNA, 2043 bp, Homo sapiens
  CDS (5)..(1714)
agcaatggggttcctgcagctgctggtcgtagcggtgctggcatccgaacaccgggtggctggtgcagccgaggtcttcgggaattccagcgagggtcttattgaattttctgtggggaaatttagatacttcgagctcaataggccctttccagaggaagctattttgcatgatatttcaagcaatgtgacttttcttattttccaaatacactcacagtatcagaatacaactgtttccttttctccgactctcctttccaattcctcggaaacaggcactgccagtggactggttttcatccttagaccagagcagagtacatgcacttggtacttggggacttcaggcatacagcctgtccagaatatggctatcctactctcctactcagaaagagatcctgtccctggaggctgtaatttggagttcgatttagatattgatcccaacatttacttggagtataatttctttgaaacgactatcaagtttgccccagcaaacctaggctatgcgagaggcgtagatcccccaccatgtgacgctgggacagaccaggactccaggtggaggttgcagtacgatgtctatcagtattttctgcctgagaatgacctcactgaggagatgttgctgaagcatctgcagaggatggtcagtgtgccccaggtgaaggccagtgctctcaaggtggttaccctaacagctaatgataagacaagtgtttccttctcctccctcccgggacaaggtgtcatatacaatgtcattgtttgggacccgtttctaaatacatctgctgcctacattcctgctcacacatacgcttgcagctttgaggcaggagagggtagttgtgcttccctaggaagagtgtcttccaaagtgttcttcactctttttgccctgcttggtttcttcatttgtttctttggacacagattctggaaaacagaattattcttcataggctttatcatcatgggattcttcttttatatactgattacaagactgacacctatcaagtatgatgtgaatctgattctgacagctgtcactggaagcgtcggtggaatgttcttggtagctgtgtggtggcgatttggaatcctctcgatctgcatgctctgtgttggactagtgctggggttcctcatctcgtcagtgactttctttactccactgggaaacctaaagatttttcatgatgatggtgtattctgggtcactttctcttgcatagctatcctcattccagtagttttcatgggctgcctaagaatactgaacatactgacttgtggagtcattggctcctattcggtggttttagccattgacagttactggtccacaagcctttcctacatcactttgaacgtactcaagagagcgctcaacaaggatttccacagagctttcacaaatgtgccttttcaaactaatgacttcattatcctggcagtatggggcatgctggctgtaagtggaattacgttacagattcgaagagagagaggacgaccgttcttccctccccacccatacaagttatggaagcaagagagagagcgccgagtgacaaacattctggaccctagctaccacattcctccattgagagagaggctctatggccgattaacccagattaaagggctcttccagaaggagcagccagctggagcgagaacgcctttgcttctgtagatgcccaggggcttggtcagtgtgcctcagctttggagttcatgcctggagtggttcaacagtctctggtgcaagtctaataagagatcaggcatatatatctgttctttgcataatattatggtgcccttattgatatatggtaagggtgtactaggggattaggatgattgtaagagaatgagaaagatgaccaaaaggttggtggtagggaggcttttccttatttccaaatacttgaggaattaccttttggtttacaaatctatgatcaacttattccattaaatagatacattaaaaaaattaaaaactgattcttctgc

SEQ ID NO: 12948 - protein, 570 aa, Homo sapiens [sequence omitted]

SEQ ID NO: 12949 - DNA, 2158 bp, Homo sapiens
tctatcatttatgagtactatgtccataggaaagccacttcaactcactgtactttttcttacctgtaagagatcaaacctgataaagtatcaggtttattccagctctaacactctgaaatgccacaaaatgcactccccaataaattaagattaaaggaatgcccaaaccccaaacatgatcattgtgatcatttcttatgaaacataagaatgagacataagaattttatatgagatactggcagaatttgctgagtcagtctcaggcaacatttaataagtaaatatgcagctaagcagtggactataatgcttttacacagccagaaaatagcaatattcctaaaattaatgaaagcatacacaaatccactcaggatgctaggacacaggcagctgaatgatatgagcttataatctattcttcccagactatttatcttatcacagcaacaccctgaagccacatgcaaaggatgaaccagactccccagtgctctatagaaccatgagtgaagcagctctggtgagaaaaaggatgaagcctctgatgatggacagaaaagaaagacagaaaaatagagcctctattaatggacacttctataaccatgaagtaagtgagttacaattccattaatgtaatataaaataaggttccctgtttcactaacaataccacccaattcaattcacaatttaaagtcataataataacagtagcatgtctaacatcttgggggcactctctatgtgctagatattaaagtaaatgtgttttaaatagatttttactgaattatcttattaatcactaaaacaatcctatgaaataggtaccattattttctttacttgacatataagctaattgaggcttatggagattaagcaatttgtcttagattatgctactcttaagtagtaactctcaacctgaacccagctttgtctgactccagaacacaagtttttaaccaccatgatgggtgaactctatcactgtgccaagtattaaaaacatgcagatgaggcagccgatgtctcagccagcacggagctcagggattgagcagggaaaccaacataccaacaataatactggaataatgtaagtgctacaaagtggttggatcaaaggacatttgaacgtgaacatttaaataaaaggaaaaagccacaggccaatttattccaataaatcaaacttctcatgttgccatgttccaggtcttttacctatacacataccgtttttatataagtgtagttgtagtttagatacaattcacattctgctttttcactgaatatgtgttaaatttatatgtgcctttccatagtgcttgtaagacattacattttgctgaaggtaggaaatatatcatcatttttttccagaactcaaatatttttcatgtgatgtactttagcaatcattcatcgctccatctcataaatacttagcacttacactgtgccaggtatcttctgaggcctttaataagaaataggaactcattgctttgtaggctttttcctgtaaggatttctactttatttcttcttcttctacccttggggggtaacgatagtgtgtctttggagcctggtggggagaaatctctcttctcaattatttattcatatcagaattttagggttccagaatcattctcatagctataaagtagcattgatagtcccccacagagaggtacctaccaattgtcctgtttccctcttcacagaaattgtgttgtatgtcattatcttgtggggtaatttgtgttgaagaaggaaagccacattgctccaagcaagtggctttcagattggatcacttgtgctggaaatgaaattgacactaggttggcagcacggaatggtggttaaatgcttgggccctggagcttgacagcctggttttacattcttgctgagcaagtttcattcttcttactttacaaggctgttgatgggatggaatgaaatgaggtaagttcagcataagaatagtacctggcacaaaagaactcggtctacattagcttatgttgttgctgttgattgaatgagctcaagctgggactatagatattttacacaaatgtcattcactgcaatttaataactagcagaaaacaatacaaac

SEQ ID NO: 12950 - DNA, 2747 bp, Homo sapiens
  CDS (135)..(2444)
gactttagccttcccattttatggagtttgtcatgagtgtgatcgtatttgctgctcgtgagatttcgctcactaataaatttgattcatttaattatgtgttttctcttcctagattttaatttgatttgaaaatgagtaagtgcagaaagacaccagttcagcagctagcaagtcccgcgtcattcagcccagatattcttgctgacatttttgaactctttgccaagaacttttcttatggcaagccacttaataatgagtggcagttaccagatcccagtgagattttcacctgtgaccacactgaatttaatgcatttcttgatttgaagaactccctaaatgaagtaaaaaacctactgagtgataagaaactggatgagtggcatgagcacactgctttcactaataaagcagggaaaatcatttctcatgttagaaaatctgtgaatgctgaactttgtactcaagcatggtgtaagttccatgagattttgtgcagctttccacttattccacaggaagcttttcagaatggaaaactgaattctctacacctttgtgaagctccaggagcttttatagctagtctcaaccactacttaaaatcccatcggtttccttgtcattggagttgggtagcgaatactctgaatccataccatgaagcaaatgacgacctcatgatgattatggatgaccggcttattgcaaataccttgcactggtggtactttggtccagataacactggtgatatcatgaccctgaaattcttgactggacttcagaatttcataagcagcatggctactgttcacttggtcactgcagatgggagttttgattgccaaggaaacccaggtgaacaagaagctttagtttcttctttgcattactgtgaagttgtcactgctctgaccactcttggaaacggtggctcttttgttctaaagatgtttactatgtttgaacattgttccataaacttgatgtacctgctaaactgttgttttgaccaagtccatgttttcaaacctgctactagcaaggcaggaaactccgaagtctatgtggtttgcctccactataaggggagagaggccatccatcctctgttatctaagatgaccttgaattttgggactgaaatgaaaaggaaagccctttttccccatcatgtgattcctgattcttttcttaagagacatgaagaatgttgtgtgttctttcataaatatcagctagagactatttctgaaaacattcgtctatttgagtgcatgggaaaggcggaacaagaaaagctgaataatttaagggattgtgctatacaatattttatgcaaaaatttcaactgaaacatctttccagaagtaattggctagtaaaaaaatctagtattggttgtagtacaaatacaaaatggtttgggcagaggaacaaatattttaaaacttataatgaaaggaagatgctagaagccctttcatggaaagataaagtagccaaaggatactttaatagttgggctgaagaacatggtgtatatcatcctgggcagagttctattttagaaggaacagcttccaatcttgagtgtcacttatggcatattttggagggaaagaaactgccaaaggtaaaatgttctcctttttgcaatggtgaaattttaaaaactcttaatgaagcaattgaaaagtcattaggaggagcttttaatttggattccaagtttaggccaaaacagcagtattcttgttcttgtcatgttttttctgaagaactgatattttccgagttgtgtagccttactgagtgccttcaggatgagcaggttgtagtacccagcaatcaaataaagtgcctgctggtgggcttttcgactctccgtaatatcaaaatgcatataccgttggaagttcgactcctagaatcagctgaactcacaacttttagctgttcattgcttcatgatggagatccaacttaccagcgtttatttttggactgccttctacattcattgcgggagcttcatacaggagatgttatgattttgcctgtactttcttgcttcacaagatttatggctggtttgatctttgtactccacagttgttttagattcatcacttttgtttgtcccacatcctctgatcccctgaggaccagcgcagtcctgctatgtgttggttatcaggaccttccaaatccagttttccgatatttgcagagtgtgaatgaattgttgagcactttgctcaactctgactcaccccagcaggttttacagtttgtgccaatggaggtactccttaagggggccctgcttgattttttgtgggatttgaatgctgccattgctaaaaggcatttgcatttcattattcaaagagagagagaagaaattatcaacagccttcagttacaaaactgaacatatgctttctgagattcaactttatgatttcttataatttgcccagtatttgcatcctgttgctctattaatttaaaaaccttttattttggggaaaggccaacatctgcatcattcaaagtctcattaattctggaaaaccatccattctgatctctagggtatatacacccacaggcatagagctcttccacgtggtggaatctatgcaatgatagatattcacactctaaatatgaggtgtgtgtatgtgtatgggtggccacagccatgcttacctatgccatttagttggtc

SEQ ID NO: 12951 - protein, 770 aa, Homo sapiens
MSKCRKTPVQQLASPASFSPDILADIFELFAKNFSYGKPLNNEWQLPDPSEIFTCDHTEFNAFLDLKNSLNEVKNLLSDKKLDEWHEHTAFTNKAGKIISHVRKSVNAELCTQAWCKFHEILCSFPLIPQEAFQNGKLNSLHLCEAPGAFIASLNHYLKSHRFPCHWSWVANTLNPYHEANDDLMMIMDDRLIANTLHWWYFGPDNTGDIMTLKFLTGLQNFISSMATVHLVTADGSFDCQGNPGEQEALVSSLHYCEVVTALTTLGNGGSFVLKMFTMFEHCSINLMYLLNCCFDQVHVFKPATSKAGNSEVYVVCLHYKGREAIHPLLSKMTLNFGTEMKRKALFPHHVIPDSFLKRHEECCVFFHKYQLETISENIRLFECMGKAEQEKLNNLRDCAIQYFMQKFQLKHLSRSNWLVKKSSIGCSTNTKWFGQRNKYFKTYNERKMLEALSWKDKVAKGYFNSWAEEHGVYHPGQSSILEGTASNLECHLWHILEGKKLPKVKCSPFCNGEILKTLNEAIEKSLGGAFNLDSKFRPKQQYSCSCHVFSEELIFSELCSLTECLQDEQVVVPSNQIKCLLVGFSTLRNIKMHIPLEVRLLESAELTTFSCSLLHDGDPTYQRLFLDCLLHSLRELHTGDVMILPVLSCFTRFMAGLIFVLHSCFRFITFVCPTSSDPLRTSAVLLCVGYQDLPNPVFRYLQSVNELLSTLLNSDSPQQVLQFVPMEVLLKGALLDFLWDLNAAIAKRHLHFIIQREREEIINSLQLQN

SEQ ID NO: 12952 - DNA, 2345 bp, Homo sapiens
gttcgatgcattgatgttgaagtctcccacagtgaagggcctgatggaagcgatatctgagaaatatgggctgcccgtggagaagatagcaaagctttacaagaaaagcaaaaaaggcatcttggtgaacatggatgacaacatcatcgagcactactcgaacgaggacaccttcatcctcaacatggagagcatggtggagggcttcaaggtcacgctcatggaaatctagccctgggtttggcatccgctttggctggagctctcagtgcgttcctccctgagagagacagaagccccagccccagaacctggagacccatctcccccatctcacaactgctgttacaagaccgtgctggggagtggggcaagggacaggccccactgtcggtgtgcttggcccatccactggcacctaccacggagccgaagcctgagcccctcaggaaggtgccttaggcctgttggattcctatttattgcccaccttttcctggagcccaggtccaggcccgccaggactctgcaggtcactgctagctccagatgagaccgtccagcgttcccccttcaagagaaacactcatcccgaacagcctaaaaaattcccatcccttctttctcacccctccatatctatatctcccgagtggctggacaaaatgagctacgtctgggtgcagtagttataggtggggcaagaggtggatgcccactttctggtcagacacctttaggttgctctggggaaggctgtcttgctaaatacctccagggttcccagcaagtggccaccaggccttgtacaggaagacattcagtcaccgtgtaattagtaacacagaaagtctgcctgtctgcattgtacatagtgtttataatattgtaataatatattttacctgtggtatgtgggcatgtttactgccactggcctagaggagacacagacctggagaccgttttaatgggggtttttgcctctgtgcctgttcaagagacttgcagggctaggtagagggcctttgggatgttaaggtgactgcagctgatgccaagatggactctgcaatgggcatacctgggggctcgttccctgtccccagaggaagccccctctccttctccatgggcatgactctccttcgaggccaccacgtttatctcacaatgatgtgttttgcctgactttccctttgcgctgtctcgtgggaaaggtcattctgtctgagaccccagctccttctccagctttggctgcgggcatggcctgagctttctggagagcctctgcagggggtttgccatcagggccctgtggctgggtctgctgcagagctccttggctatcaggagaatcctggacactgtactgtgcctcccagtttacaaacacgcccttcatctcaagtggccctttaaaaggcctgccgccatgtgagagctgtgaacagctcagctctgagtcggcaggctggggcttcctcctgggccaccagatggaaagggggtattgtttgcctcactcctggatgctgcgttttaaggaagtgagtgagaaagaatgtgccaagatacctggctcctgtgaaaccagcctcaggagggaaactgggagagagaagctgtggtctcctgctacatgccctgggagctggaagagaaaaacactcccctaaacaatcgcaaaatgatgaaccatcatgggccactgttctctttgaggggacaggtttaggggtttgcgttcgcccttgtgggctgaagcactagctttttggtagctagacacatcctgcacccaaaggttctctacaaaggcccagatttgtttgtaaagcactttgactcttacctggaggcccgctctctaagggcttcctgcgctcccacctcatctgtccctgagatgcagagcaggatggagggtctgcttctagctcagctgtttctccttgaggttgcggaggaattgaattgaatgggacagagggcaggtgctgtggccaagaagatctccgagcagcagtgacggggcaccttgctgtgtgtcctctgggcatgttaacccttctgtggggccaaaggtttgcatcgtggatccagctgtgctccagtctgtcccctcctcctccactctgactgccacgccccggaccagcagcttggggaccctccagggtactaatggggctctgttctgagatggacaaattcagtgttggaaatacatgttgtactatgcacttcccatgctcctagggttaggaatagtttcaaacatgattggcagacataacaacggcaaatactcggactggggcataggactccagagtagg

SEQ ID NO: 12953 - DNA, 2366 bp, Homo sapiens
  CDS (24)..(1715)
agcctaggagcagagcctcccagatggctgagttggatctaatggctccagggccactgcccagggccactgctcagcccccagcccctctcagcccagactctgggtcacccagcccagattctgggtcagccagcccagtggaagaagaggacgtgggctcctcggagaagcttggcagggagacggaggaacaggacagcgactctgcagagcagggggatcctgctggtgaggggaaagaggtcctgtgtgacttctgccttgatgacaccagaagagtgaaggcagtgaagtcctgtctaacctgcatggtgaattactgtgaagagcacttgcagccgcatcaggtgaacatcaaactgcaaagccacctgctgaccgatccagtgaaggaccacaactggcgatactgccctgcccaccacagcccactgtctgccttctgctgccctgatcagcagtgcatctgccaggactgttgccaggagcacagtggccacaccatagtctccctggatgcagcccgcagggacaaggaggctgaactccagtgcacccagttagacttggagcggaaactcaagttgaatgaaaatgccatctccaggctccaggctaaccaaaagtctgttctggtgtcggtgtcagaggtcaaagcggtggctgaaatgcagtttggggaactccttgctgctgtgaggaaggcccaggccaatgtgatgctcttcttagaggagaaggagcaagctgcgctgagccaggccaacggtatcaaggcccacctggagtacaggagtgccgagatggagaagagcaagcaggagctggagaggatggcggccatcagcaacactgtccagttcttggaggagtactgcaagtttaagaacactgaagacatcaccttccctagtgtttacgtagggctgaaggataaactctcgggcatccgcaaagttatcacggaatccactgtacacttaatccagttgctggagaactataagaaaaagctccaggagttttccaaggaagaggagtatgacatcagaactcaagtgtctgccgttgttcagcgcaaatattggacttccaaacctgagcccagcaccagggaacagttcctccaatatgcgtatgacatcacgtttgacccggacacagcacacaagtatctccggctgcaggaggagaaccgcaaggtcaccaacaccacgccctgggagcatccctacccggacctccccagcaggttcctgcactggcggcaggtgctgtcccagcagagtctgtacctgcacaggtactattttgaggtggagatcttcggggcaggcacctatgttggcctgacctgcaaaggcatcgaccggaaaggggaggagcgcaacagttgcatttccggaaacaacttctcctggagcctccaatggaacgggaaggagttcacggcctggtacagtgacatggagaccccactcaaagctggccctttctggaggctcggggtctatatcgacttcccgggagggatcctttccttctatggcgtagagtatgataccatgactctggttcacaagtttgcctgcaaattttcagaaccagtctatgctgccttctggctttccaagaaggaaaacgccatccggattgtagatctgggagaggaacccgagaagccagcaccgtccttggtggggactgctccctagactccaggagccatatcccagacctttgccagctacagtgatgggatttgcattttagggtgatttgggggcagaaataactgctgatggtagctggcttttgaaatcctatggggtctctgaatgaaaacattctccagctgctctcttttgctccatatggtgctgttctctatgtgtttgcagtaattcttttttttttttttgagacggagtctcgcactgttgcccaggctggagagcagtggcgcgatcttggctcactgcaagctccgcctcccgagttcaagcaattctcctgcctcagcctcccgagtagctgggattacaggtgcctgccaccacacccagctaatgttttgtatttttagtagagatggggtttcaccatgttggccaggcagatctcaaactcctgacctcgtgatgcacccacctcggcctcccaaagtgctgggattacatgcgtgagccactgcgccctgcctgtttgtagtaatttttaggcaccaaatctccctcatcttctagtgccattctcctctctgttcaggtaaatgtcacactgtgcccagaatggatgaccaggaaccttaaagagtggctgaaaagattgcagagttatcataataaattgctaacttgcgt

SEQ ID NO: 12954 - protein, 564 aa, Homo sapiens [sequence omitted]

SEQ ID NO: 12955 - DNA, 2285 bp, Homo sapiens
agcagtatattagctctgggtcttctcatgactaaaatgactatttttaaacataagaccatattttataaatgtacagataattcaaatctattatctaatgtattaggttaatttctatttgttctatacttttttttttttttttttttgagatggagtcttgctctgtcgcccaggctggagtgcagtggtgcaatcttggctcactgcaagctccgcctcctgggttcatgccattctcctgcctcggccttccaagtagctgggactacaggtgcccgccccgacacctggctaatttttaaaaaaatatttttagtagagacagggtttcaccgtgttagccaggatggtctcgatctcctgacctcgtgatccgcccgctttggcctcccaaagtgctgggattacaggcgtgagccaccgcacccggcctattgacattttttaaggtttcagattttcttttgtgtgtctagtaattcgtcttttattgtcaaagataatttgcttatttgacttagaaaaatgatttgagggcatacaatattgtatgtggtacctaaacgttgccatttagttactcttacagaacaactttcattacactgtatattaatataaattacttcttgagtaatcccagaattgtagaaccaattggtagaatcagaaactgtctttggacttgaggtttttcttcccttagggtaaattttaggttttctggttagtttccaggagttggcggacaagttcatatcactaaaggtgttcatatcactaaaatagtaatgctaatttgtttcatatttctattttaaaaagcaatcaataaagacatttcaatacatttcatttggaagcccccaagtgtatggtggttaataaggctcagcatgctggtaacccaccattctcttagctagtgactccactaaatagtgctagccgctgagatggttttgaccctttaacagcctttttttttttttgagacggagtttcactcttgttatccaggctggggtgcaatggtgcgatatctcggctcactgcaaccactgcctcccaggttcaagcgattctcctgcctcagcctgccaagtagctggattacgggcacgtgccatcacgcccagctaatttttgtatttttggtagagacggggtttctccacgttgaccaggctggtctcgaactcctcacctcaagtgatccacccgcctcggcctcccaaagtgctgggattacaggcgtgagccaccgcgactggcctacacagcttttaattgcttgatttatactttattaaagagaggaagcacaatgagcagtgatactaaaatataactaatatggcatgtgaaagtgatcattattcagatgatcttcaccaacactgcatttgcatatatctgaccaaactttatgcgacataggcaggtctctggcacttcaaaaatgaatgttaaatagaaaataataaataatagctgattagggtaatcatttatttaatcagaataaagattatatccataaaatttacttgcagagaagtactttctttttgttttaaagacagggtctcactctgtcacccaagctatggtgcagtggcacagtcacagctcactgcagcctggacctcctggcctcaaggggatgatcctcctacttcaggaattatgccaccatgcccggctagttgagaagtactttcaaatagcaacatgaagcctttcctttaccatttgaaaataaaacatagttgtaaacataaaccagtatgtctttgtaaagccaataatatatcattttataggagcattgtcttcttgtgtttttcaagttgactatgtagttcaatgtcagtctccattttaatatcttgtttgtttatcagcctgagcatatttcattttaaaatgtatttgttgagaagtcatggtggttttttgtttttcacaagtcaagtagcttgaacactatcacttgtccaatgggaaagttgatgcttatctttatggcaaatgcttggttgaataatatatttgcaaagatgttaattctacagagagctaaataaagttaagatacctgtaaaacagtttctccagatgactttaaaataagccttatttttgtaaatttatgttaaattttaggtgttaagttgtgaaatacctaatgatgtgggcctaaatttgcctcattcagactgagacagggctgttaaaattcatttctagctaataaactgtgctataacttcttt

SEQ ID NO: 12956 - DNA, 2739 bp, Homo sapiens
  CDS (77)..(1474)
aagaatgtctcaggaggaagcatgacagagatgtttgtccagttaaaactgggagatcagaggtataaaagtaaggatgggcattttggacattgaagtgtggggaaaggacaacaaaaagcatgaggaacgtctgggcacgtgtaaagtggatatctcggcactccctctgaagcaagccaactgcctggagctgccactggacagctgtctgggggctctccttatgttggtcacacttacaccctgtgcgggggtctccgtctctgatctgtgtgtctgccccttagcagacctcagcgaaagaaagcagattacccagcgatattgcttacagaactccctgaaagatgtgaaagacgtcggcattctacaagtgaaggttttaaaggcagcagatctcttagcggcagatttctcagggaagagtgacccattttgcttgttggagttaggcaatgaccgacttcagacgcataccgtctacaaaaacctcaaccctgaatggaacaaagtttttacatttcccattaaagatatccatgatgttttggaagtgacagtgtttgatgaagatggagataaacccccagattttcttggaaaagttgccattcccttgctgtccattagagatggacaaccgaattgttatgtactaaagaataaagatttagaacaagcttttaaaggagttatttacttagagatggaccttatatataatccggtgaaagcaagtattaggacttttactccccgggaaaagcgctttgttgaagacagccgcaagctgtccaaaaagatcttatcaagagatgtggaccgtgtgaaaagaatcactatggcaatatggaatacaatgcagttccttaaaagctgcttccagtgggaatccacattaagaagtacaatagcattcgcggtatttttgatcactgtctggaattttgaactatatatgatccccttggcattgttgctgatctttgtctacaatttcatcagacctgtgaaaggcaaggtcagcagcatccaggacagccaggagagcacagacatagatgacgaggaggatgaagatgacaaggaatctgagaaaaaggggttgattgaaagaatctatatggtacaggatattgtttcaactgttcaaaacgtcttggaggaaatagcttcttttggagaaaggattaagaacacatttaactggacggtccccttcctttcatctctggcctgtttgattctggcagcagccaccatcattttgtatttcattccactgcggtacatcattttaatctggggcataaataaatttactaagaagcttcgaaatccctattccatcgacaataatgagctactagacttcctctctagggtaccgtctgatgttcaaaaggtgcagtatgcagaattgaaactctgcagcagccacagccccctgcggaagaagcgcagcgctctctagggcacacaccgactttggacagcagcacccaatattgtgtttggttgagtagaccaatgttatggctgtttcagtggtacccaaggtgtccttctgaaatgcatgccctgtggcaccctctgtatacttcctcctccttcacgtgcacagacatacacacatgtgcacacaccctcatgcatgggtgtcctagttgcgtagagggtcagcccagcgaaaagcaacaaccccaagactgtgaaagactaacatccattctgaaataggagataacaaggctgccatggatctgaacaccaccttccttgagaacagccaggagcccacttggattcaagagtgactttgaacttgttttcacacctccaacagactctcattaagattcagttatttccgctccccagccccacactcctttcagattatcgttcatgggcgtaagtctcttctcagagttaacaagtctttggtagtcatcctctgtccaaatattgtatattattaaaaggcatttttaataattaccagaattagctcaaacctttagggatctttcagccatgattattaaggatatgtatgtgaatttttgggaaacctctcggtgctggatgccagcctacagcagggtccattgctggcaatggatggcccaggaaggtccctagagatcactcacttgaaaaatgagggtcccatgaaagtatttggttgccttctgatgccacttcttctcactttactttttgcttattttcaaaatattataaaatgtcaacatataatttcagaaaggcaggtgggggtaggggagaaatgaatgaataaattctctaggtatctagaaagataagaaactgaagaccgagagactaataaggctgcttacctaattattataatcatttcatttgcctgaatgttttaagcaggaagtagaaatactttggctgcccaaatgtatcttttgttcctcttagaagtaaaataagctacatacaataaaaatttatttcagaaccccatttctagaaaataccaccccagagtcctcatttgatagcatctgtctcctgcagacctcatcattccacagtatttccctgccatgtaaaaatcctgactttgtgcgtatataaaatgtatgcaattaagtctgtttaaatgatatttaagttttaaagactgtattttgttgacacatactttgtgcagtttttatgtatgtatgtattataaaaaaagttaaggttaaaaac

SEQ ID NO: 12957 - protein, 466 aa, Homo sapiens
MGILDIEVWGKDNKKHEERLGTCKVDISALPLKQANCLELPLDSCLGALLMLVTLTPCAGVSVSDLCVCPLADLSERKQITQRYCLQNSLKDVKDVGILQVKVLKAADLLAADFSGKSDPFCLLELGNDRLQTHTVYKNLNPEWNKVFTFPIKDIHDVLEVTVFDEDGDKPPDFLGKVAIPLLSIRDGQPNCYVLKNKDLEQAFKGVIYLEMDLIYNPVKASIRTFTPREKRFVEDSRKLSKKILSRDVDRVKRITMAIWNTMQFLKSCFQWESTLRSTIAFAVFLITVWNFELYMIPLALLLIFVYNFIRPVKGKVSSIQDSQESTDIDDEEDEDDKESEKKGLIERIYMVQDIVSTVQNVLEEIASFGERIKNTFNWTVPFLSSLACLILAAATIILYFIPLRYIILIWGINKFTKKLRNPYSIDNNELLDFLSRVPSDVQKVQYAELKLCSSHSPLRKKRSAL

SEQ ID NO: 12958 - DNA, 2286 bp, Homo sapiens
  CDS (82)..(582)
cttaaagaagaggaaactgaattgaaacagctgaatttacacaaagatactgagccaaaacccctggagggaactcatctaatgggtgtgaaagactctaacatccatgagcttgaacatgagcaagagcctacttgtgcctcccagatggctgagcccttccgtaccttccgagatggatgggtctcctactacaaccagcctgtgtttctggctggcatgggtcttgctttcctttatatgactgtcctgggctttgactgcatcaccacagggtacgcctacactcagggactgagtggttccatcctcagtattttgatgggagcatcagctataactggaataatgggaactgtagcttttacttggctacgtcgaaaatgtggtttggttcggacaggtctgatctcaggattggcacagctttcctgtttgatcttgtgtgtgatctctgtattcatgcctggaagccccctggacttgtccgtttctccttttgaagatatccgatcaaggttcattcaaggagagtcaattacacctaccaagatacctgaaattacaactgaaatacatgtctaatgggtctaattctgctaatattgtcccggagacaagtcctgaatctgtgcccataatctctgtcagtctgctgtttgcaggcgtcattgctgctagaatcggtctttggtcctttgatttaactgtgacacagttgctgcaagaaaatgtaattgaatctgaaagaggcattataaatggtgtacagaactccatgaactatcttcttgatcttctgcatttcatcatggtcatcctggctccaaatcctgaagcttttggcttgctcgtattgatttcagtctcctttgtggcaatgggccacattatgtatttccgatttgcccaaaatactctgggaaacaagctctttgcttgcggtcctgatgcaaaagaagttaggaaggaaaatcaagcaaatacatctgttgtttgagacagtttaactgttgctatcctgttactagattatatagagcacatgtgcttattttgtgctgcagaattccaataaatggctgggtgttttgctctgtttttaccacagctgtgccttgagaactaaaagctgtttaggaaacctaagtcagcagaaattaactgattaatttcccttatgttgaggcatggaaaaaaaattggaaaagaaaaactcagtttaaatacggagactataatgataacactgaattcccctatttctcatgagtagatacaatcttacgtaaaagagtggttagtcacgtgaattcagttatcatttgacagattcttatctgtactagaattcagatatgtcagttttctgcaaaactcactcttgttcaagactagctaatttatttttttgcatcttagttatttttaaaaacaaattcttcaagtatgaagactaaattttgataactaatattatccttattgatcctattgatcttaaggtatttacatgtatgtggaaaaacaaaacacttaactagaattctctaataaggtttatggtttagcttaaagagcacctttgtatttttattatcagatggggcaacatattgtatgaagcatatgtagcacttcacagcatggttatcatgtaagctgcaggtagaagcaaagctgtaaagtagatttatcacacaatgactgcatacagacttcaaatatgtcaatagtttggtcatagaacctagaagccaaaagccacacagaagggcaagaatcccaatttaactcatgttatcatcattagtgatctgtgttgtagaacatgagggtgtaagccttcagcctggcaagttacatgtagaaagcccacacttgtgaaggttttgttttacaaatcacttgatttaacacactcaggtagaatatttttatttttactgttttatacccagaagttatttctacattgttctacagcaagaatattcataaaagtatccctttcaaatgcctttgagaagaatagaagaaaaaaagtttgtatatattttaaaaaattgttttaaaagtcagtttgcaacatgtctgtaccaagatggtactttgccttaaccgtttatatgcactttcatggagactgcaatacgttgctatgagcactttctttatccttggagtttaatcctttgcttcatctttctacagtatgacataatgatttgctatgttgtaaaatctttgtaaaaaatttctatataaaaatattttgaaaatctt

SEQ ID NO: 12959 - protein, 167 aa, Homo sapiens [sequence omitted]

SEQ ID NO: 12960 - DNA, 1891 bp, Homo sapiens
ataggtatgaattcatttaagtcctgaagaaaaagaaaaaaaatacgaagtggatattacccttcccattttcaaataaggaaactgaagcacaaaaagaacaagtaacttgacaaggacaccccggtagtaaatcatggggctggagctcaaccccagggtaggctggctccagagctgtgctctccttgactcttctgatggtctcctagctggaagcctcacatttcagtctcattcccccaagtggcccatcagctactccatctctggctccccaactaaacagtttctctcatagtgctggacctccactcactagttttttttccagctgttcttctcttttcttcaggtcactcttctcgaccgagtgcaaaaattatcccctccataccagctttgatgaccttccttccatactcctcaccagacacaacataataggtcacacactcctctgtgctttctggcacgttttaaacattattattattgacctttacctatagtataccatggcctatttatgtatccatctcccctagcatttttcctcaaagacaagaaccatgtcttacccatctcttgggtaagtgcctagcatggtggctgacgcttgggagggtgtcattaaatgttgctcaaaagaacaagcaaacatttaaggtggtggagagcagcctggggacagctgacatgctgcatgcttctcagtaccagcaccatcacaatgcaaaaagcaacatctttcttaacctcagcttattctgtttttcagtctactctgtgagagagcaggaatgagaccagactagcaacaccattgccaagctcaaggactgggctcaatgcagtcactccttcagagagaccccccaccccaagcatgccccactttaaaatagcatgtttattgaagggggcatcctttacagtagctagaaaatgactgaggcccaagccagggttgatcaaggatgtgccattaaggtaaagagttacagagcagggcagagggactctgggggcagaagtggatgatttgcccggcctcttccagggggtctggatacaactgaaggagctttagctacatgaggccctcagagccaaagacaggatgcaaatagagttctagagagtggccgtggaagcagaactccaggtggggaatgttcaatctctgcctcccttaaagcagggccaggctcagctggccccattgttcacttggtcacaagtttcctacctttgtttctggatgagtcaaaggccaggaaggcagttatggagagctcctgcacctccagctgccccacagaaaagcctgcaagagtacttccaggcacaggccctctcccaccctattccatttgtaagcaagggaggtcgaggaaaaggacatctccaaaagggagcataagaatagccatatatacaggggctgaaaaagtgctcatgagtccatcttttctggaaagcaaagaccagcctgaagcagtgggagctgctgcccaagcggtagtgaactggagagaaacaggccctggattttcagtgaggatgtggatctgaagagtcccccaaatgcctctgaagtctgacatctctgcttagccctaggagtctggttccctgccttcagttgcagagtgatgtgtttgtgtcattgttgatgtcacctcctaaaaagaccttcactttctggctgccacaaagccatatgtgttgctccccatatacagcctgacagagtaaatggagaggaagtgctggatttgtgtatcactggctatcagttcctcatgttgttaagcctcacacaggtgtgctagcattgaactgtagagtgtcacatacctgagtttgaaaataaaagcacatttcc

SEQ ID NO: 12961 - DNA, 2077 bp, Homo sapiens
  CDS (280)..(1647)
ggatgttctgataaatggagcaccgcgacctgccaatttcaaatgtaattcaggttacgtggtacaagatgatgttgtgatgggcactctgacggtgagagaaaacttacagttctcagcagctcttcggcttgcaacaactatgacgaatcatgaaaaaacgaacggattaacagggtcattcaagagttaggtctggataaagtggcagactccaaggttggaactcagtttatccgtggtgtgtctggaggagaaagaaaaaggactagtataggaatggagcttatcactgatccttccatcttgttcttggatgagcctacaactggcttagactcaagcacagcaaatgctgtccttttgctcctgaaaaggatgtctaagcagggacgaacaatcatcttctccattcatcagcctcgatattccatcttcaagttgtttgatagcctcaccttattggcctcaggaagacttatgttccacgggcctgctcaggaggccttgggatactttgaatcagctggttatcactgtgaggcctataataaccctgcagacttcttcttggacatcattaatggagattccactgctgtggcattaaacagagaagaagactttaaagagatcatagagccttccaagcaggataagccactcatagaaaaattagcggagatttatgtcaactcctccttctacaaagagacaaaagctgaattacatcaactttccgggggtgagaagaagaagaagatcacagtcttcaaggagatcagctacaccacctccttctgtcatcaactcagatgggtttccaagcgttcattcaaaaacttgctgggtaatccccaggcctctatagctcagatcattgtcacagtcgtactgggactggttataggtgccatttactttgggctaaaaaatgattctactggaatccagaacagagctggggttctcttcttcctgacgaccaaccagtgtttcagcagtgtttcagccgtggaactctttgtggtagagaagaagctcttcatacatgaatacatcagcggatactacagagtgtcatcttatttccttggaaaactgttatctgatttattacccatgaggatgttaccaagtattatatttacctgtatagtgtacttcatgttaggattgaagccaaaggcagatgccttcttcgttatgatgtttacccttatgatggtggcttattcagccagttccatggcactggccatagcagcaggtcagagtgtggtttctgtagcaacacttctcatgaccatctgttttgtgtttatgatgattttttcaggtctgttggtcaatctcacaaccattgcatcttggctgtcatggcttcagtacttcagcattccacgatatggatttacggctttgcagcataatgaatttttgggacaaaacttctgcccaggactcaatgcaacaggaaacaatccttgtaactatgcaacatgtactggcgaagaatatttggtaaagcagggcatcgatctctcaccctggggcttgtggaagaatcacgtggccttggcttgtatgattgttattttcctcacaattgcctacctgaaattgttatttcttaaaaaatattcttaaatttccccttaattcagtatgatttatcctcacataaaaaagaagcactttgattgaagtattcaatcaagtttttttgttgttttctgttcccttgccatcacactgttgcacagcagcaattgttttaaagagatacatttttagaaatcacaacaaactgaattaaacatgaaagaacccaagacatcatgtatcgcatattagttaatctcctcagacagtaaccatggggaagaaatctggtctaatttattaatctaaaaaaggagaattgaattctggaaactcctgacaagttattactgtctctggcatttgtttcctcatctttaaaatgaataggtaggttagtagcccttcagtcttaatactttatgatgctatggtttgccattatttaataaatgacaaatgtattaatgct

SEQ ID NO: 12962 - protein, 456 aa, Homo sapiens
MELITDPSILFLDEPTTGLDSSTANAVLLLLKRMSKQGRTIIFSIHQPRYSIFKLFDSLTLLASGRLMFHGPAQEALGYFESAGYHCEAYNNPADFFLDIINGDSTAVALNREEDFKEIIEPSKQDKPLIEKLAEIYVNSSFYKETKAELHQLSGGEKKKKITVFKEISYTTSFCHQLRWVSKRSFKNLLGNPQASIAQIIVTVVLGLVIGAIYFGLKNDSTGIQNRAGVLFFLTTNQCFSSVSAVELFVVEKKLFIHEYISGYYRVSSYFLGKLLSDLLPMRMLPSIIFTCIVYFMLGLKPKADAFFVMMFTLMMVAYSASSMALAIAAGQSVVSVATLLMTICFVFMMIFSGLLVNLTTIASWLSWLQYFSIPRYGFTALQHNEFLGQNFCPGLNATGNNPCNYATCTGEEYLVKQGIDLSPWGLWKNHVALACMIVIFLTIAYLKLLFLKKYS

SEQ ID NO: 12963 - DNA, 2161 bp, Homo sapiens
  CDS (16)..(1911)
tgtcccaacatacggatggatccaaaattatgccctgctgatccagactggattgcttttatacatagcaacgatatttggatatctaacatcgtaaccagagaagaaaggagactcacttatgtgcacaatgagctagccaacatggaagaagatgccagatcagctggagtcgctacctttgttctccaagaagaatttgatagatattctggctattggtggtgtccaaaagctgaaacaactcccagtggtggtaaaattcttagaattctatatgaagaaaatgatgaatctgaggtggaaattattcatgttacatcccctatgttggaaacaaggagggcagattcattccgttatcctaaaacaggtacagcaaatcctaaagtcacttttaagatgtcagaaataatgattgatgctgaaggaaggatcatagatgtcatagataaggaactaattcaaccttttgagattctatttgaaggagttgaatatattgccagagctggatggactcctgagggaaaatatgcttggtccatcctactagatcgctcccagactcgcctacagatagtgttgatctcacctgaattatttatcccagtagaagatgatgttatggaaaggcagagactcattgagtcagtgcctgattctgtgacgccactaattatctatgaagaaacaacagacatctggataaatatccatgacatctttcatgtttttccccaaagtcacgaagaggaaattgagtttatttttgcctctgaatgcaaaacaggtttccgtcatttatacaaaattacatctattttaaaggaaagcaaatataaacgatccagtggtgggctgcctgctccaagtgatttcaagtgtcctatcaaagaggagatagcaattaccagtggtgaatgggaagttcttggccggcatggatctaatatccaagttgatgaagtcagaaggctggtatattttgaaggcaccaaagactcccctttagagcatcacctgtacgtagtcagttacgtaaatcctggagaggtgacaaggctgactgaccgtagctactcacattcttgctgcatcagtcagcactgtgacttctttataagtaagtatagtaaccagaagaatccacactgtgtgtccctttacaagctatcaagtcctgaagatgacccaacttgcaaaacaaaggaattttgggccaccattttggattcagcaggtcctcttcctgactatactcctccagaaattttctcttttgaaagtactactggatttacattgtatgggatgctctacaagcctcatgatctacagcctggaaagaaatatcctactgtgctgttcatatatggtggtcctcaggtgcagttggtgaataatcggtttaaaggagtcaagtatttccgcttgaataccctagcctctctaggttatgtggttgtagtgatagacaacaggggatcctgtcaccgagggcttaaatttgaaggcgcctttaaatataaaatggttgctattgctggggccccagtcactctgtggatcttctatgatacaggatacacggaacgttatatgggtcaccctgaccagaatgaacagggctattacttaggatctgtggccatgcaagcagaaaagttcccctctgaaccaaatcgtttactgctcttacatggtttcctggatgagaatgtccattttgcacataccagtatattactgagttttttagtgagggctggaaagccatatgatttacagatctatcctcaggagagacacagcataagagttcctgaatcgggagaacattatgaactgcatcttttgcactaccttcaagaaaaccttggatcacgtattgctgctctaaaagtgatataattttgacctgtgtagaactctctggtatacactggctatttaaccaaatgaggaggtttaatcaacagaaaacacagaattgatcatcacattttgatacctgccatgtaacatctactcctgaaaataaatgtggtgccatgcaggggtctacggtttgtggtagtaatctaataccttaaccccacatgctcaaaatcaaatgatacatattcctgagagacccagcaataccataagaattact

SEQ ID NO: 12964 - protein, 632 aa, Homo sapiens [sequence omitted]

SEQ ID NO: 12965 - DNA, 2405 bp, Homo sapiens
caacgcttttgacaagtcaaacttttctaaacatcaagaaaatcatgctgctgagaaatcctagaaatgtgaagaatgtgacaaagcctctaaatgattgtcacacttgatcgtagggcccagacagaagagaagagtcacatcatctagatgatgaatgaaaagatatgtcattattctcctttgggcagtgcttctgcagaaaagttgcaccttctaggtgttggactcagcaatatatcacaatgtctgcagtattttggaaggagaggagagtcaccattacttaggtgctaggcccagcaatacatctcaagcacttcttgggcaaagcccaagcagtaaaaaagagtcacattacctaggttctgggtatagcaatatgtcacaaatgcccctaagaagagggcccaggaaaagagagtcaccttggtgagaatgtcagagatattccatttttgggtattcacaaaaaagaataaagtcccataacctagaaggtgggctctgctccatgacacaaatcaccctagtgggcaggtccattaaagagaaggctgtcaaagcacatagatgctgggcaaagtgatatgtcataatccccatgatgataggcccagagacatgtcacaatgacctctttaggcagagaccaggcagaagaatcacatcacttgtgtgctggccctagtgataagtcactctcatttctgtggacatggcccaggcagaagagcagagtcacattacctaagcgctgggtcaagagatatgtcacaatcttttacatgggcaaaacccaggtaaaaaagaggagtaatatcagatagtaggtgttgccagagatatgtcaaaatgccccctgtatgaaagactcaggcagtcaaaacacattagttggtttcttaacctagtgatatgttataatctttcctgtgggtatgatgcaggcagaagacgagagtcatgtgatggatgcagagacatgtcacaaggtcttctgtgggcagggtccagactgaagccttccacccgctaggggttgagcccaatgatatgtcacaatacccaaattatgcagggcccaggcaaaaaaaacgagaggcacatcacctgggttctggatccaatgatatatcacaattttctattttggcaagacccaggcagaaagaaaagttacatcacctaggtgatgaatgaaaatacatattataatagttttgtgggcaggacccatgcgggagagtcacatcacctaggtgttggacccagaaatatgtcacaatatacagtgtatacagagctgaggcatgagacaatagtaacttcactcatttgttgagcccagctatacaatccttttttgggcacagccgaagtagtagaggagagttacatcaccttggtgctgggtccagcaatgtgtcaccatacctgctgaggggagggtacaggcaagagagccacatcacttaggtgaggggcccagagatatctcacagtaccccctgtgggtagaactcaggaaaaaggagagagtcacataatctagaagctgagctcagctgtatgttacaatcacccagtggacaggtcccaggcatgagagtagagtcacatcacataggtgctggaccaagcaatttgtcacaaccttcactgtggacaggtccccagaaaaagagaatcacatcatttaggtaacaaaacctgagttagtcactgttacttgtttgggcagaggtcaggaagaagtgtcacacaacatgtatgctggactaagcaatacgtcactctctctgttttaggtatggcccaggcaggagagaagggacatatcacctaagctctggattcgcagataggccccaatctcttttttgggcaatgctcgggtaagagagcagagtcacatcaagtggttgatgggcccagagatgtatcacattgccccttgtggacagggaccaggcaggggactcacatcacaatagaggtaggacaaggaatacatcacaatacgttttgagagcagaaccaaaaaagagtaacataatctttgtgttgagtgcagcaatatgttacacttttctttgtgggcagaacgtgtaaagaaggaaaaagttggccggacacggtggcctgtaatcccaacactttgggaggtcaaggtgggcagatcacctgaggtcaggagttcaagaccagcctggccaacatggcaaaacgctgtctctactaaaaatacaaaaattggctgggtgtggtggcgggcacctgtaattctagctactcaggaggctgaggcaggagagtcacctgaacctttgaggcagaggctgcagtaagcaaagatcacgccactgcactccagtgtgggtgacacagcaagactccatctc

SEQ ID NO: 12966 - DNA, 2417 bp, Homo sapiens
agtttcaaaatattctgacaggacacagacagccctggctgaaaggagcacagagagaatacttcgagctcatgctgagagaaaaaggcgagtttgtcttttcttacctgagactgggcctgaagggagagtttcagttcttcattgacggttgctttcaagatgtacctgggaattacaccaagtgtgacctgtaacaattcaagcaaaaatgaattttccctgattctagagaagaatcccctggtggagtttgtggaagagctccctgctgggcgatcttctctgtgctactgcaacttgctctgtgggattatcagaggtgccttggaaatggttcatttggcggctgatgttacattcttgcaagacagactaaaaggtgacagtgtgacagaaataggaataacatttctaaaaaagcgagacgagaaaaaatatagagggaaaaaatgaagactagcacggaaaatgccacggggcggctagctgagttaatgttagctaaacatgtatagacatagaaattttgaattgcttcatagcatgagctttgaaaggtttataaatcagccagaaatttgaaatgcagggcatgaaggcttaaaggtttttttttccttttgcttataaatcacgcattttcaatctcatgtccacaaaatttcatatgcaaatagctccttacaagatagcaggcaggaattccacatcttacactatccatcctcagagaagctgttcattccattcacgtatggtaatgggaaaaaaaagcagcacaaatacaaacagttgtgtatttgtctctttgctgaaaaaaaaagaatgaaatgatatagcatagagtttcctatatatagacagtagtttctagatactgtatattgcattccttaaataaataattccatatttctaaaaaaatatgatttgatttttctcatgtattagcttggcttatagctttagccttctgacgctacccttgatttgtaatcaccaagtcaagctatttattcaatgataattttgaaacatttataaataacatttaattttaatttatttagttttaatatagctggcatcaaccaaattccttccttttctcatgaagtattgcttgatggtcaggccaggaaacttctaaaataaaggataaataatattctttgaaattactttcttaccccaaagcttattaattcagaatttctactatcattttcatcctctaaaaaatcttccaaaggatgttttctttgtgaccagaacacatttaaaattcaagtgtaccgaattaaatacacagtaatcttcaccagaccactggcacacaagggcggcctacaaggcagcccagaatctactgggctctgcagagagcccaaattgcaagtacaagttataattagtgtgataccaccctacggaattggagaaaatatttgtaaactatgtatctgacacccttgtgctattaataaccagaatatataaggagttcaaccaactccataggaaaaaattaataatccaattaaagatgggcaaaagatctgaatagacatttctcaaaagaagacatacacatacaaatggcaaacaggtatatgaaaaggtgctcaacatcattggtcatcagagaaatgcaaatcaaaactataatgagatattatctcaccctagttaaaaatggcttttatccaaaacaggcaatagtgaatgcttgcaaagatgtggagaagagggaactctggtacactgttggtgggaatgtaaattagtataaccactatggagaaaggtttggaggttcctcaaaaaacaaaaaatagaatgatcatatgatccagcaatcccactgctggatatatacccaaaataaaggaaatcagtatatcaaagagatatctgcactcccatgtttactgcagaactactgacgatagctaagatttggaagaaatctaagtgtccttcaatagattaatgaaataaagaaaatatggtacatatacacaatggagtactattcagccataaagaagaatgagatcctgtcatttgcaaaacatggatggaactagaggtcattatgttcaatgaaatatgtcaggacagaaagacagactttgcatgttctcatttatttgtaggagctaaaaattaaaacagtggactcatggagatatggagtaaaatgatggatatcagaggctgggaagggtagtttcaagaggagtggagatggttaatgggtacaaaaatatagttagatagaatgaataagatctgggtcgggcatggtggcacaagcctgtaatctctgcactttgggatgccaaagtgggaggattgcttgagctcaggagtttgagaccagcttgggtaacatagacccctgtctctcc

SEQ ID NO: 12967 - DNA, 1681 bp, Homo sapiens
  CDS (259)..(624)
ttagaacaattgctccccaataatttattttacaaacaggaatatgaaaaataaatggtggtaggaggaaggacccactaagaacaccatttttaaattttgctaagtaaggacattgagggaaaaaactcaaactctgatctaccatcattgtttaatgttcggcaaacatgaagcattttaataccaaaaaaagtgaggagaataaatctcagcataaaggaacaactttttaaactgaatttagcactatgaaaaatgtacctcattttctgtaattttagcgagtttcccgcggatgtacactggccccatggattggcgctggggatcaccagtttagaggtgccagtgccttctgacaaaggcccatggatccatatgactgcctgtctgttctttttagagacgggcccacactgcagagaagtgattgtgaaggtctccaaccctgtcatgcccccacctgccaccttgacttgggagagggacactcacaaaagcatgtcaaatcgacatccatttctttctctttccctcaggtctcagggagttttcctcttctcctcggactctttctctcaaggcctcttctacaaaaacccctgcccagagggttactgctaaaatgaaactcccgtgtctgtccccttccctggcccccaactgacttgcctgcctctgcttgctgctgtccctgcctattccccttcatgctggctctagaaagatgcaatctttttcccaggccccagcctctctggcctccctgccatccagcttctagcctcccttctctggaatctatggaagaatcatcaagcagcttctggaaatccaggagtctgtccttggtcatggtcatcttcaacctgtctgtgttcttgagaacgttcatgtgctcccagaaacattctttttgtctgcctttcctggtctggccacatttgactgtgtcacttctctcttttctcactcttctctgccctccacagacctccgtgctgccaggacttcctaacggaagggcttggctggctccccgaagccatccagaactggacccgagggacccagctcaacttgaatgtccttttatctgcccaggagatgggaagatgctgagaccatgcttcagtgctgtcccacatctgtctttctgagtttagacttggtttttccattatattccattcaactgatttttccatgatattccacaatgtcttacctaactctagctttctatactcaacagcaatgcctcctgagagcctcctgggtgtcaagtactctgttgtgtgcttttgaggactagggtgttagcaaggcacagtctctgactttgcagggctcacagattcatggggaaaattgatgttccagttacagtgaggcaaggcaatctggcagtaactccatagagaggaatgacaggctgggcctaggaatggaggggagcgggtaatagaggatcctaaggaaactgagagaagaggggctggagtgcggctggtctgcgctcctgtgcattgccttggctaacattttacttgtccttctgaatcaccctggcattgtcaacaaagaataatgtatgatccttcttggagtaaaaagccttcagcagtgcttcacaaaaaattctattgtatattttgtgtcctacctcaaattaatt

SEQ ID NO: 12968 - protein, 122 aa, Homo sapiens [sequence omitted]

SEQ ID NO: 12969 - DNA, 1651 bp, Homo sapiens
  CDS (218)..(532)
gagcggggcctctccgggccgcgtctgtggggtcgagactgcgcggccgttgggcgtgcagcggcgccagtcggcggacgaggggcccccgggagttgctggactgagacatgagcctccaactgtgtggttgggctcggtagcacatcgtgggacttgggtgtgcgcccacagatggtttggccctgcagtgaccagagcagcccaagccgccaccatggtgaaattgctagtggccaaaatcctgtgcatggtgggcgtgttcttcttcatgctgctcggctccctgctccccgtgaagatcatcgagacagattttgagaaggcccatcgctcgaaaaagatcctctctctctgcaacacctttggaggaggggtgtttctggccacgtgcttcaacgctctgctgcccgctgtgagggaaaaggtaagggctccctgggcactagcagcagcccttggcaccttatggccaagggactctgatgcattttcaacactgatgccaagttcagtgaaggccttgatgctgtaagggtgacggaaagtaggaagtgaatttgctgtgtgattgtgaactggttactttctgtctctgtgctctaccggccaaacaaggggtttggaccagacctgggattcccaacaggtggacttgtcggttgtcacctgataatcagaccagactacccacctaggtagggcacactctgtcctgaagctggaaagcatggcctctcttcggttcctatatcagtcagctactgttgcgtaacaaattatagcaaactgagcaccttaggactacagacgtttatcatctcacagtttctgtgagtcaggggtctgggcactgcttcaggagctcacaaggcagcagtcacagtgtctcctgggctgtggtctcatctcaacgttcaaccggggatgggtcggcctctaagctcatgtggttgtaagccaggttcagttcctcattggttgtcagaccgaaggtgtctgtttgtcagtgtctgttggctggggcagccctcagagcctggccacgtggacctccccagcatgatcagttccttcatcagcaaatggagaagatggccatgactctgtgtaagacagagggcacagtcccatgtcatgcagaggtgacagggtatcccttcccctctgccccagtgtcctgctggttagaagcaagttcaagtccttcccatactcaagtggccaggacctcacagggtatggctgtcaagaggcaggggcttctggggccatcttggagtctgtccaccccaactcctgacagcatcatcctctgctgacctgttccttgagctcccccatatcagcagcccagagtgtgggtcccctgtcaggccacagtgtgaccagccctggccatgcttgctgggtgaccctgggtgagtggcttcctctctctgggccagtgccagatgtgacattgaatttgtgttggttacatacttggtggagatatgaggaccccctgttcttcctcccaacgaaagcatggaagccctaagcttatcccccaacccctggccctgcttttcctcgtgcgtagtgtccagccccgaatgtcagcaccttccccctacccgagttgtgaaaataaaaaatgtttccagac

SEQ ID NO: 12970 - protein, 105 aa, Homo sapiens
MVKLLVAKILCMVGVFFFMLLGSLLPVKIIETDFEKAHRSKKILSLCNTFGGGVFLATCFNALLPAVREKVRAPWALAAALGTLWPRDSDAFSTLMPSSVKALML

SEQ ID NO: 12971 - DNA, 1821 bp, Homo sapiens
  CDS (10)..(1305)
gaatttgagatgagccctcgctgtgctaatctggccctcaagcactacctgctcaagccggttcagaggatcccccagtacaggctgttgctgacagattatttgaagaatctcatagaagatgctggagattacagagacactcaagatgcccttgctgttgttatagaggtagccaaccacgccaatgacaccatgaagcaaggagacaactttcagaaacttatgcaaattcagtacagcttaaatggacaccatgaaattgtgcagcctggtcgggtttttctcaaagaaggaattctgatgaagctgtctcggaaagtgatgcaacctcgaatgtttttcctgtttaatgatgccctgctgtatacaacaccagtgcagtctgggatgtataaactgaacaacatgctctcactggctggaatgaaggtcagaaaacctacccaagaagcctatcagaatgaattaaagattgaaagtgtagaacgttccttcattctctcagccagttctgccacagaaagggatgaatggctagaagcgatttccagggcaatagaagagtatgccaagaaaagaatcaccttctgtcctagtaggagtcttgatgaggcagactcagaaaataaagaagaagttagtcctcttggatcgaaggctcccatctggattcctgataccagagccacaatgtgtatgatctgcacaagcgaattcactctcacctggagacgacaccactgccgggcctgtggaaagattgtatgccaagcttgttcgtctaataagtatggcttagattacctgaaaaatcaaccagcaagagtatgtgaacattgtttccaagaactgcagaaattagatcaccagcactcccctaggattggatctcctggaaatcacaaatctccttcaagtgccttatcatcagtcttacatagcattccatcagggaggaaacagaaaaaaatcccagctgctctcaaagaagtatcagcaaacacagaggattcttctatgagtggctacttgtacagatcaaagggcaataaaaaaccctggaaacacttttggtttgtcataaaaaataaagtactatatacatatgctgcaagtgaggacgtggccgctttggagagtcagcctttattaggattcactgttattcaagttaaagatgagaattccgagtctaaagtatttcagttactgcacaaaaacatgttattttatgtattcaaagcagaggatgctcattcggctcagaagtggatagaagcatttcaggaaggcacaatattgtagcagtattggtttcatctcttctgtgattccaaagaggtggaatttcatcagaatggagtaaatgcaattcaaaaattgtataaaaatgaacactgccaagataaagccaaccagacccttcatcaaagaaattgttttgttaggtataagcaatttttaaaaggtgtttgttttttcatttatgttatttattaaaattttgatgtttacttaatggtcagaattatttctgagacacactgaattctaaagtaccatttctttagagaccagaaaaactatcttaatactgtatactgtattaactattcgtgacatagttcacactgttttcttaccttacattgtaacaatcttactggtggaaagtctttgtaaggaaaaaacacatagcaaggagcaaatttccacaaagtgcttggtttaggaattgtgattattataaaactgctgatgaaaaaaatgcatgtctttgaatcaataaacttgggtgaatatttgtatcttttagtg

SEQ ID NO: 12972 - protein, 432 aa, Homo sapiens
MSPRCANLALKHYLLKPVQRIPQYRLLLTDYLKNLIEDAGDYRDTQDALAVVIEVANHANDTMKQGDNFQKLMQIQYSLNGHHEIVQPGRVFLKEGILMKLSRKVMQPRMFFLFNDALLYTTPVQSGMYKLNNMLSLAGMKVRKPTQEAYQNELKIESVERSFILSASSATERDEWLEAISRAIEEYAKKRITFCPSRSLDEADSENKEEVSPLGSKAPIWIPDTRATMCMICTSEFTLTWRRHHCRACGKIVCQACSSNKYGLDYLKNQPARVCEHCFQELQKLDHQHSPRIGSPGNHKSPSSALSSVLHSIPSGRKQKKIPAALKEVSANTEDSSMSGYLYRSKGNKKPWKHFWFVIKNKVLYTYAASEDVAALESQPLLGFTVIQVKDENSESKVFQLLHKNMLFYVFKAEDAHSAQKWIEAFQEGTIL

SEQ ID NO: 12973 - DNA, 1748 bp, Homo sapiens
  CDS (113)..(721)
aggcgccacgtgggattcggcccgggtgctcttgtgagctgctgctcctgcggttggtgagattacctgggtctagagtgcggagctgctccgtggccacgaggacgtcaccatgcccaaagcaccaaagggaaaaagtgcaggacgggaaaaaaaagtcatccatccatatagtagaaaagcagctcaaattacgagagaggcccacaaacaagaaaaaaaggaaaaattgaagaatgaaaaggccttgcgtctcaaccttgttggtgaaaaactgcaatggtttcaaaatcatcctgatcccccaaaaaagagatattcaaagaaagatgcttgtgaactaattgaaaggtacttaaatcgattcagcagtgagctggagcagattgagttacataacagtatcagggacaggcaggggaggcggcactgttcccgggagaccgtcatcaagcagacgatggagcgggagcgacagcagtttgagggatatggccttgagattccagacattctaaatgcaagtaatctgaaaacatttagggaatgggactttgatctgaagaaattaccaaacattaaaatgagaaaaatttgcgctaatgatgcaattcccaagacgtgcaagaggaaaactactataactgtagaccaagatttgggggaattggaactaaacgatgaatcaagtgattcagatgaggaaatgactgcagtggcctaattgtcttcacttgaattgaaaataaataatttgagagcttcaaattatattcattgattatggtacctaattgtcaagatacaaaaatttgatactgacattctcttatatgatgagagtttcatttgcgtttcaaaaatggtgttatgatacttattttaaaatgaagattgcttttcatttccattaagttgctaaaatagatagatgtgatctgcagaagttgtttagtcttcatctgaatttcaggctgggagggagcaatataactaaggacaaaaaatgttttgtttttcttgtgtatttatgatcacctaatttcacgttttgtgaaatggacagtaacctgtttcctgaaagattcctgtgggtactttttgagctgtgataatagcaaaattgtttttcggtaataatatcacactaatgcttcctttaaacattaaacctattttccttttttacagaataagggaaaatgtgataagaagtttgtatacatttctggattatagattattatttatcttttgaaccagagctaaatggtaaaagaaaaaaaatcagtgatgattgttatgttgatctcccacaattaatttatcttttgacaaaggggataaagagtttcagtttagctccttttgattgtatattattttttgcttttttattgtgaaaagaggtaggttttatttgtggagagagagttgaagattagggaaccagtgattttaattatgctactttttcttctaagagataaattgatatatcattcagtgtcatgaaaaacatgaatgttgtacaattttcttcctcaaaaaactttttaaatgtaagtatccttattttttttttaaaagagcacaatgtaggtgtatttgagtattttcaagaaaagaataaaaacattaatgcagtattaggttaactggatatcagctaagccttgttaacagttaaagtattataactttttttacttctgaaaattaaaaataaaatttatttctgcaatttc

SEQ ID NO: 12974 - protein, 203 aa, Homo sapiens
MPKAPKGKSAGREKKVIHPYSRKAAQITREAHKQEKKEKLKNEKALRLNLVGEKLQWFQNHPDPPKKRYSKKDACELIERYLNRFSSELEQIELHNSIRDRQGRRHCSRETVIKQTMERERQQFEGYGLEIPDILNASNLKTFREWDFDLKKLPNIKMRKICANDAIPKTCKRKTTITVDQDLGELELNDESSDSDEEMTAVA

SEQ ID NO: 12975 - DNA, 1619 bp, Homo sapiens
  CDS (61)..(1326)
agttctgcggtgccagggagtggagcagagctcagccccgtcccaaacacagatgggaccatgaactccggacacagcttcagccagaccccctcggcctccttccatggcgccggaggtggctggggccggcccaggagcttccccagggctcccaccgtccatggcggtgcggggggagcccgcatctccctgtccttcaccacgcggagctgcccaccccctggagggtcttggggttctggaagaagcagccccctactaggcggaaatgggaaggccaccatgcagaatctcaacgaccgcctggcctcctacctggagaaggttcgcgccctggaggaggccaacatgaagctggaaagccgcatcctgaaatggcaccagcagagagatcctggcagtaagaaagattattcccagtatgaggaaaacatcacacacctgcaggagcagatagtggatggtaagatgaccaatgctcagattattcttctcattgacaatgccaggatggcagtggatgacttcaacctcaagtatgaaaatgaacactcctttaagaaagacttggaaattgaagtcgagggcctccgaaggaccttagacaacctgaccattgtcacaacagacctagaacaggaggtggaaggaatgaggaaagagctcattctcatgaaggagcaccatgagcaggaaatggaggagcatcatgtgccaagtgacttcaatgtcaatgtgaaggtggatacaggtcccagggaagatctgattaaggtcctggaggatatgagacaagaatatgagcttataataaagaagaagcatcgagacttggacacttggtataaagaacagtctgcagccatgtcccaggaggcagccagtccagccactgtgcagagcagacaaggtgacatccacgaactgaagcgcacattccaggccctggagattgacctgcaggcacagtacagcacgaaatctgctttggaaaacatgttatccgagacccagtctcggtactcctgcaagctccaggacatgcaagagatcatctcccactatgaggaggaactgacgcagctacgccacgaactggagcggcagaacaatgaataccaagtgctgctgggcatcaaaacccacctggagaaggaaatcaccacgtaccgacggctcctggagggagagagtgaagggacacgggaagaatcaaagtcgagcatgaaagtgtctgcaactccaaagatcaaggccataacccaggagaccatcaacggaagattagttctttgtcaagtgaatgaaatccaaaagcacgcatgagaccaatgaaagtttccgcctgttgtaaagtctattttcccccaaggaaagtccttgcacagacaccagtgagtgagttctaaaagatacccttggaattatcagactcagaaacttttatttttttttttctgtaacagtctcaccagacttctcataatgctcttaatatattgcacttttctaatcaaagtgcgagtttatgagggtaaagctctactttcctactgcagccttcagattctcatcattttgcatctattttgtagccaataaaactccgcactagc

SEQ ID NO: 12976 - protein, 422 aa, Homo sapiens
MNSGHSFSQTPSASFHGAGGGWGRPRSFPRAPTVHGGAGGARISLSFTTRSCPPPGGSWGSGRSSPLLGGNGKATMQNLNDRLASYLEKVRALEEANMKLESRILKWHQQRDPGSKKDYSQYEENITHLQEQIVDGKMTNAQIILLIDNARMAVDDFNLKYENEHSFKKDLEIEVEGLRRTLDNLTIVTTDLEQEVEGMRKELILMKEHHEQEMEEHHVPSDFNVNVKVDTGPREDLIKVLEDMRQEYELIIKKKHRDLDTWYKEQSAAMSQEAASPATVQSRQGDIHELKRTFQALEIDLQAQYSTKSALENMLSETQSRYSCKLQDMQEIISHYEEELTQLRHELERQNNEYQVLLGIKTHLEKEITTYRRLLEGESEGTREESKSSMKVSATPKIKAITQETINGRLVLCQVNEIQKHA

SEQ ID NO: 12977 - DNA, 2130 bp, Homo sapiens
  CDS (256)..(792)
gttagagaacgtcgcggaggaggtaagcgtcgcttggcgcctggccgccgcgggcaggatacaccgtgggcctgaggcgcgagcccggcggcgtgcggccctctctccgcgcggagccgagccggaactgcggcagtctctccctgccaggctcttcatccaaggtttctgtggatcccttctgaagttctatctgaaaattgcgcttaagtgaattttctgttagaagaacttggttgctactttcttgtcaagatgattgcaacacctttgaaacattcaagaatttacttacctccagaggcatcttctcaaaggagaaatctacccatggatgcaatcttttttgacagcattccttcaggcacacttactcctgtaaaagatttggtgaaatatcagaactcctccttaaaattgaatgaccataaaaagaatcagttcctaaaaatgacaacttttaacaataaaaatatatttcaatcaactatgctaacagaggctactacctctaacagttctcttgatatcagtgctataaagcccaacaaggatggattaaaaaataaagcaaactatgaatcaccaggaaaaatatttctaagaatgaaagaaaaagtactgcgtgacaagcaagaacagccatcaagaaacagtagtttgttggaaccacagaaaagtggaaataatgaaaccttcactcctaacagagttgaaaaaaaaaattgcagcatacctacctatgtgaagaaaaggaaaacaacaaatcattccagtcagatgacagttcactaagagcctcagtccaaggagttcctctagaatcatcaaataatgatattttcctcccggtcaaacaaaagattcagtgccagcaggaaaagaaagcaccactgcacaatttaacttacgaacttccaactctgaaccaagaacaggaaaattttttggctgtagaagcccgaaacaagacattaactagagctcagttggctaaacaaatttttcactcaaaggagagtatagttgcaaccactaaatccaaaaaggacacgtttgttttagaaagcgttgattctgctgatgaacaatttcaaaatactaatgctgagactctcagtactaattgtattcctattaaaaatggcagcctgttaatggtttctgatagtgagaggacaacagaagggacttcgcaacagaaagttaaggaaggaaatggaaaaacagtgcctggagagacaggtcttccaggttccatgaaagatacatgtaaaattgtacttgcaacaccaagacttcatataacaatacctcggaggtcaaaaagaaatatttcaaagctttctcctccaagaatatttcaaactgttacaaatggacttaaaaaaaatcaggtagttcagctacaggaatggatgatttaaagcatcaataataatactgctatatgtgtagaaggaaaattgatagacgtcactaacatatattggcacagtaatgtaattatagagcggattgagcacaacaaacttaggactatatcaggcaacgtttatatattaaaaggcatgatagaccaaatttccatgaaagaagcaggatatccaaattatctcataaggaaatttatgtttggatttccagaaaattggaaagagcacattgataactttctggaacaattaagagatggggtttcgtcatgttggccagactggtctcgaactcctggctacaagtgatccgcctgtctcagcctcccaaagtgttgggattacaggcatgagccactgtgcctggcctgagggctggtgaaaagaacagggaaaagaccaaacaaaaacagaaaactggaagatctgtccgtgacataaggaaatcaatgaaaaatgatgcacgagaaaaccaaacagatactgctcaaagagccaccaccacttacgattttgattgtgataatttggaactgaagagtaataagcacagtgagtcaccaggagctacagaattaaacatgtgccacagtaattgccaaaataaaccaacattaaggttcccagatgaccaagtaaataatactattcaaaatggaggaggagatgacttatctaatcaggaattaattgg

SEQ ID NO: 12978 - protein, 179 aa, Homo sapiens
MIATPLKHSRIYLPPEASSQRRNLPMDAIFFDSIPSGTLTPVKDLVKYQNSSLKLNDHKKNQFLKMTTFNNKNIFQSTMLTEATTSNSSLDISAIKPNKDGLKNKANYESPGKIFLRMKEKVLRDKQEQPSRNSSLLEPQKSGNNETFTPNRVEKKNCSIPTYVKKRKTTNHSSQMTVH

SEQ ID NO: 12979 - DNA, 1959 bp, Homo sapiens
  CDS (468)..(1934)
agctggggtccctttggagacactccaggaaaaggggggcacatacccccactgggcttttcctgatgctgacaggggctgctctggctgttcctaagtggaactcgtcaaggtggcagtgacggtgctgatggggacctcaggacttatctgatcagtttcccatcgtccttgctgggtctgttgcttcaccggcatctgtgctctgacaccattaataaccacagagtctgagagtcaggaggaagtgctgctcacactggaggaagtggctgggagagtgcaggggctggtggcagagaccgcccagagcccatcctagcccaacatggcgtgggtgtcctgggaatgaggcctgcctccagcctcaccttctccatctgggaaatgggactattgatgcagaagcctccccaaaagtggatctgagaggcatagacatcgtggttctcacggactctccaaggatgaggcctgcggaccccttgataaaggccatcaaggatggcgatgaagaggccttgaagaccatgatcaaggaagggaagaatctcgcagagcccaacaaggagggctggctgccgctgcacgaggccgcatactatggccaggtgggctgcctgaaagtcctgcagcgagcgtacccagggaccatcgaccagcgcaccctgcaggaggaaacagccgtttacttggcaacgtgcaggggccacctggactgtctcctgtcactgctccaagcaggggcagagccggacatctccaacaaatcccgagagacaccgctctacaaagcctgtgagcgcaagaacgcggaggccgtgaagattctggtgcagcacaacgcagacaccaaccaccgctgcaaccgcgactggaccgctctgcacgagtctgtgtctcgcaatgacctggaggtcatgcagatcctggtgagcggaggagccaaggtggaatccaagaatgcctacggcatcacccccttgttcgtggccgcccagagtggacagttggaggccttgaggttcttagccaagtacggtgctgacatcaacacgcaggccagcgacaacgcgtctgccctctacgaggcctgcaagaatgagcatgaggaggtggtggagtttctgctgtcacagggtgccgacgccaacaagaccaacaaggacggcttgctcccgctgcacatcgcctccaagaagggcaactacaggatcgtgcagatgctgctgccggtgaccagccgcacgcgcatacgccgtagcggcgtcagtccgctgcacctggcggccgagcgcaaccacgacgaggtgctggaggcgctgctgagcgcgcgcttcgacgtgaacacgccgctggcgcccgagcgcgcgcgcctctacgaagaccggcgcagctccgcgctgtacttcgcggtggtcaacaacaacgtgtacgccaccgagctgctgctgcaacacggcgccgaccccaaccgcgacgtcatcagccccttgctcgtggccatccgccacggctgcctgcgcacaatgcagctgctgctggaccacggcgcgaacatcgacgcctatatcgccacgcaccccaccgccttccccgccaccatcatgttcgccatgaagtgcctgtcgctgctcaagttcctcatggacctgggctgcgacggcgagccctgcttctcatgcctctacggcaacggcccgcacccgccggccccgcagccctccagcaggttcaacgacgcgcccgcggccgacaaggagcccagcgtggtgcagttctgtgagttcgtatctgccccagaggtgagccgctgggcggggcccatcatcgatgtcctcctggactacgtgggcaacgtgcagctctgctcgcggctgaaggaacacatcgacagctttgaggactgggtcttggagggctttgttaagtattaatataataaatgttacacatgtg

SEQ ID NO: 12980 - protein, 489 aa, Homo sapiens [sequence omitted]

SEQ ID NO: 12981 - DNA, 1775 bp, Homo sapiens
  CDS (52)..(1590)
tattgagcgccgactgtctacgggcggccgggggagaggagaggcagcagcatggcgagtgtcctgtcccgacgccttggaaagcggtccctcctgggagcccgggtgttgggacccagtgcctcggaggggccctcggctgccccaccctcggagccactgctagaaggggccgctccccagcctttcaccacctctgatgacaccccctgccaggagcagcccaaggaagtccttaaggctcccagcacctcgggccttcagcaggtggcctttcagcctgggcagaaggtttatgtgtggtacgggggtcaagagtgcacaggactggtggagcagcacagctggatggagggtcaggtgaccgtctggctgctggagcagaagctgcaggtctgctgcagggtggaggaggtgtggctggcagagctgcagggcccctgtccccaggcaccacccctggagcccggagcccaggccctggcctacaggcccgtctccaggaacatcgatgtcccaaagaggaagtcggacgcagtggaaatggatgagatgatggcggccatggtgctgacgtccctgtcctgcagccctgttgtacagagtcctcccgggaccgaggccaacttctctgcttcccgtgcggcctgcgacccatggaaggagagtggtgacatctcggacagcggcagcagcactaccagcggtcactggagtgggagcagtggtgtctccaccccctcgcccccccacccccaggccagccccaagtatttgggggatgcttttggttctccccaaactgatcatggctttgagaccgatcctgaccctttcctgctggacgaaccagctccacgaaaaagaaagaactctgtgaaggtgatgtacaagtgcctgtggccaaactgtggcaaagttctgcgctccattgtgggcatcaaacgacacgtcaaagccctccatctgggggacacagtggactctgatcagttcaagcgggaggaggatttctactacacagaggtgcagctgaaggaggaatctgctgctgctgctgctgctgctgccgcaggcaccccagtccctgggactcccacctccgagccagctcccacccccagcatgactggcctgcctctgtctgctcttccaccacctctgcacaaagcccagtcctccggcccagaacatcctggcccggagtcctccctgccctcaggggctctcagcaagtcagctcctgggtccttctggcacattcaggcagatcatgcataccaggctctgccatccttccagatcccagtctcaccacacatctacaccagtgtcagctgggctgctgccccctccgccgcctgctctctctctccggtccggagccggtcgctaagcttcagcgagccccagcagccagcacctgcgatgaaatctcatctgatcgtcacctctccaccccgggcccagagtggtgccaggaaagcccgaggggaggctaagaagtgccgcaaggtgtatggcatcgagcaccgggaccagtggtgcacggcctgccggtggaagaaggcctgccagcgctttctggactgagctgtgctgcaggttctactctgttcctggccctgccggcagccactgacaagaggccagtgtgtcaccagccctcagcagaaaccgaaagagaaagaacggaaacacggagtttgggctctgttggctaaggtgtaacacttaaagcaattttctcccattgtgcgaacattttatttttt

SEQ ID NO: 12982 - protein, 513 aa, Homo sapiens
MASVLSRRLGKRSLLGARVLGPSASEGPSAAPPSEPLLEGAAPQPFTTSDDTPCQEQPKEVLKAPSTSGLQQVAFQPGQKVYVWYGGQECTGLVEQHSWMEGQVTVWLLEQKLQVCCRVEEVWLAELQGPCPQAPPLEPGAQALAYRPVSRNIDVPKRKSDAVEMDEMMAAMVLTSLSCSPVVQSPPGTEANFSASRAACDPWKESGDISDSGSSTTSGHWSGSSGVSTPSPPHPQASPKYLGDAFGSPQTDHGFETDPDPFLLDEPAPRKRKNSVKVMYKCLWPNCGKVLRSIVGIKRHVKALHLGDTVDSDQFKREEDFYYTEVQLKEESAAAAAAAAAGTPVPGTPTSEPAPTPSMTGLPLSALPPPLHKAQSSGPEHPGPESSLPSGALSKSAPGSFWHIQADHAYQALPSFQIPVSPHIYTSVSWAAAPSAACSLSPVRSRSLSFSEPQQPAPAMKSHLIVTSPPRAQSGARKARGEAKKCRKVYGIEHRDQWCTACRWKKACQRFLD

SEQ ID NO: 12983 - DNA, 2041 bp, Homo sapiens
  CDS (119)..(1117)
gagagattctgctaaggataaagagaaaggcaaacatgatgatggacggaaaaaggaagcagaaattatcaaacaattgaagattgaactcaagaaggcacaggagagccaaaaggagatgaaactattgctggatatgtaccgttctgccccaaaggaacagagagacaaagttcagctgatggcagctgagaagaagtctaaggcagagttggaagatctaaggcaaagactcaaggatctggaagataaagagaagaaagagaacaagaaaatggctgatgaggatgccttgaggaagatccgggcagtggaggagcagatagaatacctacagaagaagctagccatggccaagcaggaagaagaagcactcctctctgaaatggatgtcacaggccaggcctttgaagacatgcaggagcaaaatatccgtttgatgcagcaattgcgggagaaggatgatgcaaatttcaagctcatgtcagagcgtatcaagtccaatcagatccataagttgcttaaagaagagaaggaggagctggcagaccaggtgttgactctgaagactcaggttgatgcccagctacaggtagtaaggaaactggaagagaaggagcatctgttacagagcaacattggcacaggggagaaagagctgggtcttaggacccaagccttagagatgaataaacgcaaggcaatggaggcagcccagcttgcagatgacctcaaagcacaactggagttggctcagaagaagctacatgattttcaggatgagatcgtggagaacagtgttaccaaagaaaaggacatgttcaatttcaaacgagcccaggaggacatctctagacttcgcaggaagctggagaccacaaagaaaccagacaatgtacccaagtgtgatgagattctgatggaagagattaaggattacaaggcacgcttgacctgtccatgctgtaacatgcgtaaaaaggatgctgttcttactaagtgttttcatgtcttctgctttgagtgtgtgaagacacgctatgacacccgccagcgcaaatgtcccaagtgtaatgctgcttttggtgccaatgattttcatcgcatctacattggttgatctaagtcaagagaagaagaggagctggctagtcaggaacttattcattaaccaccaaacctctacctcttctctccttgactgtcacctgtaggacagtttatcagtcaactacctttcctccagactttacttccaggctttcctcttcagtagctggatgactttagcagaaaggactggtaaatacaagccttgggtttcagaatgaattagaaacaaataactcttactgtcttccctcccagctttgtttattttgtgcttttagacttttcagtgttttctttttccagcccactgtataaacttggattgtccattcctcctgaagaaatcaagttggtatttttgatgtggaaaagggaacaaaagtggaaacatggctacttttggggagtgatattttaaaaaataagttgtctatgggcacaaagttttcttcatttgtgtagcaaacttcttgtgaatgtggattacaaaatggtataattgtgctactctcccctgggtggtttgcagccctaatgaaattatgtctaggatgattcagtctatttcccatttactagcagagtaacttgttaagatcagctggctttcttgttaaagttatttaagttttgaatgctctactacttcaagtctttaaatttcttgagactagaataattttaaataatatgaccctttgtcttctaatgaaataaagattgaagaggttgagtcaggactgagctggtgaagaaatcttgtgggtattctggaaatttgatacggagagaacttggtgagctatgaattactctcagtctcctttttacagggttgttgtgatccctcttttccagaaaattctgtggaatgtttctgtaggactttgttctccacaagcttgaattaaagcaggattcagtttgc

SEQ ID NO: 12984 - protein, 333 aa, Homo sapiens
MKLLLDMYRSAPKEQRDKVQLMAAEKKSKAELEDLRQRLKDLEDKEKKENKKMADEDALRKIRAVEEQIEYLQKKLAMAKQEEEALLSEMDVTGQAFEDMQEQNIRLMQQLREKDDANFKLMSERIKSNQIHKLLKEEKEELADQVLTLKTQVDAQLQVVRKLEEKEHLLQSNIGTGEKELGLRTQALEMNKRKAMEAAQLADDLKAQLELAQKKLHDFQDEIVENSVTKEKDMFNFKRAQEDISRLRRKLETTKKPDNVPKCDEILMEEIKDYKARLTCPCCNMRKKDAVLTKCFHVFCFECVKTRYDTRQRKCPKCNAAFGANDFHRIYIG

SEQ ID NO: 12985 - DNA, 1720 bp, Homo sapiens
  CDS (673)..(1440)
gactgcagatgaaattagtaactggtggggtcgtggggtgtgaatggtgggcgggagcagctatgtcagttggtgtgtttctgcttatgttagggtaattgggcacggcctttgtgtaactggtgaatatctctgaacctgggcatgaaacagagagatgtcctaactctgggtgagaggaatcctcatttttctctgccctctcactgtggcatcctaagaaaaaagttttgggttcctgcagcatgaaggagagctctgctcccagaatttgggagctccagatttcttccagggtgtggaggcatcaatatatcagtctgggaaaggggttcctgggccactccaggagctgagttgggtggaaggtgctgagagtgtgggtgggggccacttctgagcacccatgtggcacccactgctggtccctgtttgtggctgggcactcaggaaaatgtttttggtgctaagagtaaaaagccaaccaacaaacacatctcttttttctgtctattcactggaaagtaaaagcagtctgggcgcaggctggggacccagatggaattcaaacttatgcctgctctcaaggtgctcacggttgctgataaacagctggataaaatgaagagtctatgagtgagggatgcagagccagggaaggctggtggagtgatgccaccagcacaggggtatgagtttgcagctgccaaggggccaagggatgagctggggccctccttcccaatggcatctccccctggtctggaactgaagacactgagcaatggtccccaagccccaaggagatcagctcccctgggcccagtggccccaaccagggagggtgtggagaatgcctgcttctcctcagaggagcatgagacccatttccagaaccctgggaacacgagactgggcagctcacccagtccccctgggggtgtctcctcactgccccgatcccagcgggatgatctgtcccttcattcagaggaggggccagccctggagcccgtgagccgcccggtggattatggctttgtttccgccctcgttttcctggtgagtgggattcttctggtggtgacagcatacgccatcccccgtgaggctcgagtcaatccggacacagtgacagcgcgggagatggaacgactggagatgtactacgcccgcctaggctcccacctggacaggtgcatcatcgcaggcctcgggctgctcacggtgggcggcatgctcttgtcggtgctgctcatggtctccctgtgcaagggcgagctgtaccgccggaggaccttcgtccccggcaagggctccaggaagacctacggctccattaacctgcgcatgagacagctcaatggggatgggggccaggccctggtggagaatgaagttgtccaggtctcagagactagccacaccctccagaggtcttaagaactagcccaccttatctggctgctttagctccagtgctacaaggtccaccccctgctcccgcccacctgacccctgccaaggccctggggttttaaactgagctcacatagggccttgtggaagaagtactgggtgctggagggagagctcggggcccagcccatgccccacacgggcaagcagcccactgatctgttttgtagctgaggttttgcatacggttttgtttggaggatggcttctgctgctaaaaatacaaaagtttggaaaccgc

SEQ ID NO: 12986 - protein, 256 aa, Homo sapiens
MPPAQGYEFAAAKGPRDELGPSFPMASPPGLELKTLSNGPQAPRRSAPLGPVAPTREGVENACFSSEEHETHFQNPGNTRLGSSPSPPGGVSSLPRSQRDDLSLHSEEGPALEPVSRPVDYGFVSALVFLVSGILLVVTAYAIPREARVNPDTVTAREMERLEMYYARLGSHLDRCIIAGLGLLTVGGMLLSVLLMVSLCKGELYRRRTFVPGKGSRKTYGSINLRMRQLNGDGGQALVENEVVQVSETSHTLQRS

SEQ ID NO: 12987 - DNA, 2264 bp, Homo sapiens
  CDS (105)..(1769)
aaacggatcgcgttgggtgaaggtgacggcgtcgagccattgacttccaaagactcctggcacatgaggaagaaacccagaagaggagagcaaaggagtcaggaatggcttttactcagttgacattcagggacgtggccatcgaattctctcaagatgagtggaaatgcctgaactctacacagaggactttatacagggatgtgatgttggagaactacaggaacctggtctccctggatctgtctcgtaactgtgtaatcaaggaactagcaccacaacaggaaggtaacccaggagaagtattccacacagtgacattggaacaacatgaaaaacatgacattgaagagttttgcttcagggaaatcaagaaaaaaatacacgactttgactgtcagtggagagatgatgaaagaaattgcaacaaagtgactacggccccaaaagaaaatcttacttgtaggagagaccaacgcgatagaagaggtataggaaacaagtctattaaacatcagcttggattaagctttctaccacatccccatgaactgcagcagtttcaagctgaagggaaaatttatgaatgtaaccatgttgagaagtctgtcaaccatggttcctcagtttcaccaccccaaatactttcttctaccgtcaaaacccatgtttctaataaatatgggactgatttcatctgttcttcattactcacacaagaacagaaatcatgcattagggaaaaaccttacagatatattgagtgcgacaaagccttgaatcatggctcacacatgactgtacgtcaggtaagtcattctggagagaaaggatataaatgtgatctgtgtggcaaggtctttagtcaaaaatcaaaccttgcgcgtcattggagagttcatactggagagaaaccatacaaatgtaatgaatgtgacagaagtttcagtcgcaactcatgccttgcactacatcggagagttcacactggagagaaaccttacaaatgttatgagtgtgacaaggtcttcagtcgaaattcatgccttgcactacatcagaaaactcatattggagagaaaccttacacgtgtaaagagtgtggcaaagcctttagtgtgaggtcaacacttaccaaccatcaggtaattcatagtggcaagaaaccttacaaatgcaatgaatgtggcaaggtgttcagtcagacttcaagccttgcaactcatcagagaattcacactggggagaaaccatacaagtgtaatgaatgtggtaaagtcttcagtcagacttcaagccttgcaaggcattggagaattcatactggagagaaaccttacaaatgcaatgaatgtggtaaggttttcagttacaattcacaccttgcgagtcatcggagagttcatactggagagaaaccttacaagtgtaatgagtgtgggaaagcctttagtgtgcattcgaacttaactacccatcaggtcatccatactggagagaagccttacaaatgtaatcaatgtggcaaaggcttcagtgtgcattcaagcctaactacccatcaggtcatccatactggagaaaaaccttacaaatgtaatgagtgtggcaaatcctttagtgtgcgcccaaacctcactagacatcagataatccatactggaaagaaaccttacaaatgtagtgattgtgggaagtcctttagtgtgcgcccaaacctcttcagacatcaaattatccatactaaggagaaaccttataaaagaaattaatatggcaaggtcttcagtcaaagtttaaatcctgtgagtcatcaaagaatttatatcagagagaaaccatacaagtataataaatgtggcaaggttttcagtcacaattcactcctacacagcatcagagaatttcattcttgagagaatccttacaagtacagcaaacccttcatcacaagttcaagcattcattgacatcagagtccatgctaaagagaaatcatatacacctaactgtgtggcagaggcttcatttaggtctcacaactcactagacatcaaaatgtgtaaacatctttgtatattttgtgcatgttgaagctattaaccaaggatcaaaactgtaacacatccaaggatttatgtgaggaataattcagtctagttgtgctgataaacttttcatattacacattgtagaacaaatgcaagcccaaatgtgttaaaactcacacaacatgatatatattaaaggttgcaggatgtttg

SEQ ID NO: 12988 - protein, 555 aa, Homo sapiens
MAFTQLTFRDVAIEFSQDEWKCLNSTQRTLYRDVMLENYRNLVSLDLSRNCVIKELAPQQEGNPGEVFHTVTLEQHEKHDIEEFCFREIKKKIHDFDCQWRDDERNCNKVTTAPKENLTCRRDQRDRRGIGNKSIKHQLGLSFLPHPHELQQFQAEGKIYECNHVEKSVNHGSSVSPPQILSSTVKTHVSNKYGTDFICSSLLTQEQKSCIREKPYRYIECDKALNHGSHMTVRQVSHSGEKGYKCDLCGKVFSQKSNLARHWRVHTGEKPYKCNECDRSFSRNSCLALHRRVHTGEKPYKCYECDKVFSRNSCLALHQKTHIGEKPYTCKECGKAFSVRSTLTNHQVIHSGKKPYKCNECGKVFSQTSSLATHQRIHTGEKPYKCNECGKVFSQTSSLARHWRIHTGEKPYKCNECGKVFSYNSHLASHRRVHTGEKPYKCNECGKAFSVHSNLTTHQVIHTGEKPYKCNQCGKGFSVHSSLTTHQVIHTGEKPYKCNECGKSFSVRPNLTRHQIIHTGKKPYKCSDCGKSFSVRPNLFRHQIIHTKEKPYKRN

SEQ ID NO: 12989 - DNA, 1793 bp, Homo sapiens
  CDS (165)..(1436)
attcaagtcctggcttgagagccgagcggcaagagcgcgggccggggaagggaagagtaggagaggaagccgcgagggagaacaggcgagctactgtctcctttggaaaagaaccagtgacgcgccgcctgggagctggagcccgcgcagcgccccgcagggcgatggacggccgaaccccgcgcccgcaggacgccccagccaggagaaaaccaaaagccaaggcaccacttcctccagctgagaccaaatatactgatgtctcttcagctgctgattctgtagaatccactgctttcatcatggaacagaaagaaaacatgatagataaagacgttgaactctcagtggtcctacctggggatattatcaaatctactactgttcatggcagtaaacctatgatggacttgttgatattcctttgtgcacagtatcacttaaatccatcaagttacacaatcgatctgttgtcagctgaacagaaccacattaaatttaagccaaacacaccaataggaatgttggaggtagagaaggtaattttaaagccgaaaatgttggataagaaaaaacctacacctataataccagagaaaactgtgagagtagtgattaattttaagaaaacacagaagaccatagtgagagtgagtccacatgcatcgcttcaagagcttgcccctattatatgtagcaaatgtgagtttgatccgttgcatacactattgttgaaagattatcaatcgcaggagcctcttgacttgacaaaatctcttaatgacctgggactaagagaattatatgcgatggatgtcaacagagccacttctgttactgtcttcagtaagtcatctttacaagagtcctgccaaatatcacaaaacctagatattatgaaggagaaagaaaataaagggtttttcagtttttttcaacgcagtaagaaaaagcgagaccaaactgcaagtgcccctgcaacccctctagtaaataagcaccgcccaacttttacaaggtccaataccatttccaaaccatatatttccaacaccctgccgtcggatgcacccaagaagaggcgggctccactgcccccgatgccagcatctcagagtgtcccccaagaccttgcacacatccaggagaggcctgcttcttgtatagtgaaatccatgagcgtggatgagacagataagagtccctgtgaagcaggaagagtgagggcaggttcactgcagctcagcagcatgtctgcagggaattcatctttgagaaggacaaagcgaaaagcaccttccccaccctccaaaatacccccgcatcaaagtgatgaaaatagtcgtgtgactgccttacagccagtagatggagttcctccagacagtgcttcagaagcaaactctcctgaggagctatccagcccaggaaacatttaggaggaacactcttgaatctttcatctttaagtgaaacctttcaccctgggctttccagtcaggagcagtgcactgcgcccaaactgatggaggaaacctctgtctttgagtgccctgggacacctgaggcagccataacatcattgacatctggaataagctctgattatagccttgaagagatagatgaaaaggaagaactgagtgaagtgcctaaagttgaagctgaaaatatttctccgaagtcacaagatattccttttgtatctactgatataataaatacactgaaaaatgatcctgactcagcccttggcaatggtagtggagagttctcacaaaactccatggaag

SEQ ID NO: 12990 - protein, 424 aa, Homo sapiens
MDGRTPRPQDAPARRKPKAKAPLPPAETKYTDVSSAADSVESTAFIMEQKENMIDKDVELSVVLPGDIIKSTTVHGSKPMMDLLIFLCAQYHLNPSSYTIDLLSAEQNHIKFKPNTPIGMLEVEKVILKPKMLDKKKPTPIIPEKTVRVVINFKKTQKTIVRVSPHASLQELAPIICSKCEFDPLHTLLLKDYQSQEPLDLTKSLNDLGLRELYAMDVNRATSVTVFSKSSLQESCQISQNLDIMKEKENKGFFSFFQRSKKKRDQTASAPATPLVNKHRPTFTRSNTISKPYISNTLPSDAPKKRRAPLPPMPASQSVPQDLAHIQERPASCIVKSMSVDETDKSPCEAGRVRAGSLQLSSMSAGNSSLRRTKRKAPSPPSKIPPHQSDENSRVTALQPVDGVPPDSASEANSPEELSSPGNI

SEQ ID NO: 12991 - DNA, 2719 bp, Homo sapiens
  CDS (115)..(1440)
aaaaaaaaaaaaaagcgcttccgcccggagagagctggccgggttgaggcgccggctttcccgggtcttctccagctgccaccgctttactgcaaaactgacgggcgcaaaaacatgagtgactccgcgggagggcgcgctggtctccggcgttaccccaagctcccagtgtgggtggtggaggatcatcaggaggttctaccctttatataccgggccataggctcaaagcatcttcctgccagtaatgtaagttttttacatttcgactcacatccagacctccttattcctgtgaatatgccagcagacaccgtgtttgataaggaaacactctttggagaattaagtattgaaaattggattatgcctgcagtttatgctggccatttttcacatgtaatatggtttcatcccacgtgggctcagcagatcagagagggcagacaccactttttagtaggcaaagacacttctaccacaacaatcagggttacaagtacagatcattatttcctaagtgatggtctgtatgtacctgaagaccagctagagaaccaaaaacctttacaattggatgtaattatggtaaaaccttataagctctgtaacaatcaagaagaaaacgatgcagtgtcttctgctaagaaaccaaagctagccctggaagattcggaaaacactgcctctactaactgtgactcttctccagaaggactggaaaaggacacagcaacacagagaagtgaccagacttgcctagaaccatcatgttcatgttcttctgaaaatcaggaatgccagactgctgccagcactggggaaattctggaaattttgaagaaagggaaggcatttgttttagatattgacttggattttttttcagtcaagaatcccttcaaagaaatgttcactcaggaagagtacaaaatcttacaagagctgtaccaatttaagaaacctggcaccaacctaacagaggaagatttggtagatattgttgatactcgaattcatcaattagaggatttagaagccactttcgctgatttgtgtgatggtgatgatgaagaaacggtacagagatgggcttcaaaccctggaatggaatcactagttccccttgtacagagtttgaaaaaacggatggaagtaccagactatgaaatggttcaccaggctggtttaacctgcgattattcagaacttcctcaccatatcagcacagaacaagaaatagagtgtcttattcaatctgtgcattatttgctgaaaaatttaccaaatcctactcttgtgacaattgcaaggtcaagtctggatgattactgtccttctgaccaagttgacactattcaagaaaaggtcctcaatatgctacgtgccctctatggaaatctagacctccaagtgtatgcagcagagtctcctccatcttgaaacaaacaaaacattaggctcctgttgtatcttggtttagtaacaggcccttaattaacttatttgtacatgagtcttccagagaacactgttttatattaactttcagttgaaatctttcagatattttgaatctctgaacaaccattgtcagttgtgaatgatggtaaattttttggcatcaagtctcataaccccaactgatagaactgttgcttatctgtcttccttaagtattttttagggttttgtttttttttttgtttgtttgtttgtttgtcttcacttttcccccaggtctgttgagctgtatgagattcattcatacttcatttattcattcaactaatatttgttgaacacttacatgtaccagacattattaagtgctgggtatatggtaatgaacagaatagacaaggcccctgcccttttaggggagacagatgagaagtaaattacgggttatgagaaatgttatgaaggaaaggacaacaacagacatgtcttagtacttagggtatcatggctttataggaaagtaacattctctatcttttttttttttttaattttataaaaatagagatggggtctcaccatgttacccaggctggtctcaaactcctgggcacaagcaatccacctgccttcgcctcccgaagtgctgggattacagatgtaagtcactaccccagccagaaactaacattctcaaaagctactaccaaaaaaaccccacaaatttgccaatccatgaaagtatcataggaagtctacctttccaaggaatttggcattgtggccctgctcttgccaaatgctctccagcattgttggtatcaaggtggtctggttgagtaaacttgaccaaacaaaaattaactgttttttgcttttctgtttttgttttgctgatcaaaaaagcccttcagggtctcttgtgcatccaggaggtcattgtagatatcaataatatagtgcctaagtgccactttattgccaagtctagattgatacttttttcagataaaccagctttttatgtaaagagtaagggaaaaagttaaatctttaattctgacctgccataaatacccaaagatataaactgtcttccaccgcccccctcataactaagacatccttcctgagtcactcttaatcatgaaacttgattttctcaattggccagtcttctgatctttagtatctctttagttcagtaatttttacctacctacttgatttattttcctttaaaaggtgaaatgac

SEQ ID NO: 12992 - protein, 442 aa, Homo sapiens
MSDSAGGRAGLRRYPKLPVWVVEDHQEVLPFIYRAIGSKHLPASNVSFLHFDSHPDLLIPVNMPADTVFDKETLFGELSIENWIMPAVYAGHFSHVIWFHPTWAQQIREGRHHFLVGKDTSTTTIRVTSTDHYFLSDGLYVPEDQLENQKPLQLDVIMVKPYKLCNNQEENDAVSSAKKPKLALEDSENTASTNCDSSPEGLEKDTATQRSDQTCLEPSCSCSSENQECQTAASTGEILEILKKGKAFVLDIDLDFFSVKNPFKEMFTQEEYKILQELYQFKKPGTNLTEEDLVDIVDTRIHQLEDLEATFADLCDGDDEETVQRWASNPGMESLVPLVQSLKKRMEVPDYEMVHQAGLTCDYSELPHHISTEQEIECLIQSVHYLLKNLPNPTLVTIARSSLDDYCPSDQVDTIQEKVLNMLRALYGNLDLQVYAAESPPS

SEQ ID NO: 12993 - DNA, 1701 bp, Homo sapiens
  CDS (909)..(1529)
aagaaacctaaaggctgcaggctgccaggtgtgcttggagagcccccttcttccgccgggcctcgcaagcagcgtaggactgtggagaagggcggtgggcaaggagggaactcgagagcagcctccatgggcacacaggagggctggtgcctgctgctctgcctggctctatctggagcagcagaaaccaagccccacccagcagaggggcagtggcgggcagtggacgtggtcctagactgtttcctggtgaaggacggtgcgcaccgtggagctctcgccagcagtgaggacagggcaagggcctcccttgtgctgaagcaggtgccagtgctggacgatggctccctggaggacttcaccgatttccaagggggcacactggcccaagatgacccacctattatctttgaggcctcagtggacctggtccagattccccaggccgaggccttgctccatgctgactgcagtgggaaggaggtgacctgtgagatctcccgctactttctccagatgacagagaccactgttaagacagcagcttggttcatggccaacgtgcaggtctctggagggggacctagcatctccttggtgatgaagactcccagggtcgccaagaatgaggtgctctggcacccaacgctgaacttgccactgagcccccaggggactgtgcgaactgcagtggagttccaggtgatgacacagacccaatccctgagcttcctgctggggtcctcagcctccttggactgtggcttctccatggcaccgggcttggacctcatcagtgtgggtggcgactgcagcacaagggcaggggtcagttggtgtacagctggaccgcagggcaggggcaggctgtgcggaagggcgctaccctggagcctgcacaactgggcatggccagggatgcctccctcaccctgcccggcctcactatacaggacgaggggacctacatttgccagatcaccacctctctgtaccgagctcagcagatcatccagctcaacatccaagcttcccctaaagtacgactgagcttggcaaacgaagctctgctgcccaccctcatctgcgacattgctggctattaccctctggatgtggtggtgacgtggacccgagaggagctgggtggatccccagcccaagtctctggtgcctccttctccagcctcaggcaaagcgtggcaggcacctacagcatctcctcctctctcaccgcagaacctggctctgcaggtgccacttacacctgccaggtcacacacatctctctggaggagccccttggggccagcacccaggttgtcccaccagagcggagaacagccttgggagtcatctttgccagcagtctcttccttcttgcactgatgttcctggggcttcagagacggcaagcacctacaggacttgggctgcttcaggctgaacgctgggagaccacttcctgtgctgacacacagagctcccatctccatgaagaccgcacagcgcgtgtaagccagcccagctgacctaaagcgacatgagactactagaaagaaacgacacccttccccaagcccccacagctactccaacccaaacaacaaccaagccagtttaatggtaggaatttgtattttttgcctttgttcagaatacatgacattggtaaatatgccacatgcctttggtggaagt

SEQ ID NO: 12994 - protein, 207 aa, Homo sapiens
MARDASLTLPGLTIQDEGTYICQITTSLYRAQQIIQLNIQASPKVRLSLANEALLPTLICDIAGYYPLDVVVTWTREELGGSPAQVSGASFSSLRQSVAGTYSISSSLTAEPGSAGATYTCQVTHISLEEPLGASTQVVPPERRTALGVIFASSLFLLALMFLGLQRRQAPTGLGLLQAERWETTSCADTQSSHLHEDRTARVSQPS

SEQ ID NO: 12995 - DNA, 2618 bp, Homo sapiens
  CDS (54)..(737)
tcatcaacagcaaaaacttcgaccgagagattggccacaataaccccagtgccatggcagtggagtcattcacggcaacagccccctttgtccaaattggcaggtttttcctctcgtcaggcctcatcgacaaagtcgacaacttcaagtccctgagcctatccaagctggaggaccctcatgtggacatcattcgccgtggagactttttctaccacagcgaaaatcccaagtatccagaggtgggagacttgcgtgtctccttttcctatgctggactgagcggcgatgaccctgacctgggcccagctcacgtggtcactgtgattgcccggcagcggggtgaccagctagtcccattctccaccaagtctggggataccttactgctcctgcaccacggggacttctcagcagaggaggtgtttcatagagaactaaggagcaactccatgaagacctggggcctgcgggcagctggctggatggccatgttcatgggcctcaaccttatgacacggatcctctacaccttggtggactggtttcctgttttccgagacctggtcaacattggcctgaaagcctttgccttctgtgtggccacctcgctgaccctgctgaccgtggcggctggctggctcttctaccgacccctgtgggccctcctcattgccggcctggcccttgtgcccatccttgttgctcggacacgggtgccagccaaaaagttggagtgaaaagaccctggcacccgcccgacacctgcgtgagccctaggatccaggtcctctctcacctctgacccagctccatgccagagcaggagccccggtcaattttggactctgcaccccctctcctcttcaggggccagattggcagcatgtgcaccaggttggtgttcaccagctcatgtcttccccacatctcttcttgccagtaagcagctttggtgggcagcagcagctcatgaatggcaagctgacagcttctcctgctgtttccttcctctcttggactgagtgggtacggccagccactcagccattggcagctgacaacgcagacacgctctacggaggcctgctgataaggggctcagccttgccgtgtgctgcttctcatcactgcacacaagtgccatgctttgccaccaccaccaagcacatctgtgatcctgaagggcggccgttagtcattactgctgagtcctgggtcaccagcagacacactgggcatggacccctcaaagcaggcacacccaaaacacaagtctgtggctagaacctgatgtggtgtttaaaagagaagaaacactgaagatgtcctgaggagaaaagctggacatatactgggcttcacacttatcttatggcttggcagaatctttgtagtgtgtgggatctctgaaggccctatttaagtttttcttcgttactttgctgcttcatgtttactttcctaccccaagaggaagttttctgaaataagatttaaaaacaaaaaaaacacttaatatttcagactgttacaggaaacaccctttagtctgtcagttgaattcagagcactgaaaggtgttaaattggggtatgtggtttgattgataaaaagttacctctcagtattttgtgtcactgagaagctttacaatggatgcttttgaaacaagtatcagcaaaaggatttgttttcactctgggaggagagggtggagaaagcacttgctttcatcctctggcatcggaaactcccctatgcacttgaagatggtttaaaagattaaagaaacgattaagagaaaaggttggaagctttatactaaatgggctccttcatggtgacgccccgtcaaccacaatcaagaactgaggcctgaggctggttgtacaatgcccacgcctgcctggctgctttcacctgggagtgctttcgatgtgggcacctgggcttcctagggctgcttctgagtggttctttcacgtgttgtgtccatagctttagtcttcctaaataagatccacccacacctaagtcacagaatttctaagttccccaactactctcacacccttttaaagataaagtatgttgtaaccaggatgtcttaaatgattctttgtgtaccttttctgtcatattcagaaaccgttttgtgcctgctgggagtaattcctttagcaattaagtatttggtagctgaataaggggtcagaacttctgaaaccagagatctgtaatcatctctattggcctggggtgcctgtgctataaatgagtttcttcacatgaaaaacacagccagcccaagatgacttatctgggtttaggattcaatagtattcactaactgcttattacatgagcaatttcatcaaatctccaaactcttaaaggatgctttcggaaaacacgctgtatacctagatgatgactaaatgcaaaatccttgggctttggtttttttctagtaaggattttaaataactgccgacttcaaaagtgttcttaaaacgaaagataatgttaagaaaaatttgaaagctttggaaaaccaaatttgtaatatcattgtattttttattaaaagttttgtaataaatttctaaattatc

SEQ ID NO: 12996 - protein, 228 aa, Homo sapiens [sequence omitted]

SEQ ID NO: 12997 - DNA, 1952 bp, Homo sapiens
  CDS (59)..(832)
aaaatttaaatctcgggcttcaaatgcccaggccaaacccagctctttttttttgcagatgcagaagagagtatcgggtcactatgtgacatctgcagctgccaagagtgtccatgctgcccctaatcctgctccaaaagaactgacaaataaagaggcagaaagggatatgctgccttctccggagcagactctttctcccttaagtaaaatgcctcactctgttccacaaccccttgttgaaaaaactgatgatgatgtcatcggtcaggctcctgctgaagcctcccctcctcccatagctccaaaacctgtgacaattcctgctagtcaggtatccacacaaaatctgaagactttgaaaacttttggtgccccacgaccatactcaagttctggtccttcaccgtttgctcttgctgtagtgaaaaggtcacagtctttcagtaaagagcgcaccgagtcacctagtgccagtgcattggtccaacctccagccaacacagaggaagggaagactcattctgtaaataaatttgtggacatcccacagcttggtgtgtctgataaggaaaataactctgcacataatgaacagaattcccaaataccaactccaactgatggcccatcattcactgttatgagacaaagttctttaacattccaaagctctgacccagaacagatgcgacagagtttgctgactgcaatccgttcgggagaggctgctgccaaattgaaaagggttaccattccatcaaatacaatatctgtgaatggaaggtcaagactcagccattccatgtcccctgatgcccaggacggccattaaatgttaccctgccacaccactgcacttcacttccacttcagaccaacttcatactaatggaacattttggcaaatgtatattcagatgtacactaatatattatctattaaaatattagaatttgtgttgtggcttttaatgccagaagaaaagttaccagaatttataatttatagtaattttttgatcttttttttgccttaagagttgaatatgctgctttagaactttaaaacaaggtgtaaatgattttcattttttacaaatgaaaaataattcctttgtattgatttcacttaccagcacattctctacaatggtgacttagacaaaagtataagattcatagactttatatttgtatgacatacaactaggacaaacatagatatgacatttgctgcctcagtgtagcaattggaaatatttataagttatatgaaagcctgttttgggctgaaagaatgatttagaaaactagtgataccaaataagtatattcagttcaataattattttcaatgatgaatcacttagtgtgaaagacttgccttgtgtattctttatgtaattacaaatcactgtcaattttatgggaagctcatagtattttaatattttattaacatggaactcttgtttttttaatctttagaacttaaattctacaagaattttaaatattttctgtatataattatgacattgtcacacagaaattacacattttatgtgccagaagccttaaacatctttctgtgaaaatgctgatatattgtgacagttatttcacatttgatatgtagagaggaataggggttagtttatgtttatattgaaaaactttaaagactatttggaagttccagaaattctggttttaattcaagtaaaatgataaaatagtcattatatagttcagatgctaatattctaagtaataatatatatttacattgaagctaaaactgttaagcaaaacaatgcccatttgtcggcttacaactcttccggagtctagagcctgttggtgttctgtccctactttaagaatttaattgctcacttattctgaaagctttgttcaaacaagatgatattaaatttgttttcact

SEQ ID NO: 12998 - protein, 258 aa, Homo sapiens; identical to SEQ ID NO: 12499

SEQ ID NO: 12999 - DNA, 2061 bp, Homo sapiens
  CDS (72)..(1544)
gcagtcactgccgaccggctggctgggccttgcggcgtgaggaccccggcggcgccgcagtcccgcgagccatggcccagtccggcggggaggctcggcccgggcccaagacggcggtgcagatccgcgtcgccatccaggaggccgaggacgtggacgagttggaggacgaggaggagggggcggagactcggggcgccggggacccggcccggtacctcagccccggctggggcagcgcgagcgaggaggagccgagccgcgggcacagtggcaccactgcaagtggaggtgagaatgagcgtgaggacctggagcaggagtggaagcccccggatgaggagttgatcaagaaactggtggatcagatcgaattctgcttttctgatgaaaacctggagaaggacgcctttttgctaaaacacgtgaggaggaacaagctgggatatgtgagcgttaagctactcacatccttcaaaaaggtgaaacatcttacacgggactggagaaccacagcacatgctttgaagtattcagtggtccttgagttgaatgaggaccaccggaaggtgaggaggaccacccccgtcccactgttccccaacgagaacctccccagcaagatgctcctggtctatgatctctacttgtctcctaagctgtgggctctggccaccccccagaagaatggaagggtgcaagagaaggtgatggaacacctgctcaagctttttgggacttttggagtcatctcatcagtgcggatcctcaaacctgggagagagctgccccctgacatccggaggatcagcagccgctacagccaagtggggacccaggagtgcgccatcgtggagttcgaggaggtggaagcagccatcaaagcccatgagttcatgatcacagaatctcagggcaaagagaacatgaaagctgtcctgattggtatgaagccacccaaaaagaaacctgccaaagacaaaaatcatgacgaggagcccactgcgagcatccacctgaacaagtccctgaacaagagagtcgaggagcttcagtacatgggtgatgagtcttctgccaacagctcctctgaccccgagagcaaccccacatcccctatggcgggccgacggcacgcggccaccaacaagctcagcccgtctggccaccagaatctctttctgagtccaaatgcctccccgtgcacaagtccttggagcagccccttggcccaacgcaaaggcgtttccagaaagtccccactggcggaggaaggtagactgaactgcagcaccagccctgagatcttccgcaagtgtatggattattcctctgacagcagcgtcactccctctggcagcccctgggtccggaggcgtcgccaagccgagatggggacccaggagaaaagccccggtacgagtcccctgctctcccggaagatgcagactgcagatgggctacccgtaggggtgctgaggttgcccaggggtcctgacaacaccagaggatttcatggccatgagaggagcagggcctgtgtataaataccttctatttttaatacaagctccactgaaaaccaccttcgttttcaaggttctgacaaacacctggcatgacagaatggaattcgttcccctttgagagattttttattcatgtagacctcttaatttatctatctgtaatatacataaatcggtacgccatggtttgaagaccaccttctagttcaggactcctgttcttcccagcatggccactattttgatgatggctgatgtgtgtgagtgtgatggccctgaagggctgtaggacggaggttccctgggggaagtctgttctttggtatggaatttttctctcttctttggtatggaatttttcccttcagtgactgagctgtcctcgataggccatgcaagggcttcctgagagttcaggaaagttctcttgtgcaacagcaagtagctaagcctatagcatggtgtcttgtaggaccaaatcgatgttacctgtcaagtaaataaataataaaacacccaactgggagtgctg

SEQ ID NO: 13000 - protein, 491 aa, Homo sapiens
MAQSGGEARPGPKTAVQIRVAIQEAEDVDELEDEEEGAETRGAGDPARYLSPGWGSASEEEPSRGHSGTTASGGENEREDLEQEWKPPDEELIKKLVDQIEFCFSDENLEKDAFLLKHVRRNKLGYVSVKLLTSFKKVKHLTRDWRTTAHALKYSVVLELNEDHRKVRRTTPVPLFPNENLPSKMLLVYDLYLSPKLWALATPQKNGRVQEKVMEHLLKLFGTFGVISSVRILKPGRELPPDIRRISSRYSQVGTQECAIVEFEEVEAAIKAHEFMITESQGKENMKAVLIGMKPPKKKPAKDKNHDEEPTASIHLNKSLNKRVEELQYMGDESSANSSSDPESNPTSPMAGRRHAATNKLSPSGHQNLFLSPNASPCTSPWSSPLAQRKGVSRKSPLAEEGRLNCSTSPEIFRKCMDYSSDSSVTPSGSPWVRRRRQAEMGTQEKSPGTSPLLSRKMQTADGLPVGVLRLPRGPDNTRGFHGHERSRACV

SEQ ID NO: 13001 - DNA, 2022 bp, Homo sapiens
  CDS (378)..(1349)
aaacggcggcggcggcggcaccggaggctccgaggctcctgcgctcccgcgccgcgctcccctcgtccgcccgggccgccaggagaagaaactgaggcctggaatttgattaactcattcaaggttacccagttggtaattcatttgcacacctgttagcaagaaacagaagttgaaggactggaacaagtgaactaggaaagagggaacgccaatccaaggatagaaggacaaggacagaatcaccagcactggctgaaggcctcctgtttcctgcgctttctccttttcctgtgaaatctccgaggagaagaaagaatgatggacagtttatcctttcactgccacaaggcctgtttacttggcagtaccttaacatggggaatcttcttaaagttttgacatgcacagaccttgagcaggggccaaattttttccttgattttgaaaatgcccagcctacagagtctgagaaggaaatttataatcaggtgaatgtagtattaaaagatgcagaaggcatcttggaggacttgcagtcatacagaggagctggccacgaaatacgagaggcaatccagcatccagcagatgagaagttgcaagagaaggcatggggtgcagttgttccactagtaggcaaattaaagaaattttacgaattttctcagaggttagaagcagcattaagaggtcttctgggagccttaacaagtaccccatattctcccacccagcatctagagcgagagcaggctcttgctaaacagtttgcagaaattcttcatttcacactccggtttgatgaactcaagatgacaaatcctgccatacagaatgatttcagctattatagaagaacattgagtcgtatgaggattaacaatgtaccggcagaaggagaaaatgaagtaaataatgaattggcaaatcgaatgtctttgttttatgctgaggcaactccaatgctgaaaaccttgagtgatgccacaacaaaatttgtatcagagaataaaaatttaccaatagaaaataccacagattgtttaagcacaatggctagtgtatgcagagtcatgctggaaacaccggaatacagaagcagatttacaaatgaagagacagtgtcattctgcttgagggtaatggtgggtgtcataatactctatgaccacgtacatccagtgggagcatttgctaaaacttccaaaattgatatgaaaggttgtatcaaagttcttaaggaccaacctcctaatagtgtggaaggtcttctaaatgctcttaggtacacaacaaaacatttgaatgatgagactacctccaagcaaattaaatccatgctgcaataacaattctggaataagcacctgctgtagacagaagacagtattctgcaatgactgagaatgcagttttttagtgattgcaattactatctcatttattcttgcttttatttctttcctctgttcctcttccctcttttttaatcatgttcttaagacttcttttctgtgccaaaatcagtaaagttacactctgaagggatatcatcctttcaaacgggccatctaagccagctaattatgcattgcattggggtctctactgagaaaaattctgtgacttgaactaaatatttttaaatgtggattttttttgaaactaatatttaatattgcttctcctgcatggcaagactgcctattctgctatttaaaaaccctcaatgactttattttctactgccgcctttttcatgtgcaaccaaaatgagaatgtttaaattaactgtgttgtacgaatggtacccaacacaaactttttttaaattagtaatacttttgtttaaagttttaagtttgcattttgactttttttgtaaggatgtatgttgtgtgtttaacctttattaactaacgttaaaagctgtgatgtgtgcgtagaatattacgtatgcatgttcatgtctaaagaatggctgttgatgataaaataaaaatcagctttcatttttct

SEQ ID NO: 13002 - protein, 324 aa, Homo sapiens
MGNLLKVLTCTDLEQGPNFFLDFENAQPTESEKEIYNQVNVVLKDAEGILEDLQSYRGAGHEIREAIQHPADEKLQEKAWGAVVPLVGKLKKFYEFSQRLEAALRGLLGALTSTPYSPTQHLEREQALAKQFAEILHFTLRFDELKMTNPAIQNDFSYYRRTLSRMRINNVPAEGENEVNNELANRMSLFYAEATPMLKTLSDATTKFVSENKNLPIENTTDCLSTMASVCRVMLETPEYRSRFTNEETVSFCLRVMVGVIILYDHVHPVGAFAKTSKIDMKGCIKVLKDQPPNSVEGLLNALRYTTKHLNDETTSKQIKSMLQ

SEQ ID NO: 13003 - DNA, 2547 bp, Homo sapiens
  CDS (111)..(2237)
accgctacacatgcgccttgcaaggaagggcgagatttcgggggcggggcggggggcgggcctaggccggggtctcacagcgactgcgcggacgggttcctgagtggaacatggcgacttgcgccgaaatcctgcggagcgagttccccgaaattgacggacaggtcttcgactacgtgaccggcgtcttgcacagcggcagcgcggacttcgagtctgtggatgacctggtggaagctgtaggggaactattgcaagaggtgtccggggacagcaaggatgacgcgggcatcagggccgtgtgccagcgcatgtacaacactctgcgtctggctgagccacaaagccagggaaatagccaggtgctactggacgcccctatccagttgtcaaagataacggagaactacgactgtggaaccaaacttccaggactgctaaagagggaacagtcctcgacagtgaatgcaaagaagttagagaaggccgaggctcgacttaaggcaaagcaggagaagcgctcagagaaggacacgctcaagaccagcaaccctctagtcttagaagaggcatcagccagccaggcaggcagcagaaaggagagtcggttggaatcatctggcaagaacaaatcctatgatgtgcgaattgagaactttgatgtgtcttttggcgatagagtactgctggctggagcggatgtgaacctggcatggggccgccgttacgggctggtggggcggaatgggttggggaagacaacgttactgaagatgctggccacccggagtctgcgggttccagcccacatttccctgctgcacgttgagcaagaggttgctggagatgacactcctgccctgcagagtgtgctggagagtgacagtgtgcgagaggatttgctacggagggagcgggagctcactgcccagattgctgctggcagggcggagggctctgaagctgcagagctggcagaaatctatgccaaactggaggagattgaggctgacaaggcacctgccagggcatcagtcattctcgctgggcttggctttacccctaaaatgcagcagcagcccacccgggagttctcaggtggctggaggatgaggctggccctggcccgggccctctttgctaggccagatcttctgctgttagatgaacctacaaacatgctggatgtcagggccatcctgtggctggagaattacctgcagacgtggccctccaccatcctagtcgtctcccacgaccgcaacttcttgaatgccatcgccacagacatcatccacctgcacagccagcggctagatggttaccggggagactttgagaccttcatcaagagtaagcaggagcggctgctcaaccagcagcgtgaatatgaggcgcagcagcagtatcgccagcacatccaggttttcattgaccggtttcgctacaatgccaacagggcctctcaagtgcagagtaaactcaagatgctggagaagctgcctgagctgaggcctgtggacaaggaatcagaggtcgtaatgaagttccctgatgggtttgagaagttctcgccgccaattctgcagctagatgaggtggatttctactacgatccgaagcacgtcatcttcagtcgcctctctgtgtctgctgatctcgagtctcgcatctgtgtggttggagagaatggggctgggaagtctaccatgctgaagctgcttttgggggacctggcacctgttcggggcatcagacacgctcacaggaatctgaagattggctatttcagccagcaccatgtggagcagctggacctaaacgtcagtgctgtggaactgctggcacgcaagtttcctgggcggcctgaggaggagtaccgtcaccagctgggtcggtatggcatctccggagaactggccatgcgtcctcttgccagcctgtctgggggccagaagagccgagtggcctttgctcagatgactatgccctgccccaacttctacattctggatgaacccacaaaccacctggacatggagaccattgaggctctgggccgtgccctcaacaatttcaggggtggtgtgattctggtgtcccacgatgagcgctttatcaggctggtgtgccgggagttgtgggtgtgcgaaggaggcggcgtcacccgtgtggaaggaggatttgaccagtaccgcgccctcctccaggaacagttccgccgcgaaggcttcctctagggccaccaggctgaggactcgcccaggacatggactggtctctcagacccctgggccaccatgtaggccaccactccaggccgtggacttcccccaacttggggacagccttattcccaaatgtctctatccttttgactggagcatcttctgcacaaccttgggagcccatccaagggttggtgaggactggtctcccgggggtgggggtctggggggtaccctctggggttatagattcccccactgccccagctctgactggaccccaagtggctgctatgtaaattaaatctctccccgcgtc

SEQ ID NO: 13004 - protein, 709 aa, Homo sapiens
MATCAEILRSEFPEIDGQVFDYVTGVLHSGSADFESVDDLVEAVGELLQEVSGDSKDDAGIRAVCQRMYNTLRLAEPQSQGNSQVLLDAPIQLSKITENYDCGTKLPGLLKREQSSTVNAKKLEKAEARLKAKQEKRSEKDTLKTSNPLVLEEASASQAGSRKESRLESSGKNKSYDVRIENFDVSFGDRVLLAGADVNLAWGRRYGLVGRNGLGKTTLLKMLATRSLRVPAHISLLHVEQEVAGDDTPALQSVLESDSVREDLLRRERELTAQIAAGRAEGSEAAELAEIYAKLEEIEADKAPARASVILAGLGFTPKMQQQPTREFSGGWRMRLALARALFARPDLLLLDEPTNMLDVRAILWLENYLQTWPSTILVVSHDRNFLNAIATDIIHLHSQRLDGYRGDFETFIKSKQERLLNQQREYEAQQQYRQHIQVFIDRFRYNANRASQVQSKLKMLEKLPELRPVDKESEVVMKFPDGFEKFSPPILQLDEVDFYYDPKHVIFSRLSVSADLESRICVVGENGAGKSTMLKLLLGDLAPVRGIRHAHRNLKIGYFSQHHVEQLDLNVSAVELLARKFPGRPEEEYRHQLGRYGISGELAMRPLASLSGGQKSRVAFAQMTMPCPNFYILDEPTNHLDMETIEALGRALNNFRGGVILVSHDERFIRLVCRELWVCEGGGVTRVEGGFDQYRALLQEQFRREGFL

SEQ ID NO: 13005 - DNA, 3452 bp, Homo sapiens
  CDS (38)..(3148)
gaggggttcctcgccagccaggtgctcgtcatgcgcaatgtggcgctgcggcgggcggcagggcctgtgtgtgctgaggcggctgagcggcggacatgcacaccacagagcgtggcgatggaacagtaaccgggcttgtgagagggctctgcagtataaactaggagacaagatccatggattcaccgtaaaccaggtgacatctgttcccgagctgttcctgactgcagtgaagctcacccatgatgacacaggagccaggtatttacacctggccagagaagacacgaataatctgttcagcgtgcagttccgtaccactcccatggacagtactggtgttcctcacattcttgagcataccgtcctttgtgggtctcagaaatatccgtgcagagaccctttcttcaaaatgttgaaccggtccctctccacgttcatgaacgccttcacagctagtgattatactctgtatccattttccacacaaaatcccaaggactttcagaatctcctctcggtgtatttggatgccacctttttcccatgtttacgcgagctggatttctggcaggaaggatggcggctggaacatgagaatccgagcgacccccagacgcccttggtctttaaaggagtcgtctttaatgagatgaagggagcgtttacagacaatgagaggatattctcccagcaccttcagaacagacttcttcccgaccacacgtactcagtggtctccgggggtgacccactgtgcatcccggagcttacatgggagcagcttaagcagtttcatgccactcactatcacccaagcaatgctaggttcttcacgtacggtaattttccattagaacagcatctgaaacaaattcacgaggaagcactgagcaaattccagaaaattgaaccaagcaccgtggtgccagctcagacaccctgggacaagcctagggaattccagataacatgtggcccggattcatttgctacagatccctctaaacaaacaaccgtcagcgttagcttcctcttaccggacatcaccgacacatttgaagccttcacattaagtcttctgtcttcactcttgacttctgggcccaattctcccttttacaaagccttgattgaatctggccttggcacagacttttctcctgatgttggatataatggctacacgagggaggcctactttagtgtcggcctccaagggattgtggagaaagacattgagaccgtcagaagcctcatagacagaacgattgatgaagtagttgagaaaggatttgaagatgatcgaattgaggctttacttcataaaattgaaatacagatgaaacatcagtctaccagctttgggctgatgctgacatcatacatagcttcttgctggaaccatgatggggaccctgtggagctcttgaagttgggaaatcagttagctaaattcagacagtgcctgcaggaaaatccaaaatttttgcaagaaaaagtaaaacagtattttaagaataaccagcataagctgactttatcgatgaggccagatgacaagtatcacgagaagcaggcacaggtggaagccacgaagctcaagcagaaggtcgaggctctgtcccccggagacaggcagcagatctacgagaaaggtctagaattacggagtcaacaaagcaaacctcaagatgcctcttgtctgccagcgttgaaagtttccgatattgaacccaccatacctgtcacagagttggacgtggtcctgacagctggagatatccctgttcagtactgcgcccagcccaccaatggcatggtgtatttccgggccttctccagcctgaacacactccccgaggagctgaggccctatgtgcccctcttctgcagcgtcctcaccaagctgggctgcggccttcttgactaccgggagcaggctcagcagatagaattgaagaccggagggatgagtgcttctccccacgtgctccccgacgactcacacatggacacctacgagcagggtgtgcttttctcctctctctgcctggatcgaaacctgccagacatgatgcagctatggagtgaaatatttaacaacccgtgctttgaagaagaggagcacttcaaggtgctggtgaagatgaccgcccaggagctcgccaatggaattcctgactctgggcacctgtacgcatccatcagggcaggccggaccctcacgcccgcaggggacctgcaggagaccttcagcgggatggatcaggtgcggctgatgaagaggattgcagaaatgacagatatcaaacccatcctgaggaagctcccacgtatcaagaaacacttgttaaatggtgataatatgaggtgttcagtgaatgcgactcctcagcagatgcctcagacagaaaaagcggtcgaagacttccttagaagcatcggtcggagtaaaaaggaacggaggcctgtgcgcccacacacggtcgagaaacctgtgcccagcagctctggtggagatgcccacgttccccatggctcccaggtcattaggaagctggtcatggaacccaccttcaagccctggcagatgaagactcacttcctgatgcccttcccggtgaattacgtgggtgaatgcatccgaactgtcccctacacggacccagatcatgccagtcttaaaatccttgcacgtttgatgactgccaaattcttgcatacagaaattcgagaaaaaggcggtgcttatggtggaggcgcaaaactcagccacaatgggattttcaccctttactcttacagggacccaaatacaatagagacgctccagtcttttgggaaggctgtcgactgggctaagtctggaaaattcacacagcaagacatcgacgaagccaaactttctgtcttctcaaccgtagatgctcctgtcgctccttcagacaaaggaatggaccacttcttgtacggcctctcggatgagatgaagcaggcccacagagagcagctctttgctgtcagccacgacaagctcctggccgtgagcgatagatacctcggcactgggaagagcacacacggcctggccatcctcggacccgagaacccgaaaattgccaaggacccatcctggatcatccgatgagcagccgtggcgctcgactgcacaggagcccgagacaatacacctccgagctgaatatgaaaagtcagaaatgctactgctttttccaagaatattatgtcattgagtgtcgccaaagcccttgactggcgagtcaaaaactcagatctatcttaagagtgaccaggaagaggttcattgaaataatcatgcatgaagcgccaaagatgcaccatgtagaattttcactttgtactggcaggctcgttttacctcattctagaatatttaagaatctaaaaataaagggcaactctgactt

SEQ ID NO: 13006 - protein, 1037 aa, Homo sapiens [sequence omitted]

SEQ ID NO: 13007 - DNA, 1559 bp, Homo sapiens
  CDS (47)..(1453)
acttttgggcaggtgtcagcgcccgtgtcaccgccacgtcgcggacatggtgatttcagaaagtatggatatactcttcagaataagaggaggccttgatttggcttttcagctagctactcctaatgaaatttttctcaagaaggcactgaaacatgtgttgagtgacctgtcaactaagctgtcttcaaacgcccttgtgttcagaatttgccacagttcagtgtatatatggcctagcagtgacataaacaccattcctggagaactgactgatgcttctgcttgtaagaacatactgcgctttgttcaatttgagccagaagaagatataaaaagaaaattcatgagaaagaaggacaaaaagttatcagacatgcatcaaatagtaaatatagatcttatgctggaaatgtcaacctccctggcagctgtaacgcccatcattgaaagggaaagcggaggacaccattatgttaatatgactttacctgtcgatgcagttatatctgttgctccagaagaaacatggggaaaagttcgtaaactcctggttgatgcaattcataatcaactaactgacatggaaaaatgtattttgaaatatatgaaaggaacatctattgtggtccctgaaccactgcactttttattaccagggaaaaaaaatcttgtaacaatttcatatccttcaggaataccagatggccagctgcaggcctataggaaggagttacatggtcttttcaatctgcctcacgacagaccctatttcaaaaggtctaatgcttatcactttccagatgagccatacaaagatggttacattagaaatccacatacttaccttaatccacctaacatggagactggtatgatttatgtggtccagggcatatatggctatcatcattatatgcaggatcgcatagatgacaatggctggggctgtgcttatcgatctctgcagactatctgctcttggttcaaacatcagggatacacagagaggtccattccaacacacagagaaattcagcaggctctagtcgatgccggggacaaaccagcaacatttgtcggatcgcggcaatggattggatctattgaggtgcagctggtactaaaccaattgatcggtataacgtcaaaaatcctgtttgtcagccaaggttcagaaattgcctctcaaggacgggaactggctaatcatttccaaagtgaaggaactccagttatgatcgggggaggagttttggcccacacaatactaggagttgcatggaatgagattacagggcagataaagtttctgattctagatccacattataccggtgctgaagacctgcaagttattttggaaaagggctggtgcggatggaagggcccagatttttggaacaaggatgcatactataacttatgtcttcctcagcgaccaaatatgatttaaaatatcttggagtcaaagactgcagtagagtggtattataaatttgtgaataaagaatcagtttaatttttcacattaaatcctggttctagtttgaccattt

SEQ ID NO: 13008 - protein, 469 aa, Homo sapiens
MVISESMDILFRIRGGLDLAFQLATPNEIFLKKALKHVLSDLSTKLSSNALVFRICHSSVYIWPSSDINTIPGELTDASACKNILRFVQFEPEEDIKRKFMRKKDKKLSDMHQIVNIDLMLEMSTSLAAVTPIIERESGGHHYVNMTLPVDAVISVAPEETWGKVRKLLVDAIHNQLTDMEKCILKYMKGTSIVVPEPLHFLLPGKKNLVTISYPSGIPDGQLQAYRKELHGLFNLPHDRPYFKRSNAYHFPDEPYKDGYIRNPHTYLNPPNMETGMIYVVQGIYGYHHYMQDRIDDNGWGCAYRSLQTICSWFKHQGYTERSIPTHREIQQALVDAGDKPATFVGSRQWIGSIEVQLVLNQLIGITSKILFVSQGSEIASQGRELANHFQSEGTPVMIGGGVLAHTILGVAWNEITGQIKFLILDPHYTGAEDLQVILEKGWCGWKGPDFWNKDAYYNLCLPQRPNMI

SEQ ID NO: 13009 - DNA, 2652 bp, Homo sapiens
  CDS (300)..(638)
gatgcaggaactgagcttcatcgctcttcaatgttagctgaagcaatggctaatttagtagttgacaaatctaaaaggagccaagggtcaagctctaaaatgggaaaatgttataattgtggaaaaactggacatttaaaaaaggaatgccaccagatctcaggacagaaaggatcttacaatgcagttcccccatcagcggaaaaaacgccaggactttgtcctcgctgtaacaaaggaaatcactgggctaatcactgctgctcaaaatttcatcggaatggcaccccgttttaggcatgggttcctggaggcacattgattccatcaccccaggaacaccaggaagtgcaggattagatctacctgccagagaaagaatcacattagttgggggagacaaacccatcaaagttcccactggtatttggggaacttcaccagcaggatacatgggactaattttaggcaaaagccgccttaacttgcaaggcatgactgtagtcccaggagctgttgactctgattatgaaggagaaactcaagtagttttaatgtcacaagatctttgggtttttgaactgggagaatatattgctcaattattgcttattccctgcaaattacacccttctccatgaaaggagaaacgaggaaataaagggtttgggagcacaactacatgggaaatctatctatcccgacccatagcctctaatagacccacctgtgtagtacaaattaaaggaaagaaattttatgggcttatggatacgggaactgatgtatcagtaatatctaaagacaattggcccacatcctggctcttgcaattaacttctacatccctagtggaagtaggaacagctcagagtgttcaacagagtgctgagattttaccttgtcttggtccggatgggcagtcatgtacttttcagccttatgttgcaaatatagctatcagtttatggggctgagacttacttacagcatgggagatgagacttacaaatgaaaactttgataacccaggatttaaaatgttgaaggacatggatatcagagtgaaaaaggtttagggaaattcctacaggaaaatcctaacctgatatcagtaactggcaaaacagatagaaaaaggctaggaaatcaggatttctgacagaggtcattgatatttctcccctgcccactgccttaccattagaatggcttagtgacaaacctgtgcgggtggatcaatggcccctaacacaggagaagctagatacctctggtgcttcagcgcaatgctgagagctaattacagtcattcaggttttacagctcacagcttcagatcctatcaacattgtctgtaattcagcttatgttgtaaacgtagccagtcacattcacatggaaactgctacagttaaaagtacactagacccagaactgcttaatttgtttcacttattctcaaatgctgcatgctacatgccaaacaggtgagacagctggtcatgtacagtgacattgtctgtcatcatttgctcatatggggatacttaaacaattaaaaactgacaatggactcgcttatactagtcatgcttttcaaaatttcttatagctttgggctataacccataaaataggaattccttataatcctaaaggacaaggcattgtagagcaggcacattgaacattacaacacatgttgaaaagacgaaaggggtataggaggccaactaccacctcaatcaaaactacatttagccttatttacttcacatttttggactcctggtacagatggtaagactccagcagaaagacattggcaagtgttagaggaaaagaggaaagtttatctgaaagcattatggaaatccctggaaggacaatggaaaggtcgggtggatttactgacgtggagaagagggtatgcttgtgttttcacaggagatggacaagccgtgtgggtgccctcaaggtgtgtgcaaccatggaatgggagactggaggaacccagggtggccaaccatgggtccggtccctctggtgtgagccatgagccagctgagcctgagtgcgaagacggagagaaggccgaccacagtcatgacatcaacccccataacctggggacaactcaagaaaaccacacaggaggctgagaaactactggagcaccagggacagtctgtaaagttggatggaccatcaatgggaaaatgagagctgcccaccctggccttacactccttcaattaatacataaacagaaaggaggatatacagagagccaaaggcccatgggacgtgaccaacattccactgagtctatacgatcaaacagcaaactgtttatcatgaatacagaatgtgggcaaactcatgactgtgcctgccccagaaggtttgctgagggcaattgcttcctgacgccaagctccttgaggttatctattgggacatccagagaatgcagtcttgcaagcctactctggaccgagcagctgaccccctcttccacttcccttcacactatctcttttgcctaataaatacggaaggctgtgtacaaggtcaggtcccttgtccactagaggcaaggtgcttcctgacccttcttccaaatatactcttttgtctttgtctttt

SEQ ID NO: 13010 - protein, 113 aa, Homo sapiens [sequence omitted]

SEQ ID NO: 13011 - DNA, 2199 bp, Homo sapiens
  CDS (225)..(2054)
tgctggaaaccaggcgggttgggacagagggcttggtggactccttttctcagggactggaaaggtcatacgctgtcagcagcagcgtactacacggcatcgagcctcggctgaaggacttccaccagctcctgctcaacccgcccaagaagaaagcgatcctgaccaccattggtgtgctggaggagcccctggggaatgcccgtctgcatggcgcccgcctcatggcagcactgctgcacacaaacacacccagcatcaaccaggagctctgccggctcaacacgatggacttactgctggacttgttctttaagtacacctggaataactttttgcacttccaagtggaactatgcatagccgctattctctcccacgctgcccgtgaggagaggacagaagccagcggatccgagagcagggtggagcctccgcatgagaacgggaaccggagcctggagactccccagccggccgccagcctccctgacaacacaatggtgacccacctgttccagaagtgctgcctggtgcagaggatcctggaggcctgggaagccaacgaccacacgcaggcagcgggtggcatgagacgtgggaacatgggccacctcacacggatcgccaacgcggtggtgcagaacctggagcggggccctgtgcagacgcacatcagcgaggtcatccgagggctccctgcggactgccgtggccgctgggagagcttcgtggaggagacgctgacggagacgaaccgcaggaacactgtggacctggtgagcactcaccaccttcactcctcaagtgaggacgaggacattgagggtgctttccctaacgagctgtcccttcagcaggccttctctgactaccagatccagcagatgacagccaacttcgtggatcagtttggcttcaatgatgaggagtttgccgaccaggacgacaacatcaatgccccgtttgacaggatcgcagagatcaacttcaacatcgacgctgacgaggacagtcccagcgcagctctgtttgaggcctgctgcagtgaccgcatccagccctttgatgatgatgaggacgaggacatctgggaggacagtgacactcgctgtgctgcccgggtgatggccagacccaggtttggagccccccatgcttcagagagttgctcaaagaatggcccagagcgtggaggccaggatgggaaggcgagcttggaagcacacagagatgcacctggggcaggtgccccaccggcccccgggaagaaggaagccccccctgtggagggtgactcagaaggcgccatgtggacggcagtgtttgatgagccagcgaactcaacgcccacagccccaggagtggtgagggacgtgggttccagtgtgtgggcagctggcacctcagctccagaggagaaaggctgggccaagttcactgacttccagcctttctgctgctccgagtcagggcccaggtgcagctctccggtggacacagaatgcagccatgctgagggcagccggagccaaggccctgagaaagccttcagcccggcttctccatgtgcctggaacgtgtgtgtcaccaggaaggcccccctgctggcctctgacagtagctcctctgggggctcccacagcgaggatggcgaccagaaggcagcgagtgccatggatgcggtgagcaggggtcccggccgggaggcccccccgctgcccacagtggccaggacagaggaggcggtcggcagggtcgggtgtgctgacagccggctgttaagccctgcctgccccgcgccaaaggaagtgactgctgccccagccgtggctgtgccccccgaggctactgtggccatcaccacagcactgagcaaggctggccccgccatacccaccccagcagtctcttctgcactggccgtggcggtccccctagggcccatcatggcagtcacagcagccccagccatggtggccaccctggggacagtgacaaaggacgggaagacagatgccccgccagaaggagctgccttaaatggcccagtgtgatgctgctgccgcccggccacggcccaccctggtcaggctgcctccttaatcgagaaaactacctggtgatgcaatctttttttttttaatttaatttaattttaaaataaatgctgcattggtaaagctggcagttgaaacc

SEQ ID NO: 13012 - protein, 610 aa, Homo sapiens
MAALLHTNTPSINQELCRLNTMDLLLDLFFKYTWNNFLHFQVELCIAAILSHAAREERTEASGSESRVEPPHENGNRSLETPQPAASLPDNTMVTHLFQKCCLVQRILEAWEANDHTQAAGGMRRGNMGHLTRIANAVVQNLERGPVQTHISEVIRGLPADCRGRWESFVEETLTETNRRNTVDLVSTHHLHSSSEDEDIEGAFPNELSLQQAFSDYQIQQMTANFVDQFGFNDEEFADQDDNINAPFDRIAEINFNIDADEDSPSAALFEACCSDRIQPFDDDEDEDIWEDSDTRCAARVMARPRFGAPHASESCSKNGPERGGQDGKASLEAHRDAPGAGAPPAPGKKEAPPVEGDSEGAMWTAVFDEPANSTPTAPGVVRDVGSSVWAAGTSAPEEKGWAKFTDFQPFCCSESGPRCSSPVDTECSHAEGSRSQGPEKAFSPASPCAWNVCVTRKAPLLASDSSSSGGSHSEDGDQKAASAMDAVSRGPGREAPPLPTVARTEEAVGRVGCADSRLLSPACPAPKEVTAAPAVAVPPEATVAITTALSKAGPAIPTPAVSSALAVAVPLGPIMAVTAAPAMVATLGTVTKDGKTDAPPEGAALNGPV

SEQ ID NO: 13013 - DNA, 2325 bp, Homo sapiens
  CDS (151)..(1824)
acaaaacccgagagaggcgtgagcagcgctgtgtttgcgagcgggagcgaggggcgccggctggggtgtgtgctcctgagctcttcagaaaccaggctgctttcaggaacattgctgtggattcccagggcctattccactagaagcaagatggctgaactcaatactcatgtgaatgtcaaggaaaagatctatgcagttagatcagttgttcccaacaaaagcaataatgaaatagtcctggtgctccaacagtttgattttaatgtggataaagccgtgcaagcctttgtggatggcagtgcaattcaagttctaaaagaatggaatatgacaggaaaaaagaagaacaataaaagaaaaagaagcaagtccaagcagcatcaaggcaacaaagatgctaaagacaaggtggagaggcctgaggcagggcccctgcagccgcagccaccacagattcaaaacggccccatgaatggctgcgagaaggacagctcgtccacagattctgctaacgaaaaaccagcccttatccctcgtgagaaaaagatctcgatacttgaggaaccttcaaaggcacttcgtggggtcacagaaggcaacagactactgcaacagaaactatccttagatgggaaccccaaacctatacatggaacaacagagaggtcagatggcctacagtggtcagctgagcagccttgtaacccaagcaagcctaaggcaaaaacatctcctgttaagtccaatacccctgcagctcatcttgaaataaagccagatgagttggcaaagaaaagaggcccaaatattgagaaatcagtgaaggatttgcaacgctgcaccgtttctctaactagatatcgcgtcatgattaaggaagaagtggatagttccgtgaagaagatcaaaactgcctttgctgaattacacaactgcatcattgacaaagaagtttcattaatggcagaaatggataaagttaaagaagaagccatggaaatcctgactgctcgtcagaagaaagcagaagaactaaagagactcactgaccttgccagtcagatggcagagatgcagctggccgaactcagggcagaaattaagcactttgtcagcgagcgtaaatatgacgaggagctcgggaaagctgcccggttttcctgtgacatcgaacagctgaaggcccaaatcatgctctgcggagaaattacacatccaaagaacaactattcctcaagaactccctgcagctccctgctgcctctgctgaatgcgcacgcagcaacctctgggaaacagagtaacttttcccgaaaatcatccactcacaataagccctctgaaggcaaagcggcaaaccccaaaatggtgagcagtctccccagcaccgccgacccctctcaccagaccatgccggccaacaagcagaatggatcttctaaccaaagacggagatttaatccacagtatcataacaacaggctaaatgggcctgccaagtcgcagggcagtgggaatgaagccgagccactgggaaagggcaacagccgccacgaacacagaagacagccgcacaacggcttccggcccaaaaacaaaggcggtgccaaaaatcaagaggcttccttggggatgaagacccccgaggccccggcccattctgaaaagccccggcgaaggcagcacgctgcagacacctcggaggccaggcccttccggggtagtgtcggtagggtttcacagtgcaatctctgccccacgagaatagaagtttccacagatgcagcagttctctcagtcccggctgtgacgttggtggcctgagctaggaggaaaaagagcagttttcactcagttttggttccctgcccgaggtgctgacccaattcgctgccaaaagagtgtcaatcagaatatacaaatcccgtatggttgtgtcatcctctcttaatcatttttactaattctaataatcagctctagcttgcttcataattttcatggctttgcttgatctgttgatgctttctctcatcaagactttgctgcattttagccaggcagtatttactcattattaggaaaatcaagatgtggctgaagatcagaggctcagttagcaacctgtgttgtagcagtgatgtcagtccattgattgtctttagagagttaatgttacaaaaaagaattcttaataatcagacaaacatgatctgctgaggacacatgcgcttttgtagaatttaacatctggtgtttttctgaaaaaatatatatacatatattgctttatttgaaacaaattaaaatatgctgcatttg

SEQ ID NO: 13014 - protein, 558 aa, Homo sapiens [sequence omitted]

SEQ ID NO: 13015 - DNA, 1857 bp, Homo sapiens
  CDS (149)..(1708)
aaataacacttcacttctaacaaacaaaccagcacttcttagatcccttttcaccgttggagcactatgtcggcattttgattttgatctggaagattttaaaggcaacagcaaggttaacataaaagataaagtacttgaactattgatgtattttacaaaacactcagatgaagaagtacaaacaaaagctatcattggtctaggatttgcctttattcagcatccaagtctaatgttcgagcaagaagtgaagaatctatataataatattttatctgataagaactcctcagtcaatttaaaaatacaagtgttaaaaaacctccagacctacctacaagaagaagatacacgtatgcagcaggcagatagagactggaagaaagttgcaaaacaggaagacttaaaagaaatgggtgatgtttcctcagggatgtgtagttccatcatgcagctttatctcaaacaggtgcttgaggcattttttcacacccagtcaagtgtacgccactttgccctaaatgtcattgcattgactctaaatcaaggtcttattcatccagttcagtgtgtgccatatttaattgctatgggcacagacccagaacctgctatgcggaacaaggctgatcagcaacttgtggaaatagacaaaaaatatgctggattcattcatatgaaagcagtggctggtatgaagatgtcttaccgggtacaacaggcaatcaacacatgcctaaaagatcctgtaaggggtttcagacaagacgagtcctctggcgctttgtgttcacacctttactccatgatccgtggaaaccgccaacacagacgagcctttcttatttctttactcaacctctttgatgacacagcaaaaacagacgtgactatgctcttgtatatagcagacaatctagcctgttttccataccagacacaggaagagccgttgtttataatgcatcatatagacattacactctcagtttctggtagtaacctactgcagtcattcaaggagtctatggtaaaggacaaaaggaaagagagaaaatcatcacctagtaaggaaaatgagtcaagcgacagtgaagaagaagtttccaggcctcggaagtcacggaaacgtgtagattcagattcagattcagattcagaagacgatataaattcagtgatgaaatgtttgccagaaaattcagctcctttaatcgaatttgcaaatgtgtcccagggtattttattacttctcatgttaaaacaacatttgaagaatctttgtggattttctgatagtaaaattcagaagtactctccatctgaatctgcaaaagtatatgataaagcgataaaccgaaaaacaggagttcattttcatccaaaacaaacactggacttcctgcggagtgacatggctaattccaaaatcacagaagaggtgaaaaggagtatagtaaaacagtatctagatttcaaacttctcatggaacatctggaccctgatgaagaagaagaagaaggggaggtttcagctagcacaaatgctcggaacaaagcaattacctcactgcttggaggaggcagccctaaaaataatacagcagcagagacagaagatgatgaaagtgatggggaggatagaggaggaggcacttcaggggtgaggcggaggaggagtcaacgtatttcgcagcgtattacgtaaaatgatttttatgtgcttatatatgtcagtctattaaatgtacaccaagtaatgtaatacttaaaagagaaaacattttgtagatagagattctctacttacccgtttatacatccttttgtagaaagtttaacataaaagacaat

SEQ ID NO: 13016 - protein, 520 aa, Homo sapiens
MYFTKHSDEEVQTKAIIGLGFAFIQHPSLMFEQEVKNLYNNILSDKNSSVNLKIQVLKNLQTYLQEEDTRMQQADRDWKKVAKQEDLKEMGDVSSGMCSSIMQLYLKQVLEAFFHTQSSVRHFALNVIALTLNQGLIHPVQCVPYLIAMGTDPEPAMRNKADQQLVEIDKKYAGFIHMKAVAGMKMSYRVQQAINTCLKDPVRGFRQDESSGALCSHLYSMIRGNRQHRRAFLISLLNLFDDTAKTDVTMLLYIADNLACFPYQTQEEPLFIMHHIDITLSVSGSNLLQSFKESMVKDKRKERKSSPSKENESSDSEEEVSRPRKSRKRVDSDSDSDSEDDINSVMKCLPENSAPLIEFANVSQGILLLLMLKQHLKNLCGFSDSKIQKYSPSESAKVYDKAINRKTGVHFHPKQTLDFLRSDMANSKITEEVKRSIVKQYLDFKLLMEHLDPDEEEEEGEVSASTNARNKAITSLLGGGSPKNNTAAETEDDESDGEDRGGGTSGVRRRRSQRISQRIT

SEQ ID NO: 13017 - DNA, 1885 bp, Homo sapiens
ccttcggatggcgtttctgagtggacgtcctttttgttgatattgatgctatacctttctgtttgttagttttccttctaacagtcaggtccctctgctgcaggtctgctagagtttgctggaggtccactccagaccctgtttgcctgagtatcaccagcagaggctacagaacagcaaagattgctgcctgttccttcctggaagcattgtccctgaggggcacccgccagatgccagccagagctctcttgtatggggtatcttttggcccctgctggggggtgtctcctggtcaggagacacaggggtcacggacccacttgaggaggcagtctgacccttagcagagctcgagcactgtgctaggagatccactgctctcttcagagctggcaggcagggacctttgagactgctgaagctgcacccacagccagcatttgccccaggtgatctgtcccagggagatggcttcatctataagcccctgactggggctgctgcctttttttcagagatgccctgcccagagaagaggaatctagagaggcagtctagctacagtagctttgctgagctgcggagggctccagccagttgccatttccctgtggctttgtttacactatgaggggaaaaccacctgctcaagcctcagtaatggtggatgcccctcccccggccaagcttgagcatcccaggtcgatttcagactgttgtgctggcagtgagaatttcaaaccagtggatcttaacttgctgggctctgtaggggtgggatccgctgagctagaccacttggctccctggcttcagccatctttccaggcgagtgaacggttctgtcttgctggcattccaggcaccactggggtatgaaaaaaaaactcctgcagctagcttggtgtccgcccaaacggctgtccagttttgtgcttgaaacccagggccctggtggtgtaggcacccgagggaatctcctggtctgtgggttgtgaagaccgtgggaaaagtgtagtgcctggaccagagtgcaccgttcctcatggcacagtccctcacggcttcccttggctagtggaggaggttcactaaccacttgtgcttcctgcatgaggcaacaccccaccctgctttggcttgccctccatgggctgtacccgctgtttaaccagatgagctgggtacctcagctggaaatgcagaaatcaccctctttctgcgttgatctcgctgggagctgcagactggagctgttcctattcggccatcttgccacaagctgatgttagtcttttagggcccattagctctcaagccttcctgtacaactgtaagatggccattattactactcccgccagatgccagccagagctttcttgtatctaaacctgtgtttgttttttaaaactcatcaggagagttttttcctccaaagatcatcttaattgaagaactgaattaaaagcatacatgtgccctgtgtctacacttaaaactatccaaaacacaaacctttatacctaaaggaaactgaggcctggatttgctcagataatgctggaattcatacttaaaactctcagacataccctcaagaaattcagaagtaggaaagacagatatttaaacaaatatatgtgaaaatgctctttgaactataaagcaatttacaaaagtgtcatcaattcatcattgttgttatctttatcacagtcaataatattgttgcccaaattagaatggtttaacaaaacattttcttccttgccttagagcaggggtgtccaaacttttgactttcctgggccacattagaagaagaatgtgtcttcggccacacataaaatacgctaacactaataatagatgatgagct

SEQ ID NO: 13018 - DNA, 1819 bp, Homo sapiens
  CDS (161)..(577)
tattggacattcgttgggcaatttaataattcgttcagtgcttacaaggccaaggtttaaatattacctcaacaaacttcatacctttctgtctctttctggacctcaccttggtacactctacaacagcagtgctcttgttaatacaggtctctggtttatgcagaaatggaaaaaatcaggttcgcttttgcagctgacatgtcgagatcactcagaccctcgccaaacttttttatataagcttagtaacaaagcagggcttcattatttcaaaaatgttgtgctagtgggatccctacaggatcgctatgttccttatcactctgcccgcattgaaatgtgtaaaacagctttaaaggacaaacagtcaggacagatctattcagaaatgatccacaacttgcttcgacctgttctgcaaagcaaggactgtaatttggttcgctataatgtcatcaatgcattgcccaatacagctgattcactcattgggagagctgcacatatagctgttcttgattcggaaatatttttagagaaattctttctggttgctgccctcaaatatttccaatagtataaaaacattgttagcgactggacaattacctcattcaacaatgtttcaaataatgtattatattaaaatgtagatgctgataagttctaagaaatatttatacctttttatatggaagataatttatatcatccatgtttagtgctttttaaacatcaactttactttctaggtaatgtggctgtgcaatatttttttaattttatctttttacttttctattactttttcatatattttgctacctaagtatttcagtgaaactttaagcccatacctgtgtctgattgtttattattggctttccacaattcttacatcagactacattatattagagaccattattgctagaatagcatgggatttaaaattttctaatactgggggtattatttagttaattataaatttttcttttcacattttactgtgttttaactggaaataaaattatggctgctacaatatattttttgaaatcaacttctgtagttctaaaatacaactttatcatacaatcaaaccaggtagttcatataaaacagtgtaatacaagttttctataaagtcattactgttgcttaaacatatttcatgcctattaaaatatattttctactggtgatttcaacattatttctcatactgacttttattactggaaatgttcctgtacatgttggcagcagataaagatttttgaatgtttgaatgccctctgccttgatttggttggaatttttgctaaattggtaatgttgcttgaactttatgactacattttcttttaacttttttcgtggacttccttatatgtacataataattaaatgttgaaatttatgaaatacttttatgaatttagataatttttaaatattgttaaaatttattgaactaaaaagtaatgtacataaaataattcatgttaaagatggaacaaaataattaactttacatgtttggtgatacagatgcaaatgtttttgatatatggagatgttgagtcttttgactttactaaaggtgctgaatagcattaaattcactattttccttttctgttttacttgtgaaaataaaaatgcactaaggttgggtagaagttctgtttgcactcactaattgtgacagacagaggtttttgtaagtatttattgtacaattgatgcatgtttatttttagcgttgttattgcctctggtgttaataaatgaacaaatggctatctgg

SEQ ID NO: 13019 - protein, 139 aa, Homo sapiens
MQKWKKSGSLLQLTCRDHSDPRQTFLYKLSNKAGLHYFKNVVLVGSLQDRYVPYHSARIEMCKTALKDKQSGQIYSEMIHNLLRPVLQSKDCNLVRYNVINALPNTADSLIGRAAHIAVLDSEIFLEKFFLVAALKYFQ

SEQ ID NO: 13020 - DNA, 1750 bp, Homo sapiens
tttaacgaatttaaaaagctaatgacaattttgagaaaaggtttgggatgtatattgctatgtaatttaataaactgattttatggatataaatatgactgctttccttagagaataattattacctgaagcgcatccagacaacgtggctacctttatcatttcattcaaccctgagtggcccaaacaaaggcctcaggccggccacttccttccacttcttggtctgacctctccatgatctgttactaggcaaaactcagatgtttggctaccttgggctgcaactgtcccactcttgcccaggcttgctggagttggggttatccacagtcagaggttcagagttgtcaaattctccaattagagcaagagatgaggaaaggaaagggagacgaaagaaagaggctgtgcctcagaaataataacgccgcatatctacaactatctgatctttgacaaacctgagaaaaacaagcaatggggaaaggattccctatttaataaatggtgctgggaaaactggccaaccaatgtagaaagctgaaactggatcccttccttgcaccttatacaaaaatcagttcaagatggattaaagacttaaacgttagacctaaaaccataacctaggcattaccattcaggacataggcatgggcaaggacttcatgtctaaaacaccaaaaccaatggcaaccaaaggcaaaattgacaaatgggatctaattaaactaaagagcttctgcacagcaaaagaaactaccatcagagtgaacaggcaacctacaaaatgggagaaaattttcgcaacctactcatctgacaaagggctaatatccagaatctacaatgaactcaaacaaatttacaagaaaaaaacaaccccatcaacaagtgggtgaaggatatgaacagacacttctcaaaagaagacatttatgcagccaaaaaacacatgaaaaaatgctcatcatcactggccatcagagaaatgcaaatcaaaaccacaatgagataccatctcacaccagttagaatggcgatcattcaaaagtcaggaaacaacaggtgctggagaggatgtggagaaataagaacacttttacactgttggtaggactgtacactagttcaaccattgtggaagacagtgtggcgattcctcaaggatctagaactagaaataccatttgacccagccatcccattactgggtatatacccaaaggactataaatcatgctgctataaagacacacgcacgtgtatgtttattgcggcattattcacaatagcaaagacttggaaccaacccaaatgtccaacaatgacagattggattaagaaaatgtggcacatatacaccatggaatactatgcagccataaaaaacgatgagttcatgtcctttgtagggacatggatgaaattggaaatcatcattctcagtaaactatcgcaagaacaaaaaaccaaacaccgcatattctcactcataggtgggaactgaacaatgagaacacatggacacaggaaggggaacatcacactctggggactgttgtggggtggggggagggggagggatagcattgggagatatacctaatgctagatgacgagttagtgggtgcagcgcaccagcatggcacatgtatacatatgtaactaacctgcacactgtgcacatgtaccctaaaacttaaagtataataataaaaaagaaaaattgcttcaaatgaacaac

SEQ ID NO: 13021 - DNA, 3112 bp, Homo sapiens
  CDS (112)..(861)
ttactaacggaatctgaatcagagcatggtgaaagggttaatggacgatgtctgaacaattggcttaggagagggaaaactttaaaactaatattctctctaagaaaagaaatggaagcgttcttggtttcagtaggggcaacaacagtccacttctcagacaaacaatggctttgtgactttggcttcttggtggacattatggaacaccttcgagaactcagtgaagaattacgagttagtaaagtctttgctgctgctgcctttgaccatatttgtactttcgaagttaagctgaatttatttcaaagacatattgaggaaaaaaatctaacagactttcctgccctcagagaagttgttgatgagctaaaacagcaaaataaggaagatgaaaaaatatttgatcccgataggtatcaaatggtgatctgtcgtctccaaaaagaatttgagagacattttaaggacctcaggttcattaaaaaggacttaggacttttttcaaatccatttaactttaaacctgaatatgcacctatttcagtgagggtggagctaacaaaacttcaggcaaacactaatctttggaatgaatacagaatcaaagacttggggcagttttatgctggattgtctgctgaatcctacccaattatcaaaggggttgcctgtaaggtggcatccttgtttgatagtaaccaaatctgtgaaaaggctttttcatatttgactcgaaaccaacacactttgagtcagccattaacagatgagcatctccaagccctgtttcgggttgccacaactgaaatggagcccggttgggatgaccttgtgagagaaagaaatgaatctaatccataaggctttgtagtacaagattgaaaaactcaacaagaatttaattctaaaagcaaaaattggtttgagttttcaagtttactaatttggattgtgagaaagtaccaagtaccagccgtccaaactgatcacaattaaaattctgacagttgccttttttttcatctcaaatggcagcatgggactgaaacatgagaatgccaccttttttaaaacttagtttagtgacaaagtcattgtcttttatgatatagttaattttaaagagatttagtattaatgtgagttgaatttgcagtctgttttttaggtgttctgaagataaatgccaaaaatttcagctcttattttaatggagtgttaaaattctgattcatatagtcttaaattatcaactccttaaatgtgcttttgaaccaatttgcagaagctcacatagcaagttcataagtttccaaaaaggaagcccatacataacagtggaggtgttttgtctaaccatcaaaatgtttgagacttttttttaaacatttctgagttcgaaggtaatactgacagatttcttccctcttccctccccatcacccacctcagtgataacacattactgatagaggaagtcattagaatcatttttaagtttcagatataggagacttcatgcaatttggagataagactaattattgggggttttccttggattttttttttaataactgggggctattttatcagcttgcctattaaaggactatggtaagtatagaatcttaatggttgccagttagtaattctttttttttttttttttactgtagacacaagtttggccctatcaaaaacgatgaggaaaaaagattgcactccaggattaggaggtgtgagatattttagcttttttgtcttatctgcgtgggtattgctgctttattttaaaaaatcctgcctaaagtaaacactttgttttaaaatgatacagtatcagattttgttagatgctagaaatggatttattctaaaatttggaactgtcgtacacattctatatgtaagatagcacacaagtagaaatatttaaaagcagtcttattcacagattgcagtaattctgtatttctactaagataatctgctttgtgccaaaacagtaatttccaagcttctgttcaccatgaaaaggcaatcttaaagttcattatgtaaaactaattataaacaggacccaatttatattcatagatcctctcaagtattatacaatttaaaaactcttgttccaaagtcctgtcttaactattgaaacaccttaatctgtggttactaatccagcaaattcaaggaaccaggctatgactaagaatttaggtggaattgatgtctgggcaattaaaataaacggcataagagcttaaaaaccaaagttgtgccagtggctttcaactagaggcagtaacctgtcattccagaggatgctgagaaatgtgtaggggcgcttttttggttgtcatatttactaggggcttctgttggcatttaagcctaaagacactcacccctgcagtgcatgggacagcctggcacaatgaagaattagccctcccaaaatgtagattattttatttcaagggatagggcagattaccattagaagcaaaattaaaagtacaagctgggcaaactgacagaatactagataggagagactaattccaaccttctaaatttggctagtaaagtgcaataaaggcattgataagttctgttagctcaccatagcacttgtaaatcaggaattaataattgaatcagatttaagggctctgtcctgttatacatatttaaggcagaaaaaaagttacatgtcgattaggtacttatcaagaatggtcaagctgagattttggttaatagagtaagcttacatatctagagaaacaacatagtggaaaaccgaaaaaaaaaaaacagaaaaatctaccggtaatttcccaatagctttgaatattcacagcagagctttattacttgagagaaagactggaagacctgaaagccacttctgcttcctaaccccagttccttaaatattgaaatcttgtacattttgtgaaattccagtatgttttgcttaaggtgttaataaaattagtttgcatcatgtagtcattgagtgagggggagatataagccaaggattttaaattgacccttagctatagagaatttgctataagctagtcttgtttgt

SEQ ID NO: 13022 - protein, 250 aa, Homo sapiens
MEAFLVSVGATTVHFSDKQWLCDFGFLVDIMEHLRELSEELRVSKVFAAAAFDHICTFEVKLNLFQRHIEEKNLTDFPALREVVDELKQQNKEDEKIFDPDRYQMVICRLQKEFERHFKDLRFIKKDLGLFSNPFNFKPEYAPISVRVELTKLQANTNLWNEYRIKDLGQFYAGLSAESYPIIKGVACKVASLFDSNQICEKAFSYLTRNQHTLSQPLTDEHLQALFRVATTEMEPGWDDLVRERNESNP

SEQ ID NO: 13023 - DNA, 2145 bp, Homo sapiens
  CDS (155)..(1516)
tagtgaagatgccttacttgaggaagaggatgcatctgagcaagatattcatttagctctggagtctgataattcaagcagtaaatcaagttgttcttcttcctggacaagccgatctgttgctccaggctttcagtaccaccctaatctacctatgcatgccgtcataatggaaaagtccaatgatcatttcattgtgaaaatacgacgtgcaacaccatctacctcttctggccttaaacagagtatgatgcctgatgaattattgacatctttgcccagacatggaaaggaagctgatgaaggaccagagaaagaatatatttcatgtcagaacacagtttttaaatctgtggaggaattggaaaactccaacaaaaatgttgatggcagcaagtcaactcatgaagaacagagctctatgatacaaacacaggttcctgatatatatgaatttcttaaagatgcttcagataagatgggtcatagtgatgaagtggctgatgaatgtttcaaattgcatcaagtatgggaaacaaaagtgcctgaaagcattgaagaattgccttcaatggaagaaatctcacactctgttggggaacatcttccaaacacatacgtagatctaacgaaagatccagtcactgaaaccaaaaacttgggggaattcatagaagtaacagttttacatattgatcagttgggatgttctggaggcaatttaaatcagagtgctcaaatattagacaattctttgcaggctgatactgtaggtgcttttattgatttgacacaagatgcttcaagtgaggctaaaagtgaaggtaatcatcctgcattagctgtggaagacttgggatgtggggtgatacaggtagatgaagataattgtaaggaagaaaaggcacaagtggcaaacaggcctttaaaatgcattgttgaggaaacctatatcgacttgaccacagaatctcccagttcatgtgaagtaaaaaaagatgagttaaaatcagagccaggatcaaattgtgataactcggagttgcctgggactttgcataatcctcacaaaaagagaagaaacatttctgatctaaatcatcctcataaaaaacaaagaaaggaaacagacttaactaataaggaaaagaccaagaaacctacccaagattcttgtgagaatactgaagctcaccaaaagaaagccagtaagaagaaggcccctcctgtgactaaagatccctcatcattaaaggcaaccccagggattaaggattcatcagcagcacttgccacttctacaagtctttctgcaaaaaatgttattaaaaagaagggagaaattatcattttatggacaagaaatgatgaccgggaaattttattggagtgtcagaaaagagggccatcatttaaaacatttgcatatttagccgccaagttggataaaaatccaaatcaggtctcagaaagattccagcagctaatgaagctctttgaaaagtcaaaatgcagataagttgctgaattcctgggactcttaactgatgttgcatactacacagaagcttcaaattcctcatgttttaaatgagcactagagggaggtttatcacctttttggttaccagatgataatctatatttgttattactcagtgactctctaatttcacatcagcatgttcagcttgtgctagtcatcattctgatttgcttatctgtttttggtcaaaatatttatttttaaacatgttagaacttaccaaaatgaaagcaacagtgatgtattgaaatcttagttttgatattttaaagaaatgactttctagattaaaaaaatagttttgtagcattttaaacttagtgactatttagttcaattgttcatccattttttatttgcttttataattgcctccttgttttggtatattgtaaaataatttaaataatgtatttataaatatgtataattatgatgtaaaataccgtgtgtatatgtatgtatgtgtgtttctgtatatgcacacacataaacggctttgcctagccaaggattttttttatctgtataaaactttttgtataaagtttgctttcaataacagtaatgtataataaaaccatgtaaagttttgttgt

SEQ ID NO: 13024 - protein, 454 aa, Homo sapiens [sequence omitted]

SEQ ID NO: 13025 - DNA, 2045 bp, Homo sapiens
  CDS (52)..(1635)
gagattctgtgccccttgtcgggccgcttgtttggctgctgccgtcacctcatggcgacgcgggtagaggaggcagcgcggggaagaggcggcggcgccgaagaggcgactgaggccggacggggcggacggcgacgcagcccgcggcagaagtttgaaattggcacaatggaagaagctggaatttgtgggctaggggtgaaagcagatatgttgtgtaactctcaatcaaatgatattcttcaacatcaaggctcaaattgtggtggcacaagtaacaagcattcattggaagaggatgaaggcagtgactttataacagagaacaggaatttggtgagcccagcatactgcacgcaagaatcaagagaggaaatccctgggggagaagctcgaacagatccccctgatggtcagcaagattcagagtgcaacaggaacaaagaaaaaactttaggaaaagaagttttattactgatgcaagccctaaacaccctttcaaccccagaggagaagctggcagctctctgtaagaaatatgctgatcttctggaggagagcaggagtgttcagaagcaaatgaagatcctgcagaagaagcaagcccagattgtgaaagagaaagttcacttgcagagtgaacatagcaaggctatcttggcaagaagcaagctagaatctctttgcagagaacttcagcgtcacaataagacgttaaaggaggaaaatatgcagcaggcacgagaggaagaagaacgacgtaaagaagcaactgcacatttccagattaccttagatgaaattcaagcccagctggagcagcatgacatccacaacgccaaactccgacaggaaaacattgagctgggggagaagctaaagaagctcatcgaacagtacgcactgagggaagagcacattgataaggtgttcaaacgtaaggaactgcaacagcagctcgtggatgccaaactgcagcaaacgacacaactgataaaagaagctgatgaaaaacatcagagagagagagagtttttattaaaagaagcgacagaatcgaggcacaaatacgaacaaatgaaacagcaggaagtacaactaaaacagcagctttctctttatatggataagtttgaagaattccagactaccatggcaaaaagcaatgaactgtttacaaccttcagacaggaaatggaaaagatgacaaagaaaattaaaaaactggaaaaagaaacaataatttggcgtaccaaatgggaaaacaataataaagcacttctgcaaatggctgaagagaaaacagtccgtgataaagagtacaaggcccttcaaataaaactggaacggttagagaagctgtgcagggctcttcaaacagaaaggaatgagctcaatgagaaggtggaagtcctgaaagagcaggtatccatcaaagcggccatcaaagcggcgaacagggatttagcaacacctgtgatgcagccctgtactgccctggattctcacaaggagctgaacacttcctcgaaaagagccctgggagcgcacctggaggctgagcccaagagtcagagaagcgctgtgcaaaagcccccgtccacaggctctgctccggccatcgagtcggttgactaagatgaggtgtgatcactgtattgagagatatattttgtgtataactttctctgttagtagttaactattggttttgtggtgaaaattttcttactttttctaccatatctgtattttcttagaactactggacttatgtggtacaggaggctgcttagcagttttgaatagtttaatctataaattttcctcagctgtgttgcacatcagcctcgttctccctccactggaatgcatgtgttcactgccttgtcctttctctccctgctccttgcacattatcatcctaatgaaaatttcactgacagggccgaccattacaagggaactttgttctgacgatggttccttgatgtgaaaacaatattaatttaaacgtcttagcccccccccccataatattattc

SEQ ID NO: 13026 - protein, 528 aa, Homo sapiens
MATRVEEAARGRGGGAEEATEAGRGGRRRSPRQKFEIGTMEEAGICGLGVKADMLCNSQSNDILQHQGSNCGGTSNKHSLEEDEGSDFITENRNLVSPAYCTQESREEIPGGEARTDPPDGQQDSECNRNKEKTLGKEVLLLMQALNTLSTPEEKLAALCKKYADLLEESRSVQKQMKILQKKQAQIVKEKVHLQSEHSKAILARSKLESLCRELQRHNKTLKEENMQQAREEEERRKEATAHFQITLDEIQAQLEQHDIHNAKLRQENIELGEKLKKLIEQYALREEHIDKVFKRKELQQQLVDAKLQQTTQLIKEADEKHQREREFLLKEATESRHKYEQMKQQEVQLKQQLSLYMDKFEEFQTTMAKSNELFTTFRQEMEKMTKKIKKLEKETIIWRTKWENNNKALLQMAEEKTVRDKEYKALQIKLERLEKLCRALQTERNELNEKVEVLKEQVSIKAAIKAANRDLATPVMQPCTALDSHKELNTSSKRALGAHLEAEPKSQRSAVQKPPSTGSAPAIESVD

SEQ ID NO: 13027 - DNA, 3346 bp, Homo sapiens
  CDS (10)..(1068)
acgtactccatgcgctacctgctgcccagcgtcgtgctcctgggcacggcgcccacctacgtgttggcctggggggtctggcggctgctctccgccttcctgcccgcccgcttctaccaagcgctggacgaccggctctactgcgtctaccagagcatggtgctcttcttcttcgagaattacaccggggtccagatattgctatatggagatttgccaaaaaataaagaaaatataatatatttagcaaatcatcaaagcacagttgactggattgttgctgacatcttggccatcaggcagaatgcgctaggacatgtgcgctacgtgctgaaagaagggttaaaatggctgccattgtatgggtgttactttgctcagcatggaggaatctatgtaaagcgcagtgccaaatttaacgagaaagagatgcgaaacaaggtgcagagctacgtggacgcaggaactccaatgtatcttgtgatttttccagaaggtacaaggtataatccagagcaaacaaaagtcctttcagctagtcaggcatttgctgcccaacgtggccttgcagtattaaaacatgtgctaacaccacgaataaaggcaactcacgttgcttttgattgcatgaagaattatttagatgcaatttatgatgttacggtggtttatgaagggaaagacgatggagggcagcgaagagagtcaccgaccatgacggaatttctctgcaaagaatgtccaaaaattcatattcacattgatcgtatcgacaaaaaagatgtcccagaagaacaagaacatatgagaagatggctgcatgaacgtttcgaaatcaaagataagatgcttatagaattttatgagtcaccagatccagaaagaagaaaaagatttcctgggaaaagtgttaattccaaattaagtatcaagaagactttaccatcaatgttgatcttaagtggtttgactgcaggcatgcttatgaccgatgctggaaggaagctgtatgtgaacacctggatatatggaaccctacttggctgcctgtgggttactattaaagcatagacaagtagctgtctccagacagtgggatgtgctacattgtctatttttggcggctgcacatgacatcaaattgtttcctgaatttattaaggagtgtaaataaagccttgttgattgaagattggataatagaatttgtgacgaaagctgatatgcaatggtcttgggcaaacatacctggttgtacaactttagcatcggggctgctggaagggtaaaagctaaatggagtttctcctgctctgtccatttcctatgaactaatgacaacttgagaaggctgggaggattgtgtattttgcaagtcagatggctgcatttttgagcattaatttgcagcgtatttcactttttctgttattttcaatttattacaacttgacagctccaagctcttattactaaagtatttagtatcttgcagctagttaatatttcatcttttgcttatttctacaagtcagtgaaataaattgtatttaggaagtgtcaggatgttcaaaggaaagggtaaaaagtgttcatggggaaaaagctctgtttagcacatgattttattgtattgcgttattagctgattttactcattttatatttgcaaaataaatttctaatatttattgaaattgcttaatttgcacaccctgtacacacagaaaatggtataaaatatgagaacgaagtttaaaattgtgactctgattcattatagcagaactttaaatttcccagctttttgaagatttaagctacgctattagtacttccctttgtctgtgccataagtgcttgaaaacgttaaggttttctgttttgttttgtttttttaatatcaaaagagtcggtgtgaaccttggttggaccccaagttcacaagatttttaaggtgatgagagcctgcagacattctgcctagatttactagcgtgtgccttttgcctgcttctctttgatttcacagaatattcattcagaagtcgcgtttctgtagtgtggtggattcccactgggctctggtccttcccttggatcccgtcagtggtgctgctcagcggcttgcacgcagacttgctaggaagaaatgcagagccagcctgtgctgcccactttcagagttgaactctttaagcccttgtgagtgggcttcaccagctactgcagaggcattttgcatttgtctgtgtcaagaagttcaccttctcaagccagtgaaatacagacttaatttgtcatgactgaacgaatttgtttatttcccattaggtttagtggagctacacattaatatgtatcgccttagagcaagagctgtgttccaggaaccagatcacgatttttagccatggaacaatatatcccatgggagaagacctttcagtgtgaactgttctatttttgtgttataatttaaacttcgatttcctcatagtcctttaagttgacatttctgcttactgctactggatttttgctgcagaaatgtatcagtggcccacattaaacataccagttggatcatgataagcaaaatgaaagaaataatgattaagggaaaattaagtgactgtgttacactgcttctcccatgccagagaataaactctttcaagcatcatctttgaagagtcgtgtggtgtgaattggtttgtgtacattagaatgtatgcacacatccatggacactcaggatatagttggcctaataatcggggcatgggtaaaacttatgaaaatttcctcatgctgaattgtaattttctcttacctgtaaagtaaaatttagatcaattccatgtctttgttaagtacagggatttaatatattttgaatataatgggtatgttctaaatttgaactttgagaggcaatactgttggaattatgtggattctaactcattttaacaaggtagcctgacctgcataagatcacttgaatgttaggtttcatagaactatactaatcttctcacaaaaggtctataaaatacagtcgttgaaaaaaattttgtatcaaaatgtttggaaaattagaagcttctccttaacctgtattgatactgacttgagttattttctaaaattaagagccgtatacctacctgtaagtcttttcacatatcatttaaacttttgtttgtattattactgatttacagcttagttattaatttttctttataagaatgccgtcgatgtgcatgcttttatgttttttagaaaagggtgtgtttggatgaaagtaaaaaaaaaaataaaatctttcactgtctct

SEQ ID NO: 13028 - protein, 353 aa, Homo sapiens
MRYLLPSVVLLGTAPTYVLAWGVWRLLSAFLPARFYQALDDRLYCVYQSMVLFFFENYTGVQILLYGDLPKNKENIIYLANHQSTVDWIVADILAIRQNALGHVRYVLKEGLKWLPLYGCYFAQHGGIYVKRSAKFNEKEMRNKVQSYVDAGTPMYLVIFPEGTRYNPEQTKVLSASQAFAAQRGLAVLKHVLTPRIKATHVAFDCMKNYLDAIYDVTVVYEGKDDGGQRRESPTMTEFLCKECPKIHIHIDRIDKKDVPEEQEHMRRWLHERFEIKDKMLIEFYESPDPERRKRFPGKSVNSKLSIKKTLPSMLILSGLTAGMLMTDAGRKLYVNTWIYGTLLGCLWVTIKA

SEQ ID NO: 13029 - DNA, 2256 bp, Homo sapiens
  CDS (157)..(1065)
cttaaacagttacatgagaaccaaaaaaacaacccaacgcttttggagaataaatcaggatctggagttccaaacagtaataccaattccagtgtgcagcatgttcagataagagttgcccgcttggaagataatacagccatctcttctagccccatggcagcattgcagattccagtccagatcacccatgtttcttcagcagactctcctgctaccgttgactcagaaacaataacactaaacagtggaacactacagacatttgagattcttccctctttccatctacagcccactggcactccaggcacctacctacttcaaacaagctcaagccaaggccttcccctaactctgactgctagtcccacagtaaccctgacagctgctgctcctgcttctcctgaacagattattgttcatgctttatccccagaacatttgttgaacacaagtgataatgttacagtgcagtgtcacacaccaagagtcatcattcagactgttgccacagaggacatcacttcttccatatcccaagcagaactgacagtcgatagtgatattcagtcatctgattttcctgagcctccagacgccctagaagcagacactttcccagatgaaattcatcaccctaagatgactgtggagccatcatttaatgatgctcatgtatccaaattcagtgaccaaaatagcacagaactgatgaatagtgttatggtcagaacagaagaagaaatctctgacaccgaccttaaacaagaggaatcaccctctgatttagccagtgcttatgttactgagggtttagagtctcccactatagaagaacaagttgatcaaacaattgatgatgaaacaatacttatcgttccttcaccacatggctttatccaggcatctgatgttatggatactgaatctgtcttgcctttgacaacactaacagatcccatactccaacatcatcaggaagaatcaaatatcattggatcatccttgggcagtcctgtttcagaagattcaaaggatgtcgaagatttggtaaactgtcattagaataattcttagaaataggcagtaagcaaagaaggcacactgttaattacaacctcttcaaagaaataggagcaacccccaagaggcttaatttaccaatttaaatagccacagtccttaagccacacacattgttgctgctatgactttttacctcctttaaacacatcatctgaggttgagttttatgacagtatgtagttgagtggaggctgggagttttaagcataaatccctgtttagtgttacatgggaataaggaatttcattcacttcagccactaagaaaagtttagagtcacgaaagcttaactgctgtggtttaaagtacagtttctctaaagatcagacatggcactgtctcctctcaagcctggttgtagttcagatgagtcttttcaacatggtcttcaacatggtctagagcttaccagtgatcttctgatcttcaagaagactaagtttgagacttgaccagcatacaagtatagagacctaggaggtggtcttgtggtggtacatttggttaacccattgctggcagtgggagctgatttaggcagggtaaacaggaaagcattaaaagttaaaattcactacaggttttttgttacttttaaagggaatatggataagcatagtaacaaaacccaccagaatctaagcagttttcaccccctcagaaaccactgtcattagtttacaaagttagcactttgaagtaaaactaaatgaggaaggaagtaatgttacctatccttgataccatgaccatttattagatgttttgctatataaattaccgagagaatagtttgtcatccacttagtgtgttagctggtggggtacaatataacctctcatctcaggctattttaaaaaaacaatatttgcttctataacaaaaggaaacaaatctaagaatcattcctgtactacagaagggttaaggcaaaggtagccttttgggctttttaatgaatatgacccctatagaaaagtcaagaaaaaaaaacccttgtataaattattttatttattattgtaattagatcttcacaaagttgtcttttcactgtgttttgtcaacgtgaaattaaattgtagttataagcaaaagttggttgcctagggaacaattgtatattcagtttaacagaaataaaagaatatttgtcttaagatgc

SEQ ID NO: 13030 - protein, 303 aa, Homo sapiens [sequence omitted]

SEQ ID NO: 13031 - DNA, 2300 bp, Homo sapiens
  CDS (116)..(1450)
gacagagcctcattcattcagatataagaacaggaggaaagagtccattgacgtgaaatcgatatcatctcgaggcagtgatgcaccaagcctgcagaatcgtcgctatccgtccatggcgaggatccactccatgaccatcgaggctcccatcacaaaggttataaatataatcaatgcagcccaagaaaacagcccagtcacagtagcggaagccttggacagagttctagagattttacggaccacagaactgtactcccctcagctgggtaccaaagatgaagatccccacaccagtgatcttgttggaggcctgatgactgacggcttgagaagactgtcaggaaacgagtatgtgtttactaagaatgtgcaccagagtcacagtcaccttgcaatgccaataaccatcaatgatgttcccccttgtatctctcaattacttgataatgaggagagttgggacttcaacatctttgaattggaagccattacgcataaaaggccattggtttatctgggcttaaaggtcttctctcggtttggagtatgtgagtttttaaactgttctgaaaccactcttcgggcctggttccaagtgatcgaagccaactaccactcttccaatgcctaccacaactccacccatgctgccgacgtcctgcacgccaccgctttctttcttggaaaggaaagagtaaagggaagcctcgatcagttggatgaggtggcagccctcattgctgccacagtccatgacgtggatcacccgggaaggaccaactctttcctctgcaatgcaggcagtgagcttgctgtgctctacaatgacactgctgttctggagagtcaccacaccgccctggccttccagctcacggtcaaggacaccaaatgcaacattttcaagaatattgacaggaaccattatcgaacgctgcgccaggctattattgacatggttttggcaacagagatgacaaaacactttgaacatgtgaataagtttgtgaacagcatcaacaagccaatggcagctgagattgaaggcagcgactgtgaatgcaaccctgctgggaaaaacttccctgaaaaccaaatcctgatcaaacgcatgatgattaagtgtgctgacatggccaacccatgccgccccttggacctgtgcattgaatgggctgggaggatctctgaggagtattttgcacagactgatgaagagaagagacagggactacctgtggtgatgccagtgtttgaccggaatacctgtagcatccccaagtctcagatctctttcattgactacttcataacagacatgtttgatgcttgggatgcctttgcacatctgccagccctgatgcaacatttggctgacaactacaaacactggaagacactagatgacctaaagtgcaaaagtttgaggcttccatctgacagctaaagccaagccacagagggggcctcttgaccgacaaaggacactgtgaatcacagtagcgtaaacaagaggccttcctttctaatgacaatgacaggtattggtgaaggagctaatgtttaatatttgaccttgaatcattcaagtccccaaatttcattcttagaaagttatgttccatgaagaaaaatatatgttcttttgaatacttaatgacagaacaaatacttggcaaactcctttgctctgctgtcatcctgtgtacccttgtcaatccatggagctggttcactgtaactagcaggccacaggaagcaaagccttggtgcctgtgagctcatctcccaggatggtgactaagtagcttagctagtgatcagctcatcctttaccataaaagtcatcattgctgtttagcttgactgttttcctcaagaacatcgatctgaaggattcataaggagcttatctgaacagatttatctaagaaaaaaaaaaaacgacataaaataagcgaagcaactaggaccaaattacagataaactagttagcttcacagcctctatggctacatggttcttctggccgatggtatgacacctaagttagaacacagccttggctggtgggtgccctctctagactggtatcagcagcctgtgtaacccctttcctgtaaaaggggttcatcttaacaaagtcatccatgatgagggaaaaagtggcatttcatttttggggaatccatgagcttcctttatttctggctcacagaggcagccacgaggcactacaccaagtattatataaaagccattaaatttgaatgcccttggacaagcttttctt

SEQ ID NO: 13032 - protein, 445 aa, Homo sapiens [sequence omitted]

SEQ ID NO: 13033 - DNA, 2015 bp, Homo sapiens
  CDS (337)..(900)
atgaatagaattggaggaggtatgtataaagatttgtttttttgtatgtacccatcaccatttttaataaactagaaactgtgttgagaattccatgaaaaaaaagtcatggtttattgttggctcatgttctaaaggctgctagcagaaattgagcctggtacatacttaaaggaaggtgatgtgttaagaagtagctgcacaaggtagggtggatgaagagcttactggtgagatttaacatttacaaaacgtacctttcagctacatgactgacagttggatctcaaaattaatctttattccataggaatagggtttggtggtctggaagcaatgaatagcatgggaggatttggaggagttggccgaatgggagagctgtaccgtggtgcgatgactagtagcatggagcgagattttggacgtggtgatattggaataaatcgaggctttggagattcctttggtagacttggtggtggaatgggtagcatgaacagtgtgactggaggaatggggatgggactggaccggatgagttccagctttgatagaatgggaccaggtataggagctatactggaaaggagcatcgatatggatcgaggatttttatcgggtccaatgggaagcggaatgagagagagaataggctccaaaggcaaccagatatttgtcagaaatctaccttttgacttgacttggcagaaactaaaagagaaattcagtcagtgtggtcatgtaatgtttgcagaaataaaaatggagaatggaaagtcaaaaggctgtggaacagtcagatttgactccccagaatcagctgaaaaagcctgcagaataatgaatggcataaaaatcagtggcagagaaattgatgttcgcttggatcgtaatgcataatttcaagccatggttggaacattcctacatctgttttgctgaatctcctagtaaaagtcatttttttaaagtaatattgtatgcttacaaaagctgtaaaaatgaacttttaaaactcccaccagcttttaacagtataatgttaaaaatatactgtaatttttgttaatctcaagtttgggtttttaaagacagcaagtctggtcattcagtttaaatgaatggttatactgtttttaatgaaataagccattttcttgttgttttcagtactacatagttggatttgtttgttctagtttctccagtttttgtcaacttattgtatggtaaaacatagattttttccccccaaacttctgttttataatatgtaatttttcatgaaaagaaagggctcagaaaaattaggatgtgattttggttggttttaaattactgtaagttttagattctaaggttcaagatttttaaaatttgatttaaatgaagaaatggatttttctctctgcccctccctgccattcatattttctgcataacactattaataatatcaacctccacagccccttattttattatttccaataattccaagttcatatagaactgataatgtagcaagccccaagtatgataataggcagactattcccaactttctgtctagtttccagccattgaagtgaactgctaaaaaaagaaaaataattgaaatgttgagagagatggttatgtaagttagtcctctgctgtttacttctgcaggagctgatccatttataaatgcagttttaataaaccatggaataccaaggcacaacatatcaaacacattggatcccacgatgttagacatagccatatctcctttccctacaaaagaaaagcatactgttaaaatgtgcttaccaatactgcgttttattaataatcttcataagaaaagaaacactggatacttttttgttgttgattcgttttgaaaaattgttgttagagcaaaagtcttactgaatttgtatttttaaatttttcttgggttagtatttaaagtcttaacatttatttaataattatatttattaaaccatctttcaataaggtat

SEQ ID NO: 13034 - protein, 188 aa, Homo sapiens
MNSMGGFGGVGRMGELYRGAMTSSMERDFGRGDIGINRGFGDSFGRLGGGMGSMNSVTGGMGMGLDRMSSSFDRMGPGIGAILERSIDMDRGFLSGPMGSGMRERIGSKGNQIFVRNLPFDLTWQKLKEKFSQCGHVMFAEIKMENGKSKGCGTVRFDSPESAEKACRIMNGIKISGREIDVRLDRNA

SEQ ID NO: 13035 - DNA, 1574 bp, Homo sapiens
  CDS (55)..(1137)
gttctcttcgcccggtccctgccgcgcacaggcctcggggtcggcgggagcacgatggcggccgctaggagactcatggcgctggccgccggcatctctccgcgcctgcagccgctgggtccccgcgctgctgggcgacagggtcgctcgcgcggcttctcttcaagctgcgcccaccccgaccacaccaaggaagccgccgaggccgagtcagggatggcccccggcgggcctggggaaggcgacggaagcttggtgaacgcttctagggacctattaaaagagttcccacagcccaaaaatcttctcaacagtgtgattggaagagccctcggcatctcacatgcaaaagacaaactagtctacgtgcacacaaatggaccgaagaaaaagaaagtcacactgcacataaaatggcccaagagcgtggaggtagaaggctatggcagcaagaagatcgatgctgagcggcaggctgcagctgcagcctgccagctgttcaagggttggggtctgctaggtccccggaatgagttgtttgacgcagccaaataccgagtgctagctgatcgctttggctcccctgccgacagctggtggcgtccggaacccaccatgccccctacttcctggcggcagctgaatccagagagtattcgaccagggggacctgggggcctatcccgctctttaggccgggaagaagaggaggacgaggaggaagagctagaagaagggaccatagatgttaccgacttcttgtccatgacccagcaggattcccacgctccactcagggactcaagggggagttcctttgagatgacagatgacgacagtgccattagggctctgacccagtttccacttcccaagaaccttctggccaaggtgattcagattgcaacgtcatcctccacagctaagaacctcatgcagttccatactgtgggcaccaagaccaagctgtctacactcaccctgctctggccctgccccatgacctttgttgccaaagggcgccgcaaagcagaggctgagaataaggcggcagccttggcctgcaagaaactgaagagcctgggcctggtggacaggaacaacgaaccgcttacacacggttacggagccgatggctgacgtatttcatggcagtcaagtccaatggcagcgtcttcgtccgggactcctctcaggtgcacccgctagctgtgctgctgctgaccgacggggacgtgcacatccgtgatgacgggcgccgggccaccatctcactgagcgacagtgacctgctgcggctggagggtgactcgcgtaccgtgcggctgctgaaggagctgcggcgggccctgggccgcatggtggagcggagcctgcgcagcgagctggctgcacttccccccagcgtacaggaggagcacgggcagctgcttgcgctactggcagagctgctgcgaggaccctgtggcagctttgatgtgcgcaagacagctgacgactgagccctgcttctgctggggctgtgtacagagtgcaaatgtttatttaaaataaagttctatttatcccttgtg

SEQ ID NO: 13036 - protein, 361 aa, Homo sapiens
MAAARRLMALAAGISPRLQPLGPRAAGRQGRSRGFSSSCAHPDHTKEAAEAESGMAPGGPGEGDGSLVNASRDLLKEFPQPKNLLNSVIGRALGISHAKDKLVYVHTNGPKKKKVTLHIKWPKSVEVEGYGSKKIDAERQAAAAACQLFKGWGLLGPRNELFDAAKYRVLADRFGSPADSWWRPEPTMPPTSWRQLNPESIRPGGPGGLSRSLGREEEEDEEEELEEGTIDVTDFLSMTQQDSHAPLRDSRGSSFEMTDDDSAIRALTQFPLPKNLLAKVIQIATSSSTAKNLMQFHTVGTKTKLSTLTLLWPCPMTFVAKGRRKAEAENKAAALACKKLKSLGLVDRNNEPLTHGYGADG

SEQ ID NO: 13037 - DNA, 2372 bp, Homo sapiens
  CDS (22)..(612)
gtctgtaggttaagggagaagatggcggcgctaggggaacccgtgcggctggagagagatatttgtagagcaattgaattattggaaaaactacaaaggagtggagaagtaccaccacagaaacttcaggctttgcaaagagtccttcaaagtgaattctgcaatgctgtgagagaggtatatgaacatgtctatgagactgtggacatcagtagcagtcctgaagtgagagcgaacgctactgcaaaggctactgttgctgcatttgctgccagtgaaggacattctcatcctcgagttgttgagctaccaaaaacagaagagggccttggattcaatattatgggaggcaaagaacaaaactctccaatctatatatcccgaataattccaggtggaattgctgatagacatgggggcctcaaacgtggagatcaactcctctctgttaatggagtgagtgttgaaggagaacatcatgaaaaagctgtagaactgctgaaagccgcacaaggaaaggttaaattagtggtacgatacacacccaaagtcttagaagaaatggagtcgcgctttgaaaaaatgagatcagcaaaacgcaggcaacagacctaatacatttcaaaacttgatatttcattttgcgttttagctagagaagttttccttgtgacttactaatggctgcaatgccaatgattgtaagaaaacaaacaaatttatcatgaaattctccttgtcattttataaatgcctattttaacatcatttatggttccagagatgcatacacttttttctgacaagaaaaagtaaaaggtgatgagggcaattctgtcctactgtttttacaggcctttttcaaatgcagattttgtcataaagttgttatagattttttaaaatgcttttttaatattaaaatgtacttttacattcttaatctttttttagaaaggaaaagttttcttcatttagctgctgatttaaaagtaaagttctccaattctttttttttgcttactctattttttttaacctgtgaaatttctttacagttttccaagaaattaagcataacagtctcatctacggcagttcattacactgtcaatgttaacatcattgctgcattttgtactttgaacacacacataatatatataaccagtggtaaatcatgactcagtacagtgcaagttttttcacttttacttaaacataatatataatggatattcatttatactgatttatgaaagtaagtttttaaacactgaaacaatcattgctaaaatacatattcttaatatttgagcattgaggcaagaggatgtaattgatagcattacttattacatccctatttatgttcaaccgtacatcaaattataaatgcaaaacaggttcagatttcatcttttgtgatttcttttaaatactattcatttttatttaaatgcacagtatttcccctatattttagtccttccattcctagagacaaaccagttatttggtggtgggaagtagctgaagcaaagaaggaaaagtaatacctttaacctcactagcttcaagagtagacattcttactagctcaatttaaataattgattttaaataggaagaaaagaggatatatttaagatacatagaaattatgatgcgaagtattcatgagaatctgtagattccatcaaaataagtaggaactcatactaaaattgttggatttaaagaggcaacttttgtttatgattcaaatatgggaatttgagaaatatttcatttgtccactggatgtcactattttactaaaaggcagctattagtgtgggactgtgactgaggtcttaaagactgaaagagttggggttcattttctgttacaacttacaggaacatttgtactttaagaaaaatttaagtgacaaatgttagaagatgatggattgaaaaatataagtaatttggcatattgaccctatataaaaaagtgggcattttgtaacattccttcaggaagaatagaattgtatgcttttttctgcatgtttgtgatcactgtgagtctcagatgattattccagttttcaatgatttttcaaaataaaagtcaatcagcattgttatttatcattaaggtattgaacactggattgcatggttgaatgtgtctttaattcactacaaaatgtgcttgttattgataggatcatgttgttaaattgtaaattttcaaaattaattgatgttttaaaaatgttgagaccaaagtagtatagaagtatggacttaatttaattgtaaaattattagaggtatttgttgtagagctttatatattaaagagaggtattggtgcatat

SEQ ID NO: 13038 - protein, 197 aa, Homo sapiens
MAALGEPVRLERDICRAIELLEKLQRSGEVPPQKLQALQRVLQSEFCNAVREVYEHVYETVDISSSPEVRANATAKATVAAFAASEGHSHPRVVELPKTEEGLGFNIMGGKEQNSPIYISRIIPGGIADRHGGLKRGDQLLSVNGVSVEGEHHEKAVELLKAAQGKVKLVVRYTPKVLEEMESRFEKMRSAKRRQQT

SEQ ID NO: 13039 - DNA, 1833 bp, Homo sapiens
attacaatgaaaaattttgtgttccaaggcaactgtatcataggtgtaaacataaagcatataaattatgacaatccttttagaggtagggtcaatatagtggataaacctgtctatcagacgtattgattatagcagtactatagttattctgctgtcattattaaagatgattatattcattcaaagctttagatgtgtcccatgtggcaagaaaggagacagtgaattttgtcaaacaataaaaatgtgtcaggaacacaaggatgaaggggatgtcatttgcctggtaagaactgggttatttccactgaaatttgttatgtttaaggaaattaagattttaagcttgaaattatacaagcagaatctaatttaattttgattgactgaagaaccagggtcttttgctctcctttggtatttcactctcctttggtattcaatcatgtgtcttttagtgctttttaaaattttacccattctttaattcagcatctccctatgtatgtgtcatagaatacttagttctgctagatattctgcaaatatatttgggaattacttcctgctgtttcgccttcttaggttcatagtacacatcagcatatgagaatctctgagaggtcctctagaaaggagagaaaaagcacctcttttggctcaatgttttccaaacttatttgaccccaaaacctttttcatatacccaataataagctacagaactaatattctgcaaatgtctcttggaacacactgccttaaacagatatttctatagctgtcagtatagttatgttgctcccaagcctagttatctccagttgttttaagggtgttatgaaaaattcttaaaatatatatgaatttgtgtaacacacacagagacacacacacatactactttaagggggtgaggatcattaattcagataatttttaagtttcctagtgattctcaatctccttgaattttacttacatttacacacacacgcacacacatatgtatatacacatatcattttaagaagctgaggatcactaattcagataatgtataagtttcccagtgattctcaacctctttgaattttacttataattacatacacacacacactgctacttatataaatgttctcatgtaatcatggtaacagctcaaattcccaaagcaagggaagacttctcattgtcagttaaacctgttaaaacatgaaaatattcattgagcctagttccttgttataaaatacaagaaataagacattcaggcattttccctttatgaagatgttcagtcatcctttccttgaactacaattaggaaaagtatatgtctttattccattgaagttctcgagagtgatataaatactttggggggtatctactatgtgcctaactagtcctgttctaggcttagtggaagctagtaaagaaatataattcatggatcaggctcataaagattttataatatttttagttaaacaagagttgggaaacaggtggagaataatgcaagagagtttgtaattaagtgccaattataccaattgctagacccaggatgtatctttaattcttgtcatccaggtcaacatatgatgctgctataagtctggggctcaaattgatatcccagtagcaataaacatataatataggaggagtctgaatgtagagatgaaaaatacagaatgtaatggcttctcttttctctcttgcggaattgcattcaaaccagaacagtgccttagaatggatgtgcccaactgctctgtatttatgcaatatttgaataaagcggaaatgtatgtgctc

SEQ ID NO: 13040 - DNA, 2068 bp, Homo sapiens
  CDS (64)..(1842)
tacgttggaagtgttcgtccgcttgtcactgaattggaccctgatgctcccataagacagaaaatgccccttgatgatctggatagagaagatgaagttagattactcaaatatctctttactctaatccgtgctggaatgacagaagaggcacaacgactctgtaaacgctgtggtcaagcatggagagctgcaacacttgaaggctggaaactgtaccatgaccctaatgttaatggaggaacagaattagaacctgttgaagggaatccatatagacgcatttggaaaataagttgctggagaatggcagaagatgagctttttaatagatacgagagagcaatttatgcagctttaagtgggaatcttaagcagccgcttcctgtctgtgacacctgggaagacacagtttgggcctacttccgggtgatggtggacagtctggtagaacaggagatccagacatcagtagcaactctggatgaaactgaagaactccctagagaatatctgggagcaaactggacgttagaaaaggtttttgaggaacttcaagctactgacaaaaagagagttctggaagagaatcaagaacattatcatatagttcaaaagtttcttatcctgggagacattgatggtttgatggatgagtttagcaaatggctttccaaaagcagaaacaatctacctggacacctgcttcgctttatgactcaccttattttgtttttccgtactctgggactacagaccaaggaggaagtttctattgaagttttaaagacatacatacagcttttaataagagagaaacatacaaatcttatagcattttatacctgtcatttgcctcaagacctagctgttgcccagtatgcattatttttggaaagtgttacagaatttgaacagcgccaccattgcctggagttggctaaagaagcagatttggatgttgcaacaataacaaaaactgtagttgagaatattcgaaagaaagataatggtgaatttagtcatcatgacctggccccagccctagatactggcactactgaggaggatcgtttaaaaattgatgtaattgactggttggtatttgacccagcgcagagggcagaagcactgaaacaaggcaatgcaattatgagaaaattcttggcatcaaaaaagcacgaagctgcaaaagaagtatttgtgaaaattcctcaggattctatagcagaaatctataatcagtgcgaggaacaaggaatggaaagtccacttcctgctgaagatgataatgctatccgagaacatttgtgcatcagagcttatttggaagcccatgaaacctttaatgagtggtttaagcatatgaattcagttccacaaaaacctgctttgatacctcaaccaacttttactgagaaagtggctcatgaacacaaagaaaagaaatatgaaatggattttggtatttggaaagggcatttggatgccctaactgctgatgtgaaggagaaaatgtataacgtcttgttgtttgttgatggagggtggatggtggatgttagagaggatgccaaagaagaccatgaaagaacacatcaaatggtcttactgagaaagctttgtctgccaatgttgtgttttctgcttcatacgatattgcacagtactggtcagtatcaggaatgcctacagttagcagatatggtatcctctgagcgccacaaactgtacctggtattttctaaggaagagctaaggaagttgctgcagaagctcagagagtcctctctaatgctcctagaccagggacttgacccattagggtatgaaattcagttatagtttaatctttgtaatctcactaattttcatgataaatgaagtttttaataaaatatacttgttattagtaattttttcttttgcattaccatgtaaaatttagacatttgaattttgtacttttcagaatattatcgtgacactttcaacatgtagggatatcagcgtttctctgtgtgcttgttaataaaactatataaaaattaaaattttctgtttttac

SEQ ID NO: 13041 - protein, 593 aa, Homo sapiens [sequence omitted]

SEQ ID NO: 13042 - DNA, 2107 bp, Homo sapiens
  CDS (63)..(1007)
aaaagcccgggccgaacggccccgccgcagagactcagcgcggatcgctgctccctctcgccatggcgcaggtgctgatcgtgggcgccgggatgacaggaagcttgtgcgctgcgctgctgaggaggcagacgtccggtcccttgtaccttgctgtgtgggacaaggctgaggactcagggggaagaatgactacagcctgcagtcctcataatcctcagtgcacagctgacttgggtgctcagtacatcacctgcactcctcattatgccaaaaaacaccaacgtttttatgatgaactgttagcctatggcgttttgaggcctctaagctcgcctattgaaggaatggtgatgaaagaaggagactgtaactttgtggcacctcaaggaatttcttcaattattaagcattacttgaaagaatcaggtgcagaagtctacttcagacatcgtgtgacacagatcaacctaagagatgacaaatgggaagtatccaaacaaacaggctcccctgagcagtttgatcttattgttctcacaatgccagttcctgagattctgcagcttcaaggtgacatcaccaccttaattagtgaatgccaaaggcagcaactggaggctgtgagctactcctctcgatatgctctgggcctcttttatgaagctggtacgaagattgatgtcccttgggctgggcagtacatcaccagtaatccctgcatacgcttcgtctccattgataataagaagcgcaatatagagtcatcagaaattgggccttccctcgtgattcacaccactgtcccatttggagttacatacttggaacacagcattgaggatgtgcaagagttagtcttccagcagctggaaaacattttgccgggtttgcctcagccaattgctaccaaatgccaaaaatggagacattcacaggtaccaagtgctggtgtgattctaggatgtgcgaagagcccctggatgatggcgattggatttcccatctgacttcctggaaattggagcacacagtcaggttttatttgatttttttttttaaggataccacttcacagcctttaggatagctattatttagaagcaaaacagaagataaatgttggcaaggatgtggagatattggattcccttgtgcagtgccggtgggaatgtaaaatgatgtagctactatggaaaatgatacggcaatttctttagaaatgaaatatagaattgccgtatgatctgcagttccacatctggatatctatccaaaagaagtgaaagtagggacttgaacgaacatttgtacaccaatgttcacagcggctttattcacaacagccaaaaggtggaagcaacccagtgtccatggatagatgaatagataaataaaatgtggtataaacatacaatgggctattgtttagccttaaaagggaaggaaattctgacatgctgcaatatggatgaagcttaaagtcattatgcaaagtggaataagcctatcacaaaaaataatattacataattctacttatatgaggaatctagagcagtcagtttcacagagacagaaaatagaatggtggttgccaagggctgggagaagagggcaatggagagtgagtgtttagtgggtcagagttttagtttgggaaggtaaaaagttctggagatggatgatggttatgggtgctcaacagtgtgaatgtacttaatgccacagaactgcacatttaaatgtggttaaaatcatcacttttatgttatgtatatttaccacaataaataaagaagttgatatttcttatacttacaaagaggagaagggcatttgcaaatcaacaagaagtgtgaggcccctctctctagcagaaaaatagactaaatctatttctttatcttttaacatcctgtttaagggaaatgccaaaacaaatgggaaaaaatacacacacacaaatatatatgaacatgttttgcctcatgagtaatcaaaatgtgtacatatgtatgtttatgtatgtgtgtttatatttaaaatcgtgttctgccttatgagtaaacaaaaagtatacaaattaaaaactataatgaaacgt

SEQ ID NO: 13043 - protein, 315 aa, Homo sapiens
MAQVLIVGAGMTGSLCAALLRRQTSGPLYLAVWDKAEDSGGRMTTACSPHNPQCTADLGAQYITCTPHYAKKHQRFYDELLAYGVLRPLSSPIEGMVMKEGDCNFVAPQGISSIIKHYLKESGAEVYFRHRVTQINLRDDKWEVSKQTGSPEQFDLIVLTMPVPEILQLQGDITTLISECQRQQLEAVSYSSRYALGLFYEAGTKIDVPWAGQYITSNPCIRFVSIDNKKRNIESSEIGPSLVIHTTVPFGVTYLEHSIEDVQELVFQQLENILPGLPQPIATKCQKWRHSQVPSAGVILGCAKSPWMMAIGFPI

SEQ ID NO: 13044 - DNA, 3129 bp, Homo sapiens
  CDS (7)..(1449)
agaattatggcgacctccgcgacgtcgccgcacgcgcctggttttccagctgagggtagatgcggttactatgtggaaaagaagaaacggttctgcaggatggtggtggccgcagggaaaagattttgtggtgaacacgctggagccatggaggaagaagatgctcggaaaagaatcctgtgtcctttagatccaaaacacacagtatatgaagatcaactagcaaagcatttgaaaaaatgtaactcaagagagaaaccaaaacctgatttctatattcaagatattaatgcaggcttaagagatgaaacagaaatacctgaacaattagttccaatttcttctctatctgaagagcagttggaaaagttaattaagaaattgagaaaagcaagtgaaggcttgaattctacacttaaagatcatattatgtcccatccagcattacacgatgcacttaatgaccctaaaaatggcgattctgcaaccaagcacctgaaacagcaggcttctattttaggtaacattgaaaatttaaagttacttggtccaagaagatgctttgttgagtttggagcgggaaagggaaaattatctcattgggttgatattgccttaaaagatgctgaaaaagttcacttcatcctagtggaaaaggtgaccacaagattcaaggtggatggaaaacacagaaagaaaaattcagtgtttgaaagacttcaaattgatattcaacacttgtgtttgaacaagattcctgtgctaagagaagaaaaactacctgtggtaggaattggaaagcatctgtgtggtatggcaacagatcttgcattacgatgtttggttgaaacctatgctgccagttttgaggaaaggaatgaagaacctttagccaaacgcataaagaatgataaaacagaaaaagaaatttacactttggccaaggaaggaaatgaaaaaaatgtcccagagaagtggaaccctgtggctggcattgttattgcactctgttgtcaccacaggtgtgattggagacattatgtgggcaaagaatatttcagggctctaggccttggagcagtggaattccattatttccagcgaatgagtagttgggcaacttgtgggatgcggaaaacatctttggaaacctcaaatagtaccacaaagaggcaagataatcagaatgatgatagtgaagagcatgatgatggaggatacagaatcacagatgatggcgctgattgtttgcctgggcttcttagtgttgaagaaaagaagaaaatagggcatctttgtaaattgctgattgaccaaggtcgaatccagtatttgcagcagaagggattcagtcctgctttgcagtactatacagaccctctggtgtctttggaaaatgttttgttaactgctttaccaaatcattcttcatcaccagaaacaactgcttaatggaaaagaaatttgagcatcatctgtcttccaccaaaaaaaattttttaattatatttttatatcaaaaaaatatatactttaaatagcaaataatatgaactttaaaaaatgctgtggcctcattaaactttggtaatagcttttctttttacttcagaaatccaaacattagagaattcaccaaagtaatcctctttagaagggcatcttgaattatattatccatccgtatttatggagattggtaaagtagttgaaccgttgacttggtgatctgaaacatacataacatgtcaacacataattagcgtatttctgtttgtattaattttggaaatttatcttcctttgattttatttaatattttttatttcttaagttcaagaggtagtgattgattgtaacaagggccaatctgagaatttgacttatatgtggacatttttccctacagatctggaaagcacaattgtgattttctcaaatgcagacaattcagagatattcacaattaataaacacaattaattaatgaagtcaccttcaaatttccagagccatacatgtatatattgtcagaatctgtccatgacaaacacaaaactgaagagctgttttcaaagaaaaaagattatttcacttaattattttgttggataattgtctagttagaacttccaaaaagatacttacaaacataattcacaaatttgaaataatttctgaagttgattagctatctcatatcttttatcaggtcattttttatatatgtaggcacaaacaataagtatgttctcttctgtttgggaaaataatttggaataaaatagaaattagataatgaaaccaaaaaccttctcaaatttaggccttatttaactcatgactggtttctatgcacaagaaaatactaaaccaaatatatggtaggactgttattctcttctgcatcttatccctattttgtttctgcctttatttgtaaaaattgtcttaattgatggtacatttgccaagacaaaggttcagaattactaattttagatattatgatattctgaaataactatttttatcctgtagttctatgattatatgatttgtaaataagaagcctaaccaatttaaaattcctgactttagtctcatatatcttgtcagactgtctcggttcaaattccaaacctaccatcttcagttgtgcgaccttgggcatgctacctaatctctttgtgcctcaatttcctccttttaaaatggggatgatgatgataacaataatacctacctcacaaggttgttgtgagcatcaaatgagataacacaagtaaaatgcatagaacagttccaagcacagagtaattcaataaatattaactagtaatagtagtggtagtaactcgtgaatctttttaataacataataggctttgattttattatctctttaagttgttaacttttttcccttgttataagttttatgtcaagtaaggtagtttgtttaagttagttacccatgtccccaatcaagggaacctaaatgaagatatatcattaaataattaacctttttttattgtgtcaagcaatactaatttgtgtcataaaatttgttttgcatcattcaacaatttatgcccagaaataaacaatattctacaacaggc

SEQ ID NO: 13045 - protein, 481 aa, Homo sapiens
MATSATSPHAPGFPAEGRCGYYVEKKKRFCRMVVAAGKRFCGEHAGAMEEEDARKRILCPLDPKHTVYEDQLAKHLKKCNSREKPKPDFYIQDINAGLRDETEIPEQLVPISSLSEEQLEKLIKKLRKASEGLNSTLKDHIMSHPALHDALNDPKNGDSATKHLKQQASILGNIENLKLLGPRRCFVEFGAGKGKLSHWVDIALKDAEKVHFILVEKVTTRFKVDGKHRKKNSVFERLQIDIQHLCLNKIPVLREEKLPVVGIGKHLCGMATDLALRCLVETYAASFEERNEEPLAKRIKNDKTEKEIYTLAKEGNEKNVPEKWNPVAGIVIALCCHHRCDWRHYVGKEYFRALGLGAVEFHYFQRMSSWATCGMRKTSLETSNSTTKRQDNQNDDSEEHDDGGYRITDDGADCLPGLLSVEEKKKIGHLCKLLIDQGRIQYLQQKGFSPALQYYTDPLVSLENVLLTALPNHSSSPETTA

SEQ ID NO: 13046 - DNA, 2420 bp, Homo sapiens
  CDS (24)..(2285)
aaaaatgtgtgtttgtgggtgaaatggctgcgcaggtcggagcggtgcgcgtagtacgggcggtggcggcgcaggaggagccggacaaagaggggaaggagaaacctcatgctggggtctccccgcggggagttaaacggcagcgccgatctagcagtggggggtctcaggagaagcgggggcggccgagccaggagccccctctcgctccccctcaccggcggcgtcgcagccgccgacatcctgggccgctgccgccgacgaatgcagccccaactgtcccaggccctgttgagcctcttctcctgccgcctccgccgccaccttcgctggcacccgccgggcccgctgtcgctgcccctctcccggccccaagcacctcggccctcttcaccttctcgcctctgacggtgagcgcggccgggcccaagcataagggccacaaggagcggcacaagcaccatcaccaccgcggccccgatggtgatcccagctcctgcggaaccgatctcaagcacaaggacaagcaggaaaacggcgagaggactggaggggtgcctctgatcaaagcccccaagagagaaacaccagatgaaaatggtaaaacccagagagccgatgattttgtcttgaagaaaataaagaagaaaaagaaaaagaaacaccgagaagacatgcgaggaagacgccttaaaatgtacaataaggaagtacaaaccgtctgtgctggcctgacccgcatcagtaaagaaattctcacccaaggacaaataaatagcacttcaggacttaataaggagtccttcaggtatctgaaagatgaacagctgtgccgattaaatttgggtatgcaagaatatcgggtaccccagggagtacaaacaccttttatgactcaccaggaacattctattcgtagaaatttcttaaaaacaggtactaaatttagcaactttattcatgaggaacaccagtccaatggtggtgctcttgtccttcatgcttacatggatgaactctcatttttgtctccaatggagatggagagattttctgaggagtttcttgctttgacattcagtgaaaatgagaaaaatgctgcttactatgctttagcaatagtgcatggagcggctgcttatctcccagacttcttggactactttgcttttaatttccccaacactccagtgaaaatggaaattctgggcaagaaagatattgaaacaaccaccatttcaaattttcacactcaggtcaacaggacatactgctgtggcacctaccgagcaggtcctatgcggcagataagtctcgttggagcagtagatgaagaagttggtgattatttcccagagttccttgatatgttagaagaatcaccatttctgaaaatgactttgccctggggtacactttctagcctccgactccagtgtaggtcccagagtgatgatgggcctataatgtgggtaaggccaggagaacagatgatccctacagcagatatgccaaagtcacccttcaaaagacgacgatcaatgaatgaaataaaaaatctccagtacctacctcggaccagtgaaccccgcgaagttctctttgaagataggactagagctcatgctgatcatgtcggtcaggggtttgactggcagagtacggctgctgttggagttttgaaagctgtacaatttggtgaatggagtgaccaacctcgcataaccaaagatgtgatttgttttcatgctgaggattttactgatgttgtacaaagacttcagttagatcttcatgaacctccagtttcccagtgcgtacagtgggtagatgaagctaaactaaaccaaatgaggcgggaaggcattcgttatgctagaattcagctttgcgacaatgatatctacttcatccctagaaatgtcattcatcagttcaaaacagtttcggcggtgtgcagcttagcctggcatataaggcttaaacagtaccaccctgttgtggaagccactcaaaacacagaaagcaattctaacatggactgtggtttaactggaaagcgagaattagaagttgactcccaatgtgtgaggataaaaactgaatctgaagaagcatgcacagagattcagctgttaacaactgcctcatcatctttcccacctgcatcagaacttaatctacagcaagatcagaagactcagcctattccagttttaaaagtggaaagtagactggactctgaccagcaacacaatctgcaagaacattcaaccacttctgtgtgatatgtacatattcaaacacattttttaacttttttaaattttgatgtgaagttatagttttataactggcttaagttaagttttattggagaaatcttgcctataattctataaagagaaatgacattccac

SEQ ID NO: 13047 - protein, 754 aa, Homo sapiens
MAAQVGAVRVVRAVAAQEEPDKEGKEKPHAGVSPRGVKRQRRSSSGGSQEKRGRPSQEPPLAPPHRRRRSRRHPGPLPPTNAAPTVPGPVEPLLLPPPPPPSLAPAGPAVAAPLPAPSTSALFTFSPLTVSAAGPKHKGHKERHKHHHHRGPDGDPSSCGTDLKHKDKQENGERTGGVPLIKAPKRETPDENGKTQRADDFVLKKIKKKKKKKHREDMRGRRLKMYNKEVQTVCAGLTRISKEILTQGQINSTSGLNKESFRYLKDEQLCRLNLGMQEYRVPQGVQTPFMTHQEHSIRRNFLKTGTKFSNFIHEEHQSNGGALVLHAYMDELSFLSPMEMERFSEEFLALTFSENEKNAAYYALAIVHGAAAYLPDFLDYFAFNFPNTPVKMEILGKKDIETTTISNFHTQVNRTYCCGTYRAGPMRQISLVGAVDEEVGDYFPEFLDMLEESPFLKMTLPWGTLSSLRLQCRSQSDDGPIMWVRPGEQMIPTADMPKSPFKRRRSMNEIKNLQYLPRTSEPREVLFEDRTRAHADHVGQGFDWQSTAAVGVLKAVQFGEWSDQPRITKDVICFHAEDFTDVVQRLQLDLHEPPVSQCVQWVDEAKLNQMRREGIRYARIQLCDNDIYFIPRNVIHQFKTVSAVCSLAWHIRLKQYHPVVEATQNTESNSNMDCGLTGKRELEVDSQCVRIKTESEEACTEIQLLTTASSSFPPASELNLQQDQKTQPIPVLKVESRLDSDQQHNLQEHSTTSV

SEQ ID NO: 13048 - DNA, 2255 bp, Homo sapiens
  CDS (412)..(1197)
aaatcgctcgcctctcaagcaacacggaagcatggcactgatctgtggcttgatagttgtgtggttccacctttgtcccctccaccaaaggaggaagatttttttgcctctcacgtttctcctgaggtgagtgacacagcgtgggcatcagcaatagcagaaccatcttctttaacatcaaggcctgtggaaaccactttggaaaataatgaaggtggacaagagcaaggaccaagtgtggaaggtcttaatgtaccaacaaaggctactttagaggtatcctctatcataaaaaagaaaccaaatcaagctaaaaaaggccttggggccaaaaaaggaagtttgggagctcagaaactggcaaacacatgctttaatgaaattgaaaaacaagctcaagctgcggataaaatgaaggagcaggaagacctggccaaggtggtatctaaagaagaatcaattgtttcatcattacgattagcctataaggatcttgaaattcaaatgaagaaagacgaaaagatgaacattagtggcaaaaaaaatgttgactcagacagactcggcatgggatttggaaattgcagaagtgttatttcacattcagtgacttcagatatgcagaccatagagcaggaatcacccattatggcaaaaccaagaagaaagtataatgatgacagtgacgattcatattttacttccagctcaaggtactttgacgagccagtggagttaaggagcagttctttctctagctgggatgacagttcagattcctattggaaaaaagagaccagcaaagatactgaaacagttctgaaaaccacaggctattcagacagacctgctgctcgccgcaagccagattatgagccagttgaaaatacagatgaggcccagaagaagtttggcaatgtcaaggccatttcatcagatatgtattttggaagacaatcccaggctgattatgagaccagggcccgcctagagaggctgtcggcaagttcctccataagctcggctgatctgttcgaggagccgaggaagcagccagcagggaactacagcctgtccagtgtgctgcccaacgcccccgacatggcgcagttcaagcagggagtgagatcggttgctggaaaactctccgtctttgctaatggagtcgtgacttcaattcaggatcgctacggttcttaatactgaagtcatgatgtgtatttcctggagaaattcctctttaaatgaacaagtaaccacatctcaggcggcagtgaagtccagatagttttgcagattgttttgctactttttcatatggtatatgtttctgatttttaatatttcttttgagaaattctgagttctgatgtaggagctttcctgtgatttctgtttcacgttccttcctgtcacaccctcctttggcgtctctgtgtatatccttgctttattttcttggaacctttgatttcaacactgagggcctggagacctcggctcctcctgctcctgaaccaggaggcttcatgtgggggaggaggagaggtctccatgtgacacatgggctcagggctgccagaatcagcggatgctggatgggcctgcagaaacaacactcaccacacacacttccttcaaaagaccaaaagtgactggtgtctcgtgtgacagattgcttcatttatgtttctacatagtaaggtgactgccaaataatatttgaagtcatctgtctctttgtaaattattttatatgacctataaatttaaaaatgtttttcagtgagtgcttttaacaaacttaagcttctgccctgccaagggaattaatgttatcttgtgaaaggtgttgctgtttgaattgatgagaaatggaagatgagaactccctaagagttctcataataaatcatctcatcacaaatcaatacggtatacagagttaaagtggaatgaggtaagaagatacagctacagaaaatagttgcgtgtatgggagaacagtcattgtaattgggtagtttgttaataaatatttttaaatcttgcttttcagaaattaccgaatgtgtataaacaaataaagaaaaataatttagctgtgttttagacagcattagaatatattgttcagcacagtaaaatatatttgaaatttgataagccaaaaatgtggttttgaatgaatattttgtgaatctttcttaaaagctcaaatttgtagacttctaaatagaataaacacttgcagc

SEQ ID NO: 13049 - protein, 262 aa, Homo sapiens [sequence omitted]

SEQ ID NO: 13050 - DNA, 1945 bp, Homo sapiens
  CDS (166)..(1650)
acttttggtcgagcggagggcgcgcagctccaccgttgccaagacgccgcgtaaacacccgagcgcgcgcagccaggtgcgctccttggggctgctggctgctgcgtttgcggcgggaggtggtggccgcggtcccacgagaaggggtatttttcgtcagccaagatgggttccaaaaggagaaatttgagctgtagtgaaaggcatcagaaattagtagatgaaaactactgcaaaaaattacatgtccaagctctaaaaaacgtcaacagtcaaatcaggaatcaaatggtgcagaatgaaaatgataaccgtgttcagcgcaagcaatttctcagattattacaaaatgaacaatttgagttggatatggaagaggccattcaaaaggcagaagaaaacaagagattgaaagaactccagctcaaacaagaagaaaaactggctatggaattggcaaaactgaaacatgaaagtctaaaggacgaaaagatgaggcaacaagtaagagaaaacagcattgagcttagagaattggagaagaaattaaaagcagcttacatgaataaagaaagggcagctcagattgctgaaaaggatgccattaaatatgaacaaatgaaacgtgatgctgaaatagccaaaaccatgatggaagaacacaagagaataataaaggaagagaatgctgcagaagacaaacgaaacaaagcgaaagcacagtactatcttgacttagagaaacaacttgaagaacaagaaaaaaaaaagcaggaagcttatgagcagctgctaaaagagaaactcatgattgatgaaattgttaggaagatctatgaagaagatcagttggaaaaacaacaaaagttagaaaaaatgaatgcaatgcgaaggtatatagaagagtttcagaaagagcaggctctctggagaaaaaagaaacgtgaggagatggaagaagaaaacagaaaaatcatagagtttgctaacatgcagcagcaaagagaagaagatcggatggcaaaagttcaagaaaatgaggagaaaaggctacagcttcagaatgcgttgacacagaaattagaagaaatgctgcggcaacgtgaagatttggaacaagtgcgacaagaattataccaggaagaacaagctgaaatatataagagcaagctaaaagaagaagcagaaaagaaattgagaaagcaaaaagagatgaagcaagattttgaagaacaaatggccttgaaggaattagtgctacaggctgcaaaagaggaagaggagaactttagaaaaactatgctagctaaatttgctgaggatgatcgaatagaattaatgaatgctcagaaacaaagaatgaagcagctggaacacaggagggctgtggaaaaacttattgaagagcgtcgccaacaattccttgcagacaaacaacgtgaactagaagagtggcagttgcagcaaaggcggcaaggatttattaatgcaattattgaagaagaaaggctaaaacttcttaaagagcatgctacaaacttactaggctatctccctaaaggagtatttaaaaaagaggatgatattgatctgcttggtgaagagttcaggaaagtatatcaacaaaggagtgaaatttgtgaagagaaatgatatcatcaaaattgggtaaagcatagattttttgtatgttaccactagatgtcagcataacttttgttttacagctcagtggcattaggtatccattgtctgtttggattttgtaaatcatcactgaatttcataacttgtaaacaattatcagatacaaattaattttaatcaagctgttatttttgtactgataatttcaaaatccgatttctacaacactacagagcactgtttgcatccccatcctcaagacagtatatttaccttgactaatacagaactctacccc

SEQ ID NO: 13051 - protein, 495 aa, Homo sapiens
MGSKRRNLSCSERHQKLVDENYCKKLHVQALKNVNSQIRNQMVQNENDNRVQRKQFLRLLQNEQFELDMEEAIQKAEENKRLKELQLKQEEKLAMELAKLKHESLKDEKMRQQVRENSIELRELEKKLKAAYMNKERAAQIAEKDAIKYEQMKRDAEIAKTMMEEHKRIIKEENAAEDKRNKAKAQYYLDLEKQLEEQEKKKQEAYEQLLKEKLMIDEIVRKIYEEDQLEKQQKLEKMNAMRRYIEEFQKEQALWRKKKREEMEEENRKIIEFANMQQQREEDRMAKVQENEEKRLQLQNALTQKLEEMLRQREDLEQVRQELYQEEQAEIYKSKLKEEAEKKLRKQKEMKQDFEEQMALKELVLQAAKEEEENFRKTMLAKFAEDDRIELMNAQKQRMKQLEHRRAVEKLIEERRQQFLADKQRELEEWQLQQRRQGFINAIIEEERLKLLKEHATNLLGYLPKGVFKKEDDIDLLGEEFRKVYQQRSEICEEK

SEQ ID NO: 13052 - DNA, 2309 bp, Homo sapiens
tttggccttatagcagttatccatggccgtactgtagtaaagttccttagaactttgccaggagtgaactagaaaaaagtgcttactagggcctaagagttgctttgtgccgtgtagtctggcctttgcactagtagatcattgctgacataggtcagtttagagacctttctgtgttaatgcctcctggtactgtcttaagatacgtacagtgtctgtttttagatctatgcatatgtcatgaagctccttgtgggctctgcatgaagctgctgctttgtttttgggttaacagatgtgcctgtcaactagcatgtgtattgtccaaattccataaacttaaggtttttaagggctgtgtggtttctgagctctatgtgtctttcctatccttgtaccttcaaagggtgagaaatgagatttatacatccaaagttagtctgataaatatggctttttgtttctccatgtaacctagactgtcaaaaataagtgatggtgataagtaggcctggagcctcagcttctgtaaatctcattcctaaaattttgctagactcgtgttggcaaaaacaaatacctgtggattgtccttaaggcttttaatcagatacctgtgttgctgttagctgaactgtagtgaagcatcgatccaaatcggtcttctgaagtatcagttatgcttttgagtttagaaaatacttaggtgttagtctagtcttcccattcatgaatcagtgtatgtccatatcagagagcctcaacttcttttttcttcctttttaaaaatgattttagtgttttgatttagtgtatactacatagttcagtattattggctttaccagtgttgacagaaaaattttaaatctccagttgcaaacagcaatggattaggatatggaaataaaatcatggtgacatcactgctgagttatcttaaacctctgctacttaattctccatattgaaatgcatactcctccacatacatggcttccaagtaaaggcaattgtagaggggccctgtctatcccagtatggttggattttaaacatatctgtgtttccgttattttgggaactgattaatatttacaattttttttgtttatgagttattttgatactaagaaaagagagaatctagaacatcttgaagttgaaatacaaattttattcttttggtcttgggagaatttaagcagtctatgcaactcatcaaatggtgagaaatagccctccgaggttccagtaagctttcagtgactttgatacctccccaagtttcttgagttgctgcttgtcaacacccagcttttaactgagtgtttgctcctgatggtttaggagattttcatgttgtatcacactgtcaagttttattttgtctttttatccctccgtggatgtgagtttgaaacaagcacggtacagtaatcctgcctgatagagtagtctggaatgagaattactttttgggtgagagagttctccattttaatgtttctaaagtttttcatatgaacttggcattggaaaagggaggtaaagaaaaaggacgtttactaaaagcagtgtctactcttcccctttgtgagtgtttattcatggctaatgaaaaaaagagaaggactcttgggttttgtgttgccatgttaagcatggagagggatgcttgacagcatgctaattgaagccagagcaagtatgtccttcatcaggtaatcaggaactcttcagttgaagctgaggaactaactgattagttgttgatcataatataattggttacaaagtggaagtgccagctggcttaagtacccaaagaaaagaatgcagcagcctaacttagtgttaccatatgttactgaatttgaaactgaccttttttcccaccctacttcacacacctaaaactcttttcttgtcagaccaaagagcgaaaagaaaaaaaaaaagtaaaacactttaccaatctgtcactcaggtacaattttgtggtgagatttttgtctgttctctttgtattgctcttaagagtcctttctcagcatattattctgccattgcctctgtcttccttggggcacctcagctctggatgctacccctgggatatctactgctgttatgtgaatgataggaggtaagtgaccattatagtaagggctctttgtaaaaaaattcaaaaaatttaaaaaggatgtatacattttatagtctggctatcagtttgatatcttgctgtcaagtatgtttctcaatctgtatttatccatcccatcaataaatgttaatggtaaaac

SEQ ID NO: 13053 - DNA, 2435 bp, Homo sapiens
  CDS (32)..(1480)
tagaaagaatgatcgacttgctgtttccaagatgttgaataagtttactaaatctggtctcaagtcacagtttgcttactgcatgctgatccgaattgccagtcgcttactaaaagaaactgaggatggccatgaaagtccactgtttgatttcattgagagctgcttgcgaaataaacatgaaatggttatttatgaagctgcttcagctatcatccatcttcctaactgcactgcaagagagttggcacctgctgtttcagttcttcaacttttctgtagttctcctaagccagccttgagatatgcagctgtgaggaccttgaacaaggtggcaatgaagcacccctctgctgttactgcctgcaatctggacttagaaaacttaatcacagactcaaacagaagcattgctaccttagccattactacactcctcaaaacaggaagtgagagcagtgtggaccggctcatgaagcagatatcttcttttgtgtctgaaatctcagatgagttcaaggtggtggttgtacaggcaattagtgctctctgtcagaaataccctcgaaagcacagtgtcatgatgactttcctctccaacatgctccgagatgatggaggctttgagtacaagcgggccattgtggactgtataatcagcattgtggaagagaaccctgagagtaaagaagcaggcctagcccacctttgtgaattcattgaggactgtgaacacactgttctggctactaagattctacacttgttgggcaaagagggccctagaacgcctgtcccctccaaatatatccgttttatttttaatagggttgtcctggagaatgaggctgtcagagctgctgctgtgagtgctttggctaaatttggggctcagaatgagagtcttctcccaagcatccttgtactcttacagaggtgtatgatggatactgatgacgaggtacgagacagagctaccttctatctgaatgtgctgcagcagaggcagatggcactaaatgccacatatatctttaatggtttgacagtctctgtaccagggatggaaaaagccttacaccagtacacgttggagccttcagaaaaaccgtttgacatgaaatcaattcctcttgctatggctcctgtctttgaacagaaagcagaaatcacacttgtggctactaagccagagaagttggctccttccaggcaagacattttccaagaacaattggctgccattcctgggtttctgaatataggacccttgttcaagtcttctgagcctgttcaacttacagaagcagagacagaatattttgttcgatgtatcaagcacatgtttaccaatcacatcgtgttccagtttgactgcaccaacactctcaatgaccagctgctggaaaaagtgacagtgcagatggagccatcagattcctatgaagtgctgtcttgtatcccagcccccagccttccttaaaaccaaccaggaatatgttacactcttgttcgtttgcctgatgatgaccctacagcagttgcaggctcctttagctgcaccatgaagtttacagtccgggactgtgaccctaacactggagttccagatgaggatgggtatgatgatgagtatgtgctggaagatctcgaagtgactgtgtctgaccatattcagaaagtactgaagcctaactttgctgctgcttgggaagaggtgggagatacctttgagaaagaggaaacctttgccctcagttctaccaaaacccttgaagaggctgtcaacaatatcatcacatttctgggcatgcagccatgtgagaggtccgataaagtacctgagaacaagaattcccattcgctctatctggcaggtatattcagaggtggctatgatttattggtgaggtccaggctggccttagccgatggagtgaccatgcaggtgactgtcagaagtaaagagagaacacctgtagatgttatcttagcttctgttggataaatgcttactggacaagaggaaactgatgcacactacatggtcagtgggcttttaggctagtggcatcagtttcccagaatcagacttttgaagatgaatgactttggagaagcaaattaaacatttggccctgagccagcagatcaagcaaatgtctatctttgcgcatgggttgttttttttttttttctttttattctacttggtcagctttgggacgatagtgcagctttgggtgatcttgaaaatcaaatactatcctatactccagctgcttaacttcattttattctttaatgtgtacctgaaagctcctggcaatgctggaaaatttttatcccagaggggtaggggggaggggaagccagagtccacttttgtcacaattcatttttattaatagaaaataaacacttattccagtttc

SEQ ID NO: 13054 - protein, 483 aa, Homo sapiens [sequence omitted]

SEQ ID NO: 13055 - DNA, 1352 bp, Homo sapiens
  CDS (176)..(1351)
ttattgccttgccttatggtttatgtttatgaggtcatcattatgttctggtcactagcacagaataaggtccatttatttatttagtttttaaaatttttttttttcaaaaaaggggggagaaaatgtaacctttgtgattggtttaccttttctttaattctagggtgggtatatggctgccaaggtccagaaattggaggaacagtttcgatcagatgctgctatgcagaaggatgggacttcatctacaatttttagtggagttgccatctatgttaatggatacacagatccttccgctgaggaattgagaaaactaatgatgttgcatggaggtcaataccatgtatattattccagatctaaaacaacacatattattgccacaaatcttcccaatgccaaaattaaagaattaaagggggaaaaagtaattcgaccagaatggattgtggaaagcatcaaagctggacgactcctctcctacattccatatcagctgtacaccaagcagtccagtgtgcagaaaggtctcagctttaatcctgtatgcagacctgaggatcctctgccaggtccaagcaatatagccaaacagctcaacaacagggtaaatcacatcgttaagaagattgaaacggaaaatgaagtcaaagtcaatggcatgaacagttggaatgaagaagatgaaaataatgattttagttttgtggatctggagcagacctctccgggaaggaaacagaatggaattccgcatcccagagggagcactgccatttttaatggacacactcctagctctaatggtgccttaaagacacaggattgcttggtgcccatggtcaacagtgttgccagcaggctttctccagccttttcccaggaggaggataaggctgagaagagcagcactgatttcagagactgcactctgcagcagttgcagcaaagcaccagaaacacagatgctttgcggaatccacacagaactaattctttctcattatcacctttgcacagtaacactaaaatcaatggtgctcaccactccactgttcaggggccttcaagcacaaaaagcacttcttcagtatctacgtttagcaaggcagcaccttcagtgccatccaaaccttcagactgcaattttatttcaaacttctattctcattcaagactgcatcacatatcaatgtggaagtgtgaattgactgagtttgtcaataccctacaaagacaaagtaatggtatctttccaggaagggaaaagttaaaaaaaatgaaaacaggcaggtctgcacttgttgtaactgacacaggtagatacttattaaaattgtcttctt

SEQ ID NO: 13056 - protein, 392 aa, Homo sapiens
MAAKVQKLEEQFRSDAAMQKDGTSSTIFSGVAIYVNGYTDPSAEELRKLMMLHGGQYHVYYSRSKTTHIIATNLPNAKIKELKGEKVIRPEWIVESIKAGRLLSYIPYQLYTKQSSVQKGLSFNPVCRPEDPLPGPSNIAKQLNNRVNHIVKKIETENEVKVNGMNSWNEEDENNDFSFVDLEQTSPGRKQNGIPHPRGSTAIFNGHTPSSNGALKTQDCLVPMVNSVASRLSPAFSQEEDKAEKSSTDFRDCTLQQLQQSTRNTDALRNPHRTNSFSLSPLHSNTKINGAHHSTVQGPSSTKSTSSVSTFSKAAPSVPSKPSDCNFISNFYSHSRLHHISMWKCELTEFVNTLQRQSNGIFPGREKLKKMKTGRSALVVTDTGRYLLKLSS

SEQ ID NO: 13057 - DNA, 1913 bp, Homo sapiens
gttttgtgtggacataagttttcagttcatttgagtaaatacccaggagtgtgattactggatcttatggtaagatatgtttatgtttgtaacaagattgccaaactgtcttccaaagtggacatccagatgcataaaaatgaatctagatattttgcatttcctgtaccattttgtattctccactagcaatggatgagagttcctgttactccacattttcttcagcatttgttgttggtgttttggatttgggccattctaataggtgtgtagtggcatgcctttcttgttttaacttgaaattccctaatgacatgagtttgaacagtttttcatacgcttacttgccatctgtttatctttggtgtgaggtatctgttcaggtatttcacccattttataatcaggttgttcattttctttagttttaatggttcatcgtatatttttgataacagttctttatcaggtacatcttttgcaaatattttctccaaggctgttgcctgccttgttctcttgacattgtcttgcagagcaaaaaaaatctaggctgcagttacagatttggaagttaagagcatattggtgctattgggagccgtaaaactgcataagataaccaaaacagtatatgtaggtagaaaagagaagagtgtaaggtcttagctctggaggactggtgatatttaaagcttagggtgataaggaataggaatagagagtgagaacgaggggccaggaaatgtaggaaagctaacaaagtatgttattctaggaatgaaagagaaagtgtatcaaggaggatgtgattggctgtgtcaaatgttgctggaccagtcaaataatatgaagattgagaaatgatcattgggtgtagtgatgaggtcattggtgactttggataagagctgtttcagtggagtaatgggaggaaatgcctgttgggaatgagttcaagtaacaacagaggagagaaactgaagatagcagatgtagataagatttccaaggagttttgctgtcaaggaaagatgattgagatggaaactcgaagggagagagaaatagagattttaaaaaataataataaagttgggagaaagggcattgttggattcttattggcatcactcaccagagaaggaaaaatggatgatgattcaagacagtggaagagacagagagtgtcggtcagttgctagcctctaatatgatttgtttaaattagagtggactcagccctgcaactgctcatgtcccttcctgaccccttcccatcttgccgtatgttttgactaacagatggtacatttatgagaatgaaaagaggcccctaatccagacaggtagccaacactacctggattttaggactggattttagccttcacttgtcctaaactaggtgtctttgggtacagcaaagtaatcatactaccatagcttctctgcttagtctactccaagacaataggaaaagttatttactatcctgcaatagttaaatgtacactttgtcctatagttaaatgtacactttgtccgatggcaaatagcatgataagtgggaagagagcacatttaagaactaagaatttggtgtgggaatccaagctcttctatcaactggcagtaaaatatatttgaggagagtttaaggcgtatgagtcgtcttaccaacaagtaattatgagtttagattttatttgaactatctctcttgtttgtattttataaagtaatggtgtgttaagcgcagtgcaccaaaatgtaactaagacttagtagcacctaggactcagatcttggtttttcttacaacattcgcactgaaaggaaccctggctctttggaaaaatggctgattccaaggatgggattccttatgccaaaggaaggaaatgctt

SEQ ID NO: 13058 - DNA, 1990 bp, Homo sapiens
  CDS (150)..(470)
gcatcagagctaaacagcagcagtcgtgcagtatcatccacagcctgagagagagtcagcagcaagagctgagccggtttctgaacccgcccagcatcgagaccacccagcccagtgaggacacgaatgccaacagtcaggacaacagcatgcaacctgagacaagcagccagcagcagctcctgagccccacgctgtcggatcgaggaggaagtcggcaagatgcagccgacgcagggaaaccccagaggaaatttgggcagtggcgtctgccctcagccccaaaaccaataagccattcagtgtcctcagtcaacttacggtttggaggaaggacaaccatgaaatctgtcgtgtgcaaaatgaaccccatgactgacgcggcttcctgcggttctgaagttaagaagtggtggacccggcagctgactgtggagagcgacgaaagtggggatgaccttctggatatttaggtggatgtcaatgtagatgaatttctagtggtggaaaccgttttctaataatgtccttgattgtccagtgagcaatctgtaattgatctataactgaattccagcttgtcacaagatgtttataaattgattttcatcctgccacagaaaggcataagctgcatgtatgatgggttactatcaatcattgctcaaaaaaatttttgtataatgacagtactgataatattagaaatgataccgcaagcaaatgtatatcacttaaaaatgtcatatattctgtctgcgtaaactaaggtatatattcatatgtgctctaatgcagtattatcaccgccccgcaaaagagtgctaagcccaaagtggctgatatttagggtacaggggttatagctttagttcacatctttcccatttccactagaaatatttctcttgagagaatttattatttatgattgatctgaaaaggtcagcactgaacttatgctaaaatgatagtagttttacaaactacagattctgaattttaaaaagtatcttctttttctcgtgttatatttttaaatatacacaagacatttggtgaccagaacaagttgatttctgtcctcagttatgttaatgaaactgttgcctccttctaagaaaattgtgtgtgcaagcaccaggcaaagaaatggactcaggatgcttagcggtttaaaacaaacctgtagataaatcacttgagtgacatagttgcgcaaagatgttaagtttcttaagaaaccttttaataactgagtttagcaaaaagaataaaactatatagctcaatttatttaaaaaaatctttgcatgtgtgatgttatcattggcttcatttcttacccaaggtatgtctgttttgccataaatcagcagagtcatttcattctgggtgatcctaacacaccattgctacgttagatttgaaatgacatctctgttaaaagaatcttctatggaaataatggtgccctgcaaaatcttcctttgaactcacaggttagggatcacacaacttacttaatcgttttttgtttttgttttttttccttatatgtcaatggcccatgtcctccgggaaaattagaaaagcaaaatgattacaaagtgctgttagatttcttgtgctgggccagccaagtagaagtggacttgacttggacctttaactattttattacagattggacatttgctgttcagatgttttttaacagagggattatctcagaatcctgtgacctccaggttgttttataatctatttttctctatttaacattcctcagatagataggcaaataggacattccttctgtgtcacagaagtatcgtggtagtggcagtctacagtttatatgattcattgtaactatgagataaagaacaaccagtcatgtggccaaaaggattagatttgatttgatgttcacttggagtttactttttgtacatacaagataaaataaatattggatttgtaaaat

SEQ ID NO: 13059 - protein, 107 aa, Homo sapiens
MQPETSSQQQLLSPTLSDRGGSRQDAADAGKPQRKFGQWRLPSAPKPISHSVSSVNLRFGGRTTMKSVVCKMNPMTDAASCGSEVKKWWTRQLTVESDESGDDLLDI

SEQ ID NO: 13060 - DNA, 1405 bp, Homo sapiens
aacaaatcatcgtagtaaaatggcggcagagagctagtaatgtgtctggaattggtgggttcttggtcgcactgacttcaagaatgaagccgcggaccctcacggtatgacagctcctctcccaacagctctactttctacatctactctctaccaccgcaaaacttctttcagttccatgaaagggccatgtttttctggtctcttggcctaggagcatgttgttcttctgccagcaaccttcttcaaccatccccacaggatgactcctctattggatacttccatgaaaagtccaggcctgggttatgtacccttcccaaagtgcaccccagacacccaacagtttttccagcccagactcaccacactgtgtggtaatttcctgatcactcagttgtgctccccacagactataagctctatgagggcaggggccacagtttgcttgttcactactatatgctcagtacctggtaaatattagttgactgaagaatgactatgtggtaatctattccattggtggcctccagtgaaccatgtcttctggtatttacatcttgtgtggtcccctccattaaatttgggctttaaccaacagaatgctgcagaagcgacaccctgccacttgtgcttttgtgatcctagccaccagtaagaagccctgtgaccttgctgagaccctgaagagaccacatagagaggccacttgaagggcaaggggtcctgactctacatggagagagaagcccagccatccctgtttcccagctgagtcctgaccagataactcactacaagactgaccacaggcaagaacagcagaagagctgcccagctgagcccatccaagagtgcagaatttcaagcaagtaaaatgactaatgttagaactcagaatgaaggggcctcaggttacctgcatcattctggttttttgctcctgttttactacgaagcaaacacctcgactataagccgccatagaccagggtctgtgtctcattcgtgtctggacaatgcatcacagacactcaactgttttctgcctgagcagaattaagacttggcctcctaactcctccatcaccatcttctccactctcttccttggccttcatcaccaacaccacctcatcaaccgtgaaagattcaaagagtaaggaaaaccatttctaggaccatgaaatgtgtcactggatctcctgcagaaatctgccagagctacaatgtgactggtttctacatgtctgacaaatttctatttaaataagtatttttcaaaatgcaaattgctacctattctttggccatcaaatcactttagtgggttgcaaccggctttttcttcttaatagaaaaggaaatgtgttgcatttggtaaacatggaaattgttttat

SEQ ID NO: 13061 - DNA, 1853 bp, Homo sapiens
  CDS (107)..(1543)
tgcacacagtggagctaaagcaagtgtagttgatgggactcctttagttgcagcaccctctttaaatgccacaaccgtagtaacaacagtttatcaggagcccattatgagccagggagcagccttgagtggtgagcctactactctgaccaaggaagaagaaaagaaacagcctgatgaagaacccatggacatggtggtggaaaaacaagaagaaacggaccacaagaatgacaatcaaatactgagtgaaattgttgaagcgaaaatggcagaggaattgaaaccaatggacactgataaagagagcatagctgaatcaaaatccccagagatgtccatgcaagaagattgtattagtgacattgcccccatgcaaactgatgaacagacaaacaaggagcagtttgtgccaggtccaaatgaaaagcctttgtacactgcggaaccagtgaccctggaggatttgcagttacttgctgatctattctaccttccttacgagcatggacccaaaggagcacagatgttacgggaatttcaatggcttcgagcaaatagtagtgttgtcagtgtcaattgcaaaggaaaagactctgaaaaaattgaagaatggcggtcacgagcagccaagtttgaagagatgtgtggactagtgatgggaatgttcactcggctctccaattgtgccaacaggacaattctttatgacatgtactcctatgtttgggatatcaagagtataatgtctatggtgaagtcttttgtacagtggttagggtgtcgtagtcattcttcagcacaattcttaattggagaccaagaaccctgggcctttagaggtggtctagcaggagagttccagcgtttgctgccaattgatggggcaaatgatctcttttttcagccacctccactgactcctacctccaaagtttatactatcagaccttattttcctaaggatgaggcatccgtgtacaagatttgcagagaaatgtatgacgatggagtgggtttaccctttcaaagtcagcctgatcttattggagacaagttagtaggagggctgctttccctcagcctggattactgctttgtcctagaagatgaagatggcatatgtggttatgccttgggcactgtagatgtgaccccctttattaaaaaatgtaaaatttcctggatccccttcatgcaggagaagtataccaagccaaatggtgacaaggaactctctgaggctgagaaaataatgttgagtttccatgaagaacaggaagtactgccagaaactttccttgctaatttcccttctctgataaagatggacattcacaaaaaagtaactgacccaagtgtggccaaaagcatgatggcttgcctcctgtcttcactgaaggctaatggctcccggggagctttctgtgaagtgagaccagatgataaaagaattctggaattttacagcaagttaggatgttttgaaattgcaaaaatggaaggatttccaaaggatgtggttatacttggtcggagcctgtgacatttgttgacactgtgaactgtccaaaagtctcttaactgcaccttgtgaatggtagttgaggtcttcatacagttcagcctctagaatggtaacaaatcagccaattggattcgaaacaaagaagactatgtaaaactcacccatcacactttgagactactcactggttggaagaatatagtattgcagcaaatcctgtatgaaagagagatgtgggcttcctttttgagtcttgtgttaggtgctgagaccttttacatgggcttatacagggagagagtcttcaataaatgtagtcagcact

SEQ ID NO: 13062 - protein, 479 aa, Homo sapiens
MSQGAALSGEPTTLTKEEEKKQPDEEPMDMVVEKQEETDHKNDNQILSEIVEAKMAEELKPMDTDKESIAESKSPEMSMQEDCISDIAPMQTDEQTNKEQFVPGPNEKPLYTAEPVTLEDLQLLADLFYLPYEHGPKGAQMLREFQWLRANSSVVSVNCKGKDSEKIEEWRSRAAKFEEMCGLVMGMFTRLSNCANRTILYDMYSYVWDIKSIMSMVKSFVQWLGCRSHSSAQFLIGDQEPWAFRGGLAGEFQRLLPIDGANDLFFQPPPLTPTSKVYTIRPYFPKDEASVYKICREMYDDGVGLPFQSQPDLIGDKLVGGLLSLSLDYCFVLEDEDGICGYALGTVDVTPFIKKCKISWIPFMQEKYTKPNGDKELSEAEKIMLSFHEEQEVLPETFLANFPSLIKMDIHKKVTDPSVAKSMMACLLSSLKANGSRGAFCEVRPDDKRILEFYSKLGCFEIAKMEGFPKDVVILGRSL

SEQ ID NO: 13063 - DNA, 2214 bp, Homo sapiens
  CDS (380)..(730)
agcagatctcagctatgtgtctgaccaaaatggaggtgtcccagatccaaatcctcctccacctcagacccaccgaagattaagaaggtctcattcgggaccagctggctcctttaacaagccagccataaggatatccaactgttgtatacacagagcttctcctaactccgatgaagacaaacctgaggttccccccagagttcccatacctcctagaccagtaaagccagattatagaagatggtcagcagaagttacttcgagcacctatagtgatgaagacaggcctcccaaagtaccgccaagagaacctttgtcaccgagtaactcgcgcacaccgagtcccaaaagccttccgtcttacctcaatggggtcatgcccccgacacagagctttgcccctgatcccaagtatgtcagcagcaaagcactgcaaagacagaacagcgaaggatctgccagtaaggttccttgcattctgcccattattgaaaatgggaagaaggttagttcaacacattattacctactacctgaacgaccaccatacctggacaaatatgaaaaattttttagggaagcagaagaaacaaatggaggcgcccaaatccagccattacctgctgactgcggtatatcttcagccacagaaaagccagactcaaaaacaaaaatggatctgggtggccacgtgaagcgtaaacatttatcctatgtggtttctccttagaccttggggtcatggttcagcagaggttacataggagcaaatggttctcaattttccagtttgattgaagtgcagagaaaaatcccttagattgcaaaataaaatagttgaactctctgtcttcatgtggaaggtttagagcagttgtgagatgctgttatgctgagaaaccctgactttgttagtgttggaaaaaagtcttacaagtctataatttaaagatgtgatggtggggaggggaggatggggaagctttttatatatgcatacattacatacctatatataaacttgtggtataaccatagaccatagctgcaggttaaccaattagttactatcgtagagtaatatatattcagaataacaaactcaagctggagaaatgagtcctgatagactgaaaattgagcaaatggaagaagatacagtattgtttagatcagaatcattaaaaaatatttttgtttagtaagtttgaagatttctggcttttaggccttttctattttgttccatttatttttgcaggcaatcttttccatggagggcagggtatccattctttaccatgggtgtacctgcttaggttaaaaatcataccaaggcctcatacttccaggtttcatgttgcgtcttgttgagggagggagagcaggttacttggcaaccatattgtcacctgtacctgtcacacatcttgaaaaataaaacgataatagaactagtgactaattttcccttacagttcctgcttggtcccacccactgaagtagctcatcgtagtgcgggccgtattagaggcagtggggtacgttagactcagatggaaaagtattctaggtgccagtgttaggatgtcagttttacaaaataatgaagcaattagctatgtgattgagagttattgtttggggatgtgtgttgtggttttgcttttttttttagactgtattaataaacatacaacacaagctggccttgtgttgctggttcctattcagtatttcctggggattgtttgctttttaagtaaaacacttctgacccatagctcagtatgtctgaattccagaggtcacatcagcatctttctgctttgaaaactctcacagctgtggctgcttcacttagatgcagtgagacacatagttggtgttccgattttcacatccttccatgtatttatcttgaagagataagcacagaagagaaggtgctcactaacagaggtacattactgcaatgttctcttaacagttaaacaagctgtttacagtttaaactgctgaatattatttgagctatttaaagcttattatattttagtatgaactaaatgaaggttaaaacatgcttaagaaaaatgcactgatttctgcattatgtgtacagtattggacaaaggattttattcattttgttgcattattttgaatattgtcttttcattttaataaagttataatacttatttatg

SEQ ID NO: 13064 - protein, 117 aa, Homo sapiens [sequence omitted]

SEQ ID NO: 13065 - DNA, 1403 bp, Homo sapiens
  CDS (96)..(746)
aaaggcgtgagcgcgcgtgcgtgcgtgtgcgggtgcgtgagcgtgagcgcgcggaggccggaagcgagcgctgcgcagtcgggtggtcgcgggccatggagggtagcttctcggatggcggagcgctgccggaggggctcgcggaagaggccgagccgcagggcgccgcctggagcggggacagtggcactgtttcccagagccacagcagcgcctcggggccgtgggaggacgagggcgcggaggacggcgcgccgggccgcgacctgccgctgcttcgccgcgccgctgcgggctacgccgcctgcctgctgcccggggccggggcgcggcccgaggtcgaggccctggacgcgagcctagaggacctgcttaccagagtggacgagttcgtgggcatgctggacatgcttcgcggcgactcgtcccacgtcgtcagcgagggcgtgccgcgcatccacgcgaaggccgccgagatgcggcgcatctacagcaggatcgaccggctggaggccttcgtgaggatggtggggggccgcgtggccaggatggaggagcaggtcaccaaggccgaggccgagctgggcaccttccccagggcgttcaagaagctcctgcacacgatgaacgtgccctcgctctttagcaagtctgctccctcgaggccacagcaagccggctacgaagcccccgtcctgtttcggaccgaagactacttcccttgttgcagtgaaaggcctcagctctgacggcctgaccactgcggcaagaggaccccagctggggtgcttacctccagtatgaagtgaattgcaaatcctgcttatggacatatatgatgttggagtgtgggattttaaagtttactttctacaaactctccgtagtatattcatgattcagtgtagaatgtatagactttatgtcttccaagtttaaaaaaagagacagggtcttggtatgttgcccagactgttcggaaactcctgggctcaagtgatccttccacctcagcctccccagtagctgggactacggggtcgccactgcacccagcctgtgtcttccagctctaatcagaaagctgcttgtcgagggcatggggaatcaaactgaatgaacttttctctgcactgtggcaaaactgttatttttatggattttactaaatggcgttaccttttcaagatttatatgtttgtataatcataagaaaattgagccattaaagccttgttattcaatcctaatagtcagttttctagaacctacttttagggtaaatggtacattatttaatattatattgaacctcctatagcgtggattgtagaccaaaggaaatggtacaatttctgagaatatatgttgattttttgtgactaattccaaagttgtatttg

SEQ ID NO: 13066 - protein, 217 aa, Homo sapiens
MEGSFSDGGALPEGLAEEAEPQGAAWSGDSGTVSQSHSSASGPWEDEGAEDGAPGRDLPLLRRAAAGYAACLLPGAGARPEVEALDASLEDLLTRVDEFVGMLDMLRGDSSHVVSEGVPRIHAKAAEMRRIYSRIDRLEAFVRMVGGRVARMEEQVTKAEAELGTFPRAFKKLLHTMNVPSLFSKSAPSRPQQAGYEAPVLFRTEDYFPCCSERPQL

SEQ ID NO: 13067 - DNA, 2097 bp, Homo sapiens
  CDS (14)..(2095)
tttagtcagtcctatgggtgtttcaagattgatggacttactagcggattccagggaagttatacgtaatgatggcgtcttactactgcaggcactaacaagaagcaatggtgcaatccagaaaattgttgcttttgaaaatgctttcgagagactactggacattatttcagaggaggggaacagtgatggaggtatagtagttgaagattgtttgattttgctccaaaacttattaaaaaacaacaactccaatcaaaatttttttaaagaaggctcatatattcaacgtatgaaaccttggtttgaagttggagatgaaaattctggctggtctgcacagagagtgaccaatctacatctaatgctacagcttgttcgtgtattggtatctcccaccaaccctcctggtgctaccagtagctgccagaaggctatgttccagtgtgggttattgcagcagctttgtactatcctaatggctactggggttcctgctgatatcctgactgagaccataaatactgtatcagaagttattcgaggctgccgagtaaaccaagactactttgcatctgtaaatgcaccttcaaacccaccaagaccggcaattgtagtacttctcatgtccatggttaatgaaaggcagccatttgttttgcgctgtgctgttctctattgtttccagtgtttcttgtataaaaaccaaaaaggacaaggagaaatcgtgtcaacacttttaccttctaccattgatgcaacaggtaattcagtttcagctggccagttattatgtggaggtttgttttctactgattcactttcaaactggtgtgctgctgtggcccttgcccatgcgttgcaagaaaatgccacccagaaagaacagttgctcagggttcaacttgctacaagtattggcaaccctccagtttctttacttcaacagtgcaccaatattctttcacagggaagcaaagtacaaacgagagttggattattaatgttgctttgtacctggctaagcaattgtcccattgcagtaacgcattttcttcacaattcagccaatgttccattccttacaggacaaattgcagaaaatcttggagaagaagagcagttggtccaaggcttatgtgcccttttgttgggcatttcgatttatttcaatgataactcgcttgagagctacatgaaagagaagctaaaacaactgattgagaagaggattggcaaagagaatttcatagagaaactaggatttattagcaaacatgagttgtattccagggcatctcagaaaccccagccaaactttcccagtccagaatacatgatatttgatcatgagtttacgaagctggtaaaagaacttgaaggtgttataactaaggctatttataagtccagtgaagaagataaaaaagaagaagaggtgaaaaaaacattagaacagcatgacaatattgtgactcactacaaaaatatgattcgagagcaagatctccaacttgaggaattaaggcagcaggtttctacattaaaatgtcaaaatgaacagctccagacggcagtcacacagcaagtatcacagatccagcagcacaaagaccagtataatcttcttaaaatacagctaggaaaagacaatcagcatcaaggttcttacagtgagggggctcagatgaatggcattcagccagaaggaattggtagattgcgagaagagatagaagaattaaaacgtaatcaggaacttttacaaagccagctgactgaaaaggactctatgattgaaaatatgaaatcttcccaaacatctggcacaaatgaacagtcttcagcaatagtttcagctagagattctgaacaagttgcagaattaaaacaggaactggcaactttaaagtctcagttaaactcacaatctgtggagatcaccaaactacagacagaaaagcaggaactgttacagaaaacagaagcgtttgcaaaatcagttgaggtacaaggagagaccgagactataatagccaccaaaactactgatgtagaaggaagactgtcagcattattacaagagaccaaagagtt

SEQ ID NO: 13068 - protein, 694 aa, Homo sapiens
MGVSRLMDLLADSREVIRNDGVLLLQALTRSNGAIQKIVAFENAFERLLDIISEEGNSDGGIVVEDCLILLQNLLKNNNSNQNFFKEGSYIQRMKPWFEVGDENSGWSAQRVTNLHLMLQLVRVLVSPTNPPGATSSCQKAMFQCGLLQQLCTILMATGVPADILTETINTVSEVIRGCRVNQDYFASVNAPSNPPRPAIVVLLMSMVNERQPFVLRCAVLYCFQCFLYKNQKGQGEIVSTLLPSTIDATGNSVSAGQLLCGGLFSTDSLSNWCAAVALAHALQENATQKEQLLRVQLATSIGNPPVSLLQQCTNILSQGSKVQTRVGLLMLLCTWLSNCPIAVTHFLHNSANVPFLTGQIAENLGEEEQLVQGLCALLLGISIYFNDNSLESYMKEKLKQLIEKRIGKENFIEKLGFISKHELYSRASQKPQPNFPSPEYMIFDHEFTKLVKELEGVITKAIYKSSEEDKKEEEVKKTLEQHDNIVTHYKNMIREQDLQLEELRQQVSTLKCQNEQLQTAVTQQVSQIQQHKDQYNLLKIQLGKDNQHQGSYSEGAQMNGIQPEGIGRLREEIEELKRNQELLQSQLTEKDSMIENMKSSQTSGTNEQSSAIVSARDSEQVAELKQELATLKSQLNSQSVEITKLQTEKQELLQKTEAFAKSVEVQGETETIIATKTTDVEGRLSALLQETKE

SEQ ID NO: 13069 - DNA, 2172 bp, Homo sapiens
  CDS (240)..(1346)
agaagattagcatcacagagcgaagctgcgatggagcagcaggcctcccagaagttcctgccgaatcgtcttcgtcacccccggggtccgaggtagcctcccttacacagcctgagaagagcacaggccgagtgcccacccaggagcccacccacagggagcccaccaggcaagcagcctcccaagagtccgaggaggccgggggcaccggcgggcccccggcaggcgtgcgatctatcatgaaacggaaagaggaggttgcagaccccacggcccaccggaggagcctccagttcgtgggggtcaacggcgggtatgagtcgtcatccgaggactccagcacagcagagaacatctcagacaacgacagcacagagaacgaggccccagagccgagggagagggttccgagtgtggccgaagccccccagctcaggcctgcagggacggcagcggccaagaccagccggcaggagtgtcagctgtctcgagaatctcagcacatacccactgctgagggggcatcaggatcaaacacggaggaggagatcaggatggagctaagccctgacctcatctcagcctgcttggccctggaaaagtacctggacaatcccaacgccctcacagagcgggagctgaaagtggcctacaccacagtgctgcaggagtggctgcgcctggcctgccgcagcgacgcacaccccgagctggtgcggcggcacctggtcacgttccgggccatgtctgcgcggctgctggactacgtggtcaacatcgccgacagcaacggcaacacagccctgcactactccgtgtctcatgccaacttccccgtggtgcagcagctgctcgacagcggtgtctgcaaggtggacaaacagaaccgtgctggctacagccctattatgctcaccgccctggccaccctgaagacccaggacgacatcgagactgtccttcagctcttccggcttggcaacatcaatgccaaagccagccaggcaggacagacggccctgatgctggccgtcagccacgggcgggtggacgttgtcaaagccctgctggcctgtgaggcagatgtcaacgtgcaagatgatgacggctccacggccctcatgtgcgcctgtgagcacggccacaaggagatcgcggggctgctgctggccgtgcccagctgtgacatctcactcacagatcgcgatgggagcacagctctgatggtggccttggacgcagggcagagtgagattgcgtccatgctgtattcccgcatgaacatcaagtgctcgtttgccccaatgtcagatgacgagagccctacatcatcctcggcagaagagtagccgtgagggaggcggggaccagccagaccgggagcaaaccgtcccttgtccccgtctcctccctgttcccgttcctccctggcccaccccactcacactccccaaggcccacggctcaaaggcaagcgagctctccctctgcttccctgggggagccccaacggccacaggactccagctccaagtgggttttcttggctcccctgttcaaagtggccacagcgcagaccgaagcaaaattcttgtatacattggcgccagggctgatgctggggtgtgggttttatgaagaacattgagaacaatcagctggtaattatggatggaggaagagggagaggaaaaaaatattgtatttttgaatcattgttgcaggagggggtgggaatcttaggatttgttgccagatttgaaagtcactggaacttgcatattttcattttaatcctaagtgttattacgcaccagttggggttcacccttcatccctcacatttaattgtctgatatagaatagtgttgtgtccactgccccgctagacggctttcttaggggaattttcttctggttgtttcacaagacagattctgtccttgtcacccgggacagaaaactcagtcttttcaccctcattcagatgaagggactcaggacaggctctgtgacttacagggacccaatcaattcacaatgagaaattaccggccaggcgtggtgactcacgtctgtaatcccagcactttgggagggcaaggcaagagcttgagcttgagcctagacgttaaagaccagcctgggcaacacagcaagacccatctctac

SEQ ID NO: 13070 - protein, 369 aa, Homo sapiens
MKRKEEVADPTAHRRSLQFVGVNGGYESSSEDSSTAENISDNDSTENEAPEPRERVPSVAEAPQLRPAGTAAAKTSRQECQLSRESQHIPTAEGASGSNTEEEIRMELSPDLISACLALEKYLDNPNALTERELKVAYTTVLQEWLRLACRSDAHPELVRRHLVTFRAMSARLLDYVVNIADSNGNTALHYSVSHANFPVVQQLLDSGVCKVDKQNRAGYSPIMLTALATLKTQDDIETVLQLFRLGNINAKASQAGQTALMLAVSHGRVDVVKALLACEADVNVQDDDGSTALMCACEHGHKEIAGLLLAVPSCDISLTDRDGSTALMVALDAGQSEIASMLYSRMNIKCSFAPMSDDESPTSSSAEE

SEQ ID NO: 13071 - DNA, 1787 bp, Homo sapiens
agtaaaatgtgaatggagcagaggacactagaggctgagaatggcaggggaaggagagtagggagacgtttgttaaaagtacagagttacagttctagaggagggataagttccattgttctacatcactgtaagatgactatcattaacaataatacagagttttcagtagctaggagactatcgagtgttcccaaaatgaagaaatgataaatgccggagatggtggatatgctaattaccctgatctattcaccacacaccatcactatgtaaaaatgtgactagagaactgatgcttggatttggccagtgagaagttcctggtggccaggcaaggtggctcatgcctgccataccagcactttgggggtctgagattggaggattgcttgaggccaggagtttgaggctgcagcaaactaggactgcactactgcactccagcctggggaacagaacaagacccccatctctacaaaaaataaaaatagctggggatgatggcagatgcctgtggtcccagctacctgggagactgaggtgggaggattgcttgaacccaggtgttggaggctgcagtgagtcaggactgcaccactgcactccagcctgggtgacagagtgagacccctgtctcaaaaagaagtccctggtgactgtgagaagtgtttcagcagaacagaggggccaagacatcattgggagtggcaacagagagaaagggaggcaagaaagggagttgagaccagtctttggaggaaatagaccaaaggaaagaaagccaggatgtgtggtcaagcgggtgcttccctgcccatgggaagggcattattatgtcagctccagaagcgaatggaaaggacccagcaggggcgtggtgcgggtgctgtgggtgaggggctgtttgtgaaggcgagtgcttgagttggcaggaggggctgggatccagtgttcaggcggtgtgcgggtgaggagctgggattggagggcatggcctgtgtcagagcagggtcatgccactcaccatcccagcagcaagctgaaagtgtgggtgcaggtggaggcaggctggtgactttgggaatgggaaggggagggaattctgtcccctgtgtcctgaatgattcccctgagggttctgagtggtacagagaatgcaggcataggtactactgactgggggacctgtctcctcaggaacctttagaaacattaatccattgcattctcaccacaacactgaaaatcaggctgacgactctgattttagataggcagaaatgaaaaaggctcagagaggtgaagcgacttgccaaatgacacacagaaagtggtcaagcagaacccacactcagcccgtttgactcaaacctgagctctttccaggattctgagcaacctgggtgagaatttgcagtgtctggaggatctggtcagaaggattcttacaggttcagggcagccccagacaaagagggctggaatcaggcctccttgaggccagccttgagaggaggcaaaattacatcattcctggagcctgcccatggagctcattccaggcctcagccacgcggggtcaaatttcctcatttctccctcccagtgaagacctgttttgttactaaaatgaacactgcatttactttattacaagaaaacagggctaggagaggttgctcatgactgtagtcccagtgccttgggaggcccagctgggagacttgcttgaggccaggagtttgagaccatcctgggcaacatagctagacccggtctctgcc

SEQ ID NO: 13072 - DNA, 1809 bp, Homo sapiens
  CDS (46)..(903)
aaagcactagccacttacagcaaagactttatttttgtacagaagatggtgaagtccaagacggtggctcagtgcgtggagtactactacacgtggaaaaagatcatgcggctggggcggaaacaccggacacgcttggcagaaatcatcgacgattgtgtgacaagtgaagaagaagaagagttagaggaggaggaggaggaggacccggaagaagataggaaatccacaaaagaagaagagagtgaggtgccgaagtccccggagccaccacccgtccccgtcctggctcccacggaggggccgcccctgcaggccctgggccagccctcaggctccttcatctgtgaaatgcccaactgtggggctgtgttcagctcccgacaggcactgaatggccatgcccgcatccacgggggcaccaaccaggtgaccaaggcccgaggtgccatcccctctgggaagcagaagcctggtggcacccagagtgggtactgttcggtaaagagctcaccctctcacagcaccaccagcggcgagacagaccccaccaccatcttcccctgcaaggagtgtggcaaagtcttcttcaagatcaaaagccgaaatgcacacatgaaaactcacaggcagcaggaggaacaacagaggcaaaaggctcagaaggcggcttttgcagctgagatggcagccacgattgagaggactacggggcccgtgggggcgccggggctgctgcccctggaccagctgagtctgatcaaacccatcaaggatgtggacatcctcgacgacgacgtcgtccagcagttgggaggtgtcatggaagaggctgaagttgtggacaccgatcttctcttggatgatcaagattcagtcttgcttcagggtgacgcagaactataaagccctgtgtgtcacttagagacagtgaaaacccacggcctccatcttcattaatcaggaaacctggactgcctgcttgttttgtaacccttttaaactacctgttttaaaagtggtcattttattcaggtttagaaaaaaaaatcctatttcttttccttttatttaaaaaaatttgtttttgtggggggttgggggaataaataattggcacaactatctttaagaggtgtttcatctgggctaccttctcatgaaatcattcccagtagggactgaagctgaccttcatgttccattgcattcagatgtcaaccatcccggttgccttttatcccaaagcttgctgtgagtgtgtgtgtgtgagacgcaggcgaccctcttagtactggggtcttggggccaacttttcccatcaagcgttactttgattctgttctgacctcattccatagtttgcagtgagcatggcatctttgcctggagatactatgctagggccagctttccaggggcaaagcaagccctcgtgttacacggctctcctccagctcacacgacatgtgaggagatgaccaaatgtgaaaacaggtttcccctgtgttgcccgtcatcctttggcccgttcacaggaatggagtactgtataattttaggctttcattcccagcagtgtttactgaggacctggttttctagaacaggtgtgtcctgtcctcttccatgttccctgggggctggtcagctccaagttgtgggtggcagagctgtgtttcagcatgaactgactagagacccatctggaggcaaatattaagttgccaggactgctttcacttcagggtgattgaaggacacatattgaagtacctagaatgccagaaagtgttctattgcccaaac

SEQ ID NO: 13073 - protein, 286 aa, Homo sapiens
MVKSKTVAQCVEYYYTWKKIMRLGRKHRTRLAEIIDDCVTSEEEEELEEEEEEDPEEDRKSTKEEESEVPKSPEPPPVPVLAPTEGPPLQALGQPSGSFICEMPNCGAVFSSRQALNGHARIHGGTNQVTKARGAIPSGKQKPGGTQSGYCSVKSSPSHSTTSGETDPTTIFPCKECGKVFFKIKSRNAHMKTHRQQEEQQRQKAQKAAFAAEMAATIERTTGPVGAPGLLPLDQLSLIKPIKDVDILDDDVVQQLGGVMEEAEVVDTDLLLDDQDSVLLQGDAEL

SEQ ID NO: 13074 - DNA, 1394 bp, Homo sapiens
  CDS (16)..(834)
tcagatccgccgagtatgaagcgctcggcttttcttttgtgtgaggagcacccacgacgccccgaccatgggcgcaggggcagaggcgaaggtcgtcgctccgtccgctaccccgtcccccagccgcaagcgccgaggagccggaagagaggcggaaagggcagcaggctccttacccagaccagcgaggggaggtcagctcgtcgcggggtgtggctcccgtccggggactcccgagctcattacgggtggccgtgtgtagccaagttcaagctctccctccgggaatgcctgccgcggcggcggaatacggcttcttcaggacattcagcaaagcggggaggcggggacctgcgggcggaggagcgacgccccagctgggaacgcggcggacgggcgagcggggggtgcgccctgggcgcgccaggccgcagaggctccggggaaagttctcttggccgcgcgagtggtggcgccccgggcgggagcagcccaggtgcatgtgggcccggtccaggcgtctgcaaaaagccctggaacgaagcggaccccccagtccagcgctggccgcggcaggggagccccttctgggcggggtatcagctgggggcggagggcggggcagagaccgtggtcccagcggcgaggtgccggcgagtccacgctgccaagccgcacactgcgcccaagccgcggggcagtccagcgctcgctgcgtccttcccccgagagacctggaggctgggtggggagaagaggacgcggtgctgctcggaccccacggttcggcggtcccaatcccacgccctccgcgcggtcggccgcgtccaggactgaggggcacaatagctctgaagctgcagtgacccctggtgggtcccgatgtccgtgcacaggcagccgaggttgagctgcggacgacactgagccccgctgggcttcggagcaggtgcaatctgtgctctccagctgggaaccagcagcgagttaatgcgagtcgcagttaggggagacacgaggggaggtgtcacagaaaaaaaactctatattgagttttagagttagagctttggcatcagacgtagttttgagttgactattctactgcttgttagctgggtagccaaagctcaaaaaaaattgcttaaaacctaggacgttagcccttaaaacaaaaccaggcttccgtagcacagtagaaatgaaatgaacaattggcgacttttgatggagtttcctctcatagtgatttgccacaaaggaccttctgtaggaagcctcggccttccctgctattgtgaccccatccaaacacaggatcagcataaccgccaaagtgcaatataaatttctgaactttacctaggctatgaataaaactattttatcttctg

SEQ ID NO: 13075 - protein, 273 aa, Homo sapiens
MKRSAFLLCEEHPRRPDHGRRGRGEGRRSVRYPVPQPQAPRSRKRGGKGSRLLTQTSEGRSARRGVWLPSGDSRAHYGWPCVAKFKLSLRECLPRRRNTASSGHSAKRGGGDLRAEERRPSWERGGRASGGCALGAPGRRGSGESSLGRASGGAPGGSSPGACGPGPGVCKKPWNEADPPVQRWPRQGSPFWAGYQLGAEGGAETVVPAARCRRVHAAKPHTAPKPRGSPALAASFPRETWRLGGEKRTRCCSDPTVRRSQSHALRAVGRVQD

SEQ ID NO: 13076 - DNA, 1980 bp, Homo sapiens
gttttaccttacggtcgctgggaatctaagcaacaaagactagaagcctccgatatgccattatcaacacacaagagacaaacagcccgaggaagcactcaatgatgagagcagtagacctgccctggcagatgagagaggagaaactctccacaatgaaggaaaagcactgacagtatttgatagctttagtcaaactgtgcttgagtttggcttagatttatgccagtggaacctgtccttaccaaattcagagatgacccaagattctactctgtggtatgagggaaagacctctcgatatttatctcacaccaacggctttatcgtaggagcgtcttcgcctcccccgtttccagtagaaaagacagctttgctcctttgaaagcgcagaccgccgcacctccagccccttctccccggggaagtaggccccgctaagaatgtgggaaggtggtggggcggcgactgaagtcgcttccgattggcgttgtcccaaggaagcctgcgcggattgatcggcggcaggcctccaatagagcctgctaggcggattggctgctacgcggctgggccctgtttccggtacctaggcgggcagccatggtgaccggcgagcggcatgcgacgccgcctctgtggcctgtggaggcccgcttggcggcgctgcttcccgacctactggtctttcggaagcctcggggatgggaacccgagctcgccacggcccagggcgtcctcctaggcgtccatgtgacgggtgagggcgacggccggcacttgcacttaagtctcctggcctgcgggagaggcggccgttgggtctaagcccctggaggcctcgacggttacaggcctagcctcccgcgagctaaggcacagtttaacttcgtgctgcggcttccttaggaaactttgagtatcttcgttttagcgtgggaggacatcttttgggatgaaccggctcagtccttgagctcaccccaaagatgatgaaattgaaactcagaggaaaggatttttacaggaccacgccccgggctttgaacccgtttttcccaaccccgagcattttctattaagcgttctgtttcaattattttattcgttcagttaattcgttcttggcgtcataagtatatgcccgccgttgttctggccgtagctatctagcagccactccgcgagtcgttcatttaacaaatacttactctgtgtcagggatatgaagatgggtaataccaggtgcctgtcctcactgtgtgagtggttctctagccagacatgaggagggatcctattgtttcccatagctaggcagcctaagagagtaggggaaagagctggctccagatgaaaagggcaccatctccagctcttggaagcagggagggtggtcctttggattcccagtggcagcagcaaccaacctggcccttagtagtttctaagttacaccatgttaatggataaaggaattactcagcttgaagggatctgtttcctttacactggcctgatgtgtggggagaaaggggccaaaaagtttaggatttggagttaacatcgtaatttctgctttgttggtcagggtttacagcattaatggacaggttcaccctgacctacaagtcggaacgtgacatggacaaactggcccatatcttcagttattacattagtgacatcgtggagcgtgagtgatcattgtagggtaacaaggtgtggtgctgggctcctgggggtttataaaagaagggggccagaagtactttaaaacaggtaccaaagggtcattcctttagcatcattcatctttggtttcttcaagttgccactgaaaagctagacctttgcctattatctgctaatctacccagtctcacattctattgactcattgttcaaagggggggcaggaggagctaatttcctttgcacatttgtattttatttcaaaataaagtattctcttctaac

SEQ ID NO: 13077 - DNA, 1974 bp, Homo sapiens
  CDS (341)..(1069)
attcagtggctggcaggaagcccgccctgcccgcccgccagtgtcagtggtgttggcatcagcttgggcaggtgtgcgggctcaggatggggcggccgtggtgaggaaccctggactctcagagatggaatttcaccgtgttgcctaggctggtctggagctcttgatctcaagcgatcctccctgcctcggcctcccaacgtgctgggattataggcgtgagccaccgctcctggccagggtctgttcctagttgcaacagttcttggaaacccactcgagagggccacgcctccattcaccaggccacgcatcacaagaggcaacaccaggagccaacatgagctcggggactgaactgctgtggcccggagcagcgctgctggtgctgttgggggtggcagccagtctgtgtgtgcgctgctcacgcccaggtgcaaagaggtcagagaaaatctaccagcagagaagtctgcgtgaagaccaacagagctttacggggtcccggacctactccttggtcgggcaggcatggccaggacccctggcggacatggcacccacaaggaaggacaagctgttgcaattctaccccagcctggaggatccagcatcttccaggtaccagaacttcagcaaaggaagcagacacgggtcggaggaagcctacatagaccccattgccatggagtattacaactgggggcggttctcgaagcccccagaagatgatgatgccaattcctacgagaatgtgctcatttgcaagcagaaaaccacagagacaggtgcccagcaggagggcataggtggcctctgcagaggggacctcagcctgtcactggccctgaagactggccccacttctggtctctgtccctctgcctccccggaagaagatgaggaatctgaggattatcagaactcagcatccatccatcagtggcgcgagtccaggaaggtcatggggcaactccagagagaagcatcccctggcccggtgggaagcccagacgaggaggacggggaaccggattacgtgaatggggaggtggcagccacagaagcctagggcagaccaagaagaaaggagccaaggcaaagagggaccactgtgctcatggacccatcgctgccttccaaggaccatttcccagagctactcaacttttaagcccctgccatggttgctcctggaaggagaaccagccaccctgaggaccacctggccatgcgtgcacagcctgggaaaagacagttactcacgggagctgcaggcccgtcaccaagccctctcccgacccaggctttgtggggcaggcacctggtaccaagggtaacccggctcctggtatggacggatgcgcaggatttaggataagctgtcacccagtccccataacaaaaccactgtccaacactggtatctgtgttcttttgtgctatgaatttggattcctaattgctattgttggttgctggggttttaaatgattgataagcttgtacagttaacttatagagggggagccatatttaacattctggatttcagagtagagatttctgtgttgtctcctagaaagcattacatgtagtttatttcagcatccttgttgggtggggccctggctctcttcccctttggtgggacctcccctttctttgggcttcagttcactcaggaagaaatgaggctgtcgccatctttatgtgcttccagtggaaatgtcacttgctacagacaatagtgcatgagagtctagagaagtagtgaccagaacagggcagagtaggtcccctccatggccctgaatcctcctctgctccagggctggcctctgcagagctgattaaacagtgttgtgactgtctcatgggaagagctggggcccagagggaccttgagtcagaaatgttgccagaaaaagtatctcctccaaccaaaacatctcaataaaaccattttagttg

SEQ ID NO: 13078 - protein, 243 aa, Homo sapiens
MSSGTELLWPGAALLVLLGVAASLCVRCSRPGAKRSEKIYQQRSLREDQQSFTGSRTYSLVGQAWPGPLADMAPTRKDKLLQFYPSLEDPASSRYQNFSKGSRHGSEEAYIDPIAMEYYNWGRFSKPPEDDDANSYENVLICKQKTTETGAQQEGIGGLCRGDLSLSLALKTGPTSGLCPSASPEEDEESEDYQNSASIHQWRESRKVMGQLQREASPGPVGSPDEEDGEPDYVNGEVAATEA

SEQ ID NO: 13079 - DNA, 2058 bp, Homo sapiens
  CDS (635)..(1036)
gcacagtgagcggagcgcctgggcggcggcggcggcggcgtgatggctccggccgcggaccgagagggctactggggccccacgacctccacgctggactggtgcgaggagaactactccgtgacctggtacatcgccgagttctggaatacagtgagtaacctgatcatgattatacctccaatgttcggtgcaattcagagtgttagagacggtctggaaaaacggtacattgcttcttatttagcactcacagatggagtctcactctgtcgccgaggctgaagtgcagtggcacaatctcggctcactgcaacctccatttcccgggtttacgcgatccttctgcctcagcctcccaagtagctgggactacagtggtaggaatgggatcctggtgcttccacatgactctgaaatatgaaatgcagctattggatgaactcccaatgatatacagctgttgcatatttgtgtactgcatgtttgaatgtttcaagatcaagaactcagtaaactaccatctgctttttaccttagttctattcagtttaatagtaaccacagtttaccttaaggtaaaagagccaatattccatcaggagtctcactctgtcaccccggctgaagtgcaatggcacaatctcggctcattggaacctccacctcccaggtcatgtatggaatgttggtctttacattagtacttcgatctatttatattgttacatgggtttatccatggcttagaggactgggttatacatcattgggtatatttttattgggatttttattttggaatatagataacatattttgtgagtcactgaggaactttcgaaagaaggtaccacctatcataggtattaccacacaatttcatgcatggtggcatattttaactggccttggttcctatcttcacatccttttcagtttgtatacaagaacactttacctgagatataggccaaaagtgaagtttctctttggaatctggccagtgatcctgtttgagcctctcaggaagcattgatgaatcattccaccaagaaaacaaacaagcacctaccatagacctggcagaataaataaggaaatccttaaagatctacaagttcaaatatgtcatgaccatcacagcagaggagtgactttctgactaatgctgccacccacacagagaataaggagtagggcctgctgggtgtttagctcatggctttatcttatttgtccccctcctcctttcacgctccagtttataaagaaacagagatgatgtgtgtgtatgcctcaaatgcagaaacagttgggcttttcttaacaggttaacagtttgtgctggttataagaaattaaccttcttttctttttgccaagggttgcatgtgaattatacctttcttaatatttgattaaataatgcagtcagctaagagccaacaaaaccccatatccagatagttagctgtgagccagcactcagctgtgtcagatttgattaatattgtattaatctcatggatagttctcaaagttaaaaaaagagagagaaagagagagagctagctgtgggattctgtgtagttcttcactatctgttccagggctagtcggaggatcataagcaagctcagacctgcccccagttcagtacttgaccacatcccaggatttatggtgtctgtctatggccacagccaaccagaatgagtgggtcatcttataacctttctgaagctccatgaggacatgtatagaatgctgcaccttcagccagctctgctctgatctttgcagatctttaagttgtcactgtttctacggctagacaaatatgactggtggtctagactacccatagttcatcctcctcacataacttatttgaagttgtcagggaatgtcattacactctgatttttaaaattatgcagtattttccagttctcagagaggtcatggttgtacccagggaagtgtgttgcattaactaaagctaaaattatcagaatcctatttacataaagcatattaaaatatctgctcctt

SEQ ID NO: 13080 - protein, 134 aa, Homo sapiens
MAQSRLIGTSTSQVMYGMLVFTLVLRSIYIVTWVYPWLRGLGYTSLGIFLLGFLFWNIDNIFCESLRNFRKKVPPIIGITTQFHAWWHILTGLGSYLHILFSLYTRTLYLRYRPKVKFLFGIWPVILFEPLRKH

SEQ ID NO: 13081 - DNA, 1790 bp, Homo sapiens
  CDS (79)..(945)
ttttttgcactcctgcgccgggcctccccgctggcgcatcgccacctgcggcggcagcgcattgaccctgtgctctacatgacggagtggttcatgtgcatcttcgcccgcaccctgccctgggcgtcggtgctgcgtgtctgggacatgtttttctgtgaaggcgttaagatcatcttccgggtggccctggtcctgctgcgccacacgctgggctcagtggagaagctgcgctcctgccaaggcatgtatgagaccatggagcagctgcgtaacctgccccagcagtgcatgcaggaagacttcctggtgcatgaggtgaccaatctgccggtgacagaagcactgattgagcgggagaatgcagcccagctcaagaagtggcgggaaacgcggggggagctgcagtatcggccctcacggcgactgcatgggtcccgggccatccacgaggagcgccggcggcaacagccacccctgggcccctcctccagcctcctcagcctccctggcctcaagagccgaggctcccgggcagctggaggggccccgtccccgccgccccccgtccgcagagccagtgctgggcctgccccagggcctgtggtcactgctgagggactgcatccatcccttccctcacccactggcaatagcacccccttgggttccagcaaggagacccggaagcaggagaaggagcggcagaaacaggagaaggagcggcagaaacaggagaaggagcgggagaaggagcggcagaagcaggagaaagagcgagagaagcaggaaaaggagcgagagaagcaggagaaggagcggcagaagcaggagaagaaggctcaaggccggaagctttcgctgcgtcgaaaggcagatgggcccccaggcccccatgatggtggggacaggccctcagccgaggcccggcaggacgcttacttctgacctctgccctggggctggactgcatggcccccctctttccctcagccaagaacaggcctggcccaaggtgccaccccctagcaccttgtcaggctgtcccttgctggggaaagtggcttggttccccatctcctcgccagctgctgatccctacacgggcaggacagatgggcagctgcaaatgagtctggagcctctcatctcccatgaggctcagctggggtctctgtcgctcctgccccagttccctctgggtcccctcctaggtgctgtcctgaatggcccgttgtcatcccaggggtgactcctggtgatgggagtcagcagtttcagattcttacactccatagctccccttaccatgaggtggagctggcttccttttccctgtcttcagccctccctgtcccccccacttcctggccagggctctcattctggacctgtgttgtaattgtgtacagaggatggcgttggcctggggtgggggtgctcgctttgtcttctgtcctttggttctccttccataatgctcctgtacccagtttatttaaggggacatgcactggaataggaaatgtcccccatctcccttcctgcaccctgctgtgctccctccaaacccaccttgctctgtgttctcaggcccccctgcttttgtctcaccaggacccatacctttcaccttgctcccttccacccctccagttagtccctatctgggtaagggtcttcccttgagctccagggggtggaacccaatgtttacattctcttctgtctctgcccccaccccatgcagcgctttgaggaattggaaaagaacctgctgttgtacctgg

SEQ ID NO: 13082 - protein, 289 aa, Homo sapiens
MTEWFMCIFARTLPWASVLRVWDMFFCEGVKIIFRVALVLLRHTLGSVEKLRSCQGMYETMEQLRNLPQQCMQEDFLVHEVTNLPVTEALIERENAAQLKKWRETRGELQYRPSRRLHGSRAIHEERRRQQPPLGPSSSLLSLPGLKSRGSRAAGGAPSPPPPVRRASAGPAPGPVVTAEGLHPSLPSPTGNSTPLGSSKETRKQEKERQKQEKERQKQEKEREKERQKQEKEREKQEKEREKQEKERQKQEKKAQGRKLSLRRKADGPPGPHDGGDRPSAEARQDAYF

SEQ ID NO: 13083 - DNA, 1947 bp, Homo sapiens
  CDS (26)..(1645)
aggttggtctggaccggaagcgaagatggcgacttctggcgcggcctcggcggagctggtgatcggctggtgcatattcggcctcttactactggctattttggcattctgctggatatatgttcgtaaataccaaagtcggcgggaaagtgaagttgtctccaccataacagcaattttttctctagcaattgcacttatcacatcagcacttctaccagtggatatatttttggtttcttacatgaaaaatcaaaatggtacatttaaggactgggctaatgctaatgtcagcagacagattgaggacactgtattatacggttactatactttatattctgttatattgttctgtgtgttcttctggatcccttttgtctacttctattatgaagaaaaggatgatgatgatactagtaaatgtactcaaattaaaacggcactcaagtatactttgggatttgttgtgatttgtgcactgcttcttttagttggtgcctttgttccattgaatgttcccaataacaaaaattctacagagtgggaaaaagtgaagtccctatttgaagaacttggaagtagtcatggtttagctgcattgtcattttctatcagttctctgaccttgattggaatgttggcagctataacttacacagcctatggcatgtctgcgttacctttaaatctgataaaaggcactagaagcgctgcttatgaacgtttggaaaacactgaagacattgaagaagtagaacaacacattcaaacgattaaatcaaaaagcaaagatggtcgacctttgccagcaagggataaacgcgccttaaaacaatttgaagaaaggttacgaacacttaagaagagagagaggcatttagaattcattgaaaacagctggtggacaaaattttgtggcgctctgcgtcccctgaagatcgtctggggaatatttttcatcttagttgcattgctgtttgtaatttctctcttcttgtcaaatttagataaagctcttcattcagctggaatagattctggtttcataatttttggagctaacctgagtaatccactgaatatgcttttgcctttactacaaacagttttccctcttgattatattcttataacaattattattatgtactttatttttacttcaatggcaggaattcgaaatattggcatatggttcttttggattagattatataaaatcagaagaggtagaaccaggccccaagcactcctttttctctgcatgatacttctgcttattgtccttcacactagctacatgatttatagtcttgctccccaatatgttatgtatggaagccaaaattacttaatagagactaatataacttctgataatcataaaggcaattcaaccctttctgtgccaaagagatgtgatgcagatgctcctgaagatcagtgtactgttacccggacatacctattccttcacaagttctggttcttcagtgctgcttactattttggtaactgggcctttcttggggtatttttgattggattaattgtatcctgttgtaaagggaagaaatcggttattgaaggagtagatgaagattcagacataagtgatgatgagccctctgtctattctgcttgacagccttctgtcttaaaggttttataatgctgactgaatatctgttatgcatttttaaagtattaaactaacattaggatttgctaactagctttcatcaaaaatgggagcatggctataagacaactatattttattatatgttttctgaagtaacattgtatcatagattaacattttaaattaccataatcatgctatgtaaatataagactactggctttgtgagggagtgtttgtgcaaaattttttcctctaatgtataatagtgttaaattgattaaaaatcttccagaatt

SEQ ID NO: 13084 - protein, 540 aa, Homo sapiens
MATSGAASAELVIGWCIFGLLLLAILAFCWIYVRKYQSRRESEVVSTITAIFSLAIALITSALLPVDIFLVSYMKNQNGTFKDWANANVSRQIEDTVLYGYYTLYSVILFCVFFWIPFVYFYYEEKDDDDTSKCTQIKTALKYTLGFVVICALLLLVGAFVPLNVPNNKNSTEWEKVKSLFEELGSSHGLAALSFSISSLTLIGMLAAITYTAYGMSALPLNLIKGTRSAAYERLENTEDIEEVEQHIQTIKSKSKDGRPLPARDKRALKQFEERLRTLKKRERHLEFIENSWWTKFCGALRPLKIVWGIFFILVALLFVISLFLSNLDKALHSAGIDSGFIIFGANLSNPLNMLLPLLQTVFPLDYILITIIIMYFIFTSMAGIRNIGIWFFWIRLYKIRRGRTRPQALLFLCMILLLIVLHTSYMIYSLAPQYVMYGSQNYLIETNITSDNHKGNSTLSVPKRCDADAPEDQCTVTRTYLFLHKFWFFSAAYYFGNWAFLGVFLIGLIVSCCKGKKSVIEGVDEDSDISDDEPSVYSA

SEQ ID NO: 13085 - DNA, 1424 bp, Homo sapiens
  CDS (215)..(1360)
gaaaaaagatcctcaaggtcttgggcttcatttctataaacatggagaaccagaagaagacatagttggacttcaggccttccaagaaagattaaacagttacaaatgcattacagacacacttcaagaactggtaaatcaaagtaaggccgctcctcagtctcccagtgtacccaaaaaacctggtcctccagtgttgtcatctgatccaaatatgctgagtaatgaagaagcaggacatcattttgaacaaatgcttaaattgtcacagcgatccaaggatgagctctttagtattgccctttataattggctaatacaagtcgaccttgcagataagctgctacaggttgcttctccatttctggagccacatctagtccgaatggccaaagttgatcaaaacagagttcgttatatggatttactctggcggtattacgagaagaacagaagtttcagtaatgctgctcgtgtactgtccagactggctgacatgcatagcacagaaatttcacttcagcagcgactagagtacattgctcgagccattcttagtgccaaaagttccactgccatttcatcaatagctgccgatggtgaatttcttcatgaattagaagaaaaaatggaggttgctaggatccaacttcagatacaggagacactacaaaggcagtattcccatcattcttctgtacaggatgcagtttctcagctggattctgagctgatggacataactaagctttatggggaatttgctgacccatttaaacttgcagagtgcaaacttgcaataattcattgtgccggttattcagaccctatattggtgcagacactttggcaagatatcatagagaaagaattgagtgacagtgtgacattgagctcctcggatagaatgcatgctcttagtctcaagattgttctccttggcaaaatttatgctggcacaccacgcttctttcctttagattttattgtacagtttttagaacagcaggtttgtactttgaactgggatgtgggcttcgtaatacagacaatgaatgaaattggagtaccattacctagactactagaagtttatgatcagttgttcaaatcacgggatccattctggaacagaatgaagaagccactgcaccttttggattgtatacatgtattattgataagatatgttgagaatcccagccaagttttaaattgtgaaaggagaagatttacaaatctctgcctggatgctgtttgtggttaccttgttgagctccagtctatgagctcgtcagtagcagtacaagccatcactgggaattttaaatctcttcaagctaaattagaacggcttcattaattactgtgatatactttcatccgttttatgatctgtaaaataaaaactcagctgggtccag

SEQ ID NO: 13086 - protein, 382 aa, Homo sapiens
MLSNEEAGHHFEQMLKLSQRSKDELFSIALYNWLIQVDLADKLLQVASPFLEPHLVRMAKVDQNRVRYMDLLWRYYEKNRSFSNAARVLSRLADMHSTEISLQQRLEYIARAILSAKSSTAISSIAADGEFLHELEEKMEVARIQLQIQETLQRQYSHHSSVQDAVSQLDSELMDITKLYGEFADPFKLAECKLAIIHCAGYSDPILVQTLWQDIIEKELSDSVTLSSSDRMHALSLKIVLLGKIYAGTPRFFPLDFIVQFLEQQVCTLNWDVGFVIQTMNEIGVPLPRLLEVYDQLFKSRDPFWNRMKKPLHLLDCIHVLLIRYVENPSQVLNCERRRFTNLCLDAVCGYLVELQSMSSSVAVQAITGNFKSLQAKLERLH

SEQ ID NO: 13087 - DNA, 2721 bp, Homo sapiens
ttcttcagttcatgggattttatttcaggagaattcaaacattcacgtattggagaagatgacacatttcttgaatgtctttggctttgagctgaatgcactaactagaagggacttcagattgtcctccttcgggggaggtaagtatattcttcatatacaggtaagagtgaaatgatagaagaatgttcctcctctccttttcttcctggacaacagatcaaatatttctcagatcttttacagctgaattggagtcacatggacaggtatgatcttaaaatataaaaaattattttaaaattacatgctaaaattttataaaaataaatgctaaaactaacttaaacggaagcatttgattaaaaaatttatccaaaaaagtttgaattttatatgaaacaggatagaagatgaaaaagctaaagaaataaaatataaataaattatggctggggacagtggctcacacctgtaatcccagcactttgggaggctgaggtgggaggactgattgaggctaggagtttgagacctgttatttgaggcacatgggaaggaaagttttctttgagatattccacattttataatattcttcaagagatttacagagttccttgagtgaattgttggtttgttcttaatactgaatttcctattcaaatttatttagaagttcatttcttacagtgatctcatctcctattaagatattcttcaaggtaggttcttggccagtttctcaatgacagatttttaaaaatattgttaatctttttattaatatgagaacataattgttccagatctggaggccatcctttaagcttcttgcaacagtctgggagcaaagagtttactcgccactgggtagtgggccatggacaccccagtctccaccagaagttcgggattgcaaaatgggactctggcagtaaatttcaaactgtatgccagacctggccctttgcagtgatataaaatttttcttgaggtgtctggaaagatggctgaataggaacagctctgctctgcagctcccagcgagatcaacgcagaaggagataatttctgcatttccaactaaagtacccagctcatctcattgggactggttagacagtgggtgcagcccacagaaggcaagcagaagcagggtggggtgtcgcctcacccgggaagcgcaaggggtcagggaactccctcccctagccaagggaagctgtgagggactgtgccgtgaggaacggggcattccggcacagatactatgctttccccacggtctttgcaacccacagaccaggagattcccttgggtgcctgcaccaccagggccctgggtttcaagcaaaaaactgggcagccatttgggcagacactgagctagcagcaggagtttttttcataccctagtagcccctagaatgccagcgagacagaactgttcactcccctggaaaggggcactgaagccagggagccaagtggtctagctcagcagatcccacccccacggagcccaacaagctaagacccactgggttgaaattctcgctgccagcacagcagtctgatgtccacctggaatgcttgagcttggtgcagggaggggcgtctgccattactgaggcttgattaggcagtttccccctcacagtgtaaacaaagctgctgggaagtttgaactgggtggagcccactgcagctcggcaaagttgctgtagcaagagtgtctctctagattcctcctctctgagcagggcatctctgaaacaaaggcagcagccccagtcagggacttatagataaaactcccatctccctgggacagagcacctgggggaaggggcagctgtgggcacagcttcaggacacttaaacgttcctgcctgctggctctgaagagagcagcagatctcccagcacagtgctcaagttctgctaagggacagactgcctcctcaagtgggtccctgacccctgtgcctccggagtgggagagaccttccagcaggggtcaacagacatctggtgggtgcccgtctgagacgaagcttccagaggaaggaacaggcagcaatctgtgctgttctgtagcctgcgctggtgatacccaggtaaacagggtctggagtggatctccaacaaactccagcagacctgcagcagaggggcctgactgttataaggaaaactaacaaacagaaaggaatagcgtcaacatcaacaaaaaggacatccacacaaaaaccccatccgaaggtcaccagcatcaaagaccaaaggtagataaatccatgaagatgaggaaaaaccagtgcaaaaaggctgaaaattccaaaaaccagaacaccttttctcctgcaaaggatcacaactccttgccagcaagagaacaaaactggatggagaatgagtttgacgaatttacagaaggaggcttcagaaggtgggtaataacaaactcctctgagctaaaggagcatgttctaacccaatgcaaggaagctaaaaatgaaaaaaggctggaggaattgctaactagaataaccactttagagaagaacataaatgatctgatggagctgaaaaacacagcacgagaccttcgtgaagcatacagaagtatcaatagctgaatcgatcaagcagaagaaaggatatcagagattgaagatcaacttaatgacataaagtgtgacgtcaagattagag

SEQ ID NO: 13088 - DNA, 2035 bp, Homo sapiens
agtaaatgaagaggaaaatgctaacatgccatattggacaccacttgtctttcgatgccaggtcccttttcagccgaatatgtcagaattttctaggctccatcttttcttttattcctcttgcagcaaccataggctttgatggcttctcacaggacagaaaacctggatcatcccaaacctgctctgtgaaccctctacttcatgtatgggtttcctcccatgctgcacactgtgagggtcatgcatcaccacagcatgcacagctgagaaatgtggagagtgaaggacccaggccacattgactgtggggatgtaagccagtggagacacacttcctgaagtaagatgcatttcacaaagctcccagtttccagaaggatggagcaccagtcacccttggtcatggccaaaccctctttgtccttgccctttcctgctctctgggatcacagaacatgtgcactggacacagcttctgccttggaaacacccagactaaggtaatttctcacacaccagtttatcttccagcttctgtcagaactttaggtcaagtattatgagccagatagagtaaaaaatataaactttaaaaattataatcaccctcaacatggcaagcttctcatggtaagaaagaaatgcaagaattcagaaactaacccagggaatagcaggctcaagatttcttggcaaataaattcacttaatagatcacagatattttctcatctcaacacatgctgtgcacaggtatatttcaaacctaatcaccgtggaatttctcattttcattattacaaacaaagctacaataagttcatgtgtattgaaatccttgcaaacttgactagtagctcaagataaattttagaataaaaaatcaaatggtattcacatgtatatactctgaagcatatatttggtcttcaacaggtttccaggcatacaactactaaaatccttggattccttaaagtggtacttgtatgttaatgagttgacaaatggctagtagtccctacgtagcttcaggatgggagctgggcacctgaaagaccaaggcagaattagagaattaagatagtcagacccagcccccaacctccatggagggaagaagggatgaatgttaagcagaacaccaatggccagtgatttaatcagtcatgcctacagaatgatgcctccataaaaaccctcaaggactgggttcagagggcttccagatagctgaagacgtggaggttcctggaaggtggtgaacctggagagagcatgcaagctccacagcctttccctatacctcaccctatgcatctcttcatctgcatctgatatcctttacaataaactgctaaatgtagatgcctccatgagttctgtgggctgctctagcaaattaattgaacccaagaagggggctgtggtaacccagacttacagctggtgtctgccataggattgattgtttgcttggtgtatgggcttaaccccatcacctttagtcacagaagtcttctgtgttgattgttgagtgagagaatagaaaaagcgctttagtttgtttttccttatagaacatgttgacattatgggacatatttaaatttcccttcagacaccaaattcgtacttttgccaataatgtgtacaaaggcatatattctcacagtttcactaacatttgattttgttagtaactttagttttacttgcaaatcttacctcagtatcattttatttggcattgatttaatcattagtgaggtttaacatcttctggtatgttttggggctatttgtgtttcttcaataaattgtttttttcttaaattttcattgttttacctttttgcttactgatttgtagcggtagttgacatgattctacacatctttgtcatcatataagtgttgaatcgtttttctagtgggacgttttatccttttgctatgttttgtttgtttcctttgtggtacaaaagttttaaatgttatatgtattaaataaactatcaatcatgccttt

SEQ ID NO: 13089 - DNA, 1853 bp, Homo sapiens
  CDS (179)..(874)
atcggctgtcagcctccctggctgttagtaccttctttcccggagtcctggtccacgagttggatttactgctgtcgcgggtgggcctcacgccattccctgtccctcggccccctgagtgagtccggtctcccggcgaaagtgagcgaggtttgcccggagcgcgcacgaggggaaaatgcctaaaaaaaagactggtgcgaggaagaaggctgagaaccgccgagaacgtgaaaaacaactaagagcatcaagaagcactatagatttagctaaacatccatgtaatgcctcaatggaatgtgacaagtgtcagaggcggcagaagaatagagcattttgctacttttgtaattctgtacagaagttaccaatttgtgcacagtgtgggaaaacaaagtgcatgatgaagtcttcagactgtgtcataaagcatgctggtgtatacagtactggccttgcaatggtgggtgcaatatgtgacttctgtgaagcttgggtttgccatggtaggaaatgtctcagtacacatgcttgtgcctgccctcttaccgatgctgagtgtgttgaatgtgaacgaggcgtgtgggaccatggaggcagaatattcagttgttctttttgccataactttctctgtgaagatgatcaatttgagcatcaagccagctgccaggttttagaggcagaaacatttaaatgtgtttcatgcaatcggcttggtcagcactcatgtctccgttgtaaggcttgtttctgtgatgatcatcaaggagcaaagtgtttaagcaagaaaaaggaaaacagcctccttgtcctaaatgtgggcatgaaactcaggagactaaggaccttagcatgtcaacacgctccctgaaatttggcaggcagactggaggtgaagagggagatggagcttctgggtatgatgcttattggaagaacctttcatctgataagtatggtgataccagctaccacgatgaggaggaggatgagtatgaagcagaggatgatgaagaggaagaagatgaaggcagaaaggattcagatactgagtcatcagatttgtttactaatttgaatttaggaaggacctatgctagtggctatgctcactatgaggaacaagagaactaggggagctgctctggtggccgtgtgtgagaggagcaggagtgagtgtgtgtgcttgatgaattgtgtgtggttgttcaaaagtaccttagccacttagccttgtgcagaagactagttacacttaatgggccaagcaatagggtgtagcgtttttatagaactgataatcaggcttatggcataagaaaaatgagtttcaaatttaagatgtttattgatcgaagcaattgaagtatcatggattggattgttactgatttcagtaaagtatgttttgccaattagatacatatatacaagataaaggaataggatggtaatatatttgtttgaaattaaattactgtttttattaaaaaatactgcttcattgggctgattttgtaaaatgtaatgagtaaaatgaattactgtatttttccttttatgtccacagaatgagagtcatatgttgttatattctaaattttcattaaatattcatgtcaccttgagttgtcatgataagtatgttttagtatttgacttattcttctctttcttcacaatgtatgtcctcagtggtacctattattgatgccttaaatgtattgataaggtgactagttagccatttttcagagatacagtatcagaaatagtattattacagaagctttacccaggacattttatttctctttgaataaatctattatttcacttaaaaaaac

SEQ ID NO: 13090 - protein, 232 aa, Homo sapiens
MPKKKTGARKKAENRREREKQLRASRSTIDLAKHPCNASMECDKCQRRQKNRAFCYFCNSVQKLPICAQCGKTKCMMKSSDCVIKHAGVYSTGLAMVGAICDFCEAWVCHGRKCLSTHACACPLTDAECVECERGVWDHGGRIFSCSFCHNFLCEDDQFEHQASCQVLEAETFKCVSCNRLGQHSCLRCKACFCDDHQGAKCLSKKKENSLLVLNVGMKLRRLRTLACQHAP

SEQ ID NO: 13091 - DNA, 2714 bp, Homo sapiens
atctgcaagggggaaacaggattttggcagcaatcctttcattactaaagcttcctttcttttcgggtacagtgaaaagagccaaggctgtgtgaccccctcatcacttagccaggcgtatggtcctggtttctgaggctgccagaaagcatcttagcaatttgtgtttggaaggtccatgcctgactattctaggctggaggttcctaaagagtaacaagaggaagagaaacaagaatctctgacacttgttgagaatagagcacagtcccatttgtttgaaaagagacaccaggcagccatgtttatgtgccagaaatgcattccacctcaaggaggacttaatttatggacccgtgtgtgccaggctgagctgggcaagatctttctcaggacaaactctgccatgcagctaaaagcctggaaactaaaggatttcatgtagtaaactatcttccaacccctgtaggcatcagaccacaggatgaggtttcagaaggtcataaggcagaatagttaagcctacagggcttacagtctgacagacctgggttcagttcttgggtcttcatcactagttttgtgacttcgggaagatgactcccggagcctcagtgagcctcagttacttcatatgtaaatgaagtaatactatctacttcacaaggctgttgaaaggattaaatggagaatgggtgtaaaacccttagtgcagtgccgtgcacacaccgtagatgccgaacgtgtgatgttggcactacacaatgtgtaatcccaatcaggcagagctaggcaggcaaatctaatccaggatctttgtaaggggactgagaaccagagactggagaaagccagtgtaaacaccatgagcaaaggagcaagagaaggggcattgtgtaagtaggagatggagcttggacttactaagtggatcagggtagaagaatccagtcaggaccaagggaggagagtccaggaaaatgccatgagcagctctgtagcatgaccttgttgggctgggttaaagtagggtctgccaccagtcatgtgacagaaaggtacctcatgcacttcctccttcccccagaaatcagcctccaggagtgaggaatgagcccagaatgagagtttagagtgctccagagcctttgttagaggtgccctccgacattcagaaaaccaggattccagagacctgggtttgagtcctgactttgcagcatactaactgtgtgatcttgaaccaacatattttcacctaatgaggctgacaatcttccctacttcacaaaatagttatgagagtcaaataaaagtacattttagaaagtgaaatgctgtggacatttaaggtggagccactgtgagagtctagggggacagatggtagtcgtctcagaatgaaacgaatacacccctctcagagccctttccaaggatcccctccttctttcagctccttccctccacctcaatacacactcctgtcccaggaacctaacctcatctagaaataccagggccagcatgccttacacctagaggtttggttggcttcagagaaacttctggaggctaaaagcagccaagaagaatcagccactacatgctgggcctggatgaacagagcagtgagctgtgatggggctggggctggggcccaggaggagcaggcaggagagtttgtatgcaccgtgattcaaatattataacaaaaatcatcgatcatgtgttaggcactttacagttcccaaagcactttcccatccatgccctgatggtctttgacacaacactgtggtgtgggttttattatttccagtacagatgaggaagactgaggcctgcatcagtgaagcaacctatccaagactacatagagaaggcagtaaatggcagggttagtctcagaacaggggagggtctgttccccccgcagtgggcagtcctaattctgaacttcacctatctgggggtgatagaggggaacaagaggaagcctgctgaagagaaaacctaaacatctgttttgtctacgtatgacttcctctgcttgtgggagagaaggaaggaaaggaacacattgttgtcagccccacaaccccaacagaattaaaccctggagcaggttgaacagcagaggcttccctcagatcaaggagccaggagcagatgatctatctctgtggccacacagagagatgtcaccttatgcaatttgcatatcatattcaattcccccaactgctctttctaatttattcaactggggaccaggctggtctcatgccaacctaggagatgtaccatagcagtatgagcagaattcctcaggaggaacaattagcaaaaactgcagttgcctctcgataggcctgagcagagagaggaacaatagctctcacgtctctcctcatcagattctaactaagcagatgttctcatgcttttttcttcttcctatgttctgtatactgacacctcttctcagtggcatatgaaatatgaaatgtcatgtgttgtgagtttgtatgaatataaaggaatatatatacacagtagcaaaagagaagatctcatttacaaatatctatggtgtttccttgttctgtgttgatctgttttattgatacaaactgaattttcttaatgtatcttctatctctattatagtggcaatgatggtatatgcattaaagttcttctgaattgtg

SEQ ID NO: 13092 - DNA, 1711 bp, Homo sapiens
  CDS (101)..(1642)
gggcgcccaattccggaaggtgctgcacagctgtggcggcgggtactgcgttagtgattagagtttcttccctgccggaggtgggatacacggtagcatcatggtcgaggaggtacagaaacattctgtacacacccttgtgttcaggtcgttgaagaggacccatgacatgtttgtagctgataatggaaaacctgtgcctttagatgaagagagtcacaaacgaaaaatggcaatcaagcttcgtaatgagtatggtcctgtgttgcatatgcctacttcaaaagaaaatcttaaagagaagggtcctcagaatgcaacggattcatatgttcataaacagtaccctgccaatcaaggacaagaagttgaatactttgtggcaggtacacatccatacccaccaggacctggggttgctttgacagcagatactaagatccagagaatgccaagtgaatcagctgcacagtccttagcggtggcattacctttgcagaccaaggctgatgcaaatcgtactgcccctagtggaagtgaataccgacatcctggggcttctgaccgtccacagcctacagcgatgaattcaattgtcatggagactggcaataccaagaactctgcactgatggctaaaaaagcccctacaatgccaaaaccccagtggcacccaccgtggaaactctacagggttatcagtgggcatcttggctgggttcgatgtattgctgtggaacctggaaatcagtggtttgttactggatctgctgacagaactataaagatctgggacttggctagtggcaaattaaaactgtcattgactgggcatattagtactgtgcggggcgtgatagtaagcacaaggagcccatatctgttctcttgtggagaagacaaacaagtgaaatgctgggatctcgaatacaataaggttatacggcattatcatggacatttaagtgcagtgtatggtttggatttgcacccgacaatcgatgtgttggtaacctgtagtcgagattcaactgcacggatttgggatgtgagaactaaagccagtgtacacacattatctggacatacaaatgcagttgctacagtgagatgtcaggctgcagaaccacaaattattacaggaagccatgatactacaattcgattatgggatctggtggctggaaaaacaagagtgacattaacaaatcacaaaaaatcagttagggctgtggttttacatccaagacattacacatttgcatctggttctccagataacataaagcagtggaaattccctgatggaagtttcattcaaaatctttccggtcataatgctattattaacacattgacggtaaattctgatggagtgcttgtatctggagctgacaatggcaccatgcatctttgggactggagaactggctacaattttcagagagttcacgcagctgtgcaacctgggtctttggacagtgaatcaggaatatttgcttgtgcttttgatcagtctgaaagtcgattactaacagctgaagctgataaaaccattaaagtatacagagaggatgacacagccacagaagaaactcatccagtcagctggaaaccagaaattatcaagagaaagagattttaatgaatgtggaattttttctctctctttttttttctttttaattaaaaaaaaaaaagcttggcgttc

SEQ ID NO: 13093 - protein, 514 aa, Homo sapiens
MVEEVQKHSVHTLVFRSLKRTHDMFVADNGKPVPLDEESHKRKMAIKLRNEYGPVLHMPTSKENLKEKGPQNATDSYVHKQYPANQGQEVEYFVAGTHPYPPGPGVALTADTKIQRMPSESAAQSLAVALPLQTKADANRTAPSGSEYRHPGASDRPQPTAMNSIVMETGNTKNSALMAKKAPTMPKPQWHPPWKLYRVISGHLGWVRCIAVEPGNQWFVTGSADRTIKIWDLASGKLKLSLTGHISTVRGVIVSTRSPYLFSCGEDKQVKCWDLEYNKVIRHYHGHLSAVYGLDLHPTIDVLVTCSRDSTARIWDVRTKASVHTLSGHTNAVATVRCQAAEPQIITGSHDTTIRLWDLVAGKTRVTLTNHKKSVRAVVLHPRHYTFASGSPDNIKQWKFPDGSFIQNLSGHNAIINTLTVNSDGVLVSGADNGTMHLWDWRTGYNFQRVHAAVQPGSLDSESGIFACAFDQSESRLLTAEADKTIKVYREDDTATEETHPVSWKPEIIKRKRF

SEQ ID NO: 13094 - DNA, 1567 bp, Homo sapiens
  CDS (304)..(621)
tgcttgaacccaggaggcagaagttgcagtgagccacctgtgaagagagagcgagcattctgctgggtgtataagtggattgtgtgcaatggtgcttcagtctagatattcatgccttaatcttactgtgttcgtctctccctttttcaggggaagcctgagctttgcttagtgatgatggccctagtgtgaggactggggcttgtggagtagcctcttgtttgctctagccaccccactgcctctgtcctctgcagttactaggaccttccctagcaagtttgcgtcctttccaccacaggcatgacctgcctctctctgctctcttccagcccgtcctctctctgcctagtccttttcagacacttgcttcttggcacctttgacttttctcactgccgggctgcccctactaaggatgattgccctgttttcgtagctctaagaagcagccaaaatccactccacctccctcccaccctccgtcactccaaacagcctggttttgttccagtcaggaaaaggtttctttcttcctcatatttttttgaacaaaatattttgcatacggaagcccggagctcctgcaaaagtgattttgtacctaattatttaagattataagttaaccccacttgcagttttttcagccagagatacatcttaatgaggtgctgacatttttcagaggataaatttaaagatacatttgaatggaactgaataattttcaaaggaagtggtcatacttctgtatcaatatagaaagttgatgtgtgtttgagacatacttggtttattttacttcatcatctgcctctgtctaatttatgaccttcacctgaaatggaataaaagtaacactagattttgggtctgtctttaactggatctggtcttggccgccacttaggagtttgtatgacttttgacaagttcctggcctgttttctcaactgtagaatgggctgaacaatgcactcctcccagatgtgttaaggagattttagaagtagtaggtttaagaatactccgagtgttagactacttccggtcttacttagtacagtaggtaggccttgaattacagtgctgtagtacataattatgtactcctttttcagtagttttttcccagtaatacgccttcagtcagtgttggcactgtatttaatttgacattctgaacagtggtattccagagtatgtgcagtaaactcacctgcctacagaagagtgacccaaatcctgtgattaagaaagaaaagaggggccaggtgtggtggctcatgcctgtaatcccagcactttgggaggccaaagcgggcggatcacgaggtctggagttagagaccatcctggccaacatggtgaaaccccgtctctactaaaaatacagaaaatgagccgggcatggtggcatgtgcctgtagtcccagctactcaggaggctaaggcaggagaatcacttggacccgggaggcggaggttgcagtgagcccagatcgtgccactgcactccaacctggtgacagagcgacagagtgacagagcgagactctgtctc

SEQ ID NO: 13095 - protein, 106 aa, Homo sapiens
MTCLSLLSSSPSSLCLVLFRHLLLGTFDFSHCRAAPTKDDCPVFVALRSSQNPLHLPPTLRHSKQPGFVPVRKRFLSSSYFFEQNILHTEARSSCKSDFVPNYLRL

SEQ ID NO: 13096 - DNA, 3073 bp, Homo sapiens
aagtagcggcggcgcttcaagatgcgctgcctgaccacgcctatgctgctgcgggccctggcccaggctgcacgtgcaggacctcctggtggccggagcctccacagcagtgcagtggcagccacctacagtgagtacctgggtggcctctggcctcaggtgttcctgactggtcctgctggagtaggggaagagacctgagttccagtcctggctttgtcaggggcgttcttctctgggcctgtttccacttttaaaatgattatggtgatggagactgactctgattcacaggggcagggtccatcattgccgaggttagcatgtgtgatctcagagctccctgggtgtgatggggagggggttgccaggtgtgagccatgggtacctgtgcctattgccagtccctggtgaaggcaaaggctcaagccccccacctaccccccttgattcctctttcaagccctgttgggcagggaagtgcgtctgggctccaatggccacccaagcacagggagaggtaggcacggacgggctcaggccagaggcggcctccagggtccttgctgaggctggggagaggtgtggtgagtgtacagcccctttgtagcccagcagttgcacctggaagtgagggccaggctgctctccctgaggctccagggagacagtgtgtgaggcctcttgccatggcctccctgcccgcctctctgcagagtatgtgaacatgcaggatcccgagatggacatgaagtcagtgactgaccgggcagcccgcaccctgctgtggactgagctcttccgaggtgcgtcctgggcaggaggggacagggaaggtgccgggtgggcacggatgcatgggggaggagggtgcccctgcccaccacacccgtgctgcccacaggcctgggcatgaccctgagctacctgttccgggaaccggccaccatcaactacccgttcgagaagggcccgctgagccctcgcttccgtggggagcatgcgctgcgccggtacccatccggggaggagcgttgcattgcctgcaagctctgcgaggccatctgccccgcccaggtgagcccctgccccaaccggccaccacgccagcccctgccactgggagagggaggccaggcagccctaggcccaaaccctagcccctgcttgatgtgcgtccccaggaagtccctttccccctctgagccacttccctcgtgaatgggaatgatgagggcttgttaccagagcacagagtcagtgagttggcagagtgaagcttccagccctgggcagacgcctgacacacagaggttcccccttggggtctggccaagggtgtgacccctgggcctctgagccatggggtgacacctgaggccatccacgcctccctggatgtagccaccgtttccggagtcctgcttgtgtgcctgttgcagcttcccttccccagtggctgctcccctgaggcccggctttccgttctcttagtgggtctcgtgcttacccgtgggggccaggcctgccagcacgggaacaatatgactcggtcagagctctggtcagacccctgtgtgtgcctggcaggagccccggcagccgccgtcgctactttctgtgtgcacagcaacccctcccagtgttctgtgactcgggtggctcctgtccagatcctagtttgtcctctggagcactcccaggtcctccaggccatgagctgcggccctgatgtctctactccagccacggactgagagtgcataggagtgtccccaaacagcagtcacgatggtcacaaccttggcttccagacagtgagtgctgtccacagacagacccgttgctgtgccatgtgtgtgactcacagcctctcctgtaatctccacaacccctcgaggaggtcgaggttattgtctccatctttataagcactaaaggatgagcctgccagccacaggtcccactgtgagttgtggacactacatttctgggatgggggcatatgagagtccttgccaagcacatttgaaggttttcccagccagcccctcccccagcgggctacccaggaactgagagttaggacgtgcccttgagtttgggctgtgcccccacttgctgtgtagctttggggagcccctcaacctctcggaaccttgtttttctcatccatcagatggagagaagtagatttaaggcacaggattgcacccaacagtgtaggcattcttggcgatgttgcaggttcggctccagaccatcggggtaaactgagtcacacagctgttttggttttccagtgcatttaaaagttagatttagaccgggcacagtggctcatgcctgtaattccagcactttgagaagccgaggtgggcggatcacttgaggtcaagagttcgagaccagcctggccaacatagtgaaaccccgtctctactaaaaataacaaaacttagccgggcacgttggcaggtccctgtaatctcagctacttgctaggctgaggcacgataatcacttgaaccgggaggtgggggttgcagtgagccaaaattgaaaaaaaaaaaaaattagggccggttgcggtggctcacgcctgtaatcccagcactttgggaggccaaggtgggcggatcacaaggtcaggaattcaagaccagcctggccaacatgttgaaaccccgtctctagtaaaaatacaaaaattagccgggtgtggggttgcacacctgtagtcccagctactcaagaggctgaggcaggagaattgcttgaacctgggaggcggaggttgcagtgaactatgattgcaccaccatactccatcctgggccacagagcaagacttcgtctcaaaaaaaaaaaaggatttacactgtactgtaggctgcgaagtgtctaaaacacaatgtatataccttaattaaaaatactttaggggccaggcacagtggctcacacctgtagtccaagtgctttgggaggtcaaggtgaggggattacttgagcccaggagtttgagaccagcctgggcaacatggcaaaaccccgactctacaacaacaac

SEQ ID NO: 13097 - DNA, 2206 bp, Homo sapiens
  CDS (76)..(1683)
atattgtctactgaaagctgccgctgaagctgccgccgttgcctccgccgccaagagtgagcgagcggacccgcgatggagaccatggcgagcccagggaaagacaattatcgaatgaagagctataagaacaatgctctaaaccctgaagaaatgagacgaagaagagaggaagagggcattcagctccggaagcagaagcgagagcaacaactttttaaacggagaaatgtggagctgattaatgaagaagctgccatgttcgatagtcttctcatggactcttatgtgagctctaccactggggagagtgtgatcacaagagagatggtggagatgctcttttctgatgattctgacctgcagttagcaaccacacagaaattccggaaactgctctccaaagagcctagtcctccaatagatgaagttatcaacactccaagagtggtggatcggttcgtggagtttctgaagaggaatgagaattgtacattacagtttgaagctgcctgggctctaacgaatattgcctctggaacctctcagcggaccaaaattgtcattgaagcaggggctgtccccatttttatagagctgcttaattcagactttgaggatgttcaggaacaggcagtctgggcactgggaaacatagctggagatagctctgtttgccgagattacgtcttgaactgttccatccttaatcctttgttaacactccttaccaagtccacacgactgacgatggcacggaatgcagtctgggccctgtcaaatctctgccgagggaaaaacccacccccagagtttgcaaaggtctctccttgtttgcctgtactgtctcgcctactcttcagcagcgactcggacttgctggcagatgcttgctgggccctttcttatctgtctgatggccccaatgagaagatccaggcagtcatagactccggagtctgccggagattggtagagctgctgatgcacaatgattacaaagtggcttctcctgccctgagagccgtgggtaacatcgtcactggggatgacatccagacccaggtcattcttaactgttcagccctaccttgccttctccacttgttgagcagtcccaaggagtcaatccggaaggaagcttgctggactatttcaaatattactgctggcaacagggctcaaatacaggctgttatagatgcaaatatcttccctgtgttgatcgaaatccttcagaaagcagagtttcgtacaaggaaagaggcagcctgggccatcaccaatgccacatcaggaggaacccctgagcagatcaggtacctggtctcactgggctgcatcaaacccctatgtgacttgctgactgtaatggattcgaagattgtgcaagtggccctcaatggactggagaacatcctgcggcttggagagcaagagggcaagcgcagtggctcaggggtcaatccttattgtggcctcatagaggaagcctatggcttggataaaattgagtttctccagagccacgagaaccaggagatctaccagaaggccttcgacctcattgagcactactttggtgtagaagacgatgatagcagcctggctccccaagtcgatgaaacgcaacagcagttcatcttccagcagcctgaggcccccatggagggcttccagctataatatctgcctccagggaggggaggggatgggaagcaccaccagccagcggaagagcagccctctggtgggcgggaaaccagtgtccccaccatcagccaccacacacctctgctgccctggagactgtgctcttgacctgctccgcccccttccctggagggagcaccctctggacagacagaaccatctgaggctcacctttgggttttgtgacaagaaggggacgtgttgggtttttcttccttacactatattttggctgcacacatgtctttaacccaggagcccaggggtagacaaaggaggactaaggtaatcaatttgcacctttttttatttttattttttttctttttttcttcagtggtgacttccttccctttatcttttttcattcttcccggtcctctgccctgatctgtgtaactcttatcttgggtacttgagcagacggtatattccagaggtgggaggtgggaggggaagggagaaatccaaaacaaagtgttcttgctctgac

SEQ ID NO: 13098 - protein, 536 aa, Homo sapiens
METMASPGKDNYRMKSYKNNALNPEEMRRRREEEGIQLRKQKREQQLFKRRNVELINEEAAMFDSLLMDSYVSSTTGESVITREMVEMLFSDDSDLQLATTQKFRKLLSKEPSPPIDEVINTPRVVDRFVEFLKRNENCTLQFEAAWALTNIASGTSQRTKIVIEAGAVPIFIELLNSDFEDVQEQAVWALGNIAGDSSVCRDYVLNCSILNPLLTLLTKSTRLTMARNAVWALSNLCRGKNPPPEFAKVSPCLPVLSRLLFSSDSDLLADACWALSYLSDGPNEKIQAVIDSGVCRRLVELLMHNDYKVASPALRAVGNIVTGDDIQTQVILNCSALPCLLHLLSSPKESIRKEACWTISNITAGNRAQIQAVIDANIFPVLIEILQKAEFRTRKEAAWAITNATSGGTPEQIRYLVSLGCIKPLCDLLTVMDSKIVQVALNGLENILRLGEQEGKRSGSGVNPYCGLIEEAYGLDKIEFLQSHENQEIYQKAFDLIEHYFGVEDDDSSLAPQVDETQQQFIFQQPEAPMEGFQL

SEQ ID NO: 13099 - DNA, 1396 bp, Homo sapiens
  CDS (333)..(1178)
ggactctatggttcggcggctctaagcgctcagctccgcggtcgtcctccaggtctgtgccgcctccttccggtctcggtggcgcggcacgcgcggctctctaggcctccttcagctctgtggtgacggtggccgaggtggagggccggtctgaagagtggcgggactggcttcacttcctccgcggttcctcggagccgcctcgctcctcttcagggactttgctgagaagggctctcgggcgtccagaccccaccgcaaaggtgtttggcgatccgccgagaagttgttggccccaggagcgtccctcggggccgaatgcgcagtggacgatgccccttctgacccaacagatccaagacgaggatgatcagtacagccttgtggccagccttgacaacgttaggaatctctccactatcttgaaagctattcatttccgagaacatgccacgtgtttcgcaactaaaaatggtatcaaagtaacagtggaaaatgcaaagtgtgtgcaagcaaatgcttttattcaggctggaatatttcaggagtttaaagttcaggaagagtctgttacttttcgaattaatttaactgtccttttagactgtttatctatttttggatcaagtcctatgccagggactttaactgcacttcgaatgtgttaccaaggttatggttaccctttgatgctgttcctggaagaaggaggagtggtgacagtctgcaaaatcaatacacaggaacctgaggagaccctggactttgatttctgcagcaccaatgttattaataaaattattctgcagtcagaggggctccgtgaagcattttctgaattggatatgacgagtgaagtcctacaaattaccatgtctcctgacaagccttatttcaggttatctacttttggaaatgcaggaagttcccaccttgactatcccaaagattctgatttgatggaagcatttcattgtaatcagacccaagtcaacagatacaagatttccttactgaaaccctctacaaaggcattagtcctatcttgtaaggtatctattcggacagataacagaggcttcctttcattacagtatatgattagaaatgaagatggacaaatatgttttgtggaatattactgctgccctgatgaagaagttcctgaatctgagtcttgagtatgacaattcactgatatttatgtgtacatttatgatagatgaagttcttattctgagtacagtactctttgtcatttcatattgggttttctatagagaagaagcacaatggggaagataggagcaaggtcatgtaccctaatagttactatgttttgtaaatccattttgtagagggcatgtaaataaatgttttcctgtagtcatagatt

SEQ ID NO: 13100 - protein, 282 aa, Homo sapiens
MPLLTQQIQDEDDQYSLVASLDNVRNLSTILKAIHFREHATCFATKNGIKVTVENAKCVQANAFIQAGIFQEFKVQEESVTFRINLTVLLDCLSIFGSSPMPGTLTALRMCYQGYGYPLMLFLEEGGVVTVCKINTQEPEETLDFDFCSTNVINKIILQSEGLREAFSELDMTSEVLQITMSPDKPYFRLSTFGNAGSSHLDYPKDSDLMEAFHCNQTQVNRYKISLLKPSTKALVLSCKVSIRTDNRGFLSLQYMIRNEDGQICFVEYYCCPDEEVPESES

SEQ ID NO: 13101 - DNA, 1799 bp, Homo sapiens
  CDS (47)..(1258)
acaaagaaagaaacaagcaagactggtattgcaaccccagtcgaatatgcatgaaacagttgatggctatagaagatatttcactcaaattgtagggttctttgtggtagaagatcacattttacatgtgacccaaggattagtaaccagggcatacactgatgaactttggaacatggccctctcaaagataattgctgtccttagagctcattcatcctattgcactgatcctgatcttgttctggagctgaagaatcttattgtaatatttgcagatactttacagggttatggttttccagtgaaccgactttttgaccttttatttgaaataagagaccaatacaatgaaacactgcttaagaaatgggctggagttttcagggacatttttgaagaagataattacagccccatccctgttgtcaatgaagaagaatataaaattgtcatcagcaaatttccctttcaagatccagaccttgaaaagcagtctttcccaaagaaattccccatgtctcagtcagtgcctcatatttacattcaagttaaagaatttatttatgccagccttaaattttcagagtcactacaccggagctcaacagaaatagacgatatgcttagaaaatcaacaaatctgctgctgaccagaactttgagtagctgtttactgaaccttattagaaaacctcatataggtttgacagagctggtacaaatcatcataaacacaacacacctggagcaagcttgtaaatatcttgaggactttataactaacatcacaaatatttcccaagaaactgttcatactacaagactttatggactttctactttcaaggatgctcgacatgcagcagaaggagaaatatataccaaactgaatcaaaaaattgatgaatttgttcagcttgctgattatgactggacaatgtctgagccagatggaagagctagtggttatttaatggaccttataaattttttgagaagcatctttcaagtgtttactcatttgcctgggaaagttgctcagacagcttgcatgtcagcctgccagcatctgtcaacatccttaatgcagatgctactggacagtgagttaaaacaaataagcatgggagctgttcagcagtttaacttagatgtcatacagtgtgaatatgaggtgttgctgtgttgcccagactggtctcaaactcctggcctcaagtcatcctcctgccttggcatcccaaaatgctggaattagaggcgtgagctactgtgcctggccatttttataagcttttaagctgaaatgtttgccagctctgagcctgtgccaggattccagggggataccctgcagctagcattcattgacctcagacaactccttgacctgtttatggtttgggattggtctacttacctagctgattatgggcagccagcttctaagtaccttcgggtgaatccaaacacagcccttactcttttggagaagatgaaggatactagcaaaaagaacaatatatttgctcagttcaggaagaatgatcgagacaaacagaagttgatagagacagtcgtgaaacagctgagaagtttggtgaatggtatgtcccagcacatgtagacctcacatggcttgcactcagtgacaccaaatccatgattcaatgttgatcttgagcaagtattggtcatgatacagtaatttgtttacagaatccaaaaatacaatagagaagatacatgagggcttaaacaagaaatagtaataaatatcatttgtatggattttt

SEQ ID NO: 13102 - protein, 404 aa, Homo sapiens [sequence omitted]

SEQ ID NO: 13103 - DNA, 1446 bp, Homo sapiens
  CDS (42)..(1445)
atcagcgctggcgcggctgcggccgctgctgcctacgcgccatggagcatcgcatcgtggggcccgggccgtaccgagctaccaggctgtggaatgagaccgtggagctttttcgtgctaagatgccgttacggaaacatcgctgtcgtttcaagagctatgagcattgtttcacagcggccgaagctgtggattggctgcatgagctgctgaggtgcagtcaaaacttcggccctgaagtgacccgcaaacaaacggtccagctgctaaaaaaattcctgaagaatcacgttattgaagacatcaagggaaaatggggtgaggaagattttgaagacaatcgtcacttatacagatttcctccttcttcacccctgaaaccatatccaaagaagcccccaaaccaaaaggatgttattaaatttccagaatggaatgatctcccaccaggcacttcacaagagaacatcccagtgaggccagttgtgatgaattctgagatgtggtacaagcgtcacagtattgcaattggagaggtgccagcttgccgtcttgtccaccgcagacagctgacagaggccaatgtagaagagatatggaagtctatgacattatcatacttacagaaaattcttggcctggattccttagaagaagttttagacgtcaaacttgtcaattcgaagttcatcatccataatgtatatagtgttagcaagcagggagttgttattcttgatgacaagtcaaaagaacttcctcattgggtgctgtcagctatgaagtgtttggcaaattggcccaactgttctgatttgaagcagcctatgtacttgggatttgaaaaagatgtctgtaaaaccatagctgattactatggtcacttgaaagagcctctacttacatttcatctttttgatgcttttgtcagtgtactgggtttgttacagaaggagaaagtggcagttgaagcatttcagatttgctgccttctcctacctcctgaaaataggagaaagttacagctattgatgaggatgatggcaaggatttgcttaaacaaagagatgccacccctgtgtgatggctttggtacccgaacactgatggttcagacattttcccgttgcatcttgtgttccaaggatgaagtggacttggatgagttattagctgctagattggtaacgtttctgatggataattaccaggaaattctgaaagtccctttggccttgcagacccctatagaggagcgtgtggctcatctacgaagagtccagataaaatacccaggagctgatatggatatcactttatctgctccatcattttgccgtcaaattagtccagaggaatttgaatatcaaagatcatatggctctcaggaacctctggcagccttgttggaggaagtcataacagatgccaaactctccaacaaag

SEQ ID NO: 13104 - protein, 468 aa, Homo sapiens
MEHRIVGPGPYRATRLWNETVELFRAKMPLRKHRCRFKSYEHCFTAAEAVDWLHELLRCSQNFGPEVTRKQTVQLLKKFLKNHVIEDIKGKWGEEDFEDNRHLYRFPPSSPLKPYPKKPPNQKDVIKFPEWNDLPPGTSQENIPVRPVVMNSEMWYKRHSIAIGEVPACRLVHRRQLTEANVEEIWKSMTLSYLQKILGLDSLEEVLDVKLVNSKFIIHNVYSVSKQGVVILDDKSKELPHWVLSAMKCLANWPNCSDLKQPMYLGFEKDVCKTIADYYGHLKEPLLTFHLFDAFVSVLGLLQKEKVAVEAFQICCLLLPPENRRKLQLLMRMMARICLNKEMPPLCDGFGTRTLMVQTFSRCILCSKDEVDLDELLAARLVTFLMDNYQEILKVPLALQTPIEERVAHLRRVQIKYPGADMDITLSAPSFCRQISPEEFEYQRSYGSQEPLAALLEEVITDAKLSNK

SEQ ID NO: 13105 - DNA, 1844 bp, Homo sapiens
  CDS (190)..(1065)
ttggccctaattggctatgtggatccagtgaaagggagaggaatccgaattctctcaattgatggtggaggaacaaggggcgtggttgctctccagaccctacgaaaattagttgaacttactcagaagccagttcatcagctctttgattatatttgtggtgtaagcacaggtgccatattagctttcatgttggggttgtttcatatgcccttggatgaatgtgaggaactttatcgaaaattaggatcagatgtattttcacaaaatgtcattgttggaacagtaaaaatgagttggagccatgcattttatgacagtcaaacatgggaaaacattcttaaggataggatgggatctgcactgatgattgaaacagcaagaaaccccacatgtcctaaggtagctgctgtaagtaccatagtaaatagagggataacacccaaagcttttgtgttcagaaactatggtcattttcctggaatcaactctcattatttgggaggctgtcagtataaaatgtggcaggccattagagcctcatctgctgctccaggctactttgcagaatatgcattgggaagtgatcttcatcaagatggaggtttgcttctgaataacccttcggcattagctatgcatgagtgtaaatgtctttggccagatgtgccgttagagtgcatagtatccctgggcactggacgttatgagagtgatgtgagaaacacggtaacatacacaagcttgaaaactaaactttctaatgttatcaacagtgctacagatacagaagaagtccatataatgcttgatggcctgttacctcctgacacctattttagattcaatcctgtaatgtgtgaaaacatacctctagatgaaagtcgaaatgaaaagctggatcagctgcagttggaagggttgaaatacatagaaagaaatgaacaaaaaatgaaaaaagttgcaaaaatattaagtcaagaaaaaacaactctgcagaaaattaatgattggataaaattaaaaactgatatgtatgaaggacttccattcttttcaaaattgtgatgagtatatgcttatgttctcataaatgaaggtctgtttagaagatcaaccacattcaataaggaattgtggggttcgacatgagttaactttgaaatacgtatgaattctggagaatcctgaaaaagacggtgcttcaaccagcttgcatagcacagagaatattcttggttacagaattcatatgggaactaggcttttaagatgttaataattagctaagctttagtaacccttactgtgctagtagattttagtagatattggtgttatattgtttgatgtttgaaaatatattaatatatgtgccgaacaagaaaccgaaagctatattgtactgtgtatttttactttagtcctcataatcatgttgaatttatgtgatcattgattttatttcatatggaaaagctaatttcttcttaaatttacattacctaatattctcactagctatgttctccaatccacactgccttttattgtaatatcatctaaatagatgcagaaaaatggaattttctctattaaagtattttacatttgacataaaaaagaaccagatacagttttctattcagatatgtttattttaacattgtttggttaaaaaaggtgaagttccagtcaaccactttttacccctgaaatttcaagataatgctatattaacttttccagatctaacactagcttattcttccctgttataaaatggtttgaacttactgaggagatattcctatcattaacaaaaataaactatttaaataatc

SEQ ID NO: 13106 - protein, 292 aa, Homo sapiens [sequence omitted]

SEQ ID NO: 13107 - DNA, 1862 bp, Homo sapiens
tcaaaaagataatccaccatgatcaagtgggttttacaccagggatgcagggatggtttaacatccacaagttaataaatgtgatacaccacacaaacagaattaaaaacaaaaatcacatgatcatctcaatagattcagaaaaagcatttgacaaaatctaacatcctttatgattaaaaccctcagcaaaattagcacagaaggaacatatcttaaggtaataaaagctaactacgacaaacccacagccaacattatgctgaatggggaaaagttgaaagcattttccctgagaattggaacaagacaagacactttcaccacttttattcagcatagtactggaagtcctggccagagcactcaaagagaaagaaataaagggcatccaaattggtaaagaggaagtcaaactgttgctgtttgctgatgatatgatcatatacctagaaaaccctaaggattcatcttgaaagctcctagaactggtaaacaaattcagcaaagtttcaggatacaaaattaatgtacgcaaatcagtagctctgctatacaccaacatcaaccaatagctgcagaaataaaataaaatacttaggaatatacctaacgaaggacatgaaagacctctacaaggaaaactacaaatcactactgaaagaaatcacagatgacacaaacaaatggaaacacatcccatgttcatgaataggtacaatcaatattgtgaaaatgaccatactttgtagattgcaaaagcaatctacaaagtcaatgcaatccccatcaaaatactaccatcattcttcacaaaagtagaaaaagaaatcctaaaattcatatggaaccaaaaaagagcccacatagccaaagcaagaaagactaagcaaaaagaacaaacctggaggcatcacattgcctaacttcaaaccatactataacaccatagtcaccaaaacagcataatactagtataaaaataggcacatagaccaatggaacaaaacggagaacctaggaataaagccaaatacttatagccaactgatctttgacaaagcaaacaaaaacataaagtggggaaagtacatcctattcaacaaacggtgctgggataattggctagccacatggagaagaataaactggatcctcatatcttaccttataaaaaatcaactcaagatggatcaaagacttaaatctaagacctgaaaccataacgattctagaagataacatcgaaaaagcccttctagacattagcttaggcaaagacttcgtgaccaagaacccaaaagcaaatgcaacaaagacaaaggtaaatagataaatagggacttaattaaactaaaaagcttctgcacaaaaaagaaataatcagcagagttaacagacaacccacagagtgggagaaaatcttcacaatctatacatctgacaaaggactaatatccagaatctacaaggtatgcaaataaatcagcaagaaaaaaacaaacgatcccatcaaaaaatgggctaaggacatgaatagacaattctcacaaggagatacacaaatgaccaacgagcatatggaaaaatgctcaacatcactaattctcagggaaatgcaaatcaaaaccacactgcgataccaccttactcctgcaagaatggccataacaaaaaaataatagatgttggcatggatgtggtgaaaagaaacactcttacactgttggtgggaatgtaaactagtacaaccactatggaaaacagtgtggagattcctttaaaaactaaaagtagatctaccatttgatccagcaatcccactactaggtatttacccaaaggaaaagaagtcattatac

SEQ ID NO: 13108 - DNA, 2387 bp, Homo sapiens
tgctgtaatgcaggctttgatctgtttcaccatggcttctattcaagtccagttaaaacctcccagctgacctcagactaggcatatttcaggctttaaattattctactttccaaactgaattctcctgcagtgccaagtatcaaaggtgtccttaaatacttgtagggatgaggttaggaatattcagttccaaaacaagatatcttctgtccgccttacatatagcagtgacacttgttgcctaactttatggtgacctcctattttgtaagggctgttagaagttctatctaagaaatggcattctgtaggtttatagaaggtttagccttcatattttaattgcttgtatacacaacagctgttttgcttttagatttctgtgtttctgaaggtaatgttcttcctgttttcaagtttacataaggatctttggtctgatgctgatgaagagttcacaggtggtatgggagagcaaaaggcaagctaatgctgtttaccgtgttttggtcaaacgtaacgagtgaaatagaatttgcctttctcatatttaattatcatgtagtttaatgtaccatatgtgaaacattctggccatagcagcaactaaaaactgcaagcaacttggtaacagaactttctaaataaacttaacctgttccagaatgtcatgtatttgacttttaagccctatctcagttggtcagtaaagaccaatccttactgtaggaaatcattgttgtatcatcacaaacatctatcttttgctgtcctgtccagtcccatcaactccacactgtgccatttgtggcatcgttttgtttatttggagtttgctaagggcagtatttttctgtcaagactattcaagaaggcattatttgagattcctgttcattcttggtgtgtctctaacagatacagtatgtatacatttgtataattgttgttgttgaaagtccagcttttttgaggtatattttaaatgttttaaggatgcttctaaggatcagtagtaatttttttagttcgcacctaaagatgattacattgacctcccccgactgcttaccaaattaaaatgtgtccacgaagtagctttgtgatcgcagatacattcatagtgaactcatcagaatggctggtttgcagtactgaaatactatcttctaggctgtatgtagtgctacaattagagaaacagaagtccaaggctggcgacagcttgaaaagtctgacagcttttctacttttcctgaaaattttaagactgtgatatctgtcattttactgtatagctgactgtgtactcaggtattttattggtccttgaaagattggtcgttatggatcacccagcctttccaagtcagtggctgttgttctgtcttgctgtctgatacgagagtggggcttttcagtgaactaaccagggattgttcttgacatacctgacttttctcacatttgaacttccactatcattgtatccatataacttctagcattttcatgccatggtaatccatgagctacacatacgtagcccggcaccgtgatgcaagttcatggtatcgtgcatgttcgtggtatcatggtatcattcatgcgtgtttgaatagttctacatctagtgcttcttgccaaaaagaatacattgtttaaattcacaaaattagcataattgcagtgctaatgaatatcggaatatgtgcacagtaacatttggactattcattggagagtttacccatacatttagcaaattgaatggccaaaacatttgactccagtgagggctcaagttagatccctatagaaagaggacacttcgtcttacttaagtcatagttaagatctgtgatacgaaccatagatattgcctgacaaagcagaaatcaccaagtttcccccttttgaattaccaccaagaagtgttgaaacaccaaatagatatcatgttattttgggcatttgcagttttcttccctgctgcatgtaatgtctcagaatcaacattcttttaaaatctagactatattttgaggcaatgaattacttatattcaacttaggcttgttttgacattcagtagaactttaagttcaatctaaaggcttcagtccacatttttttatacgttgtattttaaaaacgtttgaaaggagtcttacacctgtatcatgaaaactgaatccttttgaaataccactatatgaagagagagatgaaatttagtgaacagaattgaaaaggtgctcataatttcactatgcaaacttaccccagtctctaaaaaagtaatttagatttaaagttctttgatgtatttgattttctaaatctttatggttatgatttggaataaaatgtgcctaatcctg

SEQ ID NO: 13109 - DNA, 2477 bp, Homo sapiens
aaaacatgctgctcaatgggcttcagttccttcaaatcttttcttaaatgtttcaaaaatcttatatatatatgtatttttttcatgctttatattgaaagttttaagctttgattattgccatattcagctagccaaaaacaactacatagaaccttcaaagcgtattaattctggctaggttagcctaggttgagtaggaggttgaatagatgacttctgaagttccttcaactctaaattttatgattctgggaatttataacatccaagaatcacagaatgttagaatgggaaggaactttaagatcatctagtctaagccactcattttacagatgagaaaggctacccagagtgtagagacagaagcagagctctagggaggcagagagaggggaagtggcagaagggccagagctggggagggtctgggcataacctcacaggactggtcaatccatggcctgcagaggaaaaagggagaagagagaccacacaggagcttcagcatcactccaggaaactgatcacaggttggatgggatgcgaatggggccagtggcaccagctggtgtctgaacaggaatcagtaatggtcactctgtctgaggtcacctggcagtcagggccggccagacttttgtgctttctacagctagcatagctgcttctcatggtttggcagaacagcagcatccagagctgattctgccttgctctcatgtgtctaacctgttgtagatgagctgggtagcccagagctgcgccctgctcaccctccatggcccctggcctattcatggccttgttgtgtttctgaagtctttctttgccacattcctaaagatttttgttgttatggctgtggggccaaaaccctcttcactttttcagcatgcctggaattttcccagatcggctggatggactctacttcattcttggtaaagtttctctatcctgccatcactacctgttgtaattagtttggtcaacaacaacaacaacccagtgaggctctgattaaacaccacctctctctgttgaagccaaccctttcgttcaccacgctgatgggaaccaccttcctaatgccaagcactccacaccggtctctgtttttttccctgcgctatctgaatacacttggcaggtgggcagccttcaggaatcatcatacaattaggcttcaggagctctgttttagtcaattatgtggataaccttggaaaaacaaaatgcacagtaggtggcatcaacaagcccgttgtgcctttgggcacagcttttccctcgtgctgtttggatcatatactcattaagtccaccagctgaaaatgtcacaactggctgtgtgccatgcattaggaaaatcaaatacaggagaaattgggatatattgagcaaataagagagaatgatttttccacaatttacaaaagatttaccagtaaaaatgccaccttagttcatttacatatttcaaagatgattacaggtcactaactctttgatagaaagtataatttaaactaaagctatcaggaaccatggcatactaaagattaattagatattaggagaaatggtttgtgcaatttcctaagtcttttgaaaaggatgagtttgttttattacatttgattttcacccaacttcttaggattgtatgattgagtaaaagcaaggtacaattgtagctagctttgtttgtttgtttttgtttatttctcactgttttaagcgtccttcaccgtggttggttcaaaacttttcttcccataagtgtgtgtgaccataactggtgaattctcgaagtgttgggatacacagaaggaaaggaccgtggacaatttaaaatcgtgctatctgtaaggaaacctaagttgtatgtgtaccattattatttgacaagtgtcatagtcaaggaggtctccagtgaggaagtgtgttttaagaatggggagagacatgcctttgtagacagcatgcagtgcctttttggtagagcaattggcccgctaggactagaagattggttggaactgagagaatcatcttaaacaacatgctgagccaaaacattttttgatgttaataatattcatgtgtaaatagattgtttcaaatctctccgaaaacatagcggtagctttgtacttggacttcctttacttgtttaattttcaatggtgaaagatgggcatgatgaacaccttaaaagtcatgtggattatttttctgagttaaaaatgtatacattcaatcggaaagatataaagtctaaaaggaaagtgagggtcaaataagcagatgaggaattattatccctggaaatacagggaattttcttgttgatacaagtttacttcctaaaataaaagtttctggttttagtacctttcatcaaactttcttaatgtattaggaagcttttagcacagtttacccacgttctctaagaatctgcaggc

SEQ ID NO: 13110 - DNA, 2971 bp, Homo sapiens
  CDS (1086)..(1841)
acttccggtcccgccgccgggagccggtgcggctgtgaggggccgcgtctcgcagcagccgcccggaccgggcatggtgttgggcgccgggcccgcctcgcctgtctcggggagcccagggtaaaggcagcagtaatgctaacgctagcaagtaaactgaagcgtgacgatggtctcaaagggtcccggacggcagccacagcgtccgactcgactcggagggtttctgtgagagacaaattgcttgttaaagaggttgcagaacttgaagctaatttaccttgtacatgtaaagtacattttcctgatccaaacaagcttcattgttttcagctaacagtaaccccagtttattgagagaacattcaattgatggcactggctgggctcccacaagaacattaaaggatgtcgtttggggattaaactctttgtttactgatcttttgaattttgatgatccactgaatattgaagctgcagaacatcatttgcgggacaaggtgagaattctatttggtgcacgtgctattgtgtccggaattggtgggttcttggtctcactgacttcaagaatgaagccgcggaccctcgcggaaagtttatatggactataatgcaacgactcccctggagccagaagttatccaggccatgaccaaggccatgtgggaagcctggggaaatcccagcagcccgtattcagcaggaagaaaggccaaggatattataaatgcagctcgggaaagcctcgcgaagatgataggggggaaacctcaagatataatcttcacttccgggggcactgagtcaaataatttagtaatccattctgtggtgaaacatttccacgcaaaccggacctcaaagggacacacaggtgggcaccacagcccagtgaagggggccaagccccatttcattacttcctcggtggaacacgactccatccggctgcccctggagcacctggtggaagaacaagtggcagcggtcaccttgtcccggtgtccaaggtgagcgggcaggcagaggtggacgacatcctcgcggcagtccgcccgaccacacgcctcgtgaccatcatgctggccaacaatgagactggcattgtcatgcctgtccctgaaatcagtcagcgcattaaagccctgaaccaggaacgggtggcagctgggctacctcccatcctcgtgcacacggatgctgcacaggccttggggaagcagcgcgtggatgtggaggacctgggcgtggacttccttacaatcgtggggcacaagttttatggtcccaggattggcgcactttatatacgaggacttggtgaatttacccctctctaccctatgctatttggaggtggacaagaacggaatttcaggccagggacagagaacaccccaatgattgctggccttgggaaggccgcggagctggtgacccagaactgcgaggcttatgaggcccacatgagggacgtccgcgactacctggaagagaggctggaagctgaattcggtcagaagagaatccatctgaatagccagtttccaggcacccagcggcttcccaatacctgtaacttttccatccggggaccccggcttcaaggccacgtggtgcttgcgcagtgccgagtgctgatggccagtgtgggggccgcgtgccactcggaccacggggaccagccgtccccagtgctgctgagctacggtgtccccttcgacgtggccaggaacgcgctccggctcagcgtgggccgcagcaccaccagggccgaggtggacctcgtcgtgcaggacctgaagcaggccgtggcgcagctggaggaccaggcctagcactggggccgccttccccaccccgcttctgggaagcccgtggcagggcacagggttgtccctccagttccctcctgagggctgtgccaggatgactgtctcatgccccctctgcattttgtcctggagtgccagcgagtgtgcacccccagtttccttccctggacccctgcagagctcacagggcccaggacaccaacgccgcataggactgcccacatgggaccgcccacataggaccgcccacataggaccgcccacatgggaccgcccacatgggaccgcccacatgggaccgcccacatgggaccgcccacatgggagcgcccacatgggaccgcccacatgggaccgcccacatgggaccgcccacatagaaccgtcctccagtggtgaagcggaaacacttagctttatccaccctccccactgggaactgggcacgcctgttgtgagtgccctttcctggaaggtgtttttatctggaagatagaatccaagtatttataactcattgtcagccaaatgctatcatgaacgtaggaaacttgatttttttgttttgatcatggcctctacatgcacctttccagagtggtctcttctcaggccctttttagtccctttccaaagctgcccccaccaccctgctcctctggcctcagtgcacagtggcccccagcctcggccaggcctgctctgctcagcgcccaccgcccaccacccctcctgcttccccgagcctgaccctgttccgcccactggcaatcagggctgcgcacttccctgtccacggtccccaggccttcctgtcttgtcccttttgatcattattaactcagggtttcagctccaacctcgctgagttggtgcagctccaggtcattcctggggtgggaatcggatcatccctgactcagcttttaccttaattttatttgcagaggattcttttctcaaaatgctctggcatttggacacacatcacatgtcgatatttgcataggagtcattttcagtggaataacatttttaatgtgtggttttacggttcaaggaactacttgatgattttgaggaaacacttgccagaaactaaattaacgaataaaagatttcagtgcccg

SEQ ID NO: 13111 - protein, 252 aa, Homo sapiens; identical to SEQ ID NO: 11527

SEQ ID NO: 13112 - DNA, 1917 bp, Homo sapiens
  CDS (238)..(591)
ttctcattactaggtcaataacctgagggaatcaatggctttttgccgctctacctcttgtgtatctctttgacttttctttctctgtctagtttcctctgttctcagtttatattctatgttatcagtctctctttccacagtacaaacatccatcctttctcctgtgcaattctgtctctccctcttattatctttatttgtactttttccttcctccctgtctaggcattgggcatgtgcctcttcttagcctgtgattttgccttggggctgatgataaattatttccagattcaatcagccctggtcctaccccagtccaatcagaagtatgttggtgggaatcaacctgatcctggccctttcttcttctccattttcattcgtaatccccctcagcagatctttacaagcagttttcttatagctcatgtatctttaggtctttgccttccaagctctgtacagaatactttgtggttcctttttagtctgacattttgtggagcagtgaagcgtgctcagagacataatcagctgaagagaaaaaatccacccatggatttatatcagctaaatactaataattgattttgtttgatgtgcccataatttttaaagctgcaatataatataatgagggaccacaggtaatttctcctgtcatttgttttggctggatgggggtgggggagtaattgcttaaagttttaccattacacattaaactctctataataatcttgtttggggcttgctaactgttgagctgttttaactaaactggtaggcaatcggagttgatttaaatgaaaagataatttaacaaatctatactataaaaagagacatttgcttaattgacatgtattttttccttctgagtcacctaaacatttactcttgacaccaactgttcatgatactgaatagacagtccatataagagaaattagtggacctaaagaagccagattgtaggtgttaatttattaaacggagtgcaaagcccttggaaatgtcactgcttggcaataccatatggaatgccaaaatttacaatgacttttctttataagttatccaaaagggatttgaacaagtaagaggttatgccaaaatgtctccaatgtatggtcctgtaatatattgcagcttgaagccaatgatcccttatgacttgtatacaactaatgcatgttttattgaattttgcatttcccacgtgtggtaagttctttaaaatgtttttgatcacctttttgtgccattaaacttgtacagaaaatgtttttatggccattttcaaagggagaaagtttaaaatggaaacagcccaccctttctgccctatagctgtagttagaattgagtacctgtagcaaaacagctgtaattggtggttgtagtgttagaggtgttagcttgctagtgactagctttggagagtaaatgcatggtattgtacatcacatttcttaactcgttttaacctctgaaaagaatatattcttctttgtagtccttcttcccacccccttgccctctccctctccctgctcccagttgtcttacagttgtaaatatctgatttgaggcccaataactcttgccaagtaaagtcagcaaacaacaaacaaaccaaaatgtggggaaaaggcatttctcaaccatctctcagcagttattgatcatttcttaaggaacagcattgtgatcaaagactcaactttacgtaaaaatcagtggtaaattggggttgtatttggccatttgattacatttcaggattgaatagttttcagaatcacatgtaatccaaagacagtaggtagtgatgtcccttatccctgcagctgttttaagatagagacctcagaagactctgcttgaccgatgaccaataattatttg

SEQ ID NO: 13113 - protein, 118 aa, Homo sapiens [sequence omitted]

SEQ ID NO: 13114 - DNA, 2835 bp, Homo sapiens
  CDS (88)..(483)
gtacagaagcaaaatcaaacctgctatttcagcactcctgtttttaacttggtgtctttagtgcttggattggtgggatgtttcggaatgggcattgtcgccaattttcaggagttagctgtgccagtggttcatgacgggggcgctcttttggcctttgtctgtggtgtcgtgtacacgctcctacagtccatcatctcttacaaatcatgtccccagtggaacagtctctcgacatgccacatacggatggtcatctctgccgtttcttgcgcagctgtcatccccatgattgtctgtgcttcactaatttccataaccaagctggagtggaatccaagagaaaaggattatgtatatcacgtagtgagtgcgatctgtgaatggacagtggcctttggttttattttctacttcctaactttcatccaagatttccagagtgtcaccctaaggatatccacagaaatcaatggtgatatttgaagaaagaagaattcagtctcactcagtgaatgtcgcaggccatttctaaaagtgctacagaggacagacagggttttgaggccaccctgattattgggatgcatctgcagcacatccaggacttgaatttcattacgagttcctaatagttgtatttctaaagatgtgtttcctagagaatgtacagccttatgacactgtagtgatgtttttataattttctaagtagatttttttatattaacaaattcatatacagaaaaaataaggtgttacaaaaaatggagagctcttatttttgtacagattctgtcgtttttttttatttgtgtgagatttatggaaatacactaaatgagtaattcaggttcagtacatttattacaaagtgaaatcaggggatattcatttgtaaattttattcttagtgaatgaactgtataattttttttatcaggagagcacttataaaattcaatttataaagatcatatacccaaatcataaagatttagttgatacattaacactaagatactctgatttttagcgaactaaacaaagtgcttctactgagaggcctttataccaccatgtacagtaactctaagtgaatacggaagaccttggttttgaaattctgccaccttgtttctccctgctcatgaggtcgcaccttttgctcttgctgctaattgcccattcgtagtgggtgtaatgccaggtggaatggtttcaacaagtcaggtgaaaaccatcctttattgttgctggcacaacttgatatatagtctgactcagaactgaagctcacatctcaaattcatttcatgccagtaaatgtggcaaagagaagaaaggcccaagagcgagacaagaagaatggagaagggggcagccaagaagaacttctgggttcagggtactgtttatttgctccttctcttcatgcctgtggctggatgtcccacaacactataagaaatataagtcaagccctttgtgttaagcaagaactacagactccatcttttcacccaaatcatgaatgaccaataaaaagcaagttattccagaggaagaagcagcccttgaaatgttaaggcttaggcttgaaaggtgaagagcaggaattctctctttcaaatcctagagcataaacccatgtgtggccaagtgagatcagccctcaagggcacatgccaagggcagagcagcccatgtagacagcttcggagggcatgggggtgtagggagttcggggtagctcctcattaactatttgttgggtgagtaaaggggtgaggctcagtggcaggtacctctgcaatgacaagctgcctcccctctatgtgtttagcatatgttattagaacatgtccgacacccctaccgctgccatttgggccctttaataaagccaagtagagaaatctggcaataaaaggcaaatgtaagcatgctttctttaagacgcatcataaatggttttctttaagtgaatggaagagtttgacagagatacacctttgtaagaaaacattaagaatgctggctggctgtggtggctcacacctgtattcccagcactttgggaggcctaggcaggaggattgcttgagcctgggacttcgagaccagactgggaaacatggcaaaatcccatctctacaacaaaaatacaaaaattagccaagtgcggtggtgtgcctgtagtcctagttacttgggaggctgaggtgggagaatcacctgagcccaggaggtggaggctgcagtgagccatgccaatgcactccagtctgggcaacagagtgagaccctgtctcaaaaataaataaataaataaatgaataaagagaatgctaatcatttctgggttcactgcgactcactgtagtgctggggatcccccttgtaacactggaactgaaaggcagtgatgaaagctatgtcaagcattcattattctgaagaggaggagaaatgccacatacctttcccatgggacctgtggtggaatgaatccatacttctgcctcacttcgagcagacttttgttctcggcgctcctcacgatggagtttcatgcttcattttcacatctctctgcacaattagattgggagctccttgagggcagagtacgtgccttaatctttatctttgtaatgccacaatgaacagagtgcctcctggtacactgtaggagcttaagaaatactcactgaatgcatgaatgaatgaatgaacaaatgaaggaatgactaaggatgtttgtagtgctataatatagaatgggatttactctgctttaccagttagtttcataataaacaaatagtctgt

SEQ ID NO: 13115 - protein, 132 aa, Homo sapiens
MGIVANFQELAVPVVHDGGALLAFVCGVVYTLLQSIISYKSCPQWNSLSTCHIRMVISAVSCAAVIPMIVCASLISITKLEWNPREKDYVYHVVSAICEWTVAFGFIFYFLTFIQDFQSVTLRISTEINGDI

SEQ ID NO: 13116 - DNA, 2465 bp, Homo sapiens
  CDS (132)..(1982)
tgaaagatgccatcatagctaaattggctaatcaggctgcagattattttggtgatgctttcaaacagtgtcaatacaaagatactctccccaaggaggtgttccctgtcttggctgcaaagcactgtatcatgcaggccaatgctgagtaccatcagtctatcctggcaaaacagcagaagaaatttggagaagaaattgcaaggttacagcatgcagcagaactgattaaaacagtggcatctcgctatgatgaatatgttaatgtgaaggatttttctgacaaaatcaatcgtgcccttgctgcagcaaagaaggataatgacttcatttatcatgatcgagttccagaccttaaagatctagatcctattggcaaagccacacttgtgaaatctaccccggtcaatgtacccatcagtcagaaatttactgatctgtttgagaagatggttcccgtgtcagtacagcagtctttggctgcctataatcagaggaaagccgatttgattaacagatcaattgctcagatgagagaagccaccactttggcaaatggggtgctagcttcccttaatcttccagcagcaattgaagatgtgtctggagacactgtacctcagtctatattgactaaatccagatctgtgattgaacagggaggcatccagactgttgatcagttgattaaagaactgcctgaattactgcaacgaaatagagaaatcctagatgagtcattaaggttgttggatgaagaagaagcaaccgataatgatttaagagcaaaatttaaggaacgttggcaaaggacaccatccaatgaactgtataagcctttaagagcagagggaaccaacttcagaacagttttagataaagctgtgcaggcagatggacaagtgaaagaatgttaccagtctcatcgtgacaccatcgtgcttttgtgtaagccagagcctgagctgaatgctgccatcccttctgctaatccagcaaagaccatgcagggcagtgaggttgtaaatgtcttaaaatccttattgtcaaatcttgatgaagtaaagaaggaaagagagggtctggagaatgacttgaaatctgtgaattttgacacgacaagcaagtttttgacagccctggctcaggatggtgtgataaatgaagaagctctttctgttactgaactagatcgagtctatggaggtcttacaactaaagtccaagaatctctaaagaaacaggagggacttcttaaaaatattcaggtctcacatcaggaattttcaaaaatgaaacaatctaataatgaagctaacttaagagaagaagttttgaagaatttagctactgcatatgacaactttgttgaacttgtagctaatttgaaggaaggcacaaagttttacaatgagttgactgaaatcctggtcaggttccagaacaaatgcagtgatatagtttttgcacggaagacagaaagagatgaactcttaaaggacttgcaacaaagcattgccagagaacctagtgctccttcaattcctacacctgcgtatcagtcctcaccagcaggaggacatgcaccaactcctccaactccagcgccaagaaccatgccgcctactaagccccagcccccagccaggcctccaccacctgtgcttccagcaaatcgagctccttctgctactgctccatctccagtgggggctgggactgctgcgccagctccatcacaaacgcctggctcagctcctcctccacaggcgcagggaccaccctatcccacctatccaggatatcctgggtattgccaaatgcccatgcccatgggctataatccttatgcgtatggccagtataatatgccatatccaccagtgtatcaccagagtcctggacaggctccatacccgggaccccagcagccttcataccccttccctcagcccccacagcagtcttactatccacagcagtaatatgtctgctcagcagctcagctgattcagatcagagggaaagaaataccaaccctgcaataagtgtactaaactctacgctctggttaatgtaatgtactctcctggactgaatgcagtgtataatttctgtctacagctagaagctgtgccccagttccacatttgattacacatgtgagatttgctgctgttgcagtataaacactaggtataataggatttgaaattgcattacagttcataaaaattgaaaatgagaaattaaacctgcaagtgaaacatttgaaacgattatactttctacataagacatggttgggacatcagatacttacaaagatggtttaagtatggatactagagaaaattaagttttctttctctttggtttattgatttggtttaatttccattatgctattttgcataatcaaggcactgtaaatcttataattttaaaataaattacttaagaac

SEQ ID NO: 13117 - protein, 617 aa, Homo sapiens [sequence omitted]

SEQ ID NO: 13118 - DNA, 3097 bp, Homo sapiens
taatcagaggataacatgatcagagttgcattttagaagtagtactttggttgtaattttgcaaactggagatggggtgactatttattttgatggcatgttagtcatccttaggagaaatgacagtggcccataataaagaggcatcagtgaggatacagagtaggtagattctagaaaaatttatgagagagaatttataggcatttgattggtatggagagacaagaagaaagccagggattttgtccaggattctggcttgggcacttgagtgaatggtgtaaaactgaggggacgtataggatttacttaccatttcatttgcttgtttttttgtgtgtgttttgtttttctgggagggatgacagatatagctggtgtattagtccattttcacactgctgatagagacataccagagactgggcaatttacaaaagaaagaggtttaattagacttacagttccacgtggctggggaaggtctcacaatcatcatggcagagggtgaaagacaattcttacatggcagtggcaagaaagaatgaggaagaagcaaaagcagaaacccctgataaaccgatcagatctcatgagacttattcactatcacgagactaatgtgggaaagaccaaccctcatgattcagttacctaccactgtgtccctcccacaacaggtgggaattcttcagatgcaattcaagttgagacttgggtggggacacagccaaaccatatcagctgcgttcaagtgaagaaggaaagaagtacatatttcagctgaaactctataagtagttttgaatctgtggtggtagaaggatagagtttttattaatagaaatgaataggaaaaagtggctggttttggagataaacctcttgttgagtatctttgacagtggaacatgcaagtaaagtagcttgtaggcagttaggagataggactgggttttgtgtgagggttaggaggttataatgaaaattttaaaaacagcaacataggggattttgctaaagccttcagggaggatgacttctcacagtgaaggcatggagagaaagaggatggaatggctttagacagttctcttttcctgaggagaggccatgttgggaaggaacgtaaagctccaaagccgaaagtctcaagaaagtgaaaggaaagtaaggtaatgttggaatgtgggtgctaggaagttggggggtgagaaggcaggtagaggagcttccacaaagggaaaggtggcacaaattgctgaagcttcagagaagtagaaaattgattaagaccctcctttggattttcctagaaggtgattattgatcacctttgagacaacactatatttcctttttgttctcaatgattttgccgctcagtgacccctttcctgcccccatacttgtcttttcttttttattattggcttcaacatgactctctttctgcaacccctcagctttcataaattaacccagaaattattttatagcctcctttgagagaagcccttattttcacttccggtgagaccttgaaagttaatttacctagatgctataagcagatcagcaggcatgaccacatactgctttgtggcaattccattgatgtctttatgtccagttatttgtatcaaagcatatgattatgaaggaaaaacaaaaaatacagggtctaggttaactcagcagtagccacatgcaggatataaaatattctcatcctgaaaattcttgcaaaacaatgtgtcctgttttgttgcagttgagtatgtactgattctgtaccttcagccttcatgcagtagaacctggatgacttttgtatgggagatacaaaacccagagtctcactgaattttgtgtatggatatataggtcagacatcagtgtacatgacggtagtacaagggtgaaggatgatggaagggaagttcattaataactggtagtaagtttttgtagctcagaagaaagagggacaagtagaaataattggagtaatatttaacactttaaggaagcgatgtgatgttcagataggccttgaaagataatctctgtagtgaagaggatgacgaagggcaggtaatgacatgattctagaaagcagatatcccacagcgtgcacagaggttagaaaacaggcatctttgagttgaacactagattaattagggaaggttgaagttactgttggtaagatctgatgagagagcctagaatgtccttttaattcacaagcagtttggggggcatggcttgggaagttatgtggttagtgttttaagaagcttagttaacatggtggtgacatacaggtaaaattgtagaaaggtctgtcaataggatggactgagttactggttctcagctaagggtgacttttgcaatcttggggaaatttttagttgtcacaactgggacagagagagatgagataggcctattggcatctagtgcatagaagctaggaatgctgctgaacatcttataatacaagggacagcttcccacaacaagaattatgtggccaaaaatgtccatagtgtcaaggttaagaaaccctagctagcttatgctatagtagcaaacaaccccaagttcttaatggtttgaaacagtaaagatttatttattgctcagactcgctgtacataactatacatcatccacattctggaatccaagctaatggagctaccactgtctggcacattactcatactgtattggccaggacttgttacagaacccctcttaaccacagagaggacagaaattgcaatcctgtcacatccccagaaaggggcaaactgtaatattgactaacagcattagttacaaccatggaaggctgtcttggagtagaggagttgtcagtaagagagaaaccagtttcttgctgattgctgttaattcttcattctttgccccttcaggaaagtaaaatcacagtatatacagaatgggattagaaagatgtagcataggctgggcacagtggctcacacctgtaatcctggcactttgggaggccgaggtaggaggattgcttgaagccaagagttgagaccagcttgag

SEQ ID NO: 13119 - DNA, 1629 bp, Homo sapiens
aaaaaaacatgaactcccagagaaggattgtgggagacactttttctttccttttgcaattactgaaagtggctgcaacagagaaaagacttccataaaggacgacaaaagaattggactgatgggtcagagatgagaaagcctccgatttctctctgttgggctttttacaacagaaatcaaaatctccgctttgcctgcaaaagtaacccagttgcaccctgtgaagtgtctgacaaaggcagaatgcttgtgagattataagcctaatggtgtggaggttttgatggtgtttacaatacactgagacctgttgttttgtgtgctcattgaaatattcatgatttaagagcagttttgtaaaaaattcattagcatgaaaggcaagcatatttctcctcatatgaatgagcctatcagcagggctctagtttctaggaatgctaaaatatcagaaggcaggagaggagataggcttattatgatactagtgagtacattaagtaaaataaaatggaccagaaaagaaaagaaaccataaatatcgtgtcatattttccccaagattaaccaaaaataatctgcttatctttttggttgtccttttaactgtctccgtttttttcttttatttaaaaatgcactttttttcccttgtgagttatagtctgcttatctaattaccactttgcaagccttacaagagagcacaagttggcctacatttttatattttttaagaagatactttgagatgcattatgagaactttcagttcaaagcatcaaattgatgccatatccaaggacatgccaaatgctgattctgtcaggcactgaatgtcaggcattgagacatagggaaggaatggtttgtactaatacagacgtacagatactttctctgaagagtattttcgaagaggagcaactgaacactggaggaaaagaaaatgacactttctgctttacagaaaaggaaactcattcagactggtgatatcgtgatgtacctaaaagtcagaaaccacattttctcctcagaagtagggaccgctttcttacctgtttaaataaaccaaagtataccgtgtgaaccaaacaatctcttttcaaaacagggtgctcctcctggcttctggcttccataagaagaaatggagaaaaatatatatatatatatatatattgtgaaagatcaatccatctgccagaatctagtgggatggaagtttttgctacatgttatccaccccaggccaggtggaagtaactgaattattttttaaattaagcagttctactcgatcaccaagatgcttctgaaaattgcattttattaccatttcaaactattttttaaaaataaatacagttaacatagagtggtttcttcattcatgtgaaaattattagccagcaccagatgcatgagctaattatctctttgagtccttgcttctgtttgctcacagtaaactcattgtttaaaagcttcaagaacattcaagctgttggtgtgttaaaaaatgcattgtattgatttgtactggtagtttatgaaatttaattaaaacacaggccatgaatggaaggtggtattgcacagctaataaaatatgatttgtgg

SEQ ID NO: 13120 - DNA, 1859 bp, Homo sapiens
  CDS (314)..(1636)
tcagtgtcagcctctattttgtaaccaggatgagactgtagtccgagtccctggaaaatgttgcccgcagtgctctgcaagatcctgctctgcagctggccaagtatacgagcatggtgagcagtggagcgaaaatgcctgcaccacgtgtatatgtgaccggggtgaggtcaggtgtcacaagcaggcctgcctgcccctgagatgcggaaagggtcagagcagggctcggcgtcatgggcaatgctgtgaggaatgtgtgtctcctgccgggagctgctcctatgatggagttgtgcggttccaggacgaaatgtggaagggctcggcctgtgagttctgcatgtgtgatcatggccaagtgacctgccagactggagagtgtgccaaagtggagtgtgcccgggatgaagaattaattcacttagatggaaagtgttgtcctgaatgcatttcaaggaatggttattgtgtttatgaagaaactggagaatttgtgtcatcaaatgctagtgaagttaaacgtattccagagggagagaagtgggaagatggcccttgcaaggtgtgtgagtgccgaggggctcaggtaacttgctacgagccctcttgcccaccatgtccagtgggcacactggccttagaggtgaagggacagtgctgtccagactgcacatcagttcattgccatccagattgtttgacatgctctcagtctccagaccactgtgacctctgccaagatcctaccaagttactgcagaatggatggtgtgtgcacagctgtggactgggtttttaccaagctggcagtctctgtatagcctgccagccccagtgctccacgtgtaccagtgggctggagtgctcatcctgccagcctcccctgctgatgcggcacgggcagtgtgtgcctacctgtggggacggcttctaccaagatcgccattcctgtgcagtctgccatgagtcctgtgcaggttgctggggcccaacggagaagcactgcttggcctgcagagatcccctccacgtgctgagagatggcggctgtgagagcagctgtggaaaaggcttctacaacaggcagggcacctgtagcgcttgtgaccaatcctgtgacagttgtggccccagtagccccaggtgtcttacctgtactgagaagacagtgctgcatgatgggaaatgcatgtctgaatgccctggcgggtactatgctgatgccactggcaggtgcaaagtttgtcataactcatgtgccagctgctctgggcccacaccctctcactgtacagcctgcagcccccccaaggctctgcgtcaaggccactgtctgccccgctgtggagagggtttctactctgaccacggagtctgcaaagcctgtcactcctcctgcctggcttgtatgggtcccgcaccctctcactgtactgggtgtaagaagccagaggaaggactgcaagtggagcagctgtctggcgtgggcatcccctctggcgagtgtctagcccagtgtagagcccatttttacttggagagcactggcatatgtgaagggcaaaatctggacttctgtcagaatttagaagtgatttctgctgtttgccttggcatatcatctacagagaattgatgacatcctgaataaataatttgactcaatagccaggccatctatgagtggttgaggagatgaaagggaagtattatagtttcctttctgttcccacaagtagccttgctgttgggtgaatagtttgactctaaagctacgtgaaaaaaaaatcattagtttgtatttttcattgtaaacatatgttcattaaaaaaattttataatacacccactacct

SEQ ID NO: 13121 - protein, 441 aa, Homo sapiens
MWKGSACEFCMCDHGQVTCQTGECAKVECARDEELIHLDGKCCPECISRNGYCVYEETGEFVSSNASEVKRIPEGEKWEDGPCKVCECRGAQVTCYEPSCPPCPVGTLALEVKGQCCPDCTSVHCHPDCLTCSQSPDHCDLCQDPTKLLQNGWCVHSCGLGFYQAGSLCIACQPQCSTCTSGLECSSCQPPLLMRHGQCVPTCGDGFYQDRHSCAVCHESCAGCWGPTEKHCLACRDPLHVLRDGGCESSCGKGFYNRQGTCSACDQSCDSCGPSSPRCLTCTEKTVLHDGKCMSECPGGYYADATGRCKVCHNSCASCSGPTPSHCTACSPPKALRQGHCLPRCGEGFYSDHGVCKACHSSCLACMGPAPSHCTGCKKPEEGLQVEQLSGVGIPSGECLAQCRAHFYLESTGICEGQNLDFCQNLEVISAVCLGISSTEN

SEQ ID NO: 13122 - DNA, 1831 bp, Homo sapiens
  CDS (353)..(1423)
aaaaccatatgaatgcaataactgtggcaaatccttcatttccaagtcacaacttcaggtacatcaacgtgttcacacaagagtgaagccctatatatgtaccgaatatgggaaggtcttcagcaataattccaacctcattacacatgagaagattcaaagtagagagaaatcttccatatgtactgagtgtgggaaggcctttacctacaggtcagagttgattattcatcagagaattcacactggagagaaaccttatgaatgcagtgactgtgggagagccttcactcagaagtcagcactcacagtgcatcagagaattcatacaggagaaaaatcgtatatatgcatgaaatgtggactggccttcatccggaaggcacacttgattacacatcaaataattcatactggagagaaaccttataaatgtggtcactgtgggaaattgtttacttccaagtcacaactccatgttcataaacgaattcacacaggagaaaagccctatgtatgcaataaatgtgggaaggcattcaccaaccggtcaaatctcattacacatcagaaaactcatacaggagagaaatcttatatatgttccaaatgtggaaaggccttcacccagaggtcagacttgattacacatcagaggatccatactggggagaagccttatgaatgcaatacttgtggaaaagcctttactcagaagtcaaatcttaatatacatcagaaaattcacactggagagagacagtatgaatgccacgaatgtgggaaagccttcaaccagaaatcaatactcattgttcatcagaaaattcatacaggagagaaaccctatgtatgcactgagtgtggaagagctttcatccgcaagtcaaactttattactcatcaaagaattcatactggagagaagccttatgaatgcagtgactgtgggaagtcctttacctccaagtctcagctcctggtgcatcagccagttcacacaggagagaaaccctatgtgtgtgccgagtgtgggaaagcctttagtggcaggtcaaatctcagtaagcaccagaaaactcataccggagaaaagccctacatttgttctgaatgtgggaagacctttcgacagaagtcagagttgattacacatcacagaattcatactggagagaaaccttatgagtgcagtgactgtgggaagtctttcactaaaaaatcacagctccaagtgcatcagcgaattcacactggagagaagccttacgtgtgtgctgagtgtgggaaggcctttagcaacaggtccaatttgaataaacatcagacaacacatactggagacaaaccctacaagtgtggcatctgtgggaaaggcttcgttcagaaatcagtgttcagtgttcatcagagcagccacgcttgagagaaacagtgtgagaaaacccccctgagggttgggtctgattgtacactgttgcacgcatgcagcagaaaaatatgtatattattgtaaatagaaatgaccacatcagaatgtcacacatggctgttctggagagggcctctgagaaggcactgaatgaggcgagggacccttcctacattgtcaccatccccagtaaaccttgggtcattattcatactgacaaggaaccgagtcaatttggtgaataggaaaagccttctcatgaaaactacaatagaatactgttaccaaattcttcataagaaagatcatattatgggaatgataatcctgtttactgtggattaggtatagtgccaacagtttgaatggtaagacaacataatatatatgatagtgatg

SEQ ID NO: 13123 - protein, 357 aa, Homo sapiens
MKCGLAFIRKAHLITHQIIHTGEKPYKCGHCGKLFTSKSQLHVHKRIHTGEKPYVCNKCGKAFTNRSNLITHQKTHTGEKSYICSKCGKAFTQRSDLITHQRIHTGEKPYECNTCGKAFTQKSNLNIHQKIHTGERQYECHECGKAFNQKSILIVHQKIHTGEKPYVCTECGRAFIRKSNFITHQRIHTGEKPYECSDCGKSFTSKSQLLVHQPVHTGEKPYVCAECGKAFSGRSNLSKHQKTHTGEKPYICSECGKTFRQKSELITHHRIHTGEKPYECSDCGKSFTKKSQLQVHQRIHTGEKPYVCAECGKAFSNRSNLNKHQTTHTGDKPYKCGICGKGFVQKSVFSVHQSSHA

SEQ ID NO: 13124 - DNA, 1866 bp, Homo sapiens
actggatggtgctactgctgtggaaccttgtaaaaaccatgtggggtaaactgggaataacatgaaaagatttctgtgggggtggggtgggggagtggtgggaatcattcctgcttaatggtaactgacaagtgttaccctgagccccgcaggccaacccatccccagttgagccttacagggtcagtagctctccacatgaagtcctgtcactcaccactgtgcaggagagggaggtggtcatagagtcagggatctatggcccttggcccagccccacccccttccctttaatcctgccactgtcatatgctacctttcctatctcttccctcatcatcttgttgtgggcatgaggaggtggtgatgtcagaagaaatggctcgagctcagaagataaaagataagtagggtatgctgatcctcttttaaaaacccaagatacaatcaaaatcccagatgctggtctctattcccatgaaaaagtgctcatgacatattgagaagacctacttacaaagtggcatatattgcaatttattttaattaaaagatacctatttatatatttctttatagaaaaaagtctggaagagtttacttcaattgtagcaatgtcagggtggtggcagtataggtgatttttcttttaattctgttaatttatctgtatttcctaatttttctacaatgaagatgaattccttgtataaaaataagaaaagaaattaatcttgaggtaagcagagcagacatcatctctgattgtcctcagcctccacttccccagagtaaattcaaattgaatcgagctctgctgctctggttggttgtagtagtgatcaggaaacagatctcagcaaagccactgaggaggaggctgtgctgagtttgtgtggctggaatctctgggtaaggaacttaaagaacaaaaatcatctggtaattctttcctagaaggatcacagcccctgggattccaaggcattggatccagtctctaagaaggctgctgtactggttgaattgtgtccccctcaaattcacatccttcttggaatctcagtctgtgagtttatttggagataaggtctctgcagatgtagttagttaagacaaggtcatgctggatgaaggtagacctaaattcaatatgactggtttccttgtatgaaaaggagaggacacagagacagaggagacgcggggaagactatgtaaagatgaaggcagagatcggagttttgcagccacaagctaagaaacaccaaggattgtggcaaccatcagaagcttggaagaggcaaagaagaattcttccctagaggctttagagggataacggctctgctgaaaccttaatctcagacttccagcctcctgaacgaagaaagaataaatttcggctgttttaagccaccaaggataattggttacagcagctctaggaaactaatacagctgctaaaatgatccctgtctcctcgtgtttacattctgtgtgtgtcccctcccacaatgtaccaaagttgtctttgtgaccaatagaatatggcagaagtgatggcatgccacttccaagattaggttataaaagacactgcagcttctacttgagccctctctctctgccacccaccgcccccaatctatcttggctcactcgctctgggggaagctagctgccatgctatgagcaggcctataaagagacttacgtggtaaaaaatgaagtctcctgcccacagccacattagtgaacctagaagcagagactctgtgagataatcgatgtttgttgttttaagttgctcagttttggtctaacttgttatgcagcaatagataaataatatgcagagaaag

SEQ ID NO: 13125 - DNA, 2675 bp, Homo sapiens
  CDS (363)..(1187)
aaacatgaattcaaacggctcatcttatttcgaccattcggccccatcatgaaagtgaaaaatgaaaagctcaacatggccaacacgcttatcaatgttatcgtgcctctagcaaaaagggtggacaagttccggcagttcatgcagaatttcaggcctgctgatgaagtttttagatgtgtgcctttaagcccttgattgtgcggtgttggatcttagaagctgtgatggctcagatgcacatattggctgaggataaccagctaagtgatttcaccagcttgttttaaacatagaaaatcctactgtctaattataaatcttgaaagatcaagctgattttttatttctttttttttgagatggagtcttactctgtcacccaggctggagtgcagtggcacgaactctgctcactgcaaccttcacctcccaggttcagggagatgtgcattgagcaggatgggagagtccatctcactgttgtttactttgggaaagaagaaataaatgaagtcaaaggagtacttgaaaacacttccaaagctgccaacttcaggaactttaccttcatccagctgaatggagaattttctcggggaaagggacttgatgttggagcccgcttctggaagggaagcaacgtccttctctttttctgtgatgtggacatctacttcacatctgaattcctcaatacgtgtaggctgaatacacagccagggaagaaggtattttatccagttcttttcagtcagtacaatcctggcataatatacggccaccatgatgcagtccctcccttggaacagcagctggtcataaagaaggaaactggattttggagagactttggatttgggatgacgtgtcagtatcggtcagacttcatcaatataggtgggtttgatctggacatcaaaggctggggcggagaggatgtgcacctttatcgcaagtatctccacagcaacctcatagtggtacggacgcctgtgcgaggactcttccacctctggcatgagaagcgctgcatggacgagctgacccccgagcagtacaagatgtgcatgcagtccaaggccatgaacgaggcatcccacggccagctgggcatgctggtgttcaggcacgagatagaggctcaccttcgcaaacagaaacagaagacaagtagcaaaaaaacatgaactcccagagaaggattgtgggagacactttttctttccttttgcaattactgaaagtggctgcaacagagaaaagacttccataaaggacgacaaaagaattggactgatgggtcagagatgagaaagcctccgatttctctctgttgggctttttacaacagaaatcaaaatctccgctttgcctgcaaaagtaacccagttgcaccctgtgaagtgtctgacaaaggcagaatgcttgtgagattataagcctaatggtgtggaggttttgatggtgtttacaatacactgagacctgttgttttgtgtgctcattgaaatattcatgatttaagagcagttttgtaaaaaattcattagcatgaaaggcaagcatatttctcctcatatgaatgagcctatcagcagggctctagtttctaggaatgctaaaatatcagaaggcaggagaggagataggcttattatgatactagtgagtacattaagtaaaataaaatggaccagaaaagaaaagaaaccataaatatcgtgtcatattttccccaagattaaccaaaaataatctgcttatctttttggttgtccttttaactgtctccgtttttttcttttatttaaaaatgcactttttttcccttgtgagttatagtctgcttatttaattaccactttgcaagccttacaagagagcacaagttggcctacatttttatattttttaagaagatactttgagatgcattatgagaactttcagttcaaagcatcaaattgatgccatatccaaggacatgccaaatgctgattctgtcaggcactgaatgtcaggcattgagacatagggaaggaatggtttgtactaatacagacgtacagatactttctctgaagagtattttcgaagaggagcaactgaacactggaggaaaagaaaatgacactttctgctttacagaaaaggaaactcattcagactggtgatatcgtgatgtacctaaaagtcagaaaccacattttctcctcagaagtagggaccgctttcttacctgtttaaataaaccaaagtataccgtgtgaaccaaacaatctcttttcaaaacagggtgctcctcctggcttctggcttccataagaagaaatggagaaaaatatatatatatatatatatattgtgaaagatcaatccatctgccagaatctagtgggatggaagtttttgctacatgttatccaccccaggccaggtggaagtaactgaattattttttaaattaagcagttctactcgatcaccaagatgcttctgaaaattgcattttattaccatttcaaactattttttaaaaataaatacagttaacatagagtggtttcttcattcatgtgaaaattattagccagcaccagatgcatgagctaattatctctttgagtccttgcttctgtttgctcacagtaagctcattgtttaaaagcttc

SEQ ID NO: 13126 - protein, 275 aa, Homo sapiens
MESYSVTQAGVQWHELCSLQPSPPRFREMCIEQDGRVHLTVVYFGKEEINEVKGVLENTSKAANFRNFTFIQLNGEFSRGKGLDVGARFWKGSNVLLFFCDVDIYFTSEFLNTCRLNTQPGKKVFYPVLFSQYNPGIIYGHHDAVPPLEQQLVIKKETGFWRDFGFGMTCQYRSDFINIGGFDLDIKGWGGEDVHLYRKYLHSNLIVVRTPVRGLFHLWHEKRCMDELTPEQYKMCMQSKAMNEASHGQLGMLVFRHEIEAHLRKQKQKTSSKKT

SEQ ID NO: 13127 - DNA, 2470 bp, Homo sapiens
  CDS (1668)..(2021)
ttttcacattactctagtccccagaactgtgggccaccagatgacttcagatgtcccaatccgacaaagcagatctggacagtgaatgaagctctaattcagaaatggctgagctatccttctggaaggtttcctgtggagatagccaatgagatagatggaacgttttcttcctctggttgcctaaatggaagttttttagctgttagcaatgatgatcactatagaacaggtaccagattttcaggggttgatatgaatgctgctaggcttttattccacaaacttatacaacctgatcatccgcagatatctcagcaggtggcagctagtttggaaaagaatcttattcctaaactgactagctccttacctgatgttgaagcattgaggttttatcttactctaccagaatgtcccctgatgagtgattccaacaatttcacaacaatagcaattccctttggtacagctcttgtgaacctagaaaaggcaccactgaaagtacttgaaaactggtggtcagtacttgaacctccactattcctcaagatagtagaactttttaaggaagttgtggtacatcttttgaaactctacaagatcggtattcccccttctgaaagaagaattttcaacagttttcttcatactgcattaaaggttttagaaatactacatagggtaaatgagaaaatgggacagattatacagtatgataaattttatatacatgaagtacaagaattgatagacataagaaatgattatatcaactgggtccaacagcaggcctatggaatgttggcagatatccctgttacaatctgtacatatccatttgtatttgatgcccaagcaaaaactactctgttacagaccgatgcagtcttacagatgcagatggctattgatcaggcccacaggcagaatgtctcctctctttttctcccagtgattgaatctgtgaatccctgcttaattctagtggtgcgtagagaaaatattgtaggagatgcaatggaagtccttaggaaaacaaagaacatagattacaagaagccactcaaggttatatttgttggagaagatgctgtggatgcaggaggggtgcgcaaagaatttttcttgctcatcatgagggaattattggatcctaaatacggcatgtttaggtattatgaagattccaggctcatttggttttctgataagacatttgaagacagtgatttgttccatttgattggtgttatctgtggcttagcaatttataattgtaccattgtggacctccattttcctttggctttatataagaaactactgaaaaagaagccatccttggatgatttgaaagaactaatgcctgatgttgggagcatgcaacagttactggattatccagaagatgacatagaggaaacattttgtcttaattttacgatcacagttgaaaactttggtgcaacagaagtgaagagctggttctaaatggtgcagacacagctgttaacaaacaaaatcggcaagagtttgtcgatgcttatgtggattacatattcaataaatcagtggcttccttatttgatgcttttcatgcgggctttcataaggtccgtggaggaaaagtccttctgctctttcagcctaatgaactacaagcaatggtcattggaaatacaaattatgattggaaggaactggaaaagaatacagaatacaaaggggaatattgggcagaacatcctacgataaaaattttttgggaagtatttcacgaattaccattggaaaagaagaaacagtttctgttatttttgacaggtagtgatcgcattcctattcttggtatgaagagtctgaaactagtcatccagtccacaggaggtggtgaggagtatctcccagtttcccatacttgttttaatcttctggatcttccaaaatatacagaaaaagaaactctacgctctaaactgatccaagccattgatcacaatgaaggcttcagtttaatataactttggagttataactattcagtttagtgcaaaagcattaaactatttgtgtttttcttgtggtgatgaattcagcaaggtgacagaggtactattataattcttacttgcagaatgttcaatctacgagtgttcatggaagccaaaaaatattaaaggaaaatgaacaaactgttaatattattgtacagaaccatggattttttttgaccatcttctaataaacatagcaagtattatgaatacattaaagttttactaacatgaattttaagagtttgcatatttcagaaatgatctggtgtgagtgcatggaaatattgcttaatttttcttcaatcattgagtgaaaaacctttaactttggcctgcaatagtcatttgattattttttcattttgtaaataatgttaagttttgtaataaaatagttatgttctgatacc

SEQ ID NO: 13128 - protein, 118 aa, Homo sapiens
MVIGNTNYDWKELEKNTEYKGEYWAEHPTIKIFWEVFHELPLEKKKQFLLFLTGSDRIPILGMKSLKLVIQSTGGGEEYLPVSHTCFNLLDLPKYTEKETLRSKLIQAIDHNEGFSLI

SEQ ID NO: 13129 - DNA, 2772 bp, Homo sapiens
  CDS (301)..(1986)
aaaaaggcgtcggccctctggcaagatggctgctgcggaggcgttggagcgcggaaatctggaaccgggatggcgacgtctacactgagtcggaggcgaaggagcttactccacgggaacagcctctagataatctgagttgttgaaaatacgaagcctgttactcgtgaacagtggctgacaacagtgttgttgtgagcctggctgtctgcttggacccagaggtttcgtctgccagggtttttggttgtatttaggatttcagggaaaagtgtccaagctttcagtgttggagcaggtatggacgacaaaggcgacccgagcaatgaggaggcacctaaggccatcaaacccaccagcaaagagttcaggaaaacatggggttttcgaaggaccactatcgccaagcgagagggcgcaggggacgcggaggctgacccactggagccgccacccccacagcagcagctgggcctgtccctgcggcgcagtgggaggcagcccaagcgcactgagcgcgtggagcagttcctgaccattgcgcggcgccgcggcaggaggagcatgcctgtctccctggaggattctggtgagcccacgtcctgccccgccacagacgccgagacagcctccgagggcagcgtggaaagcgcttctgagaccagaagcggcccccagtctgcttccacagctgtgaaggaacgaccagcctcttctgaaaaggtgaaaggaggggatgaccacgatgacacctccgatagtgacagcgatggcctgaccttgaaagagcttcagaatcgccttcgcaggaagcgggaacaggagcccactgagaggcccctgaaagggatccagagtcgcctgcggaagaagcgccgggaggagggtcccgccgagactgtgggctccgaggccagtgacactgtggagggcgtcctgcccagtaagcaggagcccgagaacgatcagggggttgtgtcccaggctgggaaagatgacagagagagtaagttggagggaaaggcggctcaggacatcaaagatgaggagcctgaagacttgggccgaccgaagcctgaatgtgagggttacgaccccaacgccctgtattgcatttgccgccagcctcacaacaacaggtttatgatttgctgtgaccgctgtgaagaatggtttcatggcgattgtgtgggcatttctgaggctcgagggaggcttttggaaaggaatggggaagactatatctgcccaaactgcaccattctgcaagtgcaggatgagactcattcagaaacggcagatcagcaggaagctaaatggagacctggagatgctgatggcaccgattgtacaagtataggaacaatagagcagaagtctagcgaagaccaagggataaagggtagaattgagaaagctgcaaatccaagtggcaagaagaaactcaagatcttccagcctgtgatagaggcgcctggtgcctcaaaatgtattggccccgggtgctgtcacgtggcgcagcccgactcggtgtactgcagtaatgactgtatcctcaaacacgccgcagcgacaatgaagtttctaagctcaggtaaagaacagaagccaaagcctaaagaaaagatgaagatgaagccagagaagcccagtcttccgaaatgcggtgctcaggcaggtattaaaatctcttctgtgcacaagagaccagctccagaaaaaaaagagaccacagtgaagaaggcagtggtggtccctgcgcggagtgaagcactcgggaaggaagcagcttgtgagagcagcacgccgtcgtgggcgagcgatcacaattacaatgcagtaaagccagaaaagactgctgctccctcgccgtcactgttgtataaatgtatgtatcacctaggggttggcctcctggacccctcccgttctttctggatagccatcccctgggcctgtccaggactgggagttgcagctttgtgttaagctgatcacagacaccggctgcaccatcagcgggaagcagagcccatgtccaggatgcctcctgctgccctgtgtccatccctagtctgtcaggacttcctgtcactgttttccaaagctgtaaacctcactggtgaacgttcaccttaatgattgattctttaatctctgttgtcactctcaggctctggtaagtattcgtattctcttcatcccagtctgattgcatagccacactgcccggcacgccacatccacccctgtctgcacatgagttgttctgacaacagcgctgtatacgcttcagtttttccacattgtccacggccagcacatgaaagcatcacttcttttttatgttgtgggaatctttgcaagttagtgttgcatctgattttcaggtgtacatttatttttgactgggcagataggggatttttttttttccatgtccgattcacacgctacacacccacatgaacacattcgaacttcgaaggccacacactcctgcttcataggccccacggtaagtgagttcacacctagaacactgtcctgaccgcaggacgcgtgccttggacttggtattctacatgtgactggctttcttgccctcgtctcttgaatgtttagactcttaagatcatatcctgccccaaatttcaaattaatgaaatgaagatatttcaaacagatctttgaaacctcagattctgtggtgcaattttaatgttttcttgtttctcagttttctgctataaaactattttcaattcagtc

SEQ ID NO: 13130 - protein, 562 aa, Homo sapiens [sequence omitted]

SEQ ID NO: 13131 - DNA, 2163 bp, Homo sapiens
  CDS (7)..(366)
taaaccatgacctggctgcagaccttgactggcttattggaacagatgcaggttcacagagatgctgagtcacagctggttttgcaggagtggaaaaaggaaaggaaggagatgcgagaaatgaccaagagtttcttcaatgcccagtttggaagcctgttccgcacagaccagaacccaacctacttcctaaggcgcctgtcgcgcttcgctgacatctacatggcgtctctgagctgcctcctgaactatgacgtcagccacactttctacccccggaggactccactgcagcacgaactgcccgcctggtcagaaaggccccccaccttcggaacccctctcctgcaggaggcccaggccaagtagccaagggcaaaaactagaaactgtaactgcccctgattgggcaggcatgatggggttgacttcatgtgggtctgagtgttgcttttggaaaagatacagataagccttttgatatttattttgcaccttacggagaataattctcccaatgattaagacaggagctagcagcccacccctccagcctttccccccatgcagggctgaaaggcaagcttcacattggaactctgattttgcctttttgtttactgaggtcctggaacatcaggtttcctgggataggtgagaccacttgatgccatgtctgtattctagcaggtcaagcttgaaaccgttcttgactcctccatggaacatttcctgaacatttacgggctatgcattgggaactgcaggggcacagtgatgggcaaagattagctgcttccagaaggctgatttcgtgggctccacaatggtaaaacgctgctgtgagtggcagagaggttccccaggtgatggccagttcccaaatcatttggtactaaggctttgacattctggcacatcacatcaaatagaacacagcctccctggaaggacttaagtgagaaagaacaagagaagctgcaactcctggacccttttgtcctcagtgtgtggttcctgcgtccttccccagggcaggagagaggagatgagagctctggtcaaaacctgccagctagtggaacagccttctatagagccttctgcaagaaacgagtgggtttgaagaaccaaaacatttgtggtgttttcgccatcagggtgtattggaggctgacacttaatgggtgtgtgttacgcccagaactgctcggtgtcggggttctaaaagaatgcgctggtgttcttggcttcaagtttctgctttggagaagcagattcaggaagaatgcagctatatgtaaaccaaaggaagattttgacttcatcttattcagagctttataaggaattgttcgtcatttcagaagagcacatcctccacaggaggccactcctggtatttgagtcgtgaatcacacccgtgtcagtctgcatttctactggtcatttccatgaagattatatagacgcacgtatgtaagactgtacttactgtctgagtccattcatgctgctataacaaaataccatatgctgatttagcttataaacaacagaaatttacttctcactgcccaggaggctggcaagtccaagatcaaggtgccggcagatttggtgtctggtgaggcctgtttcctggttcacagatggtgacttctacatggtagataggttgagggagctctctgaggcctctattataagggcactaatccctttcaggatgcccctcccccttaatcacctcccaaaggcttacaggctcacttaccaccctcctagtgttatcaccttgggggtaaagatttcaacacaggaattttgggggtcacaaacattcagaccatagcacttaacctttattttaaaatgtcagccaggtgcagtggctcatgcttgtaatcctagcacttagggaggccaaggtgggaggattgcttgagctcaggaatttgagaccagcctgggtaacatagtgaaaccccatctctacaaaaaataaaccacattagttgggtttggtgatgggtgcctatagcagcacctacttgggaggctgaggctggaggatcacttgagcccagaaggttgaggcttcagtgagccgtgattgagctactgcaatccagtctgggtgatagagtgagaccctgtctc

SEQ ID NO: 13132 - protein, 120 aa, Homo sapiens
MTWLQTLTGLLEQMQVHRDAESQLVLQEWKKERKEMREMTKSFFNAQFGSLFRTDQNPTYFLRRLSRFADIYMASLSCLLNYDVSHTFYPRRTPLQHELPAWSERPPTFGTPLLQEAQAK

SEQ ID NO: 13133 - DNA, 1817 bp, Homo sapiens
  CDS (292)..(768)
aaaaatcagaataagaagtacctgacatactttctacatctgtagttgcggaagacattttaataggtcttctcatagcctttctttgctaaggacattgtgactctccagagagcaacagtgatggctctagaatgtctaggaaaaagaagggcttaatgtcaggagtctgcttggggcacacaacactagaagatgtccttctgcacattgtttcatatcgagtatggaacccttcagatcaaagcttaccaataaattcagtatgtagaacagattaacgtagttgaaatgaggaagaatgagagttatctcaaccagccagcaccccctatccccattcccacactttccctcatgggaggctgtcgggagcacttcgaaaaccactggaaaggccgggcacggtggctcatgcctgtaatcccagcactttgggaggccaaggcaggcagatcacctgaggtcaggagttcgaaaccagcctggccaacatggcgaaaccccatctttactaaaaatacgaaaattagccaggtattagaattatttctgaattatcagtctctcatttgtgctttggagaagcagaaaaggcaaaaggggtctttggccatcttctgctggagcttccagggaggatgtgtctccaagagaccagatgtaccgagtttgaaatcccagaagcccaagaggaaaagaatcacagggaggaaaagactgtccaaaggcttctggagtcttctgttctctaaccttggaaggttttgaacaatatttctcagaggatagcctttcacttattcatctgtccagcatgactcatccccgggagtgttgagtaagtgaaattttgctgtattcatgtttttgtgacttataaaataggatgataaggagagaacatgaactctggagtcagacctgttacctcggacatgatactcttagctttgtcatttagtatttgagtaattttgggcaagctaacatctctggtcgttctcatctgtaaaatgagaataaatgaaacccactaaccagaattggtatgaaaatgaaatgtggcagaaaaaaaatgaaagtgaatagtatcaccactgacacacaagcactaaaggcccttcctgtctccatcaggtatggatttggggcaacatttggccagatcttgtttatctttctgttcatctattctgtctaattcagtgctttgtttacaacgaatgtcttacaaatgctgactgaacactagcatacctgcatgaacaacaggtaaataaattttagatgtgttttaatgtttattaatctatcctgtcagagaagaactgccagttatagataaatatgatgccaggtcagggctgaagagttgggcaggttgttatctgcatggggtcactaggttccagtggagaggtgggggctaagctctcacccgctctgcagccacctggcacccggtttcagtttcctgaaagggagccttctacttgctgacgactgcctcatctcttctgaggtttcctctgataaacaattttctctgctttttttttttaattatgaaatacttaaaatgtaaaggagataatgtgacacacatttacccataattgagattgccataattgctataactttttcaaaattttgacttaatttcagacttttagaaaaattggccaggtgtgatggctcatgcctgtaatcccagcactttgggaggccaaggtgggtaaattacttgaacccagcagttcgagacttgcctgggcggcatagtgagaccttgtctctactgaaaacaaact

SEQ ID NO: 13134 - protein, 159 aa, Homo sapiens
MRKNESYLNQPAPPIPIPTLSLMGGCREHFENHWKGRARWLMPVIPALWEAKAGRSPEVRSSKPAWPTWRNPIFTKNTKISQVLELFLNYQSLICALEKQKRQKGSLAIFCWSFQGGCVSKRPDVPSLKSQKPKRKRITGRKRLSKGFWSLLFSNLGRF

SEQ ID NO: 13135 - DNA, 1179 bp, Homo sapiens
  CDS (32)..(340)
gaagtggcgtacggcatgcgccggtggcgtgatggagcggcagcagcagcagcaacagcaactgcgaaacctgcgtgacttcctgttggtctacaatcggatgacagaactctgcttccagcgctgtgtgcccagcttgcaccaccgagctctggacgctgaggaggaggcctgtctgcacagctgtgctgggaagctgatccattccaaccaccgcctcatggccgcttacgtgcagctcatgcctgccctggtacagcgccgcatcgcagactacgaggctgcctcggctgtgccaggcgttgctgctgaacagcctggggtctctccatcaggcagctagccatacccaaccccaggaaggaaggccttggatggaccctcagattgaaggacccggtggaccttggggttggtgaatcctaaacagagagaattcgaggttgcctgaaagctgggtgtccttgctccttttcctggagccaatatacccagtttttactcagtttgatttatattctgggcaaggaagctttgcctactttattggcacaatccgttgttctgtcgtttagtgcatatctgctggcttcagccctggcagctgagaaattgttttctatatgtagaaggaaaacctgagcatttgcaggcatctggttaaagcagggtctgtgtgtacaattttaaaacgggtaatatgtcatgctcttagttcatcttcacaacaaaactatgagtaagcggtattagcctcacttaacagatgaggaagcaagattccagaaagtaccagaaggtcattttatacaacaggagattggttcctgcccagatgacagaaaatgggagctctgtctagttgtccttaagtctgactgacttcagtggctcataaccgtgagccaagtatttgttggttcataactgttgttttgtgaactatgtcttacatgtctagagttctgctggatctagggaaaggaggagctatcgaagtacaacggatcaaaaaaccacagggcttttgggcactgcctccttgggaagttagtggccacagaagagagatgaaacctgtaagaagtctggagtcttttggaacttcagccatttccccaggttgttactttcttagtatgtacagtcttctcaggatgagcagtaaaacctttgaac

SEQ ID NO: 13136 - protein, 103 aa, Homo sapiens
MERQQQQQQQLRNLRDFLLVYNRMTELCFQRCVPSLHHRALDAEEEACLHSCAGKLIHSNHRLMAAYVQLMPALVQRRIADYEAASAVPGVAAEQPGVSPSGS

SEQ ID NO: 13137 - DNA, 2115 bp, Homo sapiens
  CDS (197)..(1225)
tccaaagaatgttgctacagagacacaattgaaaggtggtcagcattctcaagctgctccagtgaaatggattttccaagataatctacagccttttacgccatctcttgttcctgttaagtcttcaaataatgtggcttcaaagattttaaaaacttttgtagataggaaaaatttgggagataatactataaatatgccaccattgagtaccatcgatcctagtgggacgcgatccaaaaatatgcctattaaagataatgctttggttatgtttaatgggaaagtctatctgttggctaaaaaggggacagatgttctgccatcacaaattgaccaacagaattctgtttctcctgatactccagtaagaaaagacacgttacagacagtgagttcaagtccagtcacagaaatatccagagaggttgtaaatattgttttggctaaaagtaaatcttcccagatggagacaaaatcactttccaatacccagcttgcttccatggccaatctaagggcagagaagaataaagtggagaaaccatctccttctaccacaaatccacatatgaaccaatccagtaactacttaaaacagagtaagactttattcacaaatccaatctttccagttggatttagtacaggacacaatgcccccagaaaagtaacagccgtcatttatgctagaaaaggaagtgtcctccagagcatagagaaaataagttcctctgttgatgcaacaactgttacttcacaacagtgtgttttcagagaccaagaaccaaagatccataatgagatggcatcaacatcagataaaggtgcccaaggaagaaatgacaagaaagattctcaaggaagaagtaataaggcattacatctgaagagtgatgctgaatttaaaaagatatttggccttactaaggatttgagagtgtgccttactcgaattcctgaccatttgacctctggagaaggtttcgattcctttagcagtttggtaaagagtggtacttacaaagagacagagtttatggtgaaggaaggagagagaaaacagcagaattttgataagaaaagaaaagcaaaaactaataagaagatggatcacataaagaagagaaaaacagagaatgcttataacgcaatcataaatggggaagctaatgtcaccggttcccaactccagtattttaccaacttcagatgtgtcacaacataacattctcacgagtcacagcaaaaccagacaagaaaagagaactgagatggaatactatacccatgagaagcaagagaaaggcactttgaattcaaatgcagcttatgaacaaagtcatttcttcaataaaaattataccgaagatattttcccagtgacaccaccggagttagaagaaaccattcgagatgaaaaaataagaagacttaagcaggtgctgagagagaaagaagcagctcttgaagaaatgcgtaagaagatgcaccaaaaataaaatctcctgtaaagacttcagtgaaatagctgttttttaaaatatacttcagcattaataagttaattgtaggtgtgttctgaaagtgtctttgaatatgaagcttgttttttcatcagtcgattgtacaactttaaggaatacagaaaaggttgattcacatatgacttgtgaataatttacatggggtatctatacctttgtcttagatacctttttttggaaggataaattttatatttttctattattttaactagaattctccaagtttgaatatttgggcagggtttttgttattgtttgtatctttacctaaattgctcaggcattattccagcagtagatagtgactgtgtattactgaaattttacaattcaagagaggaaatcagctccaaacttagcttttccagtggatttgtatatgtacttgctttatctctttacccttaaaatgatgataccttgtattcaccattgttttttttaatgtcgtgaaataatatgtattatggcaacattatttaaacattcaaacatttctcaagaatgagcaacatttgtaactttacaatgtaattttatataatccaaaggtattttagaattc

SEQ ID NO: 13138 - protein, 343 aa, Homo sapiens
MPPLSTIDPSGTRSKNMPIKDNALVMFNGKVYLLAKKGTDVLPSQIDQQNSVSPDTPVRKDTLQTVSSSPVTEISREVVNIVLAKSKSSQMETKSLSNTQLASMANLRAEKNKVEKPSPSTTNPHMNQSSNYLKQSKTLFTNPIFPVGFSTGHNAPRKVTAVIYARKGSVLQSIEKISSSVDATTVTSQQCVFRDQEPKIHNEMASTSDKGAQGRNDKKDSQGRSNKALHLKSDAEFKKIFGLTKDLRVCLTRIPDHLTSGEGFDSFSSLVKSGTYKETEFMVKEGERKQQNFDKKRKAKTNKKMDHIKKRKTENAYNAIINGEANVTGSQLQYFTNFRCVTT

SEQ ID NO: 13139 - DNA, 949 bp, Homo sapiens
  CDS (100)..(414)
gcagaaggaggaaggacagcacagctgacagccgtgctcaggaagtttctggatcctaggctcatctccacagaggagaacacacaggcagcagagaccatggggcccctctcagcccctccctgcacagagcacatcaaatggaaggggctcctgctcacagctactcaggaggctgcggcaggagaatcacgtgaacccaggaggcagaagttgcagcgtgccgagatagcgccactgcataccagcctgggcgacagtacgagactccgtctcaaaaaaaaaaaaaaaaaaaaaaaaaaaagagaaaaaagaaataaaaggaaagaaggctctgttggagcctggataggggaaaatataccagagagggacaggggtcaaaacaggaaagtcacattgaactggaattggtaagaggtaggaaaatcttaagtgttctgttttcctgattaatcatcaggggccacattttgaaaaatgataataataactatatcagatgacacttcaaataaaaatataagcaggacgtgaaacactgtcctcagcaaaaaacctcaacaattgggggagaaaaaaaaaacaccaagggtgtggagggccctgagaagtctcacatctacaggagtctgcagcctgttccaggcactggggtgcaaccaagatcacaaaagtccctgtcctcactgagctcatgctgtcatggggaggaagacagaggtcaaaacaggagaggcagagtggagagggcagaaagacaatctttgaagaccatcagccaactgccttaggaggcttaggagagtccataggaagtctaatgtccccagaagcagaaacagaagacagaagatgtacctggtagcagcttgtccacagggatctgatgtaacggtgttttctcatggaagcaaattaataataaatgctgtttgtgtgaaacctc

SEQ ID NO: 13140 - protein, 105 aa, Homo sapiens
MGPLSAPPCTEHIKWKGLLLTATQEAAAGESREPRRQKLQRAEIAPLHTSLGDSTRLRLKKKKKKKKKREKRNKRKEGSVGAWIGENIPERDRGQNRKVTLNWNW

SEQ ID NO: 13141 - DNA, 1354 bp, Homo sapiens
  CDS (83)..(517)
gggcgcagcgccgagattgattcaccttcacctgtgctgcactccagctgacccaagtaggaagccagacgagctgtaaaacatgaacggaagagtggattatttggtcactgaggaagagatcaatcttaccagagggccctcagggctgggcttcaacatcgtcggtgggacagatcagcagtatgtctccaacgacagtggcatctacgtcagccgcatcaaagaaaatggggctgcggccctggatgggcggctccaggagggtgataagatcctttcggcaaatggccaagacctaaagaacctgctgcaccaggatgctgtagacctctttcgtaatgcaggctatgctgtgtctctgagagtgcagcacaggttacaggtgcagaatggacctataggacatcgaggtgaaggggacccaagtggtattcccatatttatggtgctggtgccagtgtttgccctcaccatggtagcagcctgggctttcatgagataccggcaacaactttgaaaaacttgctctctttcaatactcccaatgaagatacatttcactcaccctccacccctgctattctgccatgtctttccctctctctgcatagccagatttgaagtgactgatacccaccccaaaccttgctgttcacagtctccaattcttcatattctaatgggaaagtaaaggtattgtttgaaggaaaactgaagaaaagacttggcttagaacaaatgaggagttatatattttactaggacttttgatagaaattcagctacaacccaaagagagaaagattgagtcttcctgtcaccataggcaataccttttttcttagctggcatgccataaaggccagctatgtgatattagaggaagaaaggatttttctttttaatgatcttccttgggaaattattgtggcctttatttaatttctaactacgtacctgggtgcctatatcgacaaagagtgagaagagcatttttacctttttaaaaaagcaaatacatatatacacatacgtatgcaaatattatagtataatagtgatccctatggagaattaaaggtgagaaagctactttgtggtgtctaggtttctgataaaagggatgatcttaactgaagaatttaaagagatacttaaacagagcaaatgtagtaggaacaagggagtgagccttataagaggacgttcagtctcatttattaaaataataactgagactgggagaggtggctcatgcctgtaaatcccagcactttggtagcctgaagtgggagattgcttgagtccaggagaccagcctgggcaacatagcaaaacctcatctctattt

SEQ ID NO: 13142 - protein, 145 aa, Homo sapiens
MNGRVDYLVTEEEINLTRGPSGLGFNIVGGTDQQYVSNDSGIYVSRIKENGAAALDGRLQEGDKILSANGQDLKNLLHQDAVDLFRNAGYAVSLRVQHRLQVQNGPIGHRGEGDPSGIPIFMVLVPVFALTMVAAWAFMRYRQQL

SEQ ID NO: 13143 - DNA, 1626 bp, Homo sapiens
caactaatgggaaaaataaccagctagcatcataatgacagaatcaaattcacgcataacaatattaaccttaaatgtaaacaggttaaatgccccaattaaaagacactgactggcaaattggatagagagtcaagacccatcggtgtgctgtattcaggagactcatctcacgtccaaagacacacataggctcaaaataaagggatggaggaatatttatcaagcaaatggaaagcaaaaaaaaaaaaaaaaaagcaggggatgcaatcctagtctctgataaaacagactttaagccaacaaagatcaaaaagacaaaaaagggcattacataatggtaaagggatcaatgcaacacgaagagctaactatcctaaatatatatgcacccaaaacaggagcacccagattcataaagcaagttctcagagacctacaaagagacttagactcccacacaataatgggagactttaacaccccactgtcaatagtagacagatcagcaagacagaaaattaacaaggatattcaggacttgaactcacctctggaccaagtggacctagtagacatctacagaactctccaccccaaatcaacagaatatacattcttctcagcatcctgataccacaacatcacacttattctaaaactgaccacataattggaagtaaaacagtcctcagcaaatgcaaaagaatggaaatcataacaaacagtctctcagaccacagtgcaatcaagttagagttcaagattaagaaacttgctcaaaactatacaactacatggaaactgaataacctgctccagaatgactactgggtaaataatgaagtgaaggcagaaataaataagctctttgaaaccaatgagaacaaagacacaatgtactagaatctctggagcacagctaaagcagtgtttacagggaaatttatagcactaaatgaccacaggagaaagcaggaaagatttaaaatcgacagcctaacatcacaattaaaagaactagagaagcaaaagcaaacaaattcaaaagctagcagaagacaagaaataactaagatcagagcagaactgaaggagagagagagatgaaaaacccttcaaaaaatcaatgaatccaggagctggttttttgaaaagatcaacaaaatagatagaccactagccagactgataaacaagaaaggagacacgaatcaaatagacacaataaaaaatgataaagaggatatcaccattgatcccacagaaatacaaactacgatcagagaatactataaacacctctacacaaataagctagaaaatctagaagaaatggataaattcctggacacatacgccctcccaagactaaaccaggaagaagtcgaatccctgaatagatcattcacaagttctgaaattgaggcagtaattaatggcctcccaaccataaaaagcccaggaccaggcagattcacagctgaattctatcacaggtacaaagaggagctggtaccattccttgtgaaactattctaaacaatagaaaaaagagggaatcctctttaactcattttatgaggccagcatcatcctgataccaaaacctggcaaagacacaac

SEQ ID NO: 13144 - DNA, 1385 bp, Homo sapiens
agcatgatgcaagggaggtttgatgtcaaaatgaaatctatttccttgtttggccaaatgttctatggctttcccaccactcatggtggagcactctggatgttttattaaagaaagtcttcttgccacctatcaaagaaacatattttttagagtcataaaattaaatactgtgaaacgaaaagatgcaaaggaaataaattgaaaattactaacaaaacaaaaaacccctgaatgaataaaacatgctatactttggcaaatatagactatagctgatattcaggtaagcagacaaccctgttccttatgatgacccgaacaataagaggccaatcactgcccctgtctatgtttgctcttctattggttggaaaatgggcttgaagttgacaataactgcttaatgatgaacgtcaataataagaacttgtcctatacttcctattatttcactgtgggaagcagtgttttgtttgtttgtttgtttgttttcctatatatggcagtagcctctgtagtattctaaaacaaaggggggtgcggggggaccctgtctgtggtgtaagtaattgtgtgatttaattctgtgcattgcatctttaatgtccttatgttaatctatatatattctcttattttaccttttttgcagtatgttagtttacgaagcacgttctttcacatacattatttggcaaaatacataactgtatctgcaaactatttcagcctttatgtacagatatgaacctcttaccattttattaagaaaggctaagaattataaaattgtgtactactctttctattttttctcaccatatgtgaatttttttcagtttactaagataaaattcagaaatatttaggtgaatggtggtagcacatctattgctacttagttgaaatggacaacataacaaaaaagaatggagaaattaattcttaattaccttgtcaagcatgtcacctggtgctatgtccaaagactttccaagaagcagaaaatctgaaactccttgaactaatgccaacagacagtgacctccagaaatcaaaagaactaaaaaaggaaattctactttattggtcaacctaatagtaagtgcatgagcctccatatgatgaatgggaatgaatggcttttttaactgtcctaccagctgtaagctaaatgataagcccactcccaggcttaaagcaagtcctggttttatggtagttgcaattgctgagaggtcacttggagagactccactggcagaaagagcttcttgtactattcgttgaatattttctctgtgaagctgttgagctgctggaggaacaatcccacctgttctgaaagaaagaaagacagcattttgtagttttaagattgt

SEQ ID NO: 13145 - DNA, 2067 bp, Homo sapiens
  CDS (131)..(952)
ctacggcggccgcgcgctccaggccggtcgctccaccccccggctcccgggactgtggactccacgaccctgtcctcggccctgtccgcgccgaagcagcccgggactgcgcagcgccccgcgtgccgacatgggaaagtctctttctcatttgcctttgcattcaagcaaagaagatgcttatgatggagtcacatctgaaaacatgaggaatggactggttaatagtgaagtccataatgaagatggaagaaatggagatgtctctcagtttccatatgtggaatttacaggaagagatagtgtcacctgccctacttgtcagggaacaggaagaattcctagggggcaagaaaaccaactggtggcattgattccatatagtgatcagagattaaggccaagaagaacaaagctgtatgtgatggcttctgtgtttgtctgtctactcctttctggattggctgtgtttttccttttccctcgctctatcgacgtgaaatacattggtgtaaaatcagcctatgtcagttatgatgttcagaagcgtacaatttatttaaatatcacaaacacactaaatataacaaacaataactattactctgtcgaagttgaaaacatcactgcccaagttcaattttcaaaaacagttattggaaaggcacgcttaaacaacataagcattattggtccacttgatatgaaacaaattgattacacagtacctaccgttatagcagaggaaatgagttatatgtatgatttctgtactctgatatccatcaaagtgcataacatagtactcatgatgcaagttactgtgacaacaacatactttggccactctgaacagatatcccaggagaggtatcagtatgtcgactgtggaagaaacacaacttatcagttggggcagtctgaatatttaaatgtacttcagccacaacagtaaaaactggaagagatggatttaaagaagaaatatctattgatatttcctatactctcaatgaagaggtatttcctaataggagaccttaaattgaacaaacctaaagttcacacttctaagagtacagttaaaagtatgtggacctgcagttcttgtaactctccactctgtgttaatgatatatttgtactaggatcttttacttgaatctaaatttactggttgatttccttctccagcctatcccctacagggaaaagctgatacttcccctatagtacaataaataattatttaaaagtcatagctccagtcactactgaaaacataattttggtgataaacataatttgagaaacttaatttctgaatgtttttatagaaaattactgaaaatctattactcatggaagacttttaaagaataaccttttttcctgttttataaattcccattgttatatgatagtatttcagctacacaatattttagcttttagctagacatttataggttttcatttgttgaaatggtaatcatctgcatgtttttgtcacttatttcaggttagtgattgcctaacacttataagccaaaataatctttgcaaaattccatacctaaaattttgaaagcccctaatgttttcacacatctttctgtattagttatagttttgtgaaatctttgtgtgatcttcaaacattatcatttaatgtacaatactgtaaataaactgtgcatggcttttatacagctttagtaaatgtcaaataaagtggtacagactcattacaacaagtttctcataaaaatacaataaataggaaaatgaaattcagaaacccatagactgggaataggttccagttacagcttggatctggcataaaataaatttgaaataaaatattttgatgctccatttttttatgttgcttttcatactaaagaatggtgtagacttgttttgcaactgttaggtacccagttatcaattttatcaatgttttagaggaggaaattatttttttggtagaaattgttcaagaaatccttaattgaatgtcattaaatgatggtggccaaaataaaacctatttagaaattt

SEQ ID NO: 13146 - protein, 274 aa, Homo sapiens
MGKSLSHLPLHSSKEDAYDGVTSENMRNGLVNSEVHNEDGRNGDVSQFPYVEFTGRDSVTCPTCQGTGRIPRGQENQLVALIPYSDQRLRPRRTKLYVMASVFVCLLLSGLAVFFLFPRSIDVKYIGVKSAYVSYDVQKRTIYLNITNTLNITNNNYYSVEVENITAQVQFSKTVIGKARLNNISIIGPLDMKQIDYTVPTVIAEEMSYMYDFCTLISIKVHNIVLMMQVTVTTTYFGHSEQISQERYQYVDCGRNTTYQLGQSEYLNVLQPQQ

SEQ ID NO: 13147 - DNA, 2732 bp, Homo sapiens
  CDS (679)..(1599)
gaagagatgccacttggcggccatggcagctgtagtatcggcgactccgggtcaaggcccggtcgagtgcagtaccatgggcagcaccgggtatagggcagagacagctttgtgtcaactttgctgctgaacccctaggacccatcgttagagacctgcaggactcctttcctcatcccaggctcggaggagagtttgctgggactggtgggctggtttcctgctctggggggcggatcaccttcggggccgcctcttggagacaggggcgcctagggaacgaacaggttcgcttgagtcacttacccgccgccgcctaagacattgtgccaccctcaatccgacaatcgaagaaatcgatcattcgcacattttccccattgacttttcccatctctgttaacccacgagaatctaatgactggcatctgagaacccagagcctgggaccttagattgctgtaagctttctctggtgctaatatcagcaaaaagggtctgttgccgggtacgttcaagaggaaggtgcctcgtgaacacatctgctggtgggaaggcctaaagaactggaaagcccactctcttggaaccaccacacctgtttaaagaacctaagcaccatttaaagccactggaaatttgttgtctagtggttgtgggtgaataaaggagggcagaatggatgatttcatctccattagcctgctgtctctggctatgttggtgggatgttacgtggccggaatcattcccttggctgttaatttctcagaggaacgactgaagctggtgactgttttgggtgctggccttctctgtggaactgctctggcagtcatcgtgcctgaaggagtacatgccctttatgaagatattcttgagggaaaacaccaccaagcaagtgaaacacataatgtgattgcatcagacaaagcagcagaaaaatcagttgtccatgaacatgagcacagccacgaccacacacagctgcatgcctatattggtgtttccctcgttctgggcttcgttttcatgttgctggtggaccagattggtaactcccatgtgcattctactgacgatccagaagcagcaaggtctagcaattccaaaatcaccaccacgctgggtctggttgtccatgctgcagctgatggtgttgctttgggagcagcagcatctacttcacagaccagtgtccagttaattgtgtttgtggcaatcatgctacataaggcaccagctgcttttggactggtttccttcttgatgcatgctggcttagagcggaatcgaatcagaaagcacttgctggtctttgcattggcagcaccagttacgtccatggtgacatacttaggactgagtaagagcagtaaagaagccctttcagaggtgaacgccacgggagtggccatgcttttctctgccgggacatttctttatgttgccacagtacatgtcctccctgaggtgggcggaatagggcacagccacaagcccgatgccacgggagggagaggcctcagccgcctggaagtggcagccctggttctgggttgcctcatccctctcatcctgtcagtaggacaccagcattaaatgttcaaggtccagccttggtccagggccgtttgccatccagtgagaacagccggcacgtgacagctactcacttcctcagtctcttgtctcaccttgcgcatctctacatgtattcctagagtccagaggggaggtgaggttaaaacctgagtaatggaaaagcttttagagtagaaacacatttacgttgcagttagctatagacatcccattgtgttatcttttaaaaggcccttgacattttgcgttttaatatttctcttaaccctattctcagggaagatggaatttagttttaaggaaaagaggagaacttcatactcacaatgaaatagtgattatgaaaatacagtgttctgtaattaagctatgtctctttcttcttagtttagaggctctgctactttatccattgatttttaacatggttcccaccatgtaagactggtgctttagcatctatgccacatgcgttgatggaaggtcatagcacccactcacttagatgctaaaggtgattctagttaatctgggattagggtcaggaaaatgatagcaagacacattgaaagctctctttatactcaaaagagatatccattgaaaagggatgtctagagggatttaaacagctcctttggcacgtgcctctctgaatccagcctgccattccatcaaatggagcaggagaggtgggaggagcttctaaagaggtgactggtattttgtagcattccttgtcaagttctcctttgcagaatacctgtctccacattcctagagaggagccaagttctagtagtttcagttctaggctttccttcaagaacagtcagatcacaaagtgtctttggaaattaagggatattaaattttaagtgatttttggatggttattgatatctttgtagtagctttttttaaaagactaccaaaatgtatggttgtcctttttttttgttttttttttttttaattatttctcttagcagatcagcaatccctctagggacctaaatactaggtcagctttggcgacactgtgtcttctcacataaccacctgtagcaagatggatcataaatgagaagtgtttgcctattgatttaaagcttattggaatcatg

SEQ ID NO: 13148 - protein, 307 aa, Homo sapiens
MDDFISISLLSLAMLVGCYVAGIIPLAVNFSEERLKLVTVLGAGLLCGTALAVIVPEGVHALYEDILEGKHHQASETHNVIASDKAAEKSVVHEHEHSHDHTQLHAYIGVSLVLGFVFMLLVDQIGNSHVHSTDDPEAARSSNSKITTTLGLVVHAAADGVALGAAASTSQTSVQLIVFVAIMLHKAPAAFGLVSFLMHAGLERNRIRKHLLVFALAAPVTSMVTYLGLSKSSKEALSEVNATGVAMLFSAGTFLYVATVHVLPEVGGIGHSHKPDATGGRGLSRLEVAALVLGCLIPLILSVGHQH

SEQ ID NO: 13149 - DNA, 1564 bp, Homo sapiens
  CDS (106)..(846)
gagttcgccagtggtccaggagccgcttttttccactcgggaagacttcagagaagtctcacaaaggactcggctggctgcttttctcagtgccgaagccgcgccatgctcgttctcagaagcggcctgaccaaggcgcttgcctcacggacgctcgcgcctcaggtgtgttcatcttttgctacgggccctagacaatacgatggaacgttctatgaatttcgtacttattaccttaaaccttcaaatatgaatgcgttcatggaaaatcttaagaaaaacattcatcttcggacctcttactctgaattggttggattctggagtgtagaatttggaggcagaacgaataaagtgtttcatatttggaagtatgataattttcctcatcgagctgaagttcggaaagccttagccaactgtaaggaatggcaagaacaatctatcattccaaatttggctcgcattgataaacaagagacggaaattacttacctgataccatggtccaaattagaaaagcctccaaaagaaggagtctatgaactagctgtttttcagatgaaacctggtgggccaggtctgtggggtgatgcatttgaaagagcaattaatgcccatgtcaatttaggctacacaaaagtagttggtgttttccacacagaatatggaggactcaacagagttcatgttctttggtggaatgagagtgcagatagtcgtgcagctgggagacataagtcccatgaggatcccagagttgtggcggctgttcgggaaagtgtcaactacctagtttctcagcagaatatgcttctgattcctgcatcattttcaccattgaaatagttttctactgaaatacaaaacatttcattaactgctctaagatgtgtctgctaatggtgcttaaattctcccaagaggttctcgcttttatttgaaggaggtggtaagttaattagttaatttgctgtgcttcttgcatttttgaaagttacatattctccactgctttaagaaataattcagttcactttcaccttggcatttcagtatctgttacacattagaagtagttgtcactatttcatcatcttggtttttcatttgttttagaatacctcttctgtattttgataactcattgctttatagcattttcttttactcaaataaggattttacatttcctttcctgagattttaaaaaaatttgcttagtaaaggttattttgtgatataaaatgggatttataaaaatattagattgtttatttctttactgtggaaaagtagaatgtcatctgtattaattattgcttttacattcattgattattagtcattctaacttggaaaataatgcaattgggtcacagtgttaaaaatctagaaaagacttgttggtttatatgctgaaattgttcatttataattaattttactaatttctccttagtttggatcactaacagagatcttgggacatttatttgttttaaagaaatatttatggttatggaaacgcttgccctaataaaaatcctgcatattcattgtt

SEQ ID NO: 13150 - protein, 247 aa, Homo sapiens
MLVLRSGLTKALASRTLAPQVCSSFATGPRQYDGTFYEFRTYYLKPSNMNAFMENLKKNIHLRTSYSELVGFWSVEFGGRTNKVFHIWKYDNFPHRAEVRKALANCKEWQEQSIIPNLARIDKQETEITYLIPWSKLEKPPKEGVYELAVFQMKPGGPGLWGDAFERAINAHVNLGYTKVVGVFHTEYGGLNRVHVLWWNESADSRAAGRHKSHEDPRVVAAVRESVNYLVSQQNMLLIPASFSPLK

SEQ ID NO: 13151 - DNA, 1733 bp, Homo sapiens
tctctgaatgctgagttctgccttaaaacagcacgggtcatgctagatgaaagggatctctgttttatactctcatctcttcgctattgccgtgggatgaaagacagcagaaggaaggcgtctaagttcagaacaaagtgagcaagaccagctggctgctgttggtagcagaggcacagccagcctgtcatggcactggggggccgaggtgagctgtgccccctcctcctgggcttgtgaccctctgccccccatgggagtttcactctggctcctaggctggaatgcggtggcaccatctcagctctctgcaacctccacttcccaggttcaagcgattctcctgcctcaccctcctgagtagctgggactacaggcgagcaccaccacagccggctaatttttctatttctagtagaaatggggtttcaccatgttggcaggctggtctcgaactctgacctcaagtgatctgcctgcctcagcctctgaaagtgctggattgcaggcgtgagccaccgcaccaggcctaaacagatttctttacaatctaccaccatgaacagcaagcattagcattgctccgtcccacccagcagcccgcagagaaaggaggcagctggcaccacactgggctttggagacactgcggggactgtggaccccaccctgctgcacggagctcctgcaaaagcaaacctgagaaccttgcatacagatccctgcaagaggcatctgtctccagtggtccagcctctccttccaaatgaaaagaatcaagtcacaggaattcatgggtctgtaaggaatcgctcccatctgtgcccaggagattaacaaaggcggtggctgcagctctgtgagcagtggagaaaaattaggcacaaccttgaaccctcaccacgtgcaggtcacacacagtgaagccacttgtaactgcacacttttctgtggaaacatcttcaccctttaccaggcttggcatggtctgaactggaaaccctgagaatgtttctgcagtaggacaggagggacatcttcccatgccttccctagaaccggaggccccggacttctctggaaaaccgcctgtctgcaggcccgattcaaatctatgggggctgcacttcccttttacattttgatgtgtcaaaggcttttggagtgaccaaaagcacagaggcagcgggtggggcgcctgggtggtccccaaggtcgctgccacccttgcccggggcagaggcataagcccacatatgctgtgacgctggccaccttttctcagcttctgaggctgcgatgcctcaggaactccagtttacagagaccagtgtgtttacttgtaaataaagcctctgggtggtggagacggtactttcagtgggtctgtgccccgtggcccctgtgcctgttcggtgggggtgtcccagagaagcctggcaccagtacccccgtacaaggcccagcggactctgccttcccctgacctggctttgcaccccagcccttcttgggccaaacatctttactccaccttcagggctcggggaggacccaggccccccagcacctggccttgcccctgcctcctggggctgttgcagactgaatgtcattttgacagcagtgtccaagaatcaggaagctgttctagaattcaggttggtatcatcataaatgagttcagaaaaagaacttctgtatattttactaaaataaaaagcttttacaat

SEQ ID NO: 13152 - DNA, 2839 bp, Homo sapiens
  CDS (161)..(2839)
gaaaggacgcgccggagccgggtgagtggccccgcaactgcccctgcccctgattcttccttgcctcgccgcgaaccccggcgcccgcgccgacccgccactgcctctgcccttttccagataacagaaagtaacgtgaaggaattcaggtgactcagacatggaggagagaagacctcatctggatgccaggcccaggaattcccataccaaccacagaggccctgtggatggagagttaccaccaagagctagaaatcaggccaataacccaccagccaatgctctccgaggaggagccagccaccctggaaggcatcctagggccaacaaccatcctgctgcttactggcagagggaagagagatttagggccatgggcaggaacccacatcaaggaaggaggaaccaggaggggcatgccagcgacgaagctagagaccaaagacatgaccaggagaatgacaccaggtggagaaatggcaaccaggactgtaggaaccgcagaccaccatggtccaatgacaacttccagcagtggcggactccccaccagaagcctacagaacagccacagcaggcgaagaaactgggctacaagttcttagaaagtcttctgcagaaagacccttctgaggtggtcatcacacttgccacaagtttagggctgaaagagctcctttctcattcttccatgaaatctaacttccttgagctcatctgtcaggttcttcggaaggcttgtagctccaaaatggatcgccagagtgttctccatgtactgggcatattgaaaaactccaaatttctcaaagtctgcctgcctgcttatgtggtagggatgatcactgaacccatccctgacatccgaaaccagtatccagagcacataagcaacatcatctccctcctccaggaccttgtaagtgtcttccctgccagctctgtgcaggaaacttccatgctggtttccctcctgccaacctctcttaatgctctgagagcctctggtgttgacatagaagaggaaacggagaagaacctggaaaaggtacagactatcattgaacatctgcaggaaaagaggcgagagggcactttgagagtggatacctacactctagtgcagcctgaggcagaagaccatgttgagagctaccgaaccatgcccatttaccctacctacaatgaagtgcacttggatgagaggcccttccttcgccccaatatcatttctggaaaatacgacagcactgctatctatctggatacccacttccggctcctgcgagaagatttcgtcagacctttacgggaaggtattttggaacttctccaaagctttgaagaccagggcctgaggaagagaaagtttgatgacatccgaatctactttgacaccaggattatcacccccatgtgttcatcatcaggcatagtctacaaggtgcagtttgacacaaaaccactgaagtttgttcgctggcagaattccaaacgattgctctatgggtctttggtatgcatgtccaaggacaacttcgagacatttctttttgccaccgtatctaacagggagcaggaagatctctgccgaggaattgtccagctctgcttcaatgagcaaagccaacagctgctagcagaggtccagccctctgactctttcctcatggtagagacaactgcatactttgaggcctacaggcacgtcctggaaggactccaggaggtccaggaggaagatgttcccttccagaggaatatcgtggagtgtaactctcatgtgaaggagccaaggtacttgctaatggggggcagatatgactttacccccttaatagagaatccttcagccactggggaatttctaagaaatgtcgagggtttgagacatcccagaattaatgtcttagatcctggccagtggccctcaaaagaagccctgaagctggatgactcccagatggaagccttgcagtttgctctcacaagggaactggctattattcaaggacctcctggaacaggcaaaacctatgtgggtctaaaaattgttcaggccctcctaaccaacgagtctgtttggcaaattagcctccagaagttccccatcttggttgtgtgttatactaatcatgctttggaccagtttctggaaggcatctacaattgtcagaagaccagcattgtgcgggtgggtggaaggagcaacagtgaaatcctgaagcagttcaccctaagggagctgaggaacaagcgggaattccgccgcaacctccccatgcacctccgaagggcctacatgagtatcatgacacagatgaaggagtcagagcaagagcttcatgaaggagccaagaccctggagtgcaccatgcgtggtgtcctacgggaacagtacctgcagaagtacatctcactccagcactgggaaagtctcatgaatggaccagtgcaggatagtgaatggatttgcttccagcactggaagcattccatgatgctggagtggctaggtcttggtgtcggttctttcacgcaaagtgtttctccagcaggacctgagaatacagcccaggcagaaggggatgaggaggaagaaggggaggaggagagttcgctgatagagatcgcagaggaagctgacctgattcaagcagaccgggtgattgaggaggaagaggtggtgaggccccagcggcggaagaaggaagagagtggagcagaccaggagttggctaaaatgcttctggccatgaggctagaccattgtggcactgggacagcagctggacaggagcaagccacaggagagtggcagacccagcgcaaccag

SEQ ID NO: 13153 - protein, 893 aa, Homo sapiens
MEERRPHLDARPRNSHTNHRGPVDGELPPRARNQANNPPANALRGGASHPGRHPRANNHPAAYWQREERFRAMGRNPHQGRRNQEGHASDEARDQRHDQENDTRWRNGNQDCRNRRPPWSNDNFQQWRTPHQKPTEQPQQAKKLGYKFLESLLQKDPSEVVITLATSLGLKELLSHSSMKSNFLELICQVLRKACSSKMDRQSVLHVLGILKNSKFLKVCLPAYVVGMITEPIPDIRNQYPEHISNIISLLQDLVSVFPASSVQETSMLVSLLPTSLNALRASGVDIEEETEKNLEKVQTIIEHLQEKRREGTLRVDTYTLVQPEAEDHVESYRTMPIYPTYNEVHLDERPFLRPNIISGKYDSTAIYLDTHFRLLREDFVRPLREGILELLQSFEDQGLRKRKFDDIRIYFDTRIITPMCSSSGIVYKVQFDTKPLKFVRWQNSKRLLYGSLVCMSKDNFETFLFATVSNREQEDLCRGIVQLCFNEQSQQLLAEVQPSDSFLMVETTAYFEAYRHVLEGLQEVQEEDVPFQRNIVECNSHVKEPRYLLMGGRYDFTPLIENPSATGEFLRNVEGLRHPRINVLDPGQWPSKEALKLDDSQMEALQFALTRELAIIQGPPGTGKTYVGLKIVQALLTNESVWQISLQKFPILVVCYTNHALDQFLEGIYNCQKTSIVRVGGRSNSEILKQFTLRELRNKREFRRNLPMHLRRAYMSIMTQMKESEQELHEGAKTLECTMRGVLREQYLQKYISLQHWESLMNGPVQDSEWICFQHWKHSMMLEWLGLGVGSFTQSVSPAGPENTAQAEGDEEEEGEEESSLIEIAEEADLIQADRVIEEEEVVRPQRRKKEESGADQELAKMLLAMRLDHCGTGTAAGQEQATGEWQTQRNQ

SEQ ID NO: 13154 - DNA, 2101 bp, Homo sapiens
  CDS (47)..(649)
agacaggagcagtcattcccttgtagggacaactagaagaaattttatgaataagcatcagaagccagtgctaacaggccagcggttcaaaactcggaaaagggatgaaaaagagaaattcgaacccacagtcttcagggatacacttgtccaggggcttaatgaggctggtgatgaccttgaagctgtagccaaatttctggactctacaggctcaagattagattatcgtcgctatgcagacacactcttcgatatcctggtggctggcagtatgcttgcccctggaggaacgcgcatagatgatggtgacaagaccaagatgaccaaccactgtgtgttttcagcaaatgaagatcatgaaaccatccgaaactatgctcaggtcttcaataaactcatcaggagatataagtatttggagaaggcatttgaagatgaaatgaaaaagcttctcctcttccttaaagccttttccgaaacagagcagacaaagttggcgatgctgtcggggattctgctgggcaatggcaccctgcccgccaccatcctcaccagtctcttcaccgacagcttagtcaaagaaggtaacgaggctcctgttttctcgcctgtcagacaacaaaagaaaaataaagtcacagatagttagaaaaatgccagtggctctttttggtgtcctctattactcattcttcatttaagagaatatctttgtatgggtgtatattgcctttcaaataataaaaggagtggacttgttaattgtaggaagtttgaaggaaaaaatatgcacacctgtacaaagacatattaagaaagactaatagcaaattaaaatctcatggaagacttgatgcctaggtcaaataccccgaaatcgatctggtaatctttttgcccttcgacacaaaatggcagcctttaactttcacccctattataagaacaaaaactgttcccctctcaaggtctagagaaactgatgctcggatattcattttgattgcactttttaagatactcattgtctcagttttagaaaacaattttaagtctgctgcattagaaggagtcttgttttaattttaaggcattaagggttggataggcatgcataccatggtttggttatagaataaaataaaagtcggctgtttacttgtaggaggataatgatagtcaaattacaatgcaacacaaaacagttatttttccttaaaaataaattaaaagagcttttgtgagaacatctgtttcttctgagaacttaaagttttcctcctacatatatgaagtcctagcttcattcatgcctatagtgaaagaaaggagtcatagttttcttgtagctaaggaaagaatagtaaattgagagtcaattggtcttattcagagactcttcctagtttttagcttaaaatcactcagatttatgacaattcagactctgtaattgttagatgttattagtattatgacattttaaagtatttccctgaagaaaattcacaatacaacacacatcttatttttgctattagccattttgcacacagaaagtcaacatagaatacaaatgttaatcattaattattttaaattatcctagccaacataacagaaaataattgcctttctagtttttttaaaaacctaagtgatgtctgtaacttcctttgtaatatatccaaaaattacgttattaggtggatagatatctgataaagcaaatacggcaaaatattagttatagaaactagatggtgggcatgtgaatgttcattgttcaatttgttcaacttttctgtatgtctggaaattattgtagtaaaatgtttggggggtggtgaggagaaaaataactttgctatggaagtaacatagtacctctgttatatggcttttccttaaactctgccatcttttacaaactagaggtttaaacctttgcttcctaattggaaaaggattaagaaaatgctgggtatggtaactcatgcctgtaatcctaacactttgggaagctgaggtaaaaaaattgcttgaggccaggagtttgagaccagtctgggaaacaaagcaagactctcttctctac

SEQ ID NO: 13155 - protein, 201 aa, Homo sapiens
MNKHQKPVLTGQRFKTRKRDEKEKFEPTVFRDTLVQGLNEAGDDLEAVAKFLDSTGSRLDYRRYADTLFDILVAGSMLAPGGTRIDDGDKTKMTNHCVFSANEDHETIRNYAQVFNKLIRRYKYLEKAFEDEMKKLLLFLKAFSETEQTKLAMLSGILLGNGTLPATILTSLFTDSLVKEGNEAPVFSPVRQQKKNKVTDS

SEQ ID NO: 13156 - DNA, 1600 bp, Homo sapiens
  CDS (121)..(1242)
gcttcccgtccgctgtcctctgctgccagtcccctgccccgggcaaagcccatctggtccgccgagcaggccggagctattgggagtggcggatcctcccaccccagccggatctgggccatggccgagcctggagagggactgccagaggaggtgctggcactcatcttccgccacctgtccctgagagaccgtgctgccgccgccagggtctgcagggcctgggccgccgctgctacctgcagcgccgtgtggcacgacacaaaaatcagttgcgaatgtgagctggaaggcatgctgccaccttatctgtccgcctgcctcgaccacattcacaacctacggctggaatttgagccatcgaggaagccgagccgccgggcggccatcgagctgctgatggttctggcgggccgtgccccggggctgcgaggcctgcgcctggagtgccgcggagaaaaaccgctcttcgacgcgggccgcgacgtcctggaggctgtgcacgctgtatgcggggcggccaaccagctacgccacctcgacctgcggcgcttgtccttcacactggacgacgcgctggtgctgcaggcggcgcgcagctgtcccgaactccacagcctttttctggacaacagtaccctagtgggcagcgtgggtcccggctcagtgctcgagctactggaggcctgcccgcgcctgcgcgctctcggcctgcacctagccagtttgtcgcacgccatcctcgaagcactggcggcgccagaccgagcgcctttcgcgctcttggctctgcggtgcgcgtgccccgaagatgcacgcgcgtccccgctgcccaacgaagcctgggtcgcgttgcgccgccgccaccctgggctggcagtggagctggagctggagcccgcgctgcccgctgagagcgtgacgcgcgtcctgcagccagccgtccccgtggctgcgctgcgcctcaacctctcaggcgacaccgtaggcccagtgcgcttcgcagcacaccactacgccgcaaccctgtgcgcgctcgaggtgcgcgcagccgcttcggccgagctgaacgccgcgctggaggagctggcggcgcgctgcgcggccctgcgcgaggtgcattgtttctgcgtggtgagccactcggtgctggacgccttccgcgcgcactgcccgcgcctgcgcacctataccctcaagctcacgcgcgagccgcatccctggaggcctacgctcgtggcgtgattgggcgacttctctcccccgtccccgtggacgtaagcgctctgagagggaacgggggggggtgtccaggcgcgccccgagtgctagtgccttcttttgggattgttgccccccgggtctttaccgagttgggaactgtgatggcatcgggaccagtcctgggcgccctgagaccactcgctgctctcaccctctgcagacgccccacccgctcggtcctggacacactgcccccctctcttgcctccacccctctgcggactctgcagctccgcggccccggcgcagggagagggagggcacgggcgcgggccgggcctcaagggtgagtgtgaaataaacaaatcctgcagtg

SEQ ID NO: 13157 - protein, 374 aa, Homo sapiens
MAEPGEGLPEEVLALIFRHLSLRDRAAAARVCRAWAAAATCSAVWHDTKISCECELEGMLPPYLSACLDHIHNLRLEFEPSRKPSRRAAIELLMVLAGRAPGLRGLRLECRGEKPLFDAGRDVLEAVHAVCGAANQLRHLDLRRLSFTLDDALVLQAARSCPELHSLFLDNSTLVGSVGPGSVLELLEACPRLRALGLHLASLSHAILEALAAPDRAPFALLALRCACPEDARASPLPNEAWVALRRRHPGLAVELELEPALPAESVTRVLQPAVPVAALRLNLSGDTVGPVRFAAHHYAATLCALEVRAAASAELNAALEELAARCAALREVHCFCVVSHSVLDAFRAHCPRLRTYTLKLTREPHPWRPTLVA

SEQ ID NO: 13158 - DNA, 2414 bp, Homo sapiens
  CDS (1851)..(2066)
gaacccaggaggcagaggttgcagtgagccaagatcatgccactgcactccagcctggcgacagagcgagactccatttaaaaaaaaaaacaccagggcatctgtaagccactttgggagtcaaaagaatgtagagctgggctggactccttagaagaaagttaagttctgagtgtgggaggaagtgcctgcacccccacatccagacagcccgtcactcctgctgccgaagactgacttgctgattcgggctctgcctccatagtgggggcacagagccagggagagtgcccacaggcccagggatcctgggtgtgggaccagggagaatgcccacaggccccagggcctttttgagcccagggcgctctctgcacaggcctgctacaacttcatccgaagcatggccgcctacagcctcctgctgttcctgctgcagatcaaggacagacacaacggcaacattatgctggacaagaagggccatatcatccacatcggtcagccagccacagcgccaccctcctctcccttcaccccggcacccaggggtggatagggatccccaccccacagagaggagaatgcccaggaccaccctgccaggagtgtcagggtccagctctgaggtccgaactgtcggccaccaagctgttctgctgtagagggtgcctggccccggccccagggagctggggcgagagccgccattgctctgagtcagaagctggagctgggcggagtggggctcgtccaggttcagtgccccagcttggctccttcctccacttcctcccttctctttctctgcctgctgccccaccacccaccccatcactgtctccaagaaaacacaacctgccttttgggggtggagggggtgctcctgttgcagagtccttttccactcctcaaaacagaccactcgtccttgcccgccctggctcctacccagtcacaggcagctctttggggttttgcagactttggcttcatgtttgaaagctcgccgggcggcaatctcggctgggaacccgacatcaagctgacggatgagatggtgatgatcatggggggcaagatggaggccacacccttcaagtggttcatggagatgtgtgtccaggctacctggctgtgcggtgagcctgggtgaggaccagggtggaggcggagggggtgtgtggaacgttctgagatcccctttaggatgaagggaatccggttccagagagtgaggtaggtgctagcagccacctgctgacctacacctgtcctttggtcacctctgtctgcccacctgtgccagtaaattcttgctctgggcatctaattccaaccaccttccccacaatcctgcccacgccttcagccatgggctctccctttctgggcatcccatccaccctgtcaccaaagcctgagcacctgccaccccacaggctacgtgccaaagatgggctttgtcccagtttcatatacaggtcacttggccaaggccacagtccaacctgggttcatccccactgccccgcagagaaaggcaggtcagcgtgtctgcatcccacccaggtgcagaagccatggccggcagccttatgtgggggacagggcaggacactcagcctgtccagagtgcgtatgggcagcccttgcctgggcagtacgggtgaccgagtgcagcagatcgaaagttgcctcggggatgtgcaagatgtggcaggcgaggtgggtggcaggagcccacacctgaggctgttggcatcagccagtccacaggactacaggcagggccaccacctaggctggcctctgcccaccgctccctcctgtctctccccaggccctacatggatgtggtcgtctccctggtcactatcatgttggacacgggcctgccctgttttcgcggccagacaatcaagttcttgaagcacaggtttagccccaacatgactgagcgcgaggctgcaaatttcatcatgaaggtcatccagagctgcttcctcagcaacaggagccggacctacaacatgatccagtactatcagaatgacatcccctactgaggaggggaccttcgagggcctctgccccatgtgcccttgaagctgccccacaatcatggagccctgcgacctacccgccctgccgccacatgcagtggaggagaggcctgtggcccgaagagcctggtagcgcctcctggggcagcacgtgggtggcgcaggcttagtaacgccgtggactgcagcgacaatcagtggatggtgctgtctatgcacaggtgtgagtcctctgtttgcactggacatattccctacctgttttatttcataggtacatgaagtattgtgtataaaaaaagagataagatttaaccaacatcaacaaaataaaaacccaaaatagtg

SEQ ID NO: 13159 - protein, 72 aa, Homo sapiens
MDVVVSLVTIMLDTGLPCFRGQTIKFLKHRFSPNMTEREAANFIMKVIQSCFLSNRSRTYNMIQYYQNDIPY

SEQ ID NO: 13160 - DNA, 1891 bp, Homo sapiens
  CDS (457)..(1437)
tgaaaaccagcttgtagttagggcccggagcgcatgccatagactcggcgactcaggaatcctgaagactctctgagcgacctggagcaccttggctgtgtccctgcctgccttcaccctcctccagtgcccccagtactgggcgtgagtccggaagtggccacaacccagcctggaccgtcgcttataaagctgtgtaaacctgtataagctcaggcgttgacagctggaaggcagctggcactggcagcccccttcattgcacctatctcccccatctcattgccacggctgaaccctccttctcaatcttggaacagcacccccttctttaagtcccccaggacccgacagcctgagccagatttctactgtgtcaagtggatcccttggaaaggagaacagacacccatcatcacccagagcactaacggcccttgccctctccttgccatcatgaacatcctctttcttcagtggaaggtgaagctccccccgcagaaggaagtgatcacatcggatgagctcatggcccatcttggaaactgcctcctgtccatcaagccccaggagaagtcagagggacttcagcttaattttcagcagaatgtggatgatgcaatgacagtgctgcctaaactggccacaggtctggatgtcaatgtgcgattcacaggcgtctctgattttgagtatacacccgagtgcagtgtctttgacctgctaggcatacctctgtaccatggctggcttgttgatccacagagtcctgaggctgtgcgtgcagttgggaaactgagttacaaccagctggtggagaggatcatcacctgcaaacactccagtgacaccaacctcgtgacagaaggcctgattgctgagcagttcccggagaccaccgcggcccagctgacctaccacggactgtgtgagctgacagcagctgctaaggagggtgaacttagcgtctttttccgaaacaaccactttagcaccatgactaagcataagagtcacttatacctactggtcactgaccagggctttctacaggaggagcaagtcgtatgggagagcctgcacaatgtggatggagacagctgcttttgtgactctgactttcacctgagacattccctgggcaaggggcctggagcagaaggtgggagtggctccccagaaaagcagctgcaggtagaccaggactacctgattgctctgtccctgcagcagcaacagccacgaggcccgctggggcttaccgacttggagctggcccagcagcttcagcaagaggagtatcaacagcagcaggcagcgcagccagtgcggatgcggacgcgggtcctgtcactgcaggggagaggagccacatctggacgcccagccggggagcgtcggcagaggccgaagcacgagtcagactgcattctgctgtagctctgccccagtgccaggctggcctgccccttcttccagaggctatggctagttggcttgctcccccgcctccacccctgagatgtgctggataacttatttatggactgttggggatgagagcaggcaacaaatgccaaggtcagacttggtaatgtccttgacctcacgtgctgctgccttctctgcctcccacccagggcaacactaggattggtgggtttctggttctcaactcccggtccctgaatagtcacacgtatgtacagactgaggctctggggtgaggtccctatccagaatgcatctcttctgcttcccatccctgctgcctggatgctcctgatcacctaggcaggcctgtctccagttgtttcagagcttaatttgggtttctatctcttatttgtaatgccttcctggggtttggaaataaaacttctggccgggc

SEQ ID NO: 13161 - protein, 327 aa, Homo sapiens
MNILFLQWKVKLPPQKEVITSDELMAHLGNCLLSIKPQEKSEGLQLNFQQNVDDAMTVLPKLATGLDVNVRFTGVSDFEYTPECSVFDLLGIPLYHGWLVDPQSPEAVRAVGKLSYNQLVERIITCKHSSDTNLVTEGLIAEQFPETTAAQLTYHGLCELTAAAKEGELSVFFRNNHFSTMTKHKSHLYLLVTDQGFLQEEQVVWESLHNVDGDSCFCDSDFHLRHSLGKGPGAEGGSGSPEKQLQVDQDYLIALSLQQQQPRGPLGLTDLELAQQLQQEEYQQQQAAQPVRMRTRVLSLQGRGATSGRPAGERRQRPKHESDCILL

SEQ ID NO: 13162 - DNA, 2041 bp, Homo sapiens
  CDS (189)..(1820)
gtgtcactcggcccgctcggcgcgccccttcccagccgcccttccgtaccggctctcgggctcttccggtctccggccgccccttacctgcaggctcttctcccgccgcggcccggcgctctccgagtcgcccctgcggactggtctcgcacagtgcctgggcaccgggcgccagacagacactggccatgacgagcggcgcaaccaggtaccggctgagctgctcgctccggggccacgagctggacgtacggggcctggtgtgctgcgcctatccgccgggagcctttgtgtccgtgtcccgagaccgcaccacccgcctctgggccccagacagtccaaacaggagctttacagaaatgcactgtatgagtggccattccaattttgtatcttgtgtatgcatcataccctcaagtgacatctaccctcatggcctaattgccaccggtggaaatgaccacaatatatgcattttctcactggacagtccaatgccactttatattctaaaaggccacaaaaatactgtttgtagtctatcatctggaaaatttgggacattacttagtggttcatgggacaccactgctaaagtctggctgaatgacaagtgcatgatgaccttgcagggtcatacagctgcggtgtgggcggtaaagatcttacctgaacagggcttaatgttgactggatcagcagacaagactgttaaactgtggaaggctggaagatgtgagaggactttttcagggcatgaagactgtgtaagaggtttggcaattttgagtgaaacagaatttctttcctgtgcaaatgatgctagtattagaaggtggcaaatcactggcgagtgtcttgaagtatattatggacatacaaattatatttatagcatatccgtttttccaaattgtagagactttgtgacaacagcagaggacagatctctgagaatctggaaacatggggaatgtgctcaaactatccgacttccagctcagtctatatggtgctgctgtgtgctcgacaatggtgacattgtggttggtgcgagtgatggcattattagagtgtttacagaatcagaagatcgaacagcaagtgctgaagaaatcaaggcttttgaaaaagaactgtctcacgcaaccattgattctaaaactggcgatttaggggacatcaatgctgagcagcttcctgggagggaacatcttaatgaacctggtactagagaaggacagactcgtctaatcagagatggggagaaagtcgaagcctatcagtggagtgttagtgaagggaggtggataaaaattggtgatgttgttggctcatctggtgctaatcagcaaacatctggaaaagttttatatgaagggaaagaatttgattatgttttctcaattgatgtcaatgaaggtggaccatcatataaattgccatataataccagtgatgacccttggttaactgcatacaacttcttacagaagaatgatttgaatcctatgtttctggatcaagtagctaaatttattattgataacacaaaaggtcaaatgttgggacttgggaatcccagcttttcagatccatttacaggtggtggtcggtatgttccgggctcttcgggatcttctaacacactacccacagcagatccttttacaggtgctggtcgttatgtaccaggttctgcaagtatgggaactaccatggccggagttgatccatttacagggagtagtgcctaccgatcagctgcatctaaaacaatgaatatttatttccctaaaaaagaggctgtcacatttgactaagcaaaccctacacaaatattaggtaaactgaaggaacttaatggaactgcacctgaagagaagaagttaactgaggatgacttgatacttcttgagaagatactgtctctaatatgtaatagttcttcagaaaaacccacagtccagcaacttcagattttgtggaaagctattaactgtcctgaaggtaaataaacactcttcaaaaatgtaaccag

SEQ ID NO: 13163 - protein, 544 aa, Homo sapiens [sequence omitted]

SEQ ID NO: 13164 - DNA, 2137 bp, Homo sapiens
  CDS (241)..(1860)
atcgccagcctccagtcctgcctccacgacgcgcccttccccaaggctggccgggtctggatgtcgccatcccctattcggagctacagacctcgcagctgaactcttaaaaagaacctcgcttcttcctcacggtgctccagctccacacaccgtactgagcctcgccagccaccgtacgcgaggtcgcggcgcgtccgtgacgtcactgatgtgcgcttctcccgcactaagggaaacatggctctagcgcggccggtgcggctcttttccctcgtgactcggttgctcctggcgccgcgacggggcctcacggtccgcagtcccgacgaacccctgccggtggtgcgcatcccagtggctctacagcggcagttggaacagcggcagagcaggcggcggaacctcccgaggccggtgctggttcgacccggaccgctgctggtttcggcgcggcggccggagttgaaccagccggcgcgcctcacactgggccgttgggagcgcgcgccgctagcctctcaaggctggaagagtcgacgcgcgcgtcgggaccacttctccatcgagcgcgcgcaacaggaggcgccagcggtgcgaaagctctcgtctaagggcagctttgctgacctgggcctggagccccgtgtgctgcacgcactacaggaggctgcgcctgaagtcgttcagcccacaaccgtgcagtctagcaccatcccctcactacttcgcggccgccatgtcgtttgcgccgcagaaaccggcagtggcaagactctcagctacctcctgccgctgcttcaacggctcttgggccagccaagcctggactcccttcctatccccgcgccccgaggcctggtccttgttccttcccgagaattggcccaacaggtgcgggctgtggcccaacccttgggccgctccttgggcctgctggtgcgggacctggagggaggccacggcatgcgtaggatcaggctgcagctgtccagacagccttcagcagatgtgcttgtggccactccaggggctctgtggaaggccctgaaaagtcgactgatcagtctggagcaactctccttcttggtgttggatgaggcagacacactgctggatgaaagcttcctggaactggtggactacatcttagagaagagccacatagcagaaggcccagctgacttggaagaccccttcaatcccaaagctcagttagtgctggtaggagccacatttcccgaaggtgtaggccagttgctgaataaagtcgccagcccagatgctgtcaccaccatcaccagctccaagctccactgtatcatgcctcatgtgaaacagacatttctgagactgaagggagcagataaggtggccgagctggtgcacatcctcaagcatcgtgacagagcagaaaggactggtccctcaggaactgttctggtgttctgtaatagctccagcactgtgaactggctgggatatattctggatgaccacaaaatccaacacctaaggttgcaggggcaaatgccagccttgatgagggtaggaatcttccagtccttccagaagagctcccgagacatacttctctgcacagacatagcctctcggggcctggacagcactggtgtggagctggttgtcaattatgatttccccccaacgctgcaagattacatccacagagcagggagagtgggccgtgtggggagcgaggtgccaggcaccgtcatcagttttgtgacccatccctgggatgtgagcctggttcagaagattgagctggcggctcgccgaaggagaagtcttccaggactagcatcctcggtgaaagagcctttgccccaagcaacctgattttgacaaatctgattaaaatgtgatgctagaacagggatctttcccagtatcttgagtgggtgaccacacttgtcagtgggaggctctgggctgccctgtcggctccttgagggcgggatgaactgctttgtgacttggaaaggtacgctgctggccagcattggagaagaagctgctgagcatggctttctgtagtctttagcaagacacaagtggattttgactttgtatcatgtcatgatttctaacaataaatgatgtttttatgtgc

SEQ ID NO: 13165 - protein, 540 aa, Homo sapiens
MALARPVRLFSLVTRLLLAPRRGLTVRSPDEPLPVVRIPVALQRQLEQRQSRRRNLPRPVLVRPGPLLVSARRPELNQPARLTLGRWERAPLASQGWKSRRARRDHFSIERAQQEAPAVRKLSSKGSFADLGLEPRVLHALQEAAPEVVQPTTVQSSTIPSLLRGRHVVCAAETGSGKTLSYLLPLLQRLLGQPSLDSLPIPAPRGLVLVPSRELAQQVRAVAQPLGRSLGLLVRDLEGGHGMRRIRLQLSRQPSADVLVATPGALWKALKSRLISLEQLSFLVLDEADTLLDESFLELVDYILEKSHIAEGPADLEDPFNPKAQLVLVGATFPEGVGQLLNKVASPDAVTTITSSKLHCIMPHVKQTFLRLKGADKVAELVHILKHRDRAERTGPSGTVLVFCNSSSTVNWLGYILDDHKIQHLRLQGQMPALMRVGIFQSFQKSSRDILLCTDIASRGLDSTGVELVVNYDFPPTLQDYIHRAGRVGRVGSEVPGTVISFVTHPWDVSLVQKIELAARRRRSLPGLASSVKEPLPQAT

SEQ ID NO: 13166 - DNA, 2516 bp, Homo sapiens
  CDS (83)..(685)
atttgccactcgatactgcctctgcaacccaggcgtcttccagtccacagacacctgctacgtgttgtccttctccatcatcatgctcaacaccagcctccacaatcccaacgcccgggacaggccgcctttcgagcgctttgtgtccatgaaccgcggcatcaacaatggtagcgacctgcccgaggaccagctgcggaacctcttcgacagcatcaagagtgagccattctccatccctgaggacgacggcaatgacctcactcacaccttcttcaatccagaccgggagggttggctgctcaagctagggggccgcgtgaagacgtggaaacggggctggttcatcctgaccgacaactgcctctactacttcgagttcaccactgacaaggagccacggggaattatacctcttgagaacctctcggtgcagaaggtggatgaccccaagaagccattctgcctggagctctacaaccctagctgccgaggccagaaaatcaaggcctgcaagaccgatggcgacggcagggtggtggagggcaagcacgaatcgtaccgcatctcagccaccagtgccgaggaacgtgaccagtggatcgagtccatccgagccagcatcacccgtgtccccttctacgacctggtctctactcggaagaagaagattgccagcaagcagtgagattcctggaggtggcactgggggctggtcaccctgagagtcccatcgcctgcagcacctggagacccacctcccaccccagtgcactcttttgggccacagacatcattgctgttccccgttacctcgagctgactctagaggggaaggcagagctcaggagggtgggtgggagctgcagtgggctcagagtccagcaatgaggccccctggcctgggcacccagctgcaggcccctgccctacgtgcactacaggaaggggtgaggagagcagccagaggaaaaccagccccagaatgctgcaacttctcttctctctggacttcggtgtcctcggctctgaaggcgctctctgcacttagatgctgtcagccctcaacgtaggaggggccgtggggtccctaagtgattcttctccctggcaaggctcttccttttcagggatatctctgccaacccttcccctgtcctcgggttgggcttggccctctctgcctgagagagctcagcacacacacagctcagacccacggacaggaccccgggacagaaccccgggagcactgccctaggagcctggaccccacgagctcagtcccagctctgcctctgactcgctgtgtaccctctgccaagtcatgcccattctctagttcttgcaaaactgcagtgcttggactagaaacgtattggcccctgctagccctgtgctccagcttccagctggagatggcagccgttatttgcggagcccaggctgactccggattcaacgttgctggggagagaaaagcagtatagactccaccttccaggatgtccatttcggggagaggagcaggtgggaccctcaagaaaatgacggagaacatcccagacagatgggactcaagcaggatgggtgctatatccaagaagccaagaagggagagtttcgtgcactgtggttaacaggagggccgcctggaggcagtggctgagccagaaagtaacacagagctcatgcttggagagatagagtcttggccatggctttcctgcaagaccactgacgagcagtcccatggtgataaagggcagtccggcgggtcccagcatctcgagaccctctgcagaagtattatcagagtagagctgacttccagtacccgggcagccagctctgtctccagggaggcctggcctggaggaggagtccactaacaggaaacacttctcaccccctcacacaggcccaggggagcccctggagggaaattccttggcaggggaacaggaaatgtggtcgcctctgccccactgccagcctgagtgggcaaggaagcaggtggatcccccagaaggaaccgcagctcgcgaggcacctctcctcgtccccacccacccccacatttgcacaccttccacagggtcaggatggagtagctgccttgcgaggtggtgagactcctgtctctggaggtctgcaagcactggtagtgatattgcagcagacaaggtctgggttgggcgtctgcaggaggagaccttgtgggacatctgaggacatccgcagattcttgtcagcctgtgaactaggccctgcctctgtcacctcattggtccatgaaggagcagccaggggtggtggaaggagcactgggctaggggtcaggggtcagagattctgtcctgctcctgggatgcactggctactcccttagtctactcccttcccctctctggtcctcagcttcctccatcatggaggagatgggatcatggattttctgggcataagtggctgttctgggagtcattccaaagagagaataagactcctgatcc

SEQ ID NO: 13167 - protein, 201 aa, Homo sapiens [sequence omitted]

SEQ ID NO: 13168 - DNA, 1583 bp, Homo sapiens
  CDS (1084)..(1476)
actcgatattgcgaaaccaaacttggtataagagctcccaacactgctaaactggtcatcgctaaacctttaaaaaaaaaaaaaaagcattcgctggtacccagatttccacaggagttaaacatttcctgcgcagctaaagcaagtcttaccagtaggaaaccggaacttgctaggactaagaaacttgaggctaggctgaccccatggttgttatgattagaaatccgaggccactggaaacccggagctgctgaccaacgagtcacagggtaacttcgccttcgcatggggaaacgggctggtgcagtggtgtcatcttggctcagtgcagcctcgacttcctgggatccagcgatcctcccgcttcagcctctagagtagccgagaccacaggtcacccctcgctgccaggctctcttcccggtccagagcccacaggatcctacaggaggggccaacaactgcttgcctttgaaacttgaaactctcggtctaaggttccttaggagcgtaaaaggcacagcgttttctgatcgcagcttcaggtctcccgcccctgtcccggtacctctcctgcaggacggaactctgtgggaacgctcgttgattctgatggttaactgtcagatatccttgatattggacataggatttggaagagggcaggagagaaaaatgaactgcaagactccagcacaagaggtgggattgctggcagatgtctgctccctctccaaacctaatgaacatctcaaagtgccatccactttcctatacccttgatctgtgaaatggatcactgacgctttctctgtctttccggaaatgcaaaacaggtgaattttcaagcgcttgaattgtctctcacacttttcagtcaagagtggggctataaactccttcctcataggaaataaggaactgccactgcttggaagtaaaacgtatttttcccataagctttcacatttcccaaaaaaaattatacatccagatgtaatccccctaagaggcttacagaccctaccaggagcgttcccacgcgaacgcatcatctcccaatcggatcctgaaaacaccatgcaaccaattccatccttttctggatcaacctgggcagaggacaggtgcagaggagcccagagaagggccttgacaagtcaggagacccaatttggggtcgcaattgtcactcactccccaggcgtttgctttgatcttcccctcccaccatactacttcttctgctacctggtttctccctggtatttgaggatcctccaattgccttctggtcttacagacgggagaataaaggaaaaatggcatcgtttccaccttaaaagttacaagcacttcaccagatggtacagcctaggtagagcctttgtaaaacaaatgcccgcccactgcttcaccctcctcatttccacctcagcaaagcattttagcagaaaagctgacccagagcagtagctccctgctataatcctagcactttgggaggctaagtcaggagtatctctttagcccagaagttcaataccaccctaagcacaaagtgagatcctgcctctacc

SEQ ID NO: 13169 - protein, 131 aa, Homo sapiens
MQPIPSFSGSTWAEDRCRGAQRRALTSQETQFGVAIVTHSPGVCFDLPLPPYYFFCYLVSPWYLRILQLPSGLTDGRIKEKWHRFHLKSYKHFTRWYSLGRAFVKQMPAHCFTLLISTSAKHFSRKADPEQ

SEQ ID NO: 13170 - DNA, 1093 bp, Homo sapiens
  CDS (54)..(659)
attggctgggttcggcgcagctaacagacggcggcagtgcgagaaagccgaagatggcggtccccgcggcgctgatcctacgggagagccccagcatgaagaaagcagtgtcactgataaatgcaatagatacaggaagatttccacggttgctcactcggattcttcaaaaacttcacctgaaggctgagagcagtttcagtgaagaagaggaagaaaaacttcaagcggcattttctctagagaaacaagatcttcacctagttcttgaaacaatatcatttattttagaacaggcagtgtatcacaatgtgaagccagcagctttgcagcagcaattagagaacattcatcttagacaagacaaagctgaagcatttgtcaatacttggtcttctatgggtcaagaaacagttgaaaagttccggcagagaattctggctccctgtaagctagagactgttggatggcagcttaaccttcagatggctcactctgctcaagcaaaactaaaatctcctcaagctgtgttacaactcggagtgaacaatgaagattcaaagagcctggagaaagttcttgtggaattcagtcacaaggagttgtttgatttctataacaagctagagactatacaagcacagctggattcccttacatgatgttttcgaagactgtttttttcatcacgctcctgccacctcattattttgcattgaagatacattgccaggttgtgttttctgaaggattcagtgacttgctttctgtaaattatatggcttatcacttcttagacaaataacaaccaatagagatcattgttaagaatactgaggttctaatatactttctttagttctgtgagccaacagtaattattaagaacactttccctttaaaggaaacaaaagtgaataccatattgtttttactgtcatagtgttgctttcttgcctgtcctgcttagtttttacttgctggatgataccataatgtatcaaggagcgtccatggatacaagataagatgtgtaccttagtagaatacagagctttggtaattacatgaataaaattaagaaaatagccat

SEQ ID NO: 13171 - protein, 202 aa, Homo sapiens
MAVPAALILRESPSMKKAVSLINAIDTGRFPRLLTRILQKLHLKAESSFSEEEEEKLQAAFSLEKQDLHLVLETISFILEQAVYHNVKPAALQQQLENIHLRQDKAEAFVNTWSSMGQETVEKFRQRILAPCKLETVGWQLNLQMAHSAQAKLKSPQAVLQLGVNNEDSKSLEKVLVEFSHKELFDFYNKLETIQAQLDSLT

SEQ ID NO: 13172 - DNA, 1911 bp, Homo sapiens
  CDS (96)..(968)
ccctgcgcggctgctggaccgacgggcgcacccaggtaggggggcggctgagccgcgcagtgcggaccctcgcggggaactgcgccgccgccaccatgtctcaggaaggtgtggagctggagaagagcgtccggcgcctccgggagaagtttcatgggaaggtatcctccaagaaggcgggggctctgatgaggaaattcggcagcgaccacacgggagtggggcgctccatcgtgtacggggtaaagcaaaaagatggccaagaactaagtaacgatctggatgcccaggatccaccagaagatatgaagcaggaccgggacattcaggcagtggcgacctccctcctgccactgacagaagccaacctacgcatgtttcaacgtgcccaggacgaccttatccctgctgtggaccggcagtttgcctgctcctcctgcgaccacgtctggtggcgccgcgtgccccagcggaaggaggtatcccggtgccggaaatgccggaagcgctacgagccagtgccagctgacaagatgtggggcctggctgagttccactgcccgaagtgtcggcacaacttccggggctgggcacagatggggtccccgtccccctgctacgggtgcggcttccccgtgtatccaacacggatcctccccccgcgccgggaccgggacccggatcgccgcagcacccacactcactcctgctcagctgccgactgctacaaccggcgagagccccacgtgcctgggacatcctgtgctcaccccaagagccggaagcagaaccacctgcccaaagtgctccaccccagcaaccctcacattagcagtggccccactgtggccacctgcttgagccagggtggcctcctggaagacctggacaacctcatcctggaggacctgaaggaggaggaggaggaagaggaggaggtggaggacgaggagggcgggcccagggagtgacccctgccaggtgcagatacaaaccagacacggtctgtggctactttgtgttattataagatatgagctcaaaccgagatatgaatgaccttggggagccatctgaggccaagatattgacgggggggattcctgggtcccattttcagcgcccagggtcacagatccacagtgggaagttctgtgggacacattggcactgagccacaaagaaggtgtggccagaacaacttgggctcctgctgaccaatgtcctctagggcctaggggacagaggaacacagagtcacagcttcaggggccgaatgagcatggcggccttcctgagagaatatgccccaccacgaaactcagcccagtagacaccatcctggtagcggcttcggtagtggccgccgtggtgccacacaccgttgaggttggagtgggcacaggcatggtaccaccagcctccccgctggtacagggcacagttacctgaggggagagagagagtccatgtcctctcaccagaataaaagcctctacctgcacctcacagtgcaaggcttttgccaggcatcccctggcccctcccattcttattgaatacaagccctgatcttccatctcctcagcaaaaaaataggagccctggccccccaactttcttcagagtaatagccttaattccttccctatctccttaccaaagtacaagtcacatctttcccaccttttctgcaaactaggagtctaccgttcattcctttatcaaagaaaagtatctacttcctttctagaataagagtactagctctcaccctctgccctttacttgaacaggagtcttgattctttttttgcctcatcagagaaggaatctggactccccatccccccaccaggataaaagtcctgacctttgttctcttgacggaataaaagcttgcttatcctt

SEQ ID NO: 13173 - protein, 291 aa, Homo sapiens
MSQEGVELEKSVRRLREKFHGKVSSKKAGALMRKFGSDHTGVGRSIVYGVKQKDGQELSNDLDAQDPPEDMKQDRDIQAVATSLLPLTEANLRMFQRAQDDLIPAVDRQFACSSCDHVWWRRVPQRKEVSRCRKCRKRYEPVPADKMWGLAEFHCPKCRHNFRGWAQMGSPSPCYGCGFPVYPTRILPPRRDRDPDRRSTHTHSCSAADCYNRREPHVPGTSCAHPKSRKQNHLPKVLHPSNPHISSGPTVATCLSQGGLLEDLDNLILEDLKEEEEEEEEVEDEEGGPRE

SEQ ID NO: 13174 - DNA, 1736 bp, Homo sapiens
  CDS (236)..(1225)
cttctaacagtatttctcaagtacttaacaaaaagatgaaaacttgaagtccaagccgtgctgctgattccgtctcacagtttaaagactgtccagaaactttaagctttcaaaactgtacattttaaaatcctgtgcgtttatcttcattttgctgggcagaaagccaaagtactggactgcctggttcagggctgaacgcctagtacacctgctaacttggagcttcagagccatggcaaccaaggagtcaagagacgccaaagcacagttggccctctcctcatcggccaatcagagcaaggaagtgcctgaaaacccaaactatgctctcaaatgtactcttgtgggacacacggaagcagtgtcatcagttaagtttagtcctaatggagaatggctagcaagttcttctgctgataggctaatcataatttggggagcatatgatggaaaatatgagaaaacactctatggtcataatttggaaatatcggatgttgcctggtcatcagattccagtcgtcttgtttctgcctcagatgataaaactctaaaattatgggatgtgagatctggaaaatgtttgaaaacactgaaggggcacagtaattatgtcttttgttgtaacttcaatccgccatccaaccttataatctcgggatcttttgatgagactgtaaaaatatgggaggtgaaaacaggaaagtgtctcaagactttgtctgctcattctgacccagtttctgctgttcattttaattgtagtgggtccttgatagtgtcaggtagctatgatggcctctgtagaatctgggatgctgcatcaggtcagtgtttaaaaacgctcgttgatgacgataaccctcctgtctcttttgtaaaattttctccaaatggtaaatacattctcactgcaactttggacaacactcttaaactatgggattatagcagaggcaggtgcctgaaaacatacactggtcaaaagaatgagaaatattgcatatttgccaatttttcagttactggtggaaagtggattgtgtctggttccgaggataacctggtttacatttggaaccttcagactaaagagattgtgcagaaattacaaggccatacagatgttgtgatctcagcagcttgtcatcctacagaaaacctcatcgcatcagcagcattagaaaatgacaaaacaattaaactgtggatgagtaaccactaatccctttgaaaatcaagtagtagagccaagttggccaaaaaacttggatatttaaaaagacggtttcttttaattttggcagtttggtattttaaaaattgtctattgttaaattttgggattcatacactacatttacaaaatgagatagttgaaaaagcacatctagaattcagcttctgactaccaatcttttttgagcaactttttgtaatttttatggatttatgtcacttttattacagggatatattgcatagtggtgaaatctgggcttagtataccctcacccaaatagtatacattgtacctagtaaatactttcccatctctcaccccactcccacctttgaaggctctagtgtctatgactctgctctccacgtccaggtgtacacattgtttatctcccacttacgagaacatgtggtttttgactttctgtatcattacttcacttaatggcctccaggtccatccatgttgttgcaaaagataagatttcatt

SEQ ID NO: 13175 - protein, 330 aa, Homo sapiens
MATKESRDAKAQLALSSSANQSKEVPENPNYALKCTLVGHTEAVSSVKFSPNGEWLASSSADRLIIIWGAYDGKYEKTLYGHNLEISDVAWSSDSSRLVSASDDKTLKLWDVRSGKCLKTLKGHSNYVFCCNFNPPSNLIISGSFDETVKIWEVKTGKCLKTLSAHSDPVSAVHFNCSGSLIVSGSYDGLCRIWDAASGQCLKTLVDDDNPPVSFVKFSPNGKYILTATLDNTLKLWDYSRGRCLKTYTGQKNEKYCIFANFSVTGGKWIVSGSEDNLVYIWNLQTKEIVQKLQGHTDVVISAACHPTENLIASAALENDKTIKLWMSNH

SEQ ID NO: 13176 - DNA, 1716 bp, Homo sapiens
gtgagagaatgcttgtctgtgaaagtcacctgtaagatgagaacttaaaaatgattgagttggctgggcacggtggctaatgcctataatcccagaactttggggggctgaggtgggtgaatcactttgagctcaggagtttgagaccagcctgggcaacatggggagacccttcctctactaaaaacacaaaaattaatcaggcatggtggctaacacctgtaatcccagctactcagctggctgagtctgaaggatcacttgagcctgggaggcagaggttgcagtgagcggagactgcaccaccgcactccagcctgggagacagagtgagaccctgtctccaatatatatatatattaaataaatggttaagagctaaccaaagcatatagaggaatagctttatagcaaataatgtaatgtggaaatgcatagggcaggatagaactttgcaacttcaagaaaatagaacacaggaggctaatgcctgtaatcccagcattttgggaggccaaggtgggagaattccttgagcccaggagtttaagtttaagaccagcctgggaaaagtagcaagacctcatcattatgaaaaaattaaaaatcagccaagtgcagtggtgcttgcccagagtcctagctactcaggaggctgaggcaggaggacccagcatgagcacaggagttcaaggctatggtgagctatgatcatgccctgcacttcagcttgggtgacagaccagaattccatctcaattttttaaacgaaaatagaagaaagacaggcgattggaacaagagaagactgaataagagtggtgtcataattggaggggtataaaggggtcaggtcttgaaaggactggcagaggactttgaggagatcagagtttgtctaagctctagagaagatcttgaagaatttttggcagtgaggtaaggttatctaatttatgtttatacatatctttctgaatattttgtagataatttgttggagtagtgaaagggagggaatgagaggatggatgctatttgcagtggttgagccataaatgggcattgggttagtctcagattatgacagtgaaaatggtgaaaatggacaagatccgaacatactttggatattgaatctaaaaggcctgttgatagagggaatatggatttatgaagggaataagaaggaaatgccaagcctgtctccagcgtttcgagtttagcaattgcttgaatggctgtgttatttaatgagatagtagcatcaagaggagaaatagtttttcagagtggatgaagttttgatatttagattatttaatattgagattcttctgatttatgcagtaaggaatataagataggcattaaaaataaggtgcaaaacttattttgaatccaaagcttaaaagaaatgtcaaagcaggaaacaaaatacaccagccatccatacagatggtacttaaaaccgcagagagatgagaaggtccaggattgagtcaaaaagaatcatcttttgttgtgtgatcaaccactccagtttgcctaagatgaggttttcctggcatgtgagactttcagtgctacacccagcaaagccctggcaaactcgatgagttgattatcctatctgtagttctgatgagagaatatctaagaagacatatttacctaagccagacaccagactagtgactagtggtctgcaccact

SEQ ID NO: 13177 - DNA, 2134 bp, Homo sapiens
aatttatattttacttatgccaaattatttatgataatttgccattgctatactgtaccagtgtcaaatgctgcagcctgccaagctgtgattttgtgaggcttgtccctatgtaggatgcaccgcaggcccctggccactgaaagagtgtgcagtggactgtgggtctcccatatgcggtgccgcccaaaggtggctttgcctcaagcaacctaccctgatgttttactcattggaatgtttttccccgattgtggatgacttcttttctgatggagagagtccaggagggatggaaaactcctggatttaagctcagcatcccccacatgggcttttcgatcatcttcaggcctgaagctgcacgacctgaagttcgcctgcatttatcagccctctttgtgctgctccttgccaccttgaggttcctgctggggaccatgtgtggttgtggcatgtgtgagcagaagggaggatgaggaaaaagagaagaaaccccggtactgacaagctgtttttgagtgccactgtttgccatcatctaagccactgaatcaagtgtatttcaggcttatttcaacattccaatgccctggttttcctgcttgaatctgttcgtggtcaaaggtttgggggaatttgtgaccctggaacatccccagagtgaaagatggagctgggccacatcagaataaggccttggccccatcctctcacagcctaggtgctctgcaggcatgctgactgtcctgattgcgatccagcccgaaattccctcctctgctttcaaaagtcaaatcccccattcttaggccacgctggtgtcacaagctcctgtcagggagctggggtttgggaatgtgctttgtgaactctgctttaaagtgaggggccgaggaaaacttagaaacaggcagagttggaagcagccaaatcacagtgggtgttgtgtgtgtgtgcgtgtgtgcatgcgtgcgtgtatgcgtgtgtgaaagcaggtggaccattccactttttagctcctattgatgcaccaaaccaagtgcctcatttctgtgccaaatgtttgccttggtcgttgtggacctccttctctaacttgcggtggcatgactgtcaggaggtgctggcattttcagcagatcctcatgtgttgaccctgatgtctttagcagaggcctctagcatctcggtttttcatccactgcaggaatgtggccacagggagcagaggtttgtactttccccaagaggtcctcatcctgagacggtctctacccatgtttaacccaaagagtgcaggccaggttccttatccttctgatgaaggatgagagagctcatttagaagtcagagcaaactagggtctcagtattgagaaacgcagcctgccagggaatcacagagacatcggggtgcccgcgatggccctcatgaagccatgcctcgacggcattcaggaagccctgcaaacgtgctttttgaactcattggccaggtgtgatttttacacaaggtaaacgtggtcaagggcatcggggaatttgccccaagcagatagctccctctgaggaaccaaaggaagcaagtttccacgatttctgaagagctggtattggaagtttctttcttccttttgtgttacatgtgcattaaacagaacaagctgtgtgtcatcacagattgtactgtgggctcagaaaccgtgagagagcccccaccgtggacaccggctctagggccacaggaaaaggaacgtttccaggcattttgtctccagggctcccgctggacaggcacgtactgccctggggagtaaatgcggagagttcacgaactgtgcccaacgcatgttatagccagggtcctactaactactcagtaaaagaacgtattgttgtattcctccagtgttaagctatagccatgttaaaagtcactgtgcatttattctcagcatcaaataccttgtaacgtcttctctgccttgttagtgcatatttttacttttctgatactgtaaagaatatatccagtatgtaaatgaatgttctataaatcttttgtatagtcattttctctgctccttaaatatcatctctattcagagtataataaaattatgaacttggt

SEQ ID NO: 13178 - DNA, 2968 bp, Homo sapiens
  CDS (255)..(1964)
agttctctgtagtgtttgccaatgttggagccgtctgcaaagtgtccccggcaagaagaggctgcctaccacaaggactttagcttactttttaaagattgaagaaaaaaaagaagacagaaaaagaagaactcaaagatacacaaagtaatttgaaccaaggctcagaagtttttggagccgtgagggatacagcagtttggtcaatattgtcttaacatgcttcaaataaatcagcttctctccaagataaaatggcaaacccaaaagagaaaactgcaatgtgtctggtaaatgagttagcccgtttcaatagagtccaaccccagtataaacttctgaatgaaagagggcctgctcattcaaagatgttctcagtgcagctgagtcttggtgagcagacatgggaatccgaaggcagcagtataaagaaggctcagcaggctgttgccaataaagctttgactgaatctacgcttcccaaaccagttcagaagccacccaaaagtaatgttaacaataacccaggcagtataactccaactgtggaactgaatgggcttgctatgaaaaggggagagcctgccatctacaggccattagatccaaagccattcccaaattatagagctaattacaactttcggggcatgtacaatcagaggtatcattgcccagtgcctaagatcttttatgttcagctcactgtaggaaataatgaattttttggggaaggaaagactcgacaagctgctagacacaatgctgcaatgaaagccctccaagcactgcagaatgaacctattccagaaagatctcctcagaatggtgaatcaggaaaggatatggatgatgacaaagatgcaaataagtctgagatcagcttagtgtttgaaattgctctgaagcgaaatatgcctgtcagttttgaggttattaaagaaagtggaccaccacatatgaaaagctttgttactcgagtgtcagtaggagagttctctgcagaaggagaaggaaatagcaaaaaactctccaagaagcgcgctgcgaccaccgtcttacaggagcttaaaaaacttccacctcttcctgtggtggaaaagccaaaactattttttaaaaaacgccctaaaacaatagtaaaggccggaccagaatatggccaagggatgaaccctattagccgcctggcgcaaattcaacaggccaaaaaggaaaaggagccggattatgttttgctttcagaaagaggaatgcctcgacgtcgagaatttgtgatgcaggtgaaggtaggcaatgaagttgctacaggaacaggacctaataaaaagatagccaaaaaaaatgctgcagaagcaatgctgttacaacttggttataaagcatccactaatcttcaggatcaacttgagaagacaggggaaaacaaaggatggagtggtccaaagcctgggtttcctgaaccaacaaataatactccaaaaggaattcttcatttgtctcctgatgtttatcaagagatggaagccagccgccacaaagtaatctctggcactactctaggctatttgtcacccaaagatatgaaccaaccttcaagctctttcttcagtatatctcccacatcgaatagttcagctacaattgccagggaactccttatgaatggaacatcttctacagctgaagccataggtttaaaaggaagttctcctactcccccttgttctccagtacaaccttcaaaacaactggaatatttagcaaggattcaaggctttcaggcagccttaagtgccttgaaacaattttctgaacaaggactggatccaatcgatggagcaatgaatatcgaaaaaggttctcttgaaaaacaagccaagcatctgagagagaaagcggacaataaccaggcacccccgggctccatcgctcaggactgcaagaaatcaaactcggccgtctagcagctcccagaacccgcggctgccaccgcatccttataaacctgtcagcacgcatgagggtgtctgtgttcagggaaatgaatgactaataccattatttgagtcttatgtgaagacaacactattctaacacgagagataatatacatggtactgtttattcaactggggaaaaataaaactttgagcatttcccttggaactcgagatcagatcataactcatttgcctagaggcagcagaaatctgatcctgctactggagcttaaaataacaagtaaagaaaagtgttagaaacaaagctaaaattttaacatgattaataatagagaagttgggtttggttctgttgttatgattgttttgtcgtggtgcttgtgttcagttatattctctctctctctcatttcaaatactgcttgacaattcgaaaatgaaccaatgatgtgctgtggaatgtgatggttgtcttcatatagagtcacatggtttctctttttatgcagatatttataatcttcatcctatatcagtaggaataactataaggtgcactacaaaaagatgtatgcaaacaaacatgttttaaatcaggtcagatatctgatgaaaaatacgaactaatgttaagagcaagtagtttcaacatactccaggaactgagaaacaaaacaaagcaattgtgggttttgagctccatatactcttagcaagtaagggggcgtcttgcccctatatatcatcttcccggattccactccctgttgtgggaatcgcgcccacccccatccgtgtgttgtagccactcacggtttgcatcaagagtgttttttgtaactgcctctggacttgggacagtgagtaggatcaaaaataaataatgtacatgacggggaagggaaaaacctgttggagttgcttccagccagccacgctccgggccagcatgttggaatccagcgtggagcagatgcagtaaaaatgtggttggtttctgtgtg

SEQ ID NO: 13179 - protein, 570 aa, Homo sapiens [sequence omitted]

SEQ ID NO: 13180 - DNA, 1768 bp, Homo sapiens
acaaccgtatgaaagaaatttataatccacaaaactttttcaggtcttaaggtaaaatagttccacagtctacaggtaaaaccaaggcaacaaaaatgcgtgcttatcttgattaagtaggtaattttatgcagaagatgtaacactttgtttgtagacagcatggtatgcatttctcagcaagacataaggaaaacaagattccaaaagatccattgtaaggaatggagattcttgtacaatcatatctagcagtaaataaacagattctctatttcttgttgtagttttatctgtctcctggccaattttcagtagactggaggatgcaagcgccagaaattctttaagacggtcttcaatgcttcctttgtgaattgtaaacaaagctgcagcaatctggttgatggctttggccaagcaatgtatgttgttgcaatgcccttctatagcagggctgtactgagacatcacattactggccagtgttggcaaagaaactgccacaaacaccatgagaaggcaggcaattttatactcttcttctggactaatgttttccgatttttgtgaagaaagagctacgaccaatgcaggatcaatctcacaaggtaatccggcagctgatgataactcatacacattcattgcaaccttcatatcagtttcccttggaatgtgatccttaaaatcttcaattgaacttacaagaaaaggaatgtggtaggataacacatctctaagtgcttcttgtgccaatgatcggaaggataaaattacaccaattattgtcatcctcttcaagacactgtcaacagatgataatcttttaaacagtgcagccatctggtctggtttgtcaaagctggtcctcatttgtgttaacacatcaacattctccaccacaagtttcttaagttcagcaacttgtgatgaaatatgccacataaggctttcacttagaaacttcataccatatgggcctagtagttctgataatgacctcatttctgatatgtcagaatattcctctgcattgaatgttaattcattttctgtaggtaagttcacaaacgctttcattgcaggaaaatatgctatatggccattgctgacttgtcgtaacaaagtttccaaataccaatttgtgtatagacttgtaatggttggctctccatgactgtctaaatgttgtgtttgttgaagaagcacattattaaatactcttgtaatatcaatctgcacatagtcttctattgactggagtacggtcatgtatgctcttacacttgttagaagttctgaaggttttgcaatttcctgtgtggcttgattatacatagtcatcccaacaattgacttggtaaagcgtatttccagatgagaagtcaaatattctcgtggggtaaaggtatgttcccataccaccatgtttggtacataatttatagagaagcataactcagaaagtgcagtgtgcaatttatcaaggttggtcacaaccagcctgtttttcctcatgctctcaacacctggtttctccctttcaggttcccctttcttaccagtctgcttttttgatttcttattcactgcttgactgatagttttggcacaatgcttgggtagcaactggtcactaagggtacactgttctgtgcaaatatcagtgatgagatttcgagcttgtttggccatttcatctaggaacatattacataaggaaagactgcgatctcccaatatgatgtcgctcttctggacatag

SEQ ID NO: 13181 - DNA, 1948 bp, Homo sapiens
  CDS (151)..(612)
aatctttttattaatatgagaacataattgttccagatctggaggccatcctttaagcttcttgcaacagtctgggagcaaagagtttactcgccactgggtagtgggccatggacaccccagtctccaccagaagttcgggattgcaaaatgggactctggcagcaaatttcaaactgtatgccagacctggccctttgcagtgatataaaatttttcttgaggtgtctggaaagatggctgaataggaacagctctgctctgcagctcccagcgagatcaacgcagaaggagataatttctgcatttcctactaaagtacccagctcatctcattgggactggttagacagtgggtgcagcccacagaaggcaagcagaagcagggtggggtgtcgcctcacccgggaagcgcaaggggtcagggaactccctcccctagccaagggaagctgtgagggactgtgccgtgaggaacggggcattccggcacagatactatgctttccccacggtctttgcaacccacagaccaggagattcccttgggtgcctgcaccaccagggccctgggtttcaagcaaaaaactgggcagccatttgggcagacactgagctagcagcaggagtttttttcataccctagtagcccctagaatgccagcgagacagaactgttcactcccctggaaaggggcactgaagccagggagccaagtggtctagctcagcagatcccacccccacggagcccaacaagctaagacccactgggttgaaattctcgctgccagcacagcagtctgatgtccacctggaatgcttgagcttggtgcagggaggggcgtctgccattactgaggcttgattaggcagtttccccctcacagtgtaaacaaagctgctgggaagtttgaactgggtggagcccactgcagctcggcaaagttgctgtagcaagagtgtctctctagattcctcctctctgagcagggcatctctgaaacaaaggcagcagccccagtcagggacttatagataaaactcccatctccctgggacagagcacctgggggaaggggcagctgtgggcacagcttcaggacacttaaacgttcctgcctgctggctctgaagagagcagcagatctcccagcacagtgctcaagttctgctaagggacagactgcctcctcaagtgggtccctgacccctgtgcctccggagtgggagagaccttccagcaggggtcaacagacatctggtgggtgcccgtctgagacgaagcttccagaggaaggaacaggcagcaatctgtgctgttctgtagcctgcgctggtgatacccaggtaaacagggtctggagtggatctccaacaaactccagcagacctgcagcagaggggcctgactgttataaggaaaactaacaaacagaaaggaatagcgtcaacatcaacaaaaaggacatccacacaaaaaccccatccgaaggtcaccagcatcaaagaccaaaggtagataaatccatgaagatgaggaaaaaccagtgcaaaaaggctgaaaattccaaaaaccagaacaccttttctcctgcaaaggatcacaactccttgccagcaagagaacaaaactggatggagaatgagtttgacgaatttacagaaggaggcttcagaaggtgggtaataacaaactcctctgagctaaaggagcatgttctaacccaatgcaaggaagctaaaaatgaaaaaaggctggaggaattgctaactagaataaccactttagagaagaacataaatgatctgatggagctgaaaaacacagcacgagaccttcgtgaagcatacagaagtatcaatagctgaatcgatcaagcagaagaaaggatatcagagattgaagatcaacttaatgacataaagtgtgacgtcaagattagag

SEQ ID NO: 13182 - protein, 154 aa, Homo sapiens [sequence omitted]

SEQ ID NO: 13183 - DNA, 1854 bp, Homo sapiens
  CDS (96)..(722)
gacagtttccagacacagaagctccagctacctctgagaccagtaactctaggagttactctgaagtttcaagaaatgaaagccttgaatctcctatgggagaatggggattccaaaaaggacaagagatatctgctaaagcagctacatgttttgcagagaagttgccttctagcaacctgctcaagaacagagctaaagaagaaatgagcctctctgatttgaacagtcaggaccgggttgaccacgaggagtgggaaatggtgcctaggcactcatcttggggggatgttggtgtgggtggcagtcttaaggctccagtgttaaacctaaaccagggaatggacaatggaagaagcactttggtggaagcaagaggtcagcaagtgcatgggaaaatggaaagggtagcagtgatgcctgcagggtctcagcaagttagtgtcaggttccaggtccattatgtcacaagcactgatgtgcaattcattgcagtaactggagaccatgagtgtcttgggagatggaacacttacatcccactccactataacaaggatgggttctggtctcattccattttcctgcctgcagatacagtggtggagtggaagtttgtgttggtagagaatgggggagttacccgctgggaagaatgcagcaatagattcctagaaactggccatgaggataaagtggttcacgcatggtgggggattcactgattcagtttgcaaagtaatggagaagctgtagaacaatgtggaagaggctgaggttgtggaacacactgaataaaataaaggcagtgtgactccaaattcagccatctgaattgtttaaatttgctagtggattttgtctactgtgcagaaatatatatgtctaatgtgcagaaatatatatgtgtgtatgtgtgtatatatatgcacacacacacagataatgcttccagtgaatgtgaacttcttttccctgtggcactgattgacagacttgtgctgatccattattactttagggcttgattctcttggggagtgacttggctaagcttcaggtgtaaactgtggtcacggagcaaaaacattaaccagctgcccagggttcaagcttgagcctttaggtgatctttaaactatggtagtaaaataagcctcactcaaacatagctgacttcctattggtacagcttgaaaagcactttttactacatacacattttatgcttaaaaagttaacatgatacgaaactgtgattagaaaatatctggtctggatgtgattagtaaggatacaagataatgttctaagactgcctaatgctttttgtttgattttcatctgccaggcgttgttatgtgctatgagggtagcaagtacgtctttgtcttaatgatctaaggctggtgtagaaacaaagggcctaatgagaaccaatcatcatggaagtcagttgcgggggcagcccataaggaaagggaaagtgagtggggttgggcataggctgagtgaggtggcctgaatgacacctcttagaggactgtgaagtacaggcacagcccgactgcagggagggatgcacccatcatttacccatgggagcatctgtaggaccatctctctcccacttcttctcccctcccccaccgcatctggccagatggactgtcctacagcaatcgtttccatctgtcaccctcttccctctcctttcataccagtcactatcttgggtaacaaatttatacaggacagtggtacagaaatacatctttgctctgagaatacagcaaatattaacttaaattattataactgaacaaataataaaacctgaattttaatatcttc

SEQ ID NO: 13184 - protein, 209 aa, Homo sapiens
MGEWGFQKGQEISAKAATCFAEKLPSSNLLKNRAKEEMSLSDLNSQDRVDHEEWEMVPRHSSWGDVGVGGSLKAPVLNLNQGMDNGRSTLVEARGQQVHGKMERVAVMPAGSQQVSVRFQVHYVTSTDVQFIAVTGDHECLGRWNTYIPLHYNKDGFWSHSIFLPADTVVEWKFVLVENGGVTRWEECSNRFLETGHEDKVVHAWWGIH

SEQ ID NO: 13185 - DNA, 2506 bp, Homo sapiens
  CDS (175)..(1152)
gttcggtggcccataggggaagatggcggctgctcctttggaggagcgggattgagaggatcggggtggggagaccaaacaagagagacatttctggctctgaaggcgaacgcttcgctggccatttaggagctctgctcaaagccagacgtatcctagaaggaaaacatcaccatggctacagaaattggttctcctcctcgttttttccatatgccaaggttccagcaccaggcacctcgacagctgttttataagcgacctgattttgcacaacagcaagcaatgcaacagcttacttttgatggaaaacgaatgagaaaagctgtgaaccgaaaaaccatagactacaatccatctgtaattaagtatttggagaacagaatatggcaaagagaccagagagatatgcgggcaattcagcctgatgcaggttattacaatgatctggtcccacctataggaatgttgaataatcctatgaatgcagtaacaacaaaatttgttcggacatcaacaaataaagtaaagtgtcctgtatttgttgttaggtggactccagaaggaagacgcttggtcactggagcttctagtggggagtttaccctgtggaatggactcactttcaattttgaaacaatattacaggctcacgacagcccagtgagggccatgacgtggtcacataatgacatgtggatgttgacagcagaccacggaggatatgtgaaatattggcagtcgaacatgaacaacgtcaagatgttccaggcacataaggaggcgattagagaggccaggtttatacacaatataccattttctgtagtccctattgtcatggttaaattattctctaagtgtattctgggtgcagagatgcatgggctctgtcagtttctgggaaactttctgcaccctataaacacaatatttttctttgttttcacacattcaccattttgctggcacctttctgaagtagtgttgtcccggtatcagcctttgcaatatgttagagatgtactgtctgccgcattttgcactggttttctcttttcatttatgattaataatgtgtatacgttattcctttttattatctactgtgtaagacaagaatatttcattccaaataaagaattcagtctttaattatgcaactgaataaaatctaaagcctacagaaaacaacttcagaattcacacaaagtggaaaaaggcttaagtgaagacctggttggcttggttatgccacgacttccaaaggaaagtataggactaaaaccctcacagataactggatgtggcaaacattaacggagtaatgaatgggttcttcaagctttgcagctgtaagcagatcattgtcaagaagactctaggacttttcttctgattcactgttgataacatcacttatgcaaatgtatacaataagtggagtttaaaatattttcagtgagttgtatatttttacacatcagtgaggtatgtatagtaaaactgggggaaaaagttccaaatacaagcctgaagaattgctgcagcctcagaataaagctaagcagcattctttaaggttgtgccacccatgtgtgggaggaggttgacatctttatggaaacatcatccactgtagtcatttgttcatactttcagaatcttaacagaaattgttggatgaacatgcttctgctttgtagattttgccttagtgtcatgcccatacattgagtttacacagctggtccttcataggattccaaagttcaagggagtttttagagttagttgagaaacttgatgatctttcactgctgggaaaaactgactccttcttgcagcagattctttggctttacacacaagtctgaatgtccttattttaaagttttcctcaaaggtgcaacattcatggaatagcttgccaggaagatgtgaaacttttctacagacctttgaaatggatgagaaacattgtatgtagggatgtttagcaatcagtcttttaatagacagcccacattgtttcagcttatttcatgaagtgtctgaggcagaagctgatgataattttgggagcagtattcgtgtgtgatttaaaagactgcaggaatactgcaaaaatagaatccatttattttcaccacttaaggcagcttcatgtgatttcctcgtatcatagaaaatagagaaggaacatggatagcattagcactaataatacacacttgaagttctcagaatactgatgattgaaaactcaaacaactgctctgttgaagtcttcttttgatgagatgcctatgttagctgacgacattcactttaagggcttcttcactggattcttccctctcctgtttataatgcagcacagtgtttttatttttccctgtctgagaagcacagattatctgttaaatgctgacttctttcccctgctgtgtgtcttcatgtaacagtttctcacccacggataataaatttgctacatgctctg

SEQ ID NO: 13186 - protein, 326 aa, Homo sapiens
MATEIGSPPRFFHMPRFQHQAPRQLFYKRPDFAQQQAMQQLTFDGKRMRKAVNRKTIDYNPSVIKYLENRIWQRDQRDMRAIQPDAGYYNDLVPPIGMLNNPMNAVTTKFVRTSTNKVKCPVFVVRWTPEGRRLVTGASSGEFTLWNGLTFNFETILQAHDSPVRAMTWSHNDMWMLTADHGGYVKYWQSNMNNVKMFQAHKEAIREARFIHNIPFSVVPIVMVKLFSKCILGAEMHGLCQFLGNFLHPINTIFFFVFTHSPFCWHLSEVVLSRYQPLQYVRDVLSAAFCTGFLFSFMINNVYTLFLFIIYCVRQEYFIPNKEFSL

SEQ ID NO: 13187 - DNA, 1303 bp, Homo sapiens
  CDS (60)..(641)
agcctctgtgcctcgttgtcccctggcgctacccggacatctctcagggtgccggcaccatgaagatctggacttcggagcacgtctttgaccacccgtgggaaactgttacaacagctgcaatgcagaaatacccaaaccctatgaacccaagtgtggttggagttgatgtgttggacagacatatagatccctctggaaagttgcacagccacagacttctcagcacagagtggggactgccttccattgtgaagtctcttattggtgcagcaagaacgaaaacatatgtgcaagaacattctgtagttgatcctgtagagaaaacaatggaacttaaatctactaatatttcatttacaaacatggtttcagtagatgagagacttatatacaaaccacatcctcaggatccagaaaaaactgttttgacacaagaagccataattaccgtgaaaggagttagcctcagcagttaccttgaaggactgatggcaagtacgatatcctcaaatgctagtaaaggccgagaagcaatggaatgggtaatacataaattaaatgctgagattgaagaactgacagcctcagcaagaggaaccataaggactccaatggcagcagcagcgtttgcagagaagtgatcgtgacagttggtagacaacatcgggtactccaggtctctcctaactgactatatatttatttgttattttaaaaatacaactatattttgggtagttttttttttttttttttttgataagttggtgtaaggctatgtgacttgatcaaaacagatgcagggcctctaaataaaagggatcatctgaaattaatgttgtttgaaattactatctgattttgagggttccagtatttctgtgaaaattcaacaagaactccttggaaactggtattgatattcagtctccttaaggtagatttttcaagcttttcatacattggaactccacctgactttggaccaaccccagaacagagcagagccacctcctatagacgcccattgccctgctgctgtacacttcagcagcttgcacaagggagctcacttaaaaggagaaattgtgtagttttaaaatatattttgtgcaaaataccttactatgctataaaccaccattaaaaaccagtgttttgatttggtacttaaatatttttggagtgaaaattatcactaaagtaacatgactccaacaaaagtatggtttcattataaaagagtactgtattgatttgcccaagttttgtaacttagtaaaggtattaacttccttgg

SEQ ID NO: 13188 - protein, 194 aa, Homo sapiens
MKIWTSEHVFDHPWETVTTAAMQKYPNPMNPSVVGVDVLDRHIDPSGKLHSHRLLSTEWGLPSIVKSLIGAARTKTYVQEHSVVDPVEKTMELKSTNISFTNMVSVDERLIYKPHPQDPEKTVLTQEAIITVKGVSLSSYLEGLMASTISSNASKGREAMEWVIHKLNAEIEELTASARGTIRTPMAAAAFAEK

SEQ ID NO: 13189 - DNA, 1812 bp, Homo sapiens
  CDS (304)..(1224)
gttcccaatcagtttccagccaacaccagggtgtcctagtccgcagaggtgtgggggacacactccataatctctacttttctttttgtgcagctgagtcatggagctttcagccccagcacatggctcctccttaactgcgtctgctcaacctccctcagccctgtgaacagcatccccgcacacagacgcagagcaggactctctctgctgccacttcaccttcctgagagaggaccagcggccagagcctcagtgactgccaccctggaggacagggcacaacaaccgtttctgaagagaatgggaggattccagaggggcaaatatggaactatggctgaaggtagatcagaagataacttgtctgcaacaccaccggcattgaggattatcctagtgggcaaaacaggctgcgggaaaagtgccacagggaacagcatccttggccagcccgtgtttgagtccaagctgagggcccagtcagtgaccaggacgtgccaggtgaaaacaggaacatggaacgggaggaaagtcctggtggttgacacgccctccatctttgagtcacaggccgatacccaagagctgtacaagaacatcggggactgctacctgctctctgccccggggccccacgtcctgcttctggtgatccagctggggcgtttcactgctcaggacacagtggccatcaggaaggtgaaagaggtctttgggacaggggccatgagacatgtggtcatcctcttcacccacaaagaggacttagggggccaggccctggatgactatgtagcaaacacggacaactgcagcctggaagacctggtgcgggagtgtgagagaaggtactgtgccttcaacaactggggctctgtggaggagcagaggcagcagcaggcagagctcctggctgtgattgagaggctggggagggagcgagagggctccttccacagcaatgacctcttcttggatgcccagctgctccaaagaactggagctggggcctgccaggaagactacaggcagtaccaggccaaagtggaatggcaggtggagaagcacaagcaagagctgagggagaacgagagtaactgggcatacaaggcgctcctcagagtcaaacacttgatgcttttgcattatgagatttttgtttttctattgttgtgcagcatactttttttcattatttttctgttcatctttcattacatttaaatctctggaccctggagcacttctaatgtatcaccccatggagtcattgttctaataatcaccaattcagactcagatcctcgtggtctatggagcatgctgcttgctgtctgtgcagctcccatttccccttcttcctgatagacttggagctgtgtgcctccactccaaggctgcctgcctgctgtaaacactattccactctgtctgccaacaactgcttcaggaatgggcctgagatcccatgcaggtccctgagaagtgagtaaaagtccgcagaggtggggatggaagatctctccttagatagaacctgtcttcctccctggcattgtggggtctgggcgtgacactgggactctcagcagctttgtgctgccaacctgagattgaaggcagtgcctcagagcagcacagagagttggggccccctgagccctgagccaccagccctgcagcctgccctatctccgcatttccagttgtattagccaatagatttcctacttatttaagctatttgagctccgggtctcttctacctgcattctaaaacattcaaagtaataaaaatttctccacatt

SEQ ID NO: 13190 - protein, 307 aa, Homo sapiens [sequence omitted]

SEQ ID NO: 13191 - DNA, 2063 bp, Homo sapiens
  CDS (8)..(1354)
gaacaatatggcggatggcgaggagccaatggctgttgatggtgggtgtggggacactggagactgggaaggtcgctggaaccatgtaaagaagttcctcgagcgatctggacccttcacacaccctgatttcgaaccgagcactgaatctctccagttcttgttagatacatgtaaagttctagtcattggagctggcggcttaggatgtgagctcctgaaaaatctggccttgtctggttttagacagattcatgttatagatatggacactatagatgtttccaatctaaataggcagtttttatttaggcctaaagatattggaagacctaaggctgaagttgctgcagaatttctaaatgacagagttcctaattgcaatgtagttccacatttcaacaagattcaagattttaacgacactttctatcgacaatttcatattattgtatgtggactggactctatcatcgccagaagatggataaatggcatgctgatatctcttctaaattatgaagatggtgtcttagatccaagctccattgtccctttgatagatggggggacagaaggttttaaaggaaatgcccgggtgattctgcctggaatgactgcttgtatcgaatgcacgctggaactttatccaccacaggttaattttcccatgtgcaccattgcatctatgcccaggctaccagaacactgtattgagtatgtaaggatgttgcagtggcctaaggagcagccttttggagaaggggttccattagatggagatgatcctgaacatatacaatggattttccaaaaatccctagagagagcatcacaatataatattaggggtgttacgtataggctcactcaaggggtagtaaaaagaatcattcctgcagtagcttccacaaatgcagtcattgcagctgtgtgtgccactgaggtttttaaaatagccacaagtgcatacattcccttgaataattacttggtgtttaatgatgtagatgggctgtatacatacacatttgaagcagaaagaaaggaaaactgcccagcttgtagccagcttcctcaaaatattcagttttctccatcagctaaactacaggaggttttggattatctaaccaatagtgcttctctgcaaatgaaatctccagccatcacagccaccctagagggaaaaaatagaacactttacttacagtcggtaacctctattgaagaacgaacaaggccaaatctctccaaaacattgaaagaattggggcttgttgatggacaagaactggcggttgctgatgtcaccaccccacagactgtactattcaaacttcattttacttcttaaggaaaatctccacataatagaaaactcatggaaataatatactttgtggatgctaagaagttgaatcgatgtcatttttagcaatagtgttgccacgatttgtctttttttatataatgaaccactcttttttaactttgtaaccttcccttgaagacagaattttggtgttggtgcttgtaagcattttcattaataatatgagaaatgatacctggagagagagattatgagcaaatgtattgcttcttttagaggaggaagcatacaacctcttttgtgtgaattttgttattatggtcaaagaatgcattcctaagttttcatttgagtacccaaatacacaaaaggtgtccctttaaggaaaataaagaattaagttttaaataacattacattttacaatctgacatctggagtatattgaacataggctatttcttgatataacactcatttaattgtggccatccaaatgaatattattgcagaatttatcttgttcataatgatttgtaaatggtgttatagctgaatacctgtgcatgaaaatgggcaatattttcatctgtttacttgtagtgccatagaggccaatatgcacaatattaactaatgccaagacatggctgtttaaaaaatttaatgttcaaacagttatcactgatgcttttgcactatttattaataaaatcatatattgtgt

SEQ ID NO: 13192 - protein, 449 aa, Homo sapiens
MADGEEPMAVDGGCGDTGDWEGRWNHVKKFLERSGPFTHPDFEPSTESLQFLLDTCKVLVIGAGGLGCELLKNLALSGFRQIHVIDMDTIDVSNLNRQFLFRPKDIGRPKAEVAAEFLNDRVPNCNVVPHFNKIQDFNDTFYRQFHIIVCGLDSIIARRWINGMLISLLNYEDGVLDPSSIVPLIDGGTEGFKGNARVILPGMTACIECTLELYPPQVNFPMCTIASMPRLPEHCIEYVRMLQWPKEQPFGEGVPLDGDDPEHIQWIFQKSLERASQYNIRGVTYRLTQGVVKRIIPAVASTNAVIAAVCATEVFKIATSAYIPLNNYLVFNDVDGLYTYTFEAERKENCPACSQLPQNIQFSPSAKLQEVLDYLTNSASLQMKSPAITATLEGKNRTLYLQSVTSIEERTRPNLSKTLKELGLVDGQELAVADVTTPQTVLFKLHFTS

SEQ ID NO: 13193 - DNA, 1189 bp, Homo sapiens
  CDS (64)..(399)
tgtgtccagcgcctatcttaaaagaagttggcatgaaagctgcactccaggtcagcatgaacgatggcctctcttttatctccagttctgtcatcatcaccaccacacactgtagcctccacaaaattgcatcaggccccacaacagctgcttgcatggaatagcagagaataccgcctgctccctccggacagcacactcctgaaaacggggagagaggagccaaacatgctcggtttacactttccttatttactgaatgagtggagggcagagacaggcctggagttacgcacactgagtgccccaacatggaaggaaacatcaggagggacaggaaacgttccctccttaaccaacagttttcaagaccttactggaggcactttattggctacataatcactccatgcggtgggcatcaggcagaatcctggtgcagacccaactttgaggtggaggatttcacagtttctttattttgaacttcccccaggctcccactaattcctctccattctatcctcctccctttcccacaaaagaaaacagaaaggagcagcagtgtttgataccgtatcatccagaggcctggttctctcccattatagggcaaacaagccctggcaagatatttcactcccgccccatgccatgcattaaaaatccaaaattgcctatattccacctgccaagcaagagatgctttcattattgaagttccaaatgtatacctttgagaacagtgccttctcgtcttaaaagagaggtcctcattttgtgagttgggagcagagggaattaaagaaagccatgatgcagggatttggccattcaagccgggcagccttcagagaatgtcatccctaatgacacatgcccgaatgaaggagcggggctgagcttgtcctgccttcgtattgaatgttgcctgtctgcctccttaatagcgggcctctgtgtgagcatttgacaagacttaaaactattcattgaagaaaatggatgatcccccaacaggaagatgcaaccccatgggctgcctgcttgaccacagaagtgcttccagctccagttgctcatctgagaactccccccaccacttgctgttaaaattgttaaaattaaaggccatgttgattgattttttaaactttatttccattttttttaataaaataagaattgg

SEQ ID NO: 13194 - protein, 112 aa, Homo sapiens
MASLLSPVLSSSPPHTVASTKLHQAPQQLLAWNSREYRLLPPDSTLLKTGREEPNMLGLHFPYLLNEWRAETGLELRTLSAPTWKETSGGTGNVPSLTNSFQDLTGGTLLAT

SEQ ID NO: 13195 - DNA, 3397 bp, Homo sapiens
  CDS (71)..(2701)
gaatgctgggagagtccgacgagcgctgcactaacgcaggatccggctgccgaaggtcctcgccagcaggatgaagttaaaggaagtagatcgtacagccatgcaggcatggagccctgcccagaatcaccccatttacctagcaacaggaacatctgctcagcaattggatgcaacatttagtacgaatgcttcccttgagatatttgaattagacctctctgatccatccttggatatgaaatcttgtgccacattctcctcttctcacaggtaccacaagttgatttgggggccttataaaatggattccaaaggagatgtctctggagttctgattgcaggtggtgaaaatggaaatattattctctatgatccttctaaaattatagctggagacaaggaagttgtgattgcccagaatgacaagcatactggcccagtgagagccttggatgtgaacattttccagactaatctggtagcttctggtgctaatgaatctgaaatctacatatgggatctaaataattttgcaaccccaatgacaccaggagccaaaacacagccgccagaagatatcagctgcattgcatggaacagacaagttcagcatattttagcatcagccagtcccagtggccgggccactgtatgggatcttagaaaaaatgagccaatcatcaaagtcagtgaccatagtaacagaatgcattgttctgggttggcatggcatcctgatgttgctactcagatggtccttgcctccgaggatgaccggttaccagtgatccagatgtgggatcttcgatttgcttcctctccacttcgtgtcctggaaaaccatgccagggggattttggcaattgcttggagcatggcagatcctgaattgttactgagctgtggaaaagatgctaagattctctgctccaatccaaacacaggagaggtgttatatgaacttcccaccaacacacagtggtgcttcgatattcagtggtgtccccgaaatcctgctgtcttatcagctgcttcgtttgatgggcgtatcagtgtttattctatcatgggaggaagcacagatggtttaagacagaaacaagttgacaagctttcatcatcttttgggaatcttgatccctttggcacaggacagccccttcctccgttacaaattccacagcagactgctcagcatagtatagtgctgcctctgaagaagccgcccaagtggattcgaaggcctgttggtgcttctttttcatttggaggcaaactggttacgtttgagaatgtcagaatgccttctcatcagggagctgagcagcagcagcagcagcaccatgtgttcattagtcaggttgtaacagaaaaggagttcctcagccgatcagaccaacttcagcaggctgtgcagtcacaaggatttatcaattattgccaaaaaaaaattgatgcttctcagactgaatttgagaaaaatgtgtggtcctttttgaaggtaaactttgaggatgattctcgtggaaaataccttgaacttctaggatacagaaaagaagatctaggaaagaagattgctttggccttgaacaaagtggatggagccaatgtggctcttaaagactctgaccaagtagcacagagtgatggggaggagagccctgctgctgaagagcagctcttgggagagcacattaaagaggaaaaagaagaatctgaatttctaccctcatctggaggaacatttaatatctctgtcagtggggacattgatggtttaattactcaggctttgctgacgggcaattttgagagtgctgttgacctttgtttacatgataaccgcatggccgatgccattatattggccatagcaggtggacaagaactcttggctcgaacccagaaaaaatacttcgcaaaatcccaaagcaaaattaccaggctcatcactgcagtggtgatgaagaactggaaagagattgttgagtcttgtgatcttaaaaattggagagaggctttagctgcagtattgacttatgcaaagccggatgaattttcagccctttgtgatcttttgggaaccaggcttgaaaatgaaggagatagcctcctgcagactcaagcatgtctctgctatatttgtgcagggaatgtagagaaattagttgcatgttggactaaagctcaagatggaagccaccctttgtcacttcaggatctgattgagaaagttgtcatcctgcgaaaagctgtgcaactcactcaagccatggacactagtactgtaggagttctcttggctgcgaagatgagtcagtatgccaatttgttggcagctcagggcagtattgctgcagccttggcttttcttcctgacaacaccaaccagccaaatatcatgcagcttcgtgacagactttgtagagcacaaggagagcctgtagcaggacatgaatcacctaaaattccgtacgagaaacagcagctccccaagggcaggcctggaccagttgctggccaccaccagatgccaagagttcaaactcaacaatattatccccatggagaaaatcctccacctccgggtttcataatgcatggaaatgttaatccaaatgctgctggtcagcttcccacatctccaggtcatatgcacacccaggtaccaccttatccacagccacagcgtaagtagtgtgaccccaaagtcctttcagagcagtatttatgatctaatttagtaactttactttgaagccccaaagtcattgtcaaatcaataagtaagaaccattgtgcataggattcctgagtccctgctacaaagagacatgtttttttaggaggtggcctgaatcactatgctaggaagtagctcctttgtcacactgttcagagtagttgactcctgttcctcagccattactaagacttgttaaagataatcaagtgtcccgtgattttggtataaagaaacagaattttagaaattattttttacatattctttttcttcaggcaagatgacacaaattatttttggaaaaatggtttcaaggggcatttgttattactgtttttccattttatttatttatttaatagactttgtattttagagcagtcttaggttcagaacaaaattgagcagaaagtacagagtgcccccactattgacatcctacgccacagtggtgtatttgttacaatcgatgaacctacatcaatgtctcattatcacccaaagtccacagtttacactctcagtgttgtacattctgtggattttaacaaatgtgtaatgacatgtatctattagtggcatttttaaaagaaaataattatacctggaaagtgaaatattgccactatttgaaaatttaaatgc

SEQ ID NO: 13196 - protein, 877 aa, Homo sapiens
MKLKEVDRTAMQAWSPAQNHPIYLATGTSAQQLDATFSTNASLEIFELDLSDPSLDMKSCATFSSSHRYHKLIWGPYKMDSKGDVSGVLIAGGENGNIILYDPSKIIAGDKEVVIAQNDKHTGPVRALDVNIFQTNLVASGANESEIYIWDLNNFATPMTPGAKTQPPEDISCIAWNRQVQHILASASPSGRATVWDLRKNEPIIKVSDHSNRMHCSGLAWHPDVATQMVLASEDDRLPVIQMWDLRFASSPLRVLENHARGILAIAWSMADPELLLSCGKDAKILCSNPNTGEVLYELPTNTQWCFDIQWCPRNPAVLSAASFDGRISVYSIMGGSTDGLRQKQVDKLSSSFGNLDPFGTGQPLPPLQIPQQTAQHSIVLPLKKPPKWIRRPVGASFSFGGKLVTFENVRMPSHQGAEQQQQQHHVFISQVVTEKEFLSRSDQLQQAVQSQGFINYCQKKIDASQTEFEKNVWSFLKVNFEDDSRGKYLELLGYRKEDLGKKIALALNKVDGANVALKDSDQVAQSDGEESPAAEEQLLGEHIKEEKEESEFLPSSGGTFNISVSGDIDGLITQALLTGNFESAVDLCLHDNRMADAIILAIAGGQELLARTQKKYFAKSQSKITRLITAVVMKNWKEIVESCDLKNWREALAAVLTYAKPDEFSALCDLLGTRLENEGDSLLQTQACLCYICAGNVEKLVACWTKAQDGSHPLSLQDLIEKVVILRKAVQLTQAMDTSTVGVLLAAKMSQYANLLAAQGSIAAALAFLPDNTNQPNIMQLRDRLCRAQGEPVAGHESPKIPYEKQQLPKGRPGPVAGHHQMPRVQTQQYYPHGENPPPPGFIMHGNVNPNAAGQLPTSPGHMHTQVPPYPQPQRK

SEQ ID NO: 13197 - DNA, 1055 bp, Homo sapiens
gtacgtctatgagagggaataatgtggatggatggaagtggagtagaaactacccctttgcctgtgagccccctgtcccgtcctttttcactcacataccagtcaccataccttcagtatccatcctacttcctttatagctgtttcacttggaaactaatgtgtgggagcacctcctgcagcaaactgctcttgaatcttaattcgatgagtcagtgactcttaaataccgattaagccttcaccctctcccccctcccccttttaaacttatgacctgtaagattcttgtaaaaaatagggttagggaaacatttttagaatttaataggattaaggacacctggagtgtgggcgatgttgagctagagtttacctttgtgaatattggacgtgtcttcaggaacggagaagaattttgaatgctaatttttacctttcagctatgtgaaaacacatgatttacgttgatgtaaccgaatttacattgctgaatatgttggtgatttcattaacttttagagcattccggtttaagttttagcttatttgggctttctccttgctttccaaacgaaatacttcgtcttttaaatgttttgctttaacgtgacagctgcgtggagaaataatggttggcaacacttttctattgagaagggatttaattccaagcagaatattagcatccgttttcttgtaattaagttcaacttttgtttatcttcggagggttggaaagagttaagtgagttaggacttagtcatttggatgcattcctttaaatacagtgcattactaaagtcagacctttttgaaataactttttaaagtctgtaccgagtcctgtttaacgtaaaatagctagagaaaggccaaacaacatttcctcctcccttactccctccccaccccaaaacacacgcttctgctgagcgggtgtagaaggaggtacattgctgcagtgtcagtgcagtgtagaagcagaagtggcagccatgttctgtctctttttgtgaatcgccctcatttgcatagcacactcttcattcat

SEQ ID NO: 13198 - DNA, 1974 bp, Homo sapiens
  CDS (49)..(1974)
aaactgcacgcgccgagccgggaagcttcgtccagcggtcgtgttgccatgggccggaggagagccccggccggtgggtcgctgggacgggcccttatgcgccatcagactcagcggagccgaagccatcgtcacactgactcctggttgcacacaagtgaactcaatgatggctatgattggggtcgtcttaatcttcagtcagtgactgaacagagctcccttgatgacttccttgctactgcagaacttgcaggaacagagtttgtagctgaaaaacttaatattaagtttgtgcctgctgaggctagaactggactactgtctttcgaggagagccagagaattaagaagctccatgaagaaaacaaacagttcttgtgtataccgaggagaccaaactggaaccaaaatactaccccagaagaactcaaacaagcagagaaagataactttctagaatggagacgtcagcttgtccggctagaagaggaacagaagctgatattgactccatttgaacgaaatttggacttttggcgccagctctggagagtcattgagagaagtgatattgtggtccagatagtagatgctcgaaacccactcctgtttagatgtgaggatttggaatgttatgtgaaagaaatggatgccaataaggagaacgtcattctgatcaacaaggcagacttgctgactgctgagcagcggagtgcctgggccatgtacttcgaaaaagaagatgtgaaggttattttctggtcagctttggccggagccattcccctgaatggtgactctgaggaagaggcaaacagagatgatagacaaagcaacacaactgagtttggacattccagtttcgaccaggctgaaatttcccacagtgaatccgaacatctcccagctagggattctccttcacttagtgaaaatcccacaacggatgaagatgacagtgagtatgaggactgtccagaggaggaggaagacgactggcagacgtgctcagaagaagacggtcccaaggaagaggactgcagccaggactggaaggaaagctctactgcagattctgaggctcggagcaggaaaaccccacagaagaggcagatacacaattttagccatctggtatccaagcaggagttactggagctctttaaggagctacacactgggagaaaggtgaaagatgggcaacttacggtcggactggtgggctaccctaatgttggtaagagttcaacaatcaacaccatcatgggcaacaagaaagtatctgtgtctgccacacctggtcacacaaagcactttcagactctctatgtggagcctggcctctgcctgtgtgactgtcctggcttggtgatgccatcttttgtgtctaccaaggcagaaatgacttgcagcggaatcctcccaattgatcagatgagagatcatgttcctcctgtatcactagtttgccagaatattccaagacatgttttagaagctacctatggcattaacatcataacgcctagagaggatgaagatccccaccgacctccaacatcggaagaactgttgacagcttatggatacatgcgaggattcatgacagcgcatggacagccagaccagcctcgatctgcgcgctacatcctgaaggactatgtcagtggtaagctgctgtactgccatcctcctcctggaagagatcctgtaacttttcagcatcaacaccagcgactcctagagaacaaaatgaacagtgatgaaataaaaatgcagctaggcagaaataaaaaagcaaagcagattgaaaatatcgttgacaaaacttttttccatcaagagaatgtgagggctttgaccaaaggagtccaggctgtgatgggttacaagcccgggagtggtgtagtgactgcatccactgcgagctctgagaacggggcggggaagccctggaaaaaacatggcaac

SEQ ID NO: 13199 - protein, 642 aa, Homo sapiens
MGRRRAPAGGSLGRALMRHQTQRSRSHRHTDSWLHTSELNDGYDWGRLNLQSVTEQSSLDDFLATAELAGTEFVAEKLNIKFVPAEARTGLLSFEESQRIKKLHEENKQFLCIPRRPNWNQNTTPEELKQAEKDNFLEWRRQLVRLEEEQKLILTPFERNLDFWRQLWRVIERSDIVVQIVDARNPLLFRCEDLECYVKEMDANKENVILINKADLLTAEQRSAWAMYFEKEDVKVIFWSALAGAIPLNGDSEEEANRDDRQSNTTEFGHSSFDQAEISHSESEHLPARDSPSLSENPTTDEDDSEYEDCPEEEEDDWQTCSEEDGPKEEDCSQDWKESSTADSEARSRKTPQKRQIHNFSHLVSKQELLELFKELHTGRKVKDGQLTVGLVGYPNVGKSSTINTIMGNKKVSVSATPGHTKHFQTLYVEPGLCLCDCPGLVMPSFVSTKAEMTCSGILPIDQMRDHVPPVSLVCQNIPRHVLEATYGINIITPREDEDPHRPPTSEELLTAYGYMRGFMTAHGQPDQPRSARYILKDYVSGKLLYCHPPPGRDPVTFQHQHQRLLENKMNSDEIKMQLGRNKKAKQIENIVDKTFFHQENVRALTKGVQAVMGYKPGSGVVTASTASSENGAGKPWKKHGN

SEQ ID NO: 13200 - DNA, 1760 bp, Homo sapiens
aagatctatgtcctggggggccgccagggcaagctcccggtgactgcttttgaagcctttgatctggaggcccgtacatggacccggcatccaagcctacccagccgtcgggcctttgctggctgcgccatggctgaaggcagcgtctttagcctgggtggcctgcagcagcctgggccccacaacttctactctcgcccacactttgtcaacactgtggagatgtttgacctggagcatggtgagcagtggctgttctgggctgtcctcccgctctctgtgggatggaggggcatagtgtgtacatgactagatctgacctcccctctcctgcagggtcctggaccaaattgccccgcagcctgcgcatgagggataagagggcagactttgtggttgggtcccttgggggccacattgtggccattgggggccttggtaagtctctatggggctggggagaggagggagtcccaagacaggaaagactagcccccagcatgtgtgtcaccttctgcccatctccaggcactccaggggtcagggctttgtgagctcttttccctatctatgaagtaggcaggatgtggtctgcctggcccagcactcagggtgttcctcagtgactgggggctctgtcaagcaccagcaagggtctacgagacagcagcaggacaaatgaccactgtatgcacagtcaagagaacatatagaaacataaatgaatgaacaaatgatgaacataggcaatgaggagcaaggccctgatagctcatcctggggtgataactactgggctattctctgggcttagggagcagaagggcctggagtccctacggcctgtgcctctcacagccttctctctccttcttgcaggaaaccagccatgtcctttgggctctgtggagagctttagccttgcacggcggcgctgggaggcattgcctgccatgcccactgcccgctgctcctgctctagtctgcaggctgggccccggctgtttgttattgggggtgtggcccagggccccagtcaagccgtggaggcactgtgtctgcgtgatggggtctgaaggcttggtgggagctgtccactggagcagctcattgccagaggcagctatttctatggctccttttgctgctgaggacactcactgtggctctgtgggatgagagaggcatgggggtgagcacttgaaacactgccttggggccttgggttaggggagcctttgtctttagtgcaggacacacatatgcttacacctacctttatcaccattcgttcatgaatcatgcctagctccatccttgccctgggacctactaggccttccatccaactgggaaatggggagaagcaaagctggccccatgctcttcagggtcagttcctatctggagttgaccaggcctaccccagttgccattcctgaaaaatctcagctgccaggctgcctttagggtccctgtagacccaggagagttgagagggtgggggacacagagagaatagagaggatgtgggaactgccagagggccggagcgcaggagttcaagtggaggaatgctggctttgagccctctacactgctggttgtatgaccttggacaagtcacttcacctctctgtgcctcagcatcctcatctataaatggggatctctgaaaccttcctaccctacctacctcacagggctgttgtgaggacccagggagtttggatgtggaagtaaaagtgctgctaaaacct

SEQ ID NO: 13201 - DNA, 2784 bp, Homo sapiens
  CDS (47)..(2257)
aaaaaaaaaaaaaaaagtagacgctcgggcaccagccgcggcaaggatggagctgggttgctggacgcagttggggctcacttttcttcagctccttctcatctcgtccttgccaagagagtacacagtcattaatgaagcctgccctggagcagagtggaatatcatgtgtcgggagtgctgtgaatatgatcagattgagtgcgtctgccccggaaagagggaagtcgtgggttataccatcccttgctgcaggaatgaggagaatgagtgtgactcctgcctgatccacccaggttgtaccatctttgaaaactgcaagagctgccgaaatggctcatgggggggtaccttggatgacttctatgtgaaggggttctactgtgcagagtgccgagcaggctggtacggaggagactgcatgcgatgtggccaggttctgcgagccccaaagggtcagattttgttggaaagctatcccctaaatgctcactgtgaatggaccattcatgctaaacctgggtttgtcatccaactaagatttgtcatgttgagcctggagtttgactacatgtgccagtatgactatgttgaggttcgtgatggagacaaccgcgatggccagatcatcaagcgtgtctgtggcaacgagcggccagctcctatccagagcataggatcctcactccacgtcctcttccactccgatggctccaagaattttgacggtttccatgccatttatgaggagatcacagcatgctcctcatccccttgtttccatgacggcacgtgcgtccttgacaaggctggaccttacaagtgtgcctgcttggcaggctatactgggcagcgctgtgaaaatcttctggaggctgggaagtccaagatcaaggcgtcagaagattcattgtctgtccttgaagaaagaaactgctcagaccctgggggcccagtcaatgggtaccagaaaataacagggggccctgggcttatcaacggacgccatgctaaaattggcaccgtggtgtctttcttttgtaacaactcctatgttcttagtggcaatgagaaaagaacttgccagcagaatggagagtggtcagggaaacagcccatctgcataaaagcctgccgagaaccaaagatttcagacctggtgagaaggagagttcttccgatgcaggttcagtcaagggagacaccattacaccagctatactcagcggccttcagcaagcagaaactgcagagtgcccctaccaagaagccagcccttccctttggagatctgcccatgggataccaacatctgcatacccagctccagtatgagtgcatctcacccttctaccgccgcctgggcagcagcaggaggacatgtctgaggactgggaagtggagtgggcgggcaccatcctgcatccctatctgcgggaaaattgagaacatcactgctccaaagacccaagggttgcgctggccgtggcaggcagccatctacaggaggaccagcggggtgcatgacggcagcctacacaagggagcgtggttcctagtctgcagcggtgccctggtgaatgagcgcactgtggtggtggctgcccactgtgttactgacctggggaaggtcaccatgatcaagacagcagacctgaaagttgttttggggaaattctaccgggatgatgaccgggatgagaagaccatccagagcctacagatttctgctatcattctgcatcccaactatgaccccatcctgcttgatgctgacatcgccatcctgaagctcctagacaaggcccgtatcagcacccgagtccagcccatctgcctcgctgccagtcgggatctcagcacttccttccaggagtcccacatcactgtggctggctggaatgtcctggcagacgtgaggagccctggcttcaagaacgacacactgcgctctggggtggtcagtgtggtggactcgctgctgtgtgaggagcagcatgaggaccatggcatcccagtgagtgtcactgataacatgttctgtgccagctgggaacccactgccccttctgatatctgcactgcagagacaggaggcatcgcggctgtgtccttcccgggacgagcatctcctgagccacgctggcatctgatgggactggtcagctggagctatgataaaacatgcagccacaggctctccactgccttcaccaaggtgctgccttttaaagactggattgaaagaaatatgaaatgaaccatgctcatgcactccttgagaagtgtttctgtatatccgtctgtacgtgtgtcattgcgtgaagcagtgtgggcctgaagtgtgatttggcctgtgaacttggctgtgccagggcttctgacttcagggacaaaactcagtgaagggtgagtagacctccattgctggtaggctgatgccgcgtccactactaggacagccaattggaagatgccagggcttgcaagaagtaagtttcttcaaagaagaccatatacaaaacctctccactccactgacctggtggtcttccccaactttcagttatacgaatgccatcagctgaccagggaagatctgggcttcatgaggccccttttgaggctctcaagttctagagagctgcctgtgggacagcccagggcagcagagctgggatgtggtgcatgcctttgtgtacatggccacagtacagtctggtccttttccttccccatctcttgtacacattttaataaaataagggttggcttctgaactac

SEQ ID NO: 13202 - protein, 737 aa, Homo sapiens
MELGCWTQLGLTFLQLLLISSLPREYTVINEACPGAEWNIMCRECCEYDQIECVCPGKREVVGYTIPCCRNEENECDSCLIHPGCTIFENCKSCRNGSWGGTLDDFYVKGFYCAECRAGWYGGDCMRCGQVLRAPKGQILLESYPLNAHCEWTIHAKPGFVIQLRFVMLSLEFDYMCQYDYVEVRDGDNRDGQIIKRVCGNERPAPIQSIGSSLHVLFHSDGSKNFDGFHAIYEEITACSSSPCFHDGTCVLDKAGPYKCACLAGYTGQRCENLLEAGKSKIKASEDSLSVLEERNCSDPGGPVNGYQKITGGPGLINGRHAKIGTVVSFFCNNSYVLSGNEKRTCQQNGEWSGKQPICIKACREPKISDLVRRRVLPMQVQSRETPLHQLYSAAFSKQKLQSAPTKKPALPFGDLPMGYQHLHTQLQYECISPFYRRLGSSRRTCLRTGKWSGRAPSCIPICGKIENITAPKTQGLRWPWQAAIYRRTSGVHDGSLHKGAWFLVCSGALVNERTVVVAAHCVTDLGKVTMIKTADLKVVLGKFYRDDDRDEKTIQSLQISAIILHPNYDPILLDADIAILKLLDKARISTRVQPICLAASRDLSTSFQESHITVAGWNVLADVRSPGFKNDTLRSGVVSVVDSLLCEEQHEDHGIPVSVTDNMFCASWEPTAPSDICTAETGGIAAVSFPGRASPEPRWHLMGLVSWSYDKTCSHRLSTAFTKVLPFKDWIERNMK

SEQ ID NO: 13203 - DNA, 2551 bp, Homo sapiens
  CDS (234)..(872)
aaaaaaaaaaaaaaagtgtgttagttcccggtcacctgagctccgggtgacgcggctgcggtagctgcggatacaagccttccgcgggtcctgcctggcgaccccgacctcctcctgctgtctctccgctccgccaccccgaacccgccaaggtcctgtccttttcctcctgtcctttgccagcgttgggccggaccgggccgagccgggccgcccgggcgcagtctttaaccatggcgtccctcttcaagaagaaaactgtggatgatgtaataaaggaacagaatcgagagttacgaggtacacagagggctataatcagagatcgagcagctttagagaaacaagaaaaacagctggaattagaaattaagaaaatggccaagattggtaataaggaagcttgcaaagttttagccaaacaacttgtgcatctacggaaacagaagacgagaacttttgctgtaagttcaaaagttacttctatgtctacacaaacaaaagtgatgaattcccaaatgaagatggctggagcaatgtctaccacagcaaaaacaatgcaggcagttaacaagaagatggatccacaaaagacattacaaaccatgcagaatttccagaaggaaaacatgaaaatggaaatgactgaagaaatgatcaatgatacacttgatgacatctttgacggttctgatgacgaagaagaaagccaggatattgtgaatcaagttcttgatgaaattggaattgaaatttctggaaagatggccaaagctccatcagctgctcgaagcttaccatctgcctctacttcaaaggctacaatctcagatgaagagattgaacggcaactcaaggctttaggagtagattagtcaaaagaagtcatactattttgcttacttataattatgtagtataaaccaagcacagtgcagatttcttttacaaaacacatgtattttgcaaaaaaaaaaaaaatgaagaccatgagtgaacagttgtttcctaacccatggctatttagaatcttttgccaaagaatgacaatgatgcaaaaatgggaacagtttggattttaattagaactgtttaggagtgatgatgtgtaaaaagttgacttctcttttgcatggcacagagaaattatattccttacttcatgtcagtttatgttctaaatctttttcactgaatataaaaatcttgttaaatgccattaggcaccaacttaaagagggttgtaaaaatattaaaagtatatcgttaattctgtatctgttgcttgtcttttgtaagtgattatgtgttatgaccataggtggttacagctgccaaattatttttaaatggtcaaaaagaagagtgctatttaaacatctgtcttaaacaaaaactgtcataacttttcttttttctttttccattaggagaacattctagttggtaaatttcaaaatgtgcttgacacctgccttaaatagcacagacctattgtgcacatctttaaattatttcagctggcagaaaagaattacatttaaaactgaaatcaaggcctcaatacaaagattatcctggctcttttctatctctgtgggcctaattgaaatatgtactcttattttagacacgcctctgttaaaacagaccaggttttcctggtctcagacctatgatgacttgtccctttgatgtcactactgtgaattgaatataattagtaaaaatagacgatgaataaataacactttatagtaagaaaacaatatattttggccatctaaaaatgagaattataattatatgaattataatttaaactgtttaattttgtttaatgtgtatattgaatcttccaaattgaagccattattctcaattaagtactacaactatgacaatgcttgacctacatttctaaaataaaaattcacattttttgataaataaactacagttttaccagaaattactatctaaatgtgtattagcagtattttttaaggtgaaattgccttggtatctaatgaatgtgtagacagggagataaaatgaaggattgccagactagttagaatagaatttaggattaggttagttttgaaaaatgatgttgtaatatatgggttctaacacatcctaccataaaaactggaggagatatgtgtaacctggttaatttgggatggtggacattttgggctaatactgacaaaatacatcttaggactagtatacatgtgacacggattgctaggaggaatgaaaaactaaactgtatagtttatattccgtaaaccattttataatgttcaaagattaggttttgttattgatagtattaaatacacagtttctcttaacagtgatgggtgaaaacattttaccggattatggaatgtttaccagaacatgttttgattcttgaatgtacataataatgccatctaacttatttacgttcttgtttacatgtgggagcttttgttttcaaaaattattttgttaaaaaatctcaataaagatttattattgttgttcttttctt

SEQ ID NO: 13204 - protein, 213 aa, Homo sapiens
MASLFKKKTVDDVIKEQNRELRGTQRAIIRDRAALEKQEKQLELEIKKMAKIGNKEACKVLAKQLVHLRKQKTRTFAVSSKVTSMSTQTKVMNSQMKMAGAMSTTAKTMQAVNKKMDPQKTLQTMQNFQKENMKMEMTEEMINDTLDDIFDGSDDEEESQDIVNQVLDEIGIEISGKMAKAPSAARSLPSASTSKATISDEEIERQLKALGVD

SEQ ID NO: 13205 - DNA, 2412 bp, Homo sapiens
  CDS (127)..(1047)
actaaaaagctcaagggagaattagccaaagagtttgcacctgctacaccaccttctactccacacaactcatctgttggtagtttgtctgagaatgaacaaaatactatagaaaaagaagagttcatgttgaaactcatgcgatctctttctgaagaagttgagagtagtgaaagtggagagctcccagaagtggatgtgaagtcggagcactcagggaagaaggttcagtttgcagaagcattagctacacacatcctttctcttgcaactgaaatggcagcttcccatttagataacaaaataattcaagaacccaaggttaaaaacccttgcttaaatgtgcaaagtcaaagaagtgtgtcgcctacttttttaaacccctcagacgaaaatttgaaaacattatgcaattttgcgggtgatctggcagcagaagtcattacagaagctgagaaaatagcaaaagtccgaaattgtatgcttttcaagcaaaagaagaacagttgttatgctgatggtgacgaagattataaagtagaagagaggttggatatagaggctgtagtgcacccaagagaagtggatccgtttattctttcattaccaccaagttcttgtatgtcaggtctgatgtataagtatcccagctgtgaaagtgtgacagatgaatatgcaggtcaccttattcagatactaaaacaggaaggtggtaatagtgagttgataatggatcagtatgccaataggcttgcctaccgatctgttaaatcaggattacaggaagcagctaagacaaccaaagtgcagtgcaactcaagaatgttccctgtgccaagttcacaagtgaaaacaaacaaggaactgttaatgttttcaaacaaagagcaccaccaagaagcagacaaaaagagacaaagtaaaagaaatgaaggttacttttgtaaaaatcaaacttgtgaaaggacctgtggaccatcagttgaacttagcccctggaaatggcaaactaggtgtgggagggaaggcaactcttggaaaagggaatgaggtagcataaggaaaggaaatggcttttcacctgatagaacacttcatctcgaagagttttgttcgatgcttggattaacctggaaatattaatatttttgtaaagtatattttgtcatagtttattatggtgctatataaaccaccaatatttcttaaaatctaggtccaaaaagacagtgtttaaaactggtagaagcaagtgggggcaatgtcacaaatcatgatttggcccttttctataactttatctagaaaaggatactaacatttagtttcttctctcattttgagaaacacaggcttctatgatttcagtggggttgacagtgttgcctaggaaatcctggcgttaaaatgggagattgaggtgtgggtagaggctttaagcattaagaggacttgtagtcagttgaacaactctgtgctgaatattatctaatttgatgagaaaaaggagtcgtcttaccggtttctgtccttggttctgtcctccttagcattatttattaatgatgtggaatactcatttgtggatgattcaacacaggctgaaaaaagaatctcattaacagaacaaaggttaaaaagaccaaatcaagctgaggttaaaataattatgtttaacatggataaatgcatttaggctcagaaaattaatgattaatatttgaacttaagtggggagcaaacctggcttgatggcattttgtcagaaaaagacctgtgtttccattgaccaaagttgtaatgtgacttaatgtaatgctgcgtggcattaaggttctggcacagagaaaaagcggggctcatccaggattggtggtgtgctcgttgcatatacagtgtccagggtctcacctccagagatgaagatttatgaagtcagtgaagggtcctgagaatctgcatgcttgataagcatcacagatgatttcagtgcaggtgattcagagacctcacttgaaaatatattgatttacaagatatgttgcatctgttgatgacaattgatatctatactgttcttttctgctacagagatcaaggtaggagataaagacttcggcgatttgggctgggcgcggtgattcacgcctgtaatcccagaactctgggaagccaatgggggtgggggtggatcacttgaggtcaggagttcaagaccagcctgggcaacatggtgaaaccccgtctctaccaaaaatacaaaaattagccaggcgtggtggcaggcacctgtaatcccagctacttgggaggctaaggcaggagaattgcttgaacctgggaggcagagattgcagtgagctgagattgtgccactgtactccatcctgggcgacagagacagactccgtc

SEQ ID NO: 13206 - protein, 307 aa, Homo sapiens [sequence omitted]

SEQ ID NO: 13207 - DNA, 1786 bp, Homo sapiens
  CDS (36)..(1394)
gtagggggtggcgctctccgttcggcggcgctcccatggcgcacattaccattaaccagtacctgcagcaggtgtacgaagccatcgacagcagagatggagcatcttgtgcagagttggtgtcttttaaacatcctcatgttgcaaacccacgacttcaaatggcctctccagaggagaagtgtcaacaagtcttggaacccccttatgatgaaatgtttgcagctcatttaaggtgcacttatgcagtggggaatcatgacttcatagaggcatacaagtgccagaccgtgatagtccaatatcctttgtcgttcatggcagctgtcccgcatagaacacatgcagtggattacttgggacttgagacccggaaacactgggccagttgctcatttctgcagttagaaaggaatgacagtgttttggaacagaagctcgtttcagctctttcacttggtacatcattcttgcgagcattccaggcccacaaagaagaaaactgggctctgcctgtcatgtatgcagtagcgcttgaccttcgagtgtttgccaataatgcagatcaacagttggtaaagaaaggaaaaagcaaagttggggacatgttggaaaaagcagcagagttactgatgagctgtttccgggtctgtgccagcgacacccgtgctggtatagaggactctaagaagtggggcatgctgtttctggtgaaccagctgtttaaaatctacttcaagatcaacaaactccatttatgtaaacccctaattagagcaattgacagctcaaacctgaaagacgattacagcactgcacagagagtaacatacaaatactacgttggacgcaaggctatgtttgacagcgattttaagcaagctgaggagtacctgtcatttgcctttgagcattgtcaccgttctagtcagaagaacaaaaggatgattctgatctatttgcttccagtaaaaatgctattgggtcacatgcccactgtggagctcctgaaaaagtatcacctgatgcagtttgcggaagtaaccagagctgtgagcgagggcaacctgctgctgctgcacgaggcgctggcgaagcacgaggccttcttcattcgctgcggaatcttcctcaccctggagaagctgaagatcatcacctacaggaacctctttaagaaagtgtatttgttactgaaaacacaccagctgtctctggatgcttttctggttgccttgaagttcatgcaggtggaggacgtggacattgacgaagttcagtgtattctggctaacttgatatacatgggacacgtcaaaggctacatatcgcatcagcatcagaagctggtggtcagcaagcagaacccatttcctcccctgtccacggtgtgttgaaagtacacggagccccgaggacggactcggctggttctggagtctttgtgagacttctttgaaggaggctttgcgtgaaggctgctcggctcacttttcctaagtgtggttcctgaaggctgtctttgtaactttttgtagttctttgtgtaaaaagcgtattctgaatttatacacatggtatgttcttcattatatcttccaggatacatctatttttatatattaaatttgaatgtgttatcaaaatgcttggttaacttaaggcacctttttaaaagcagaatttaatttgatttaaattttccagattttatagcttgcccgtatggatgctcctcaatttatgatggggttacatcccaataaacttattttatttgcctttg

SEQ ID NO: 13208 - protein, 453 aa, Homo sapiens
MAHITINQYLQQVYEAIDSRDGASCAELVSFKHPHVANPRLQMASPEEKCQQVLEPPYDEMFAAHLRCTYAVGNHDFIEAYKCQTVIVQYPLSFMAAVPHRTHAVDYLGLETRKHWASCSFLQLERNDSVLEQKLVSALSLGTSFLRAFQAHKEENWALPVMYAVALDLRVFANNADQQLVKKGKSKVGDMLEKAAELLMSCFRVCASDTRAGIEDSKKWGMLFLVNQLFKIYFKINKLHLCKPLIRAIDSSNLKDDYSTAQRVTYKYYVGRKAMFDSDFKQAEEYLSFAFEHCHRSSQKNKRMILIYLLPVKMLLGHMPTVELLKKYHLMQFAEVTRAVSEGNLLLLHEALAKHEAFFIRCGIFLTLEKLKIITYRNLFKKVYLLLKTHQLSLDAFLVALKFMQVEDVDIDEVQCILANLIYMGHVKGYISHQHQKLVVSKQNPFPPLSTVC

SEQ ID NO: 13209 - DNA, 1898 bp, Homo sapiens
  CDS (1)..(1086)
atggagttggggagttgcctggagggcgggagggaggcggcggaggaagagggcgagcctgaggtgaaaaagcggcgacttctgtgtgtggagtttgcctcggtcgcaagctgcgatgccgcggtggctcagtgcttcctggccgagaacgactgggagatggaaagggctctgaactcctgcttcgagcctccggtggaggagagcgccttggaacgccgacctgaaaccatctctgagcccaagacctatgttgacctaaccaatgaagaaacaactgattccaccacttctaaaatcagcccatctgaagatactcagcaagaaaatggcagcatgttctctctcattacctggaatattgatggattagatctaaacaatctgtcagagagggctcgaggggtgtgctcctacttagctttgtacagcccagatgtgatatttctacaggaagttattcccccatattatagctacctaaagaagagatcaagtaattatgagattattacaggtcatgaagaaggatatttcacagctataatgttgaagaaatcaagagtgaaattaaaaagccaagagattattccttttccaagtaccaaaatgatgagaaaccttttatgtgtgcatgtgaacgtgtcaggaaatgagctttgccttatgacatcccatttggagagcaccagagggcatgctgcggaacgaatgaatcagttaaaaatggttttaaagaaaatgcaagaggctccagagtcagctacagttatatttgcaggagatacaaatctaagggatcgagaggttaccagatgtggtggtttacccaacaacattgtggatgtctgggagtttttgggcaaacctaaacattgccagtatacatgggatacacaaatgaactctaatcttggaataactgctgcttgtaaacttcgttttgatcgaatatttttcagagcagcagcagaagagggacacattattccccgaagtttggaccttcttggattagaaaaactggactgtggtagatttcctagtgatcactggggtcttctgtgcaacttagatataatattgtaaaatgcttttcaagtgtgggttttgccctgattgttgcaaatacaatttccaccttctggaaaggtaggtttgctgtggaggaaataatgtactagatcattgtcacagaaaaaccaactatgatttatggttgtgttttcagaattcaacattaaagattaatgtttatttaaacgaacacattcctgcattcaggatgtgaggccatttaataaaaagggcacaaagcctgtcagagttttcaacggtgcttatagctgccagctggattccaaacaggtaccacattgtctctgagctaatgtttatatttttccattcaggcaccgaaatagttaatatttgaaataagtcttcaaaagaaaacataagagattattgagttcttgggactggatcctttatttcataagttcagatcatcttaaatgaaaatgccatgattatctgcagttaagtagatgacagctattctacatcagacttgatttttgtcagctaattacataattggtaagctataattgaaaccttatggcttaaaattccttaactcctttttgattcatgtttgtagtcatgttgtcaacagaggcaaagttaagcttgatgatggttaaaatcggtttgatagcaccatgggacatttttctaacaaaaataaatgcatgaagagacatagccttttagttttgctaattgtgaaatggaaatgctttacaggaagtaaatgcaaattacttttaagtgtgctttaaagaaaaatattttccccacaagagaaatttaaataaagaattttatttgtt

SEQ ID NO: 13210 - protein, 362 aa, Homo sapiens [sequence omitted]

SEQ ID NO: 13211 - DNA, 1858 bp, Homo sapiens
  CDS (4)..(1473)
tcgatgaaagatcctccggacttattggacaggcagaaatgcccgaacgccttggcgtctcttcgacatgccaaatggtttcaggcaagggcaaatggattaaaatcatgtgtaattgtcctccgcattctgcgtgatttgtgcaacagagtccccacatgggcaccattgaaaggatggccactagaacttatatgtgaaaagtctataggtacttgtaatagacctttgggcgctggggaggccttgagacgagtaatggagtgtttggcatctggaatactacttcctgggggtcctggtcttcatgatccttgtgagcgagacccaacagatgctctgagctatatgaccatccagcaaaaagaagatattacccacagtgcacagcatgcactcagactatcagcctttggccagatttacaaagtgctggagatggacccccttccatctagtaagccttttcagaagtattcctggtcagttactgataaagaaggtgctgggtcttcagctctaaagaggccatttgaagatggattaggggatgataaagaccccaacaagaagatgaaacgaaacttaaggaaaattctggatagtaaagcaatagaccttatgaatgcactaatgaggctaaatcagatcaggcctgggcttcagtataagctcctatctcagtctggccccgttcatgccccagtcttcacaatgtctgtagatgtggatggcacaacatatgaagcctcaggaccatccaagaaaacagcaaaacttcacgtagcggtgaaggtattgcaggcaatgggatatccaacaggctttgatgcagatattgaatgtatgagttccgatgaaaaatcagataatgaaagtaaaaatgaaacagtgtcttcaaactcaagcaataatactggaaattctacaactgaaacctccagtaccttagaggtaagaactcagggccctatcctcacagcaagtggcaaaaaccctgtaatggagctcaatgaaaaaagaagaggtctcaagtatgaactcatctcagagactggtggaagccatgacaagcgctttgtaatggaggtagaagtagatggacagaaattcagaggcgcaggtccaaataagaaagtggcaaaggcgagtgcagctttagctgccttggagaaactgttttctggacccaatgcggcaaataataagaaaaagaagattatccctcaggcaaagggcgttgtgaatacagctgtgtctgcagcagtccaagctgttcggggcagaggaagaggaactctaacaaggggagcttttgttggggcgacagctgctcctggctacatagctccaggctatggaacaccatatggttacagcacagctgcccctgcctatggtttacccaagagaatggttctgttacccgttatgaaatttccaacatatcctgttccccactactcattcttttagcaaatgacagaagctaattcctattgaacaacaatacagtacaacacagaatgttagagaaaaagcctttttatcctgctttctttgaacacatacttgatcaaaattatttgtaaagaacatctttcctactttttgattttaacaaatgcaaatttagttctctaaaacttgaaaaaaaaaaaagaaaccagttctgtgaaaacggtacctcatttctggaaaataacttataccagcccttctgttctagggaaataaaagtctagcagttcaaagtttaagttttaagagacgtatcagattatgtaaaattaaatttgtgaaggatgtatagagtctcaaacactgatcacaaataaactgctttgttgtaacacag

SEQ ID NO: 13212 - protein, 490 aa, Homo sapiens
MKDPPDLLDRQKCPNALASLRHAKWFQARANGLKSCVIVLRILRDLCNRVPTWAPLKGWPLELICEKSIGTCNRPLGAGEALRRVMECLASGILLPGGPGLHDPCERDPTDALSYMTIQQKEDITHSAQHALRLSAFGQIYKVLEMDPLPSSKPFQKYSWSVTDKEGAGSSALKRPFEDGLGDDKDPNKKMKRNLRKILDSKAIDLMNALMRLNQIRPGLQYKLLSQSGPVHAPVFTMSVDVDGTTYEASGPSKKTAKLHVAVKVLQAMGYPTGFDADIECMSSDEKSDNESKNETVSSNSSNNTGNSTTETSSTLEVRTQGPILTASGKNPVMELNEKRRGLKYELISETGGSHDKRFVMEVEVDGQKFRGAGPNKKVAKASAALAALEKLFSGPNAANNKKKKIIPQAKGVVNTAVSAAVQAVRGRGRGTLTRGAFVGATAAPGYIAPGYGTPYGYSTAAPAYGLPKRMVLLPVMKFPTYPVPHYSFF

SEQ ID NO: 13213 - DNA, 2019 bp, Homo sapiens
  CDS (5)..(1561)
gaagatggcggccgagagggaacctcctccgctgggggacgggaagcccaccgactttgaggatctggaggacggagaggacctgttcaccagcactgtctccaccctagagtcaagtccatcatctccagaaccagctagtcttcctgcagaagatattagtgcaaactccaatggcccaaaacccacagaagttgtattagatgatgacagagaagatctttttgcagaagccacagaagaagtttctttggacagccctgaaagggaacctatcctatcctcggaaccttctcctgcagtcacacctgtcactcctactacactcattgctcctagaattgaatcaaagagtatgtctgctcccgtgatctttgatagatccagggaagagattgaagaagaagcaaatggagacatttttgacatagaaattggtgtatcagatccagaaaaagttggtgatggcatgaatgcctatatggcatatagagtaacaacaaagacatctctttccatgttcagtaagagtgaattttcagtgaaaagaagattcagcgactttcttggtttgcacagcaaattagcaagcaaatatttacatgttggttatattgtgccaccagctccagaaaagagtatagtagggatgaccaaggtcaaagtgggtaaagaagactcatcatccactgagtttgtagaaaaacggagagcagctcttgaaaggtatcttcaaagaacagtaaaacatccaactttactacaggatcctgatttaaggcagttcttggaaagttcagagctgcctagagcagttaatacacaggctctgagtggagcaggaatattgaggatggtgaacaaggctgccgacgctgtcaacaaaatgacaatcaagatgaatgaatcggatgcatggtttgaagaaaagcagcagcaatttgagaatctggatcagcaacttagggaacttcatgtcagtgttgaagccttggtctgtcatagaaaagaactttcagccaacacagctgcctttgctaaaagtgctgccatgttaggtaattctgaggatcatactgctttatctagagctttgtctcagcttgcagaggttgaggagaagatagaccagttacatcaagaacaagcttttgctgacttttatatgttttcagaactacttagtgactacattcgtcttattgctgcagtgaaaggtgtgtttgaccatcgaatgaagtgctggcagaaatgggaagatgctcaaattactttgctcaaaaaacgtgaagctgaagcaaaaatgatggttgctaacaaaccagataaaatacagcaagctaaaaatgaaataagagagtgggaggcgaaagtgcaacaaggggaaagagattttgaacagatatctaaaacgattcgaaaagaagtgggaagatttgagaaagaacgagtgaaggactttaaaaccgttatcatcaagtacttagaatcactagttcaaacacaacaacagctgataaaatactgggaagcattcctacctgaagccaaagccattgcctagcaataagattgttgccgttaagaagaccttggatgttgttccagttatgctggattccacagtgaaatcatttaaaaccatctaaataaaccactatatattttatgaattacatgtggttttatatacacacacacacacacacacacacacacacacactctgacattttattacaagctgcatgtcctgaccctctttgaattaagtggactgtggcatgacattctgcaatactttgctgaattgaacactattgtgtcttaaatacttgcactaaatagtgcactgcaagaccagaaaattttacaatattttttctttacaatatgttctgtagtatgtttaccctctttatgaagtgaattaccaatgctttgaataatgttcacttatacattcctgtacagaaattacgattttgtgattacagtaataaaatgatattccttgtg

SEQ ID NO: 13214 - protein, 519 aa, Homo sapiens [sequence omitted]

SEQ ID NO: 13215 - DNA, 3232 bp, Homo sapiens
tttaagacatgaattacatttaaaattagaatatggttaatattaaataataggcctttttctaggaaggcgaaggtagttaataatttgaatagataacagatgtgcaagaaagtcacatttgttatgtatgtaggagtaaacgttcggtggatcccctgtctttgtaactgaggttagagctagtgtggttttgaggtctcactacactttgaggaaggcagcttttaattcagtgtttccttatgtgtgcgtacattgcaactgcttacatgtaatttatgtaatgcattcagtgcacccttgttacttgggagaggtggtagctaaagaacagttgagtataggtttttctccatttacagatgtctttggtcaaatattgaaagcaaacttgtcatggtcttcttacattaagttgaaactagcttataataactggtttttacttccaatgctatgaagtctctgcagggcttttacagttttcgaagtccttttatcactgtgatcttattctgaggggagaaaaaactatcatagctctgaggcaagacttcgactttatagtgctatcagttccccgatacagggtcagagtaacccatacagtattttggtcaggaagagaaagtggccatttacactgaatgagttgcattctgataatgtcttatctcttatacgtagaataaatttgaaagactatttgatcttaaaaccaaagtaattttagaatgagtgacatattacataggaatttagtgtcaatttcatgtgtttaaaaacatcatgggaaaaatgcttagaggttactattttgactacaaagttgagtttttttctgtagttaccataatttcattgaagcaaatgaatgagtttgagaggtttgtttttatagttgtgttgtattacttgtttaataataatctctaattctgtgatcaggtactttttttgtgggggttttttttttgtttttgttttttgttgttgttttttttgggccatttctaagcctaccagatctgctttatgaaatccaggggaccaatgcattttatcactaaaactatttttatataattttaagaatataccaaaagttgtctgatttaaagttgtaatacatgatttctcactttcatgtaaggttatccacttttgctgaagatattttttattgaatcaaagattgagttacaattatacttttcttacctaagtggataaaatgtacttttgatgaatcagggaatttttttaaagttggagtttagttctaaattgactttacgtattactgcagttaattccttttttggctagggatggtttgataaaccacaattggctgatattgaaaatgaaagaaacttaaaaggtgggatggatcatgattactgtcgataactgcagataaatttgattagagtaataattttgtcatttaaaaacacagttgtttatactgcccatcctaggatgctcaccttccaagattcaacgtggctaaaacatcttctggtaaattgtgcgtccatattcattttgtcagtagccaggagaaatggggatgggggaaatacgacttagtgaggcatagacatccctggtccatcctttctgtctccagctgtttcttggaacctgctctcctgcttgctggtccctgacgcagagaccattgcctcccccacagccgtttgactgaaggctgctctggagacctagagtaaaacggctgatggaagttgtgggacccacttccatttccttcagtcattagaggtggaagggaggggtctccaagtttggagattgagcagatgaggcttgggatgcccctgctttgacttcagccatggatgaggagtgggatggcagcaaggtggctcctgtggcagtggagttgtgccagaaacagtggccagttgtatcgcctataagacagggtaaggtctgaagagctgagcctgtaattctgctgtaataatgatagtgctcaagaagtgccttgagttggtgtacagtgccatggccatcaagaatcccagatttcaggttttattacaaaatgtaagtggtcacttggcgattttgtagtacatacatgagttaccttttttctctatgtctgagaactgtcagattaaaacaagatggcaaagagatcgttagagtgcacaacaaaatcactatcccattagacacatcatcaaaagcttatttttattcttgcactggaagaatcgtaagtcaactgtttcttgaccatggcagtgttctggctccaaatggtagtgattccaaataatggttctgttaacactttggcagaaaatgccagctcagatattttgagatactaaggattatctttggacatgtactgcagcttcttgtctctgttttggattactggaatacccatgggccctctcaagagtgctggacttctaggacattaagatgattgtcagtacattaaacttttcaatcccattatgcaatcttgtttgtaaatgtaaacttctaaaaatatggttaataacattcaacctgtttattacaacttaaaaggaacttcagtgaatttgtttttattttttaacaagatttgtgaactgaatatcatgaaccatgttttgatacccctttttcacgttgtgccaacggaatagggtgtttgatatttcttcatatgttaaggagatgcttcaaaatgtcaattgctttaaacttaaattacctctcaagagaccaaggtacatttacctcattgtgtatataatgtttaatatttgtcagagcattctccaggtttgcagttttatttctataaagtatgggtattatgttgctcagttactcaaatggtactgtattgtttatatttgtaccccaaataacatcgtctgtactttctgttttctgtattgtatttgtgcaggattctttaggctttatcagtgtaatctctgccttttaagatatgtacagaaaatgtccatataaatttccattgaagtcgaatgatactgagaagcctgtaaagaggagaaaaaaacataagctgtgtttccccataagtttttttaaattgtatattgtatttgcagtaatattccaaaagaatgtaaataggaaatagaagagtgatgcttatgttaagtcctaacactacagtagaagaatggaagcagtgcaaataaattacatttttccc

SEQ ID NO: 13216 - DNA, 1928 bp, Homo sapiens
  CDS (102)..(1520)
gaagtttttatacagccattgcacaagcatttttatcaaatgaaaaattgccaaatctagagtgtatccaaaatgccaacaaaggcacccacacaagtttaatgcagagattaaggaaccgaggagagagagaccgggaaagggagagagaaagggaaatgaggaggagtagtggtttgcgagcaggttctcggagggaccgggatagagactttagaagacagctttccatcgacactaggccctttagaccagcctctgaagggaatcctagcgatgatcctgagcctttgccagcacatcggcaggcacttggagagaggctttatcctcgtgtacaagcaatgcaaccagcatttgcaagtaaaatcactggcatgttgttggaattatccccagctcagctgcttctccttctagcaagtgaggattctctgagagcaagagtggatgaggccatggaactcattattgcacatggacgggaaaatggagctgatagtatcctggatcttggattagtagactcctcagaaaaggtacagcaggaaaaccgaaagcgccatggctctagtcgaagtgtagtagatatggatttagatgatacagatgatggtgatgacaatgcccctttgttttaccaacctgggaaaagaggattttatactccaaggcctggcaagaacacagaagcaaggttgaattgtttcagaaacattggcaggattcttggactatgtctgttacagaatgaactatgtcctatcacattgaatagacatgtaattaaagtattgcttggtagaaaagtcaattggcatgattttgctttttttgatcctgtaatgtatgagagtttgcggcaactaatcctcgcgtctcagagttcagatgctgatgctgttttctcagcaatggatttggcatttgcaattgacctgtgtaaagaagaaggtggaggacaggttgaactcattcctaatggtgtaaatataccagtcactccacagaatgtatatgagtatgtgcggaaatacgcagaacacagaatgttggtagttgcagaacagcccttacatgcaatgaggaaaggtctactagatgtgcttccaaaaaattcattagaagatttaacggcagaagattttaggcttttggtaaatggctgcggtgaagtcaatgtgcaaatgctgatcagttttacctctttcaatgatgaatcaggagaaaatgctgagaagcttctgcagttcaagcgttggttctggtcaatagtagagaagatgagcatgacagaacgacaagatcttgtttacttttggacatcaagcccatcactgccagccagtgaagaaggattccagcctatgccctcaatcacaataagaccaccagatgaccaacatcttcctactgcaaatacttgcatttctcgactttacgtcccactctattcctctaaacagattctcaaacagaaattgttactcgccattaagaccaagaattttggttttgtgtagagtataaaaagtgtgtattgctgtgtaatattactagcaaattttgtagatttttttccatttgtctataaaagtttatggaagttaatgctgtcatacccccctggtggtaccttaaagagataaaatgcagacattccttgctgagtttatagcttaaaggcctaaggagcactagcaacatttggctatattggtttgctagtcaccaacttctgggtctaaccccagccaaagatgacagcagaacaacataatttacactgtgatttatctttttgctgagggggaaaaaatgtaaatgttctgaaaattcactgctgcctttgtggaaactgtttcagcaaaggttcttgtatagagggaatagggaatttcaaaataaaaaattaagtatgttctgtg

SEQ ID NO: 13217 - protein, 473 aa, Homo sapiens
MQRLRNRGERDREREREREMRRSSGLRAGSRRDRDRDFRRQLSIDTRPFRPASEGNPSDDPEPLPAHRQALGERLYPRVQAMQPAFASKITGMLLELSPAQLLLLLASEDSLRARVDEAMELIIAHGRENGADSILDLGLVDSSEKVQQENRKRHGSSRSVVDMDLDDTDDGDDNAPLFYQPGKRGFYTPRPGKNTEARLNCFRNIGRILGLCLLQNELCPITLNRHVIKVLLGRKVNWHDFAFFDPVMYESLRQLILASQSSDADAVFSAMDLAFAIDLCKEEGGGQVELIPNGVNIPVTPQNVYEYVRKYAEHRMLVVAEQPLHAMRKGLLDVLPKNSLEDLTAEDFRLLVNGCGEVNVQMLISFTSFNDESGENAEKLLQFKRWFWSIVEKMSMTERQDLVYFWTSSPSLPASEEGFQPMPSITIRPPDDQHLPTANTCISRLYVPLYSSKQILKQKLLLAIKTKNFGFV

SEQ ID NO: 13218 - DNA, 1839 bp, Homo sapiens
tgaaaataatgtactgccccatgtattactgttccaaaaggagaaagctatgtagaaagatacattaagggtgaaaatagcaatacagtagatttgaataccttgatgttttgcattacttcatttatgtttacatcatgtttagaaatgttttcatttactgtggtctttggtcacttcagctcaaagacctagtgatggatatttctttgaggctttcatttatataattttattttgtacaatgttttttttaaatgtgcaaatactgtattcaagtgaaaaaaatacagtatttgtagataaccatagctactacacagttcttcggtagtcccagtgtagttatatcagtgtttactgaagggaacatcaaaatattaatggtatattataaaataaagactttcttaaaggaaaattgcacctattttacctttttaagagtaagccatgaaatcttgtaacatgtctcttaactatttataatgaaaagtggcatttgggtatagtcaccacagcaatgttctacatccctaagattatctaggtaggacatgtcaaagatgactgttgtcattctggaggtcctattagagaatattataaaagggtgaccttgtaggaaggatctgagtcctccccctgaggttctctttttcttggtgctttattagcaactctggatatttttataaaactagttacattataaacggtttcaaacatgtttaatttacattaggtttttatgtaagagtgtcatggaagcactcagcaagcaggctgattgcaatagactcagacatgcgaataaatgtaattgagagtctattcatggtgaggagtacatcccagtgcctttaacctggatttctaatcttaagtgaaatgggtgcagcattcctttggaaaaaaaaatctttttattttcaagtgataattttgtgttttcctcatataagttttctccagagcacccaccttctcttccttcttggtctgtcattatattgcaaaatatttttcctctgaatgaaattatcacaggttgtctcaagcacaaccaactgaatgtctcttaactgtggggaccaatagggagagagcctggggtctacaagaggagacacatcatcaaatgtttgaatgatcacaaattaagacattatcagcccagtaaatttcttgcttaatgtttttccaagttctggcttgaatatttcttattaaagctatcttatgtgggtactttattttgaaaggtattatagtttgtatatttaacagtaaggaggaaactgtaaccaaaattagtatttctctatacgtattggtacttgaagattcctttcaaaagaaatccagcgttttcctaattttagtacttaatttctctttttaatttaagtgatctttctaattcgaaagctgtgttctttttgaataccgtgcatgggggttaagctgatgttaaaacagtttgcaataaaaaaaaatgaatcagcttaagtcatttaatcatttcaagtgcattctgcatcctttaaaaataagtttaagaaatttaagagaattgtgttttcattaagttttgcatatcttttgttatgccatgtaaattccctttttcgtatgattaaaggaaggttatgataaaatgattagttcatttacattcacttgtagcaattacatgagaatttgaattttgtcgtgtttgggtttgttcattcctgtgaatgatggtacagttaggtgagattttctgttatggtacccaaactcaccatttggtcctctttaatctttgagggtttcaataaaaattgttcactc

SEQ ID NO: 13219 - DNA, 2779 bp, Homo sapiens
  CDS (111)..(1634)
aaaactatttgagacataaacagttgtgtgatgtaattttagtcgctggtgatcgcagaattccagctcacagattggtgctctcctctgtctcagactattttgctgccatgtttactaatgatgtcagagaggcaagacaagaagaaataaaaatggaaggtgtagaaccaaattcgttgtggtccttgatccagtatgcttatacaggccgccttgaattaaaagaagataatattgagtgcctgttatctacagcttgccttcttcagctttcacaggttgtagaagcatgctgtaagtttttaatgaaacagcttcatccatccaactgtcttggaattcgttcttttgctgatgcccaaggttgtacagatttgcataaagtggctcacaattatactatggagcatttcatggaagtaatcagaaaccaggaatttgtattattaccagccagcgaaattgcaaagctcttggctagtgatgacatgaacattcctaatgaggagacaatattgaatgcacttcttacttgggtccgtcatgatttggaacagagacggaaagatctaagtaaacttttggcttatattaggctacctcttcttgcaccacagttcctggcagacatggaaaataatgtactttttcgggatgatatagaatgtcagaaactcattatggaagcaatgaagtaccatttattaccagagagacgacccatgttacaaagtcctcggacaaaacctaggaagtcaactgttggtacattatttgcagttgggggaatggattcaacaaaaggagcaacaagcattgaaaagtatgatctccgtacaaatatgtggactccagtagcaaatatgaatgggaggaggctacagttcggtgttgcagtgctagatgacaaactgtatgtggttggaggaagagatggactgaagactttgaatactgtagagtgctacaaccccaaaacaaaaacttggagtgtgatgccacctatgtccacacatagacatggccttggtgtggctgtactggaaggtcccatgtatgccgtaggaggacatgatggctggagctatctgaacacagtggaaagatgggaccctcaggctcgccagtggaattttgttgccactatgtctacccctaggagtacagtaggtgtggcagtactaagtggaaagctttatgcagttggtggtcgtgatggaagttcttgtctcaaatcagtagaatgttttgatcctcatactaataagtggacactgtgtgcacagatgtcaaaaaggagaggtggcgtaggagtgacgacctggaatggactgctgtatgctataggggggcacgatgctcccgcatccaacttgacttccagactctcagactgtgtggaaagatatgatcccaaaacagacatgtggactgcagtagcatccatgggcatcagcagagatgcagtgggggtctgtttacttggtgataagttatatgctgttggggggtatgatggacaggcataccttaatactgtggaggcttatgatccccagacaaatgagtggacccaggttgctccactgtgcctaggaagagctggagcttgtgttgtgactgtaaaattataatttagtgccccgttttctacatgaagacaccgtcttcctttattaatttagtataattattctatcaatggatacatttttagtaaatgtgcattgtcacaatcctgggcacaaagtgcctgatgtcaaaatgaagatagtaaaacaagggaggaagcagtggatggaccaggattaattcctttcatttcttagtaaattaaaacctgcagctggtggattgtgatcacacattcccgaagtaataagtgaggacgaatgcactgctctggaacataacccagtgctaactgggggtttcatttattcagtcaagcacatcttactcacatccagatttattttcctacagtgcaaacacaccagatgaaactttaaaatgttactttttgtaagcttatcataaatgagttgcagtaatttgtttgcttgtttgtttaaccacaaccactattttaatgatatactaaagataacactatttagttttttcagaaacatctgcattatatgtgtgttggttgtggattttgtttctaaaattggcttagtccaataaataaagaaaagcattaaggacttaaagcaacaataaccaaataaaaacttgataggatctttgaagtctatttaaatattcattccattacatctagactcaccaagaactacatgttatgatgttaagttgaagttgaaacatgatgttttgcattaaatttaagatatgcaaatttatgtagagaaaataaatgttatataccctataatctttcacctaattagtatttaattatatggatttgttttatattataaaagatgttttgattttgtcttttgatattgacaaaattgtttggatatccttatgttctcaagtctgtatctgcctcccctgccttatttcttatgttttgccacagttaacccattgtgcttctttgtaatcaaacagtttgtgggagaatgggcttattgaatgtctaaaaaataagtttaaagtgtttgttaccctaagttttttacatttttaaactctaattacatatgtgaatgttattactctcagtgaattgttattgtttgcaaaaatgcactgggcagtaacattttgtgataaatcctataagatataagtc

SEQ ID NO: 13220 - protein, 508 aa, Homo sapiens [sequence omitted]

SEQ ID NO: 13221 - DNA, 1968 bp, Homo sapiens
aaaaaataaaagatttcattttatgtgaggaattattttaataaaaaaaagagggtttatgctctatagtaataaaatttaccagtaacacccaatcagaaaattttggttccttagtatttagggaagacttttgtctcttatggaattttacatgttttgatttagaaaagtagatgcaatataatatatttcaagttttatacatattagatgaattgcatggtattttaggcaacttaactataaacaaatttattcatagaagcattgttgccaacaatttagatgacctcgatgaaaaaacacaccaattgacaaaactggctcaaaaggaaataaaaaatccaaacagacctgtaacaagtaaagagattgaaccagtaatcaaaaatctcccaacaaagaaagtccaggactaaatgagtttactggcaaactatgccaaacatataaagaagaattaacactaatccttctcgaactctcccaaaaaatggaagagaaaggagcaccctgtgacattctataaggcggacattaccttaacaccaaagccagacaaagacctcacagggaagctacagaccaatatcccttatgaatatagatgcaaaaaaacttcaaaatactagcaggccaaatccagcagcttattaaaatgatcacacagcatgaccaagtgagatttatcaaagaaatgcagggatggttctacatacaaatgtcaatcgatgtaataatataccatattaatagaatgaaggggaaaaaacagcatgatcacctcaattgataagaaaaagcatttgacaaaaatccaacaccctttcatggtaaaaacactctgcaaactaggaagaaaagggaactttcttaacctgataaagacatccataaaaacccacagctaacaacataatagcaaaacattgaaaatttttcccctaatatcatgaaaattcctgatttccccactgctattcaacattatactagaaggtctagccagagcaattaggcaagaaaaagaaataaaatgaatcccaaataggaagaagtaaaactacatttgcagaaaacatggtcctatatattaaaaatcctaaagaatccacaaaatgattccggctgattttaaaaattcagcaatgttgcaggttgcaagatcaacacacaaaagtctaagaaaaacctgaggggaaattaaaacaatttcatttacaataacatgaaaaagaataaaatacttagaaataaatttgaccaagaaagtgcaagacttggacactgaaaagtacaaaacgttgctgaaagaaattaaagaagacctaaataaatggaagacatcctgtgctggcaggttggaagacttaacattgttaagatggcattactcccaaaattagtctatagatttaatacaatccccattaaaattccagtgacccttttacagaaactgaaaagctgaccctagaatttatatgggattgcaagttactgaaggtactcaagtctgttcaaaacaatcttgaacaagaataaagttgaaggactcacattttccaatttcaaaatttactgcaaagctacttcaatcaaaacagtgttgtgctggtataaaaatatataaagcaatagagtagaatggaaagtccagaaacaaattacgccaatacactatggtcaattgatttttgacaagggttccaggaccattcaatgaagaaagaacagtgtcttcaactaatagtgctaagacaagtgaatattcacatgcaaaagaatgaatttgtacctgtacttcataccatatataaaaattaattcaaaatagatcaaagacctaaatgtaagagctaaaaccataaaactttgagaagaaaatacaggaataaatcttcatgaccttggatttggcaatggtttcttagatatggcaccaaaagcacaagcaacaacagc

SEQ ID NO: 13222 - DNA, 2491 bp, Homo sapiens
  CDS (100)..(1149)
ataagcacacgagctggaggactgggtatcaatctcactgctgcagacacagtgattttctatgatagcgactggaaccccactgtggaccagcaggccatggacagggcccaccgcttagggcagacaaagcaggttactgtgtaccggctcatctgtaaaggcaccattgaagaacgcattctgcaaagagccaaggagaagagtgagattcagcggatggtgatttcaggtgggaacttcaaaccagataccttgaaacccaaagaggtggttagtcttcttctagacgacgaagagttggagaagaaactgaggctgcggcaggaagagaaacggcaacaggaggaaaccaaccgagtgaaagagcgcaagcggaagcgggaaaagtatgcagagaagaagaaaaaagaagatgaattggatgggaaaaggagaaaagagggtgtgaacctggtgatcccatttgttccctcggctgataactccaacctctctgctgacggagatgactccttcattagcgtggactcagccatgccaagccctttcagtgagatctccatcagcagtgagctgcacactggctccattcccctggacgagagcagcagtgacatgctggtcattgtggatgacccagcctcctcagcccctcagtctcgagctaccaactctcccgcatccataacaggctccgtctcagataccgtgaatggaatttccattcaggaaatgccagctgcaggacgtggtcactcagcccgaagccgaggccgccccaaaggttcaggaagcacagccaaaggagcagggaagggccggagccgaaagtccacggcaggcagtgctgctgcaatggcaggagccaaagccggggctgcagcggcctctgcagctgcctatgccgcatacgggtacaacgtgtctaaaggaatctccgccagcagtcctctgcagacatcccttgttcggcctgctggccttgctgactttggaccttcaagcgcctcttctcctttgagttcccctttgagcaagggaaataatgttcctgggaatcccaagaacctccacatgaccagcagcctagccccagactctctggtccggaaacagggcaaaggcaccaacccctctggaggacggtaaccatctgggccctccgacttccttcaaccaaaccagggctagagtcctgacctgccagtggtctttggatggcttgcccgtgcagcatcttgcatcctgagtcagaagtggaaatgtccagcaggggaaggacaggcaggtggatggtgtgagcacttttatcatctgtgtctcatcaggagcatctggggtgcctgtaggaggaaggccacagggcatggatcagccccactgcatctcaagtgaactgtatagccaagtcttaaacctctcacggggcaagcctgacacagaccccctttagatgctcaggcatactgtttccatcccgattccactcttcggctctgacacgtcccttgcaaagtctccgcaggtgctgtgaagagccttccatggtagagatttctcttaagagtgtgatttctcatagggctagtaagggagattgtatacctgttgtccacagtcttcaggcagctccccaggtctctgaaccccagagtgtcatcattggagagagcagtgactgcgagagatggtggaggccgctaagcatggtagaggctagaggaagtctatccacaggcagttgtgttcccagcaattcctcccatcctgcatggttcacaccaagagaaccttcagatcctaccagcaaccgtagcaccttccacccaggggactcccagaagccagtaaagagaccaggagccacctcaatcagcaggacagcctcactgcccctcttgcagagtcccctttgcccatcctgaatgcacagtctccctgctcatgcccttcagtcccctgcttggctgtatgcactgtctatattgcactgagagaggaagggacagcaggagtgaggtgaagagggcggagagagggggcaggctcggcaccggccctcccagcccggccagcctgagcttgctgccctccagtagagacagaggggcagtgtttgcatgggaggtgtttctgcctgtccctgcctgatgtccctggtggagcaggtacctccgggcgggcaagcctctgatttgcacacctgaaaatcgcggaattgagtttcgatagattgatttttaaaacttttttggagtagggggtataggggaatcatttaatttaaatcattaagattcccctgctcaaacccagattcctgtgtacagatgctatttagagggaatcagaaaaatgccaagccttttctctttgaatgtgctatttttataactgaacttgtacatatgtataaagagagacacatcttccttttactaactggataaaaaaatcttaaataaaatggagtgagataattttatgt

SEQ ID NO: 13223 - protein, 350 aa, Homo sapiens
MDRAHRLGQTKQVTVYRLICKGTIEERILQRAKEKSEIQRMVISGGNFKPDTLKPKEVVSLLLDDEELEKKLRLRQEEKRQQEETNRVKERKRKREKYAEKKKKEDELDGKRRKEGVNLVIPFVPSADNSNLSADGDDSFISVDSAMPSPFSEISISSELHTGSIPLDESSSDMLVIVDDPASSAPQSRATNSPASITGSVSDTVNGISIQEMPAAGRGHSARSRGRPKGSGSTAKGAGKGRSRKSTAGSAAAMAGAKAGAAAASAAAYAAYGYNVSKGISASSPLQTSLVRPAGLADFGPSSASSPLSSPLSKGNNVPGNPKNLHMTSSLAPDSLVRKQGKGTNPSGGR

SEQ ID NO: 13224 - DNA, 2005 bp, Homo sapiens
  CDS (592)..(1875)
gatgtagaagagaattctagctctgaaagtgtctgttctggtcggaagctgcctcaccgcaatgcttctgctgtagctagaaaaaagttattacataattctgaagatgaacagagcttaaagtcagaaattgaagaagaggagctaaaagatgaaaatcaactattaccagtgtccagttctcacactgcccagagcaatgttgatgaatctgaaaacagagactcagagtcagaaagtgatttgcgggtagcccggaaaaattggcatgctaatggttacaagtcccatactccagcaccttcaaagacaaaatttcttaaaatagagtcttctgaggaagactctaaaagtcatgattcagatcatgcatgtaacagaactgctggcccatcaacgtctgtgcagaaacttaaggcagagagcatctcagaggaagcagattctgaaccaggaagatctggtggtaggaaatacaatacatttcacaagaatgcgagtttctttaaaaaaaccaagattctgagtgactcagaagactctgaatctgaagagcaagatagagaagatgggaaatgtcataaagtggaaatgaacccaatttcaggaaatctgaactgtgaccctattgctatgtcccagtgttcctcagatcatggatgtgaaactgatttagattcagatgatgacaaaatagaaaaaccaaacaattttatgaaagattctgcatcacaagacaatggactaagcagaaaaatttccaggaaaagggtctgttccagtgactcagacagtagtttacaggtggttaagaaatcatcaaaagccagaacaggtctcctgaggattactcgaagatgtgcagctacggctgccaataagatcaagctcatgagtgatgtagaagatgtcagtttagaaaatgtgcacactagaagcaaaaatggaaggaaaaaacctctccatcttgcttgtactacagctaagaagaaattgagtgattgtgaaggaagtgtacattgtgaagtaccaagtgaacagtatgcctgtgaaggcaagccacctgatcctgactccgaaggtagtacaaaagtgcttagtcaggctctaaatggagactcagactctgaagatatgttgaattcagaacacaagcacaggcataccaatattcacaaaatagatgcaccttctaaaagaaaaagttcctctgttacatcttcaggagaagattcaaaaagtcatattccagggagtgagactgataggacattttcttcagagtcaaccttggcacaaaaagctactgcagagaataattttgaagtggaactgaattatgggctgcgcaggtggaatggcagaagactcaggacctatggaaaggctccttttagtaagacaaaagtgattcatgattcacaggaaacagcagagaaggaagtaaaaaggaagagatcgcatcctggattggaaaatgtgaaaatctctgaaacaactgggaattcaaagtttagacctgatactagttccaaatcatcagatttgggatctgtaactgaatcagatattgactgtactgataatacaaaaaccaaaaggaggaaaacgaaaggaaaagcaaaagtagttagaaaaggtaaaacttttacagctaacatatctaaaactgtgagacgtcaaagacaaagcaaacgccctaggttaagtgtggatgataatgactgggaggatttggactatgcaaaatctaaaagagttcttcgacgttcaaaaataaaaacgagaaatcagggtagaaggactgtgagataccatgatggggatgatgacagaagtttagaaaatgtgttagatttcaatggttgcaccttatgaccttgagggaaagccagttcatttaagaggaaatggactggcatttatggtgaaagctggctgttaaaattatttttttgtcttacaattcagggaatatatttatatttttctatgaaaagttatg

SEQ ID NO: 13225 - protein, 428 aa, Homo sapiens
MNPISGNLNCDPIAMSQCSSDHGCETDLDSDDDKIEKPNNFMKDSASQDNGLSRKISRKRVCSSDSDSSLQVVKKSSKARTGLLRITRRCAATAANKIKLMSDVEDVSLENVHTRSKNGRKKPLHLACTTAKKKLSDCEGSVHCEVPSEQYACEGKPPDPDSEGSTKVLSQALNGDSDSEDMLNSEHKHRHTNIHKIDAPSKRKSSSVTSSGEDSKSHIPGSETDRTFSSESTLAQKATAENNFEVELNYGLRRWNGRRLRTYGKAPFSKTKVIHDSQETAEKEVKRKRSHPGLENVKISETTGNSKFRPDTSSKSSDLGSVTESDIDCTDNTKTKRRKTKGKAKVVRKGKTFTANISKTVRRQRQSKRPRLSVDDNDWEDLDYAKSKRVLRRSKIKTRNQGRRTVRYHDGDDDRSLENVLDFNGCTL

SEQ ID NO: 13226 - DNA, 2204 bp, Homo sapiens
  CDS (6)..(713)
agaagatgcttcaaattcaacccgagaaggatatcattgtagagtttatcaaaaatggagatttcaagtatgtccgcatgctgggggcactttacatgaggctgacaggcactgcaattgattgctacaagtacttggaacctttgtacaatgactatcgaaaaatcaagagccagaaccgaaatggggagtttgaattgatgcatgttgatgagtttattgatgaactattgcacagtgagagagtctgtgatatcattctgccccgactacagaaacgctatgtattagaggaagctgagcaactggagcctcgagttagtgctctggaagaggacatggatgatgtggagtccagtgaagaggaagaagaggaggatgagaagttggaaagagtgccatcacctgatcaccgccggagaagctaccgagacttggacaagccccgtcgctctcccacactgcgctacaggaggagtaggagccggtctcccagaaggcggagtcgatctcccaaaaggagaagcccctcccctcgccgagaaaggcatcggagcaagagtccaagacgtcaccgcagcaggtcccgagatcggcggcacagatcccgttccaagtccccaggtcatcaccgtagtcacagacacaggagccactcaaagtctcccgaaaggtctaagaagagccacaagaagagccggagagggaatgagtaatggactcagtttggttttagtccacatggcctcctgtggatataaggatatctgtatgtggaaggattaagatctcccccaggcagctataagaatattttagtttttttcttatcaagtttctcaacctttatttttaatgaaggaggtgctgagttttgtatctttttaatcataatcaacatcagtttttgacccaactaaccttgactgtattcaaacttatgagagtataaaggatctggaggttggggatatgactgacaaggaaaggctgtggccacctgatgaccctttccctttttattaaaccggacacacctgtttcccatttcgctgtagtttagtttttggtttgttgtggttggaactgctttgagaatcctgggatttgtgctgctgctgttattcaaagatcaaaggagtaaaacatagttgctcctaacttttttccagcagcagcaagtggtaataaacatgaaaactggtttgtagcagttttgaaagaatagaatgcattcaaatgtaaggctgcttctggatcattaaagccagtttcatcaaacagttcaacagagagcagcacttaataccctttatacagcccattttttcatagtttcatttgttcttgcccacaagcttgaaatccaggttaaggtatccagcctttatcatataagcattgacattatccaggcctagtcagtagcagtagggtaacgggattgaaaaagatttgatggagaggaaagtatctaatattagtcatggttttgacctaaattgctagacagtcgtgccattcacaaagtcagaaaatacagcaggaagagacagcttttagaggggcagagaattagaggatggtggtagtaatgaaaaagatgcattcagtttaacaagtttaatttgagacagctatggtatagctaaaaacaaaagcccataaagttggagatagggaccagagtttaacatagcgatctaggccagaattgacaatgtttaagtaatggtggaatctgtcaataagacttcccagagtgttaatatatatcagaaatgcacacaacagaaccataggcaacaccaacacaggaagaaatagaagtcacctattgaaaactggaatggcccattcagaaagacaggagaattaggagagagtgagtgaaagaagccaagggtcaagaatgcagaagcaaaggaaggactaaaaagcctccacggacatcgataatcaagagattattaagatctttgctagaagagttcctttacctgtacttaactcccttaaaaagagaaaagtgatggaatgacttctgcaactgtagtcccagcaggaactgtgaagaccagctgccctgcaggatccagtttttcttgggaggttgtatctggtcataaggtaaacattctatatattctatgcctgctctagaattgaaagacttcagcagtattaaagcattttttaatctt

SEQ ID NO: 13227 - protein, 236 aa, Homo sapiens
MLQIQPEKDIIVEFIKNGDFKYVRMLGALYMRLTGTAIDCYKYLEPLYNDYRKIKSQNRNGEFELMHVDEFIDELLHSERVCDIILPRLQKRYVLEEAEQLEPRVSALEEDMDDVESSEEEEEEDEKLERVPSPDHRRRSYRDLDKPRRSPTLRYRRSRSRSPRRRSRSPKRRSPSPRRERHRSKSPRRHRSRSRDRRHRSRSKSPGHHRSHRHRSHSKSPERSKKSHKKSRRGNE

SEQ ID NO: 13228 - DNA, 1413 bp, Homo sapiens
  CDS (36)..(947)
gcaaatgaaggcctgggagagcctgggctgattccatggagagggcttctaagaatcttaagggtcggtgtacccgagagaactgcaagtaccttcaccctcctccacacttaaaaacgcagctggagattaatgggcggaacaatctgattcaacagaagactgccgcagccatgttcgcccagcagatgcagcttatgctccaaaacgctcaaatgtcatcacttggttcttttcctatgactccatcaattccagctaatcctcccatggctttcaatccttacataccacatcctgggatgggcctcgttcctgcagaacttgtaccaaatacacctgttctgattcctggaaacccacctcttgcaatgccaggagctgttggcccaaaactgatgcgttcagataaactggaggtttgccgagaatttcagcgtggaaattgtacccgtggggagaatgattgccgctatgctcaccctactgatgcttccatgattgaagcgagtgataatactgtgacaatctgcatggattacatcaaaggtcgatgctcgcgggagaaatgcaagtactttcatcctcctgcacacttgcaagccagactcaaggcagctcatcatcagatgaaccattcagctgcctctgccatggccctgcagcctggtacactgcaactgataccaaagagatcagcactggaaaagcccaatggtgccaccccggtctttaatcccactgttttccactgccaacaggctctgactaacctgcagctcccacagccggcatttatccctgcagggccaatactgtgcatggcacccgcttcaaatattgtgcccatgatgcacggtgctacacctaccactgtgtctgcagcaacaacacctgccaccagcgttccgttcgctgcaccaactacaggcaatcagctgaaattctgaacagcagagttatggagtatcagaatctttccatggaaacctccatatggcctttctatatatattctcgtatgtcttattctaccaacacaacaataagcgtgttgcagtcaatgtattaagcaaagcaaacctgccagccagcaaattcaaataaaaaataaagcattaaaaatcaatggagatgttaaaacaacacaaatagaaaactagtaactaccatccatcctatttgaattatcaagcagaacatgaccataaaatttggtaacttgttacattactctttgtgattttctaataaccatgctaagtgtatttccacagtgagcttttggcttactatatacattcttggtggataaattgttcatctgtttttgaagtgttaccttactattttgtttacaagatagtctattgggttgattcaggatgtaacaaatatattcagtaccatttc

SEQ ID NO: 13229 - protein, 304 aa, Homo sapiens
MERASKNLKGRCTRENCKYLHPPPHLKTQLEINGRNNLIQQKTAAAMFAQQMQLMLQNAQMSSLGSFPMTPSIPANPPMAFNPYIPHPGMGLVPAELVPNTPVLIPGNPPLAMPGAVGPKLMRSDKLEVCREFQRGNCTRGENDCRYAHPTDASMIEASDNTVTICMDYIKGRCSREKCKYFHPPAHLQARLKAAHHQMNHSAASAMALQPGTLQLIPKRSALEKPNGATPVFNPTVFHCQQALTNLQLPQPAFIPAGPILCMAPASNIVPMMHGATPTTVSAATTPATSVPFAAPTTGNQLKF

SEQ ID NO: 13230 - DNA, 2016 bp, Homo sapiens
  CDS (80)..(988)
aaaaagtgtagggagggtacctctcacagaagagtcttatgactggcatcaggggaaggtcaccaagtctttcctgtacatgctgtttatcaaattcattcatctcgaagtattcagtatgccagaaagggctattgcaagacacgaagtccgagaaattgagcagcgacatacaatggatggccctcggcaagatgccactttagatgaggaagaggacatggtgatcatttataacagagttcccaaaacggcaagcacttcatttaccaatatcgcctatgacctgtgtgcaaagaataaataccatgtccttcatatcaacactaccaaaaataatccagtgatgtcattgcaagatcaggtgcgctttgtaaagaatataacttcctggaaagagatgaaaccaggattttatcatggacacgtttcttacttggattttgcaaaatttggtgtgaagaagaaaccaatttacattaatgtcataagggatcctattgagaggctagtttcttattattactttctgagatttggagatgattatagaccagggttacggagacgaaaacaaggagacaaaaagacctttgatgaatgtgtagcagaaggtggctcagactgtgctccagagaagctctggcttcaaatcccgttcttctgtggccatagctccgaatgctggaatgtgggaagcaggtgggctatggatcaagccaagtataacctaattaatgaatattttctggtgggagttactgaagaacttgaagattttatcatgttattggaggcagcattgccccggtttttcaggggtgctactgaactctatcgcacagcaccagatactgctacaccatctcatcggcatggacctatatgtggcagcaagtccatctcatcgcttttggtgaaagtcagtccagtttgtaaagattctcattgccttggaaagtgttccaggaatggactttctgcagtatgatgacctgcaaaagcagcccttccatttacatttcaaactccaagtcagccgtgtcaaagtttgaaccagaactgtggaggataatgggtcagatgcaattagcagcccagagaaccacacgttgcagtctgatttatttttttgcccatcagattccaagaatcctagtgcttaaaagcaactaaacaatcgctctattgtactgaaataaagcccggttaattcagaaatcaattgcaccaccaggtggggcacactctggccccaaacagatggggttgaaaactcccctcaaaatgcagtcttgttaaattaaaaacttgatccaggagtggaacaaatagggagccatgaatggaatggagtcaggtccactcaggcggattctttcttctcccactccttttcctttaaaaaagaaaaattccccatttcactttcatcagtgttagcatctatgcagaaacgcagccatccaccctttgcagttgaatgtgttactttaattagtctgaaaattaaagggcaactccgggccaatgtgaatgattatgaaaatacatgtgcatcccatgcaatcttctcatttaattaatagtcttgtaaactatatggctcactttaagtcagtcaagaggtataacaactccattttaaatatccacttaatacttaacaggatgtgaggaacacactatagcatacggtcccttctcaagtttcactgtctgaaatttttcaaagctgacccaagtcaacctgaaaaatgtttaacaccctgggcttgaacacaagaaactctgtgatgaacagacattcaattacattttttaaaagtgagaagcatttttgtaaaatagcgactctggaaactaattggcagccgcaaaacttgtgagcaaaggccaaatcttgtggggaacctttactacagtaacacgactcaaagaaaatgtgaataaaaggcatctttgtttcccagtcaaattagctgattaagaaataaaacatcttaacatgttttt

SEQ ID NO: 13231 - protein, 303 aa, Homo sapiens
MLFIKFIHLEVFSMPERAIARHEVREIEQRHTMDGPRQDATLDEEEDMVIIYNRVPKTASTSFTNIAYDLCAKNKYHVLHINTTKNNPVMSLQDQVRFVKNITSWKEMKPGFYHGHVSYLDFAKFGVKKKPIYINVIRDPIERLVSYYYFLRFGDDYRPGLRRRKQGDKKTFDECVAEGGSDCAPEKLWLQIPFFCGHSSECWNVGSRWAMDQAKYNLINEYFLVGVTEELEDFIMLLEAALPRFFRGATELYRTAPDTATPSHRHGPICGSKSISSLLVKVSPVCKDSHCLGKCSRNGLSAV

SEQ ID NO: 13232 - DNA, 1974 bp, Homo sapiens
  CDS (239)..(877)
agaagtgacttctccaaaaagtgtgttagttcccggtcacctgagctccgggtgacgcggctgcggtagctgcggatacaagccttccgcgggtcctgcctggcgaccccgacctcctcctgctgtctctccgctccgccaccccgaacccgccaaggtcctgtccttttcctcctgtcctttgccagcgttgggccggatcgggccgagccgggccgcccgggcgcagtctttaaccatggcgtccctcttcaagaagaaaaccgtggatgatgtaataaaggaacagaatcgagagttacgaggtacacagagggctataatcagagatcgagcagctttagagaaacaagaaaaacagctggaattagaaattaagaaaatggccaagattggtaataaggaagcttgcaaagttttagccaaacaacttgtgcatctacggaaacagaagacgagaactttcgctgtaagttcaaaagttacttctatgtctacacaaacaaaagtgatgaattcccaaatgaagatggctggagcaatgtctaccacagcaaaaacaatgcaggcagttaacaagaagatggatccacaaaagacattacaaacaatgcagaatttccagaaggaaaacatgaaaatggaaatgactgaagaaatgatcaatgatacacttgatgacatctttgacggttctgatgacgaagaagaaagccaggatattgtgaatcaagttcttgatgaaattggaattgaaatttctggaaagatggccaaagctccatcagctgctcgaagcttaccatctgcctctacttcaaaggctacaatctcagatgaagagattgaacggcaactcaaggctttaggagtagattagtcaaaagaagtcatactattttgcttacttataattatgtagtataaaccaagcacagtgcagatttcttttacaaaacacatgtattttgcaaaaaaaaaaaaatgaagaccatgagtgaacagttgtttcctaacccatggctatttagaatcttttgccaaagaatgacaatgatgcaaaaatgggaacagtttggattttaattagaactgtttaggagtgatgatgtgtaaaaagttgacttctcttttgcatggcacagagaaattatattccttacttcatgtcagtttatgttctaaatctttttcactgaatataaaaatcttgttaaatgccattaggcaccaacttaaagagggttgtaaaaatattaaaagtatatcgttaattctgtatctgttgcttgtcttttgtaagtgattatgtgttatgaccataggtggttacagctgccaaattatttttaaatggtcaaaaagaagagtgctatttaaacatctgtcttaaacaaaaactgtcataacttttcttttttctttttccattaggagaacattctagttggtaaatttcaaaatgtgcttgacacctgccttaaatagcacagacctattgtgcacatctttaaattatttcagctggcagaaaagaattacatttaaaactgaaatcaaggcctcaatacaaagattatcctggctcttttctatctctgtgggcctaattgaaatatgtactcttattttagacacgcctctgttaaaacagaccaggttttcctggtctcagacctatgatgacttgtccctttgatgtcactactgtgaattgaatataattagtaaaaatagacgatgaataaataacactttatagtaagaaaacaatatattttggccatctaaaaatgagaattataattattatgaattataatttaaactgtttaattttgtttaatgtgtatattgaatcttccaaattgaagccattattctcaattaagtactacaactatgacaatgcttgacctacatttctaaaataaaaattcacattttttgataaataaactacagttttaccag

SEQ ID NO: 13233 - protein, 213 aa, Homo sapiens; identical to SEQ ID NO: 13204

SEQ ID NO: 13234 - DNA, 1739 bp, Homo sapiens
gaaaaatatgatcatttcataatgatgaaggagtcaattcaccaagaagacataataatcctaaatgtttatgcacccataatggagcttcaaaatatatgaagcaaaaacatacagaaccagatacatcacaattatactagaagatttcaacacccctttagcaatagttgatagaatagttagaaaattagtaaagttataaaaggcttgaacaatactatcaaccaacctgacctaatttttttgttttttgagacagggtctcattttgttacccagagtggagtgcagtggcatgatcatggctcactgcagcttcaacctctcaggttcaggtggttttcccacttcagcctcccaagtggctgagagtacaggcatgcaccaccatgcccacctagctttttaattttttgtggagactggctcccactatgttacccaggttagtttcaaactcctgggctcaggtgatcctcctgcattggtctcccaaagtgctgggataataggtatgaagcactgtgcctagccaacctgacttaattgatatgtatagaacatgccaccaacagcagaatatacattctcttcaagtacacacagaacatttagtaagataggcattctgaattataaaatacatctcagtagatttaaaggacttaaatcatgttctctgactacagtgaaattaaatttgagatcaataacagaaagtacactggaaaaaaacccaaatatttgaatactaagtaacacacctctaaaaaaaacttagggggtcaaagaataaataaaaaggaaaattataatgtattttgcactgaatgatcaaaacacagcatatcaaaatttgtaggggcagtgaaagcagtacttagagggaaatttatagtgctaattgcctatattaaagaaaagaaggtctcaaatcagtgaccttggtttccatgttaagaaactggaaaaacaagaggagacaaaaatataagtagcataagaaagtctgtagtagaagtaatgaacaagtaaaaagtattagaagagaggaaattataaatatcagaacagaaatcaatgaaatagcaaacagaaaaaaataaacaacaaagagcaaacaggaaaaaacctgttctttgaaaatatcaataacactgataaatgtttaactagaccaatacagaaaataagagagaagacacaaataacaaaattaccttatatctattaaagaaatacaattttaataaatttgaatcatcataaagaagacttcaagcccagatggctttgttggcaaattctactaaacatttaaggaagaaataataccaatttcacataaaatattccagaaaactaaaggaggagggataatttccttctcccgctatgaggccagaattatgatacaaaagataggcaaagatattattaaaaaaagaaaactggccgggcatggtggctcacacctgtaatcccagaaatttggggggccgaggcaggtggattatctgaggtcaggagttcaagaccggcctgcccaacatggtgaaacctcatctctactataaatacaaaaaattagccaggcatggtggcaggcccttgtaatcctagctactcaggaggctgaggcaggaaaatcgcttgaactcaggaggcagaggttacagtgagctgagattgtgccattgcactccagcctgggtgacaagagcgaaactctatct

SEQ ID NO: 13235 - DNA, 1432 bp, Homo sapiens
  CDS (154)..(1206)
gcgggcgcccagtgcaccggaggaggtgagcgccaggtcgccttcgcggcccggggacacaggcagggacgcgggagctgatgcggctggaccggccggggaaacagtattttctggaagggggcccctctgaagcggtccaggatcctgcacatggcgctgaccggggcctcagacccctctgcagaggcagaggccaacggggagaagccctttctgctgcgggcattgcagatcgcgctggtggtctccctctactgggtcacctccatctccatggtgttccttaataagtacctgctggacagcccctccctgcggctggacacccccatcttcgtcaccttctaccagtgcctggtgaccacgctgctgtgcaaaggcctcagcgctctggccgcctgctgccctggtgccgtggacttccccagcttgcgcctggacctcagggtggcccgcagcgtcctgcccctgtcggtggtcttcatcggcatgatcaccttcaataacctctgcctcaagtacgtcggtgtggccttctacaatgtgggccgctcactcaccaccgtcttcaacgtgctgctctcctacctgctgctcaagcagaccacctccttctatgccctgctcacctgcggtatcatcatcgggggcttctggcttggtgtggaccaggagggggcagaaggcaccctgtcgtggctgggcaccgtcttcggcgtgctggctagcctctgtgtctcgctcaacgccatctacaccacgaaggtgctcccggcggtggacggcagcatctggcgcctgactttctacaacaacgtcaacgcctgcatcctcttcctgcccctgctcctgctgctcggggagcttcaggccctgcgtgaccttgcccagctgggcagtgcccacttctgggggatgatgacgctgggcggcctgtttggctttgccatcggctacgtgacaggactgcagatcaagttcaccagtccgctgacccacaatgtgtcgggcacggccaaggcctgtgcccagacagtgctggccgtgctctactacgaggagaccaagagcttcctctggtggacgagcaacatgatggtgctgggcggctcctccgcctacacctgggtcaggggctgggagatgaagaagactccggaggagcccagccccaaagacagcgagaagagcgccatgggggtgtgagcaccacaggcaccctggatggcccggccccggggcccgtacacaggcggggccagcacagtagtgaaggcggtctcctggaccccagaagcgtgctgtggtgtggactgggtgctacttatagacccaatcagaatacggtggttgagaaggaaccagtgtttacaagtaatatcagaaagttgaaggaaccagtgtttacaagtaataccagaaagttgcc

SEQ ID NO: 13236 - protein, 351 aa, Homo sapiens
MALTGASDPSAEAEANGEKPFLLRALQIALVVSLYWVTSISMVFLNKYLLDSPSLRLDTPIFVTFYQCLVTTLLCKGLSALAACCPGAVDFPSLRLDLRVARSVLPLSVVFIGMITFNNLCLKYVGVAFYNVGRSLTTVFNVLLSYLLLKQTTSFYALLTCGIIIGGFWLGVDQEGAEGTLSWLGTVFGVLASLCVSLNAIYTTKVLPAVDGSIWRLTFYNNVNACILFLPLLLLLGELQALRDLAQLGSAHFWGMMTLGGLFGFAIGYVTGLQIKFTSPLTHNVSGTAKACAQTVLAVLYYEETKSFLWWTSNMMVLGGSSAYTWVRGWEMKKTPEEPSPKDSEKSAMGV

SEQ ID NO: 13237 - DNA, 2195 bp, Homo sapiens
acagatgttctgaactgaatggtgtggcctctttttgtgtaaattccttttgccgtaatggatgcagtggaataacaatgtttacaggtaccgatcccgatccctgctcaatgtagcatttttttggttttattttcttaataaaagcaggggtaggtttctttaaactgcacaaacatgcaaggattttttaaaaatggaaacttctctcatgttattcaactagagcacttcagtttacaaaacagcaagtccatctttatggaagccagcacaaggaactgtgtgcaaataatgaagacgcttgcttggatcctgtttcaaaattctagaccagggctaccttacacagaattggtcatgttactgccaggagatttctgtgtaacttcatttattggctacagttttggcatttgaagatgtggtactcagatggggttttgtccaccattgtcaagattgtaatcttaaaaatcataccagtcattgataatttagtttatcctgaggcagtcgacttgcagaggcacagtctacaaagcctaggatgttgccactcaatggtttacattctgggacatcttttaagttgtttgtagcactgcagttcaaagtgttaatatttagagggacttctagattttatacctaatgcagtagaaccttgaagtatatttaagcttttttgttaagcttgaacagttggcaagaataatgtgagttcctatctgaaatagaatggtacattaccacttttaagttttaaaaattgatagatgttcagatgtatctcaaactcagttttatttttattccaaatattgtgaatgagaagccattgtcctaaactttggccatttttgtgctataaacatgcatttttaagttataaggtgaatcaaacaatatgtaatacagtattaggatgtaatctttgcttttgtagtactgttaaaatagagaattatgttgtttgcaccgtcttaattaaaattcttgatttttactagttgctttgcaaaaaacaaatgtttggctgcattgctaatatttgtaagtataagttgcttcaaggttgtgctgatgagtagataggatgtagtgatcttagtagtgattgaaagggagggtatttattatacaaactgtgaactgcaatgacatccttagttttggatgatgtgtattcttgtttttctttgcagcattttaatgaagattgctttgaagtgtttacgcagtagcacattagtataaaatttagtttagcacagtggacaaaaagtagttaaattaataacttaaaatcagtctctaatttatacatctgaagtatagcattcctgtatgcacacagtaaataatgggtagcctgggctctgtgttactttcttgtatttttatccaagttgtcagcttcttattgctgtgttgttgtgctaaactttgaaccttatttcttttattaaaaatcagtacactttctataatttagtaagatactggccataatcttccattgttataaccttaattttcactctgggtttacagtggctggtctgtataaataatttacacaaagatgactgaatgctaataccagttgcacttaaatgaacatgcccattctcagtagctgatgcagtaatatattcagtttatctatgcattgctggggtcttgatataagatggaaacagtgtttcttatctaaagttttgattatcagcaagttgaatggacactttagttatttaaataaagatttttgaccaaaatccagaaaatggtatgagagaaaaataaattccagctagtttaatagatttttaaatgtcaatctgattttagcctcttagagagtgctaactagctggtaatgtttacttttaattccttgttaaaatgaggcaataatttgcaagatttttgtatataagtgtaaattcttcatatctttttagatctaattcaatattttctgactacttctgccatgtataataccatttttgtgcatgcttgatgtgacattcataaattgtaccactatgactttatccatgtaaaatagctatttattgaattttcttttaaaagctggatttactgggttttttttttctctcagtttaaacatcttaacagagaatttgttactgtttattaaaagaattgcatttggaagc

SEQ ID NO: 13238 - DNA, 1608 bp, Homo sapiens
tatttaatgaaatgccaaggtgctattagatgttttttgaatatgtatacttcttttcaaatgatcacagatgtgaccatccctaatgagtgcatttcttgaaatagagcagaaactcaagtaacaagaatgggcaggataccaaggaaacagactaatcaggcagatggtgactattttgtagggaaagtctgagtaaaccaatagctctacaacagggatctgaaaataaaggaacattagtgagcatgaaaaaaatgtttttttcatattttttcattaccttataaaaattagatttacatacacatttttacctattaccacagactatatgatgaaacttagtttttctttcattataatgttttcatattagcaaaattttgtcaaaaaacaactttttcataattaagatgcagtaatggatttccttttttttgctctaccttctgagttcttgcaatactttttgaaacctattggtcttttaaaatttcttaatcattttgaaatgaattgatttttaaattgaataaaatagatttatattttgtgtaaaatataaacatcacaataaactgaaatacatttgccaaagaacaacatttttttgtaaaaaaacagaagtaaaaaaacatcctagcaggaaaccaggaacggaataaaaacacaaaaaggtatctcgggcacaatgccctgaaggtcaacaaccatggccaagagcatgaggtaatgtcaggaataagaaaacaccctgggttggatccttgacactctgatcctaagatcattagtgattgtgcaaaaatgtaatgtgtaaagtgacttataaagttgtcaggtgaatgttgcttctcatttctacttgacaaaaccctggtgaggcaaagcagttcttattcccattttacagatgaagatatacatatagaaaaattagtttgccaaaattcgtagttgccagagtggtagagcaagaactaaaactgagtcttctaattctgaattcagtgcaccttgggatttaagaatggaatgatcaggagacagagaggttatcagttgaagaaacaaacttttttccacttagcatcttaatatatacatagcctgtatttgactttattcttactatagcatactgcatttagtgtataaagataatgctttggggttagtgttacataaaaaaaatccctgtccttagtttctttctaaaatttgtgaagggtttaaattgtttcatggacatttcattgcacaaatttgtttctcttcatatgaactgtaagaaatcaaaaagagtggctggatgcagtgctcaagcctgtaatcctagcacttttggaggccgaggagagtgtatcacttgaggtcaggagttcaagaccagcctggccagcatggtgagaccccatctctactgaaactacaaaaaaattagctgggtatggtgtcatatgcctgtaatcccagctactcgggtggccaaggtgagaggatcgcttgaacctgggaggcagaggttgcagtgagccaagattgcaacactgcactccagcctgggtgacagaatgaaactgtctcaaaaaaaaaaaaaaagag

SEQ ID NO: 13239 - DNA, 2087 bp, Homo sapiens
  CDS (298)..(1266)
gttttttaggaagagtgtcccgcagagacccggcgggagctgccaggagctctgggattccagcggctggaagccacctgggaagcctggcctcagtgtggaagagaaggcagcaggattattacagaaccttgtgaagccaacgcgggcagccgccaggagctgcagaccgagaggatctcgtcctttcttgcggcccagggagaccaggcctttcattctgggctcgagaccaacaattcgaattccgaactccccctgcgtgtgggactcaaggttgcccagggctcacctctgatgggtgggcaggtgagcgcttccaacagcttctcgaggctgcactgcagaaatgccaacgaggactggatgtcggcactgtgtccccggctctgggatgtgcccctccaccacctctccatcccagggagccacgacacgatgacgtactgcctgaacaagaagtcccccatttctcacgaggagtcccggctgctgcagctgctgaacaaggccttgccctgcatcacgcgccctgtcgtgctgaaatggtccgtcacccaggcactggacgtcacagagcagctggatgccggggtgcggtacctggacctgcggatagcccacatgctggagggctcggagaagaacctgcactttgtccatatggtgtacacaacggcgctggtggaggacacactcacggaaatctcggagtggctggagcggcatccacgcgaggtggtcatcctggcctgcagaaacttcgaggggctgagcgaggacctgcacgagtacctggtcgcctgtatcaagaacatcttcggggacatgctgtgtcctcgtggggaggtgccgacactgcggcagctgtggtcccggggccaacaggtcatcgtctcctatgaagacgagagctccttgcgccggcaccacgagctgtggccaggagtcccctactggtggggaaacagggtgaagaccgaggccctcatccgatacctggagaccatgaagagctgcggccgcccaggagggttgttcgtggccggcatcaacctcacggagaacctgcagtacgttctggcgcacccgtccgagtccctggagaagatgacgctgcccaaccttccgcggctgagcgcgtgggtccgagagcagtgcccggggccgggttcacggtgcaccaacatcatcgcgggggacttcatcggcgcagacggcttcgtcagtgacgtcatcgcgctcaatcagaagctgctgtggtgctgacgggacccttctgaagttcgggacgcggcggctgcagtttcacccccgaatttccaaatggagtttcgctctcgttgccgaggctggagtgtagtagtgtgatcctggctcactgcaacctccacctcccgggttccagcaaattctcctgcctcagcctcccaagtagctgggattgcaggcgcccgccaccacgcccggataatttttgtgtgtttagcagagacggggtttcaccatgttggccaggctggtctcgatctcctgacctcaggtgatccacccgcctcggcctcccaaagtgctgggatgacaggcgtgagccaccgcgcccggcctatacctcattttctacatgtcgcttgttggagctgctggttcaagttcccagccagccaatggatgccagcaccatttttactcccctttcccaagcaaatcgtgcatttttgtctaacgagagacatcagtttctcaggatgatcctcaagaacgttatggagtccatgttgcaataggttctctttgggacctaatgactcattttccaaaaatccgcttctacttttggtacccggttgctacggtgaaatgaaggtgccccgcatccagaaagacgcactcctggaccacaaccggcggctacctcagccccacggctctgcaggatcagggctcgggcaggccccgcggagatgaagaatttgcagggagcctccctgacttccgtcggctgtgaatccttgtctgtcaggggcgtatccacaaaatcaccaaattcatacagatcgtttaaataaatgaacatcattaaagtc

SEQ ID NO: 13240 - protein, 323 aa, Homo sapiens
MGGQVSASNSFSRLHCRNANEDWMSALCPRLWDVPLHHLSIPGSHDTMTYCLNKKSPISHEESRLLQLLNKALPCITRPVVLKWSVTQALDVTEQLDAGVRYLDLRIAHMLEGSEKNLHFVHMVYTTALVEDTLTEISEWLERHPREVVILACRNFEGLSEDLHEYLVACIKNIFGDMLCPRGEVPTLRQLWSRGQQVIVSYEDESSLRRHHELWPGVPYWWGNRVKTEALIRYLETMKSCGRPGGLFVAGINLTENLQYVLAHPSESLEKMTLPNLPRLSAWVREQCPGPGSRCTNIIAGDFIGADGFVSDVIALNQKLLWC

SEQ ID NO: 13241 - DNA, 2090 bp, Homo sapiens
gaaaatttgataatctgaatcaccagcattcaaacaaatatttcggcaataaagtttacaaaatctggatttttacaaccttttctattgatgttttgtagaaataagacagggtactaatttttatactggtttttagaaaaatatttatattgttggtgctcaaatcaccaatttctagctagatcattttgcagccttcttttcagtgtttaataacaaagtttttcctaatggcccttcttttagtaaactggacatgttattccactacaaaaaccacaagttatctggccttttagatctttttggaatcggacctggttgagtaaggacctcttaaaagggaaaaataaattttgccgtcagcttcttcataacgttttcaaggaaattctaggcaatcattcctgtcaccaaagaactaaaattttggttgactggaactagtgagctgtgtccatggtgtgtcatgaaggatgtaccccagagagtaacatgagccactgggcagatcccagggaccagtacttgctgcaggatctagtctgtaatagtcttggccatggctctgctgaaagcaagccattcagtttcttgtttgtacctaaaacaccaaaaaagaaacactcaaatccagctgctttgtcaattgtcagttctgactccttttgctgtggccttatccgtactatattgtgggtagagtaacttctcagaaaaaaaggaaatgtctgtattggttggatgaaactccaccagagcacagcttagctggggcgagatgcatgtgaaggcaggcagtgccaagattccgcttcctttgtttgccaaatactagaaacacaaggaaatgcaagttacgctaaatggcagtaatactacccaactgcctttctgttcattttgtttgaaggaaattgttttgaccaaacagaaaattacttggaatggtgtgttttacagtctacctagaaaatagatggacaatatttttcaactgtatgagcacgtagataaccgagagaatgtggccacctgtgttcaagaagccactgatactggtttttgttaaacattggaagttcaggcaatggaataaatgtaggaacatacagaatgttgcactaatttggtagcctgggaattttttttattgtgcagtatgtatttaaattttgtctatgttaattaccagcatttacctttatttaaatgatggtaaggtggaatattgaataaaattaggttttgtgttttgttctttgtagtctgataaaatctccacctggtcattcattgtgtgtgacttgatacccgttaacttgccccttagtatcagctgttacttgacacaaatgtgtgtgttattcagaggttttcagtctggacactccataggtgagtgtcgtgtcttcgtgagacagcacagttgtctcatgttgtgcatagttcatgtttcctcaccacccagtcctttctcctgctcatcaaaatcagcatacacatttttgactgtacacactataaatggcatcaaatttggatatttttcttaattatgacatgcaaagtaatgtgagtcctgccagtattctggtggataaggtcttctgagtatttggttgcttgtcacaacattctccaagcagtgatatttctaaagaggagatacatgttgaaaacggttttaatttacacttccatttcctgattacatttggaaatactttgtgtaaaccatcccccttccacctccatttgtctgttgaaagattttaagttggaaacagttcctgtctgaaaactcttctgagaaccacaaaccttgtgtatggattcggcatggagccctcagctggcggctctgggtgctgacggccgctggagaggtgggctcccctcgtgcactttattgcctgggcagttttgcttgatcttttgtgactttgagccttttaagtagtttgaatgataagacttaaaatgtttcataattatgttttatgtaacagactttgacattatttaaacgagcatgtgtaatgtaacttttctctttgaatcatataaaacttgattttacattg

SEQ ID NO: 13242 - DNA, 933 bp, Homo sapiens
tgagaatggaagtaataggcaagaagccaaggggcttcccaggacaagctaaaaaagagcagatccagactacaactacagaatcctgtaagattctgaaactttgtcacttcctttctaaggcttccttcctaagcctctctgtgaaactctttgaaaaggggtatgtgggctagcttgcaaggacagccagaagggagaaggatcacatccccctccgtggccaggctctgagagacagaaatccagtgaaggacagagcatggggctgagtgtctgtagcccactgcattgagggcaggagagctcagggcaggtctgagtcatcaccattttctgtgtgtttcttcctaataagtgaaataatgtgtagtgtctagcacggtgcctgacagctcacagaaaatccccaacttcccctcccccaccgccatgccttctaactctcggtgagatgaacatctctactgggaggggaagccattgagggaagaaatgctggcaccttgacatttggggaaagaaagggaaggaattgttttccaagtatctactttgtgccagaaatggtgttgggcaatttactgattgcctcatttaatcctttgacgtatcctaggagttaggtattctcagccccatttccagaaagcaaaccaaggtgaaaaagagttaataatttgttcaaagacatatggaaaaatgccaggcatggtggctcacgcctgtaatcctagcactttgggaggccaaggcgggcagatcacttgaggtcaggagttcaagaccagcctggccaacaaggcgaaatgctgtctcgactaaaaatacaaaaattagccagaaatcacttgaatctgggaggcggaagttgcagtaagccaagatcgtgccactgcactccagcctgggcaacagagtgagactccatct

SEQ ID NO: 13243 - DNA, 2121 bp, Homo sapiens
  CDS (112)..(1440)
gatgtttatggaaaggtggttcagtatgatggctatgatcggtttgaattctctcatagctattccaaagtctatgcacagagagccccctatcaccccgatggtgtgtttatgtcttttgaaggctacaatgtggaagtccgagacagagtcaagtgcataagtggggttgaaggtgtgccattatctacacaatggggacctcaaggctatttctatccaatccagattgcacagtatggattaagtcattacagcaagaatctaactgagaaacctcctcacatagaggtatatgaaacagcagaagacagagacaaaaacaagcctaatgactggactgtgccaaagggctgctttatggcgaatgtggctgataagtctagattcaccaatgtcaaacagtttattgcaccagaaaccagtgaaggtgtatccttgcaactgggaaacacaaaagattttattatttcatttgacctcaagttcttgacaaatggaagtgtgtccgtggttctagagaccacagaaaagaatcagctcttcactatacattatgtctcaaatgctcagctaattgcttttaaagaaagagatatatactatggcattgggcccagaacttcatggagcacagttaccagggacctggtcactgacctcaggaaaggagtgggtctttcaaacacaaaagctgtcaagccaaccaaaataatgcccaagaaggtggttaggttgattgcaaaaggtaagggattcctcgacaacattaccatctctaccacagcccacatggctgcattttttgctgctagtgattggctagtaaggaaccaggatgagaaaggtggctggccaattatggtgacccgtaagttaggggaagggttcaagtctttagagccaggatggtattctgccatggcccaagggcaagccatttctacattagtcagggcctatctgttaacaaaagaccatatattcctcaattcagctttaagggcaacagccccttataagtttctatctgagcagcatggagttaaagctgtgtttatgaataaacatgactggtatgaagaatatccaaccacacctagctcttttgttttaaatggctttatgtattctttaattgggctgtatgacttaaaagaaactgcaggggaaaaactcggaaaagaagcaaggtccttgtatgagcgtggcatggaatctcttaaagccatgctgcccttgtatgacactggctcaggaaccatctatgacctccgtcacttcatgcttggcatcgctcctaacctggctcgctgggactatcataccacccacatcaatcagttgcagctactcagtaccattgatgagtccccaatcttcaaagaatttgtcaagaggtggaaaagctaccttaaaggcagcagggcaaagcacaactagagctcacaaccaaaactgcccttcagcctctgctgtacacagaaactacaggctctgtctcaggagagcataggcacattttaaaaggttatgtactaggtttttgtggattctatcaaagtgataagtgatccttaaaaccagccttctaaaataattgcattccatgggttgggtatttagaaatgtaggtggcatttagaacacaatgtttaatcaatgggctgaacaaagatgcttcactttgccttgcccatcaccctatacagtttcgcagatagtctagtcactctatgtgagaaagataatggtaagtagttgctactggccaactgtctagcacttacctgaaaacttagtatggagctcttttaaaatgtgattatttatatttatgttgaaagcggactttaaaaaaaataatgtgctgtaacacagtaaatatgtacttgtagcctggatagcagactgtgttcaactttttaaaaagatgtttcctttctatagattaatttcttgggagcaaatgagtatttgttgcatttgttcaatttgttgtatatggtgaatatttaattatggttttcttgaaacgtgtaaattaaaaacacaatcagtgttcaggcttcagttatataatgtaagcacaactaaaatgaaacttgttgactgcacaag

SEQ ID NO: 13244 - protein, 443 aa, Homo sapiens
MSFEGYNVEVRDRVKCISGVEGVPLSTQWGPQGYFYPIQIAQYGLSHYSKNLTEKPPHIEVYETAEDRDKNKPNDWTVPKGCFMANVADKSRFTNVKQFIAPETSEGVSLQLGNTKDFIISFDLKFLTNGSVSVVLETTEKNQLFTIHYVSNAQLIAFKERDIYYGIGPRTSWSTVTRDLVTDLRKGVGLSNTKAVKPTKIMPKKVVRLIAKGKGFLDNITISTTAHMAAFFAASDWLVRNQDEKGGWPIMVTRKLGEGFKSLEPGWYSAMAQGQAISTLVRAYLLTKDHIFLNSALRATAPYKFLSEQHGVKAVFMNKHDWYEEYPTTPSSFVLNGFMYSLIGLYDLKETAGEKLGKEARSLYERGMESLKAMLPLYDTGSGTIYDLRHFMLGIAPNLARWDYHTTHINQLQLLSTIDESPIFKEFVKRWKSYLKGSRAKHN

SEQ ID NO: 13245 - DNA, 1745 bp, Homo sapiens
aaatcgatgaagattgtatttttgcaccttaactccacattgctttattggttaatttatattctttccatgtaattcatgtaattgtatgtctgtgtgtgttttatgtgtcaccacctttcatgtttttgattgccctacaaagagaaaccaaatgagctgattactgactataagttctcagcctttatggacctaatcttatttttatttacttgagtaatgtttattctctgcatgaaccatgatttctcctgtgagccattccagcataagctgtgaatatgtattaacaaatatatacatttctatttttataatccataaggatatgcctgttttaaataacatacatattaacaatatctatcaggaaaaccctcaagacagcttctagttaaaacctttgttgctgtcctctcaaactatatttataaaaatttgctagggccaaatccatacttgcagaataattcatcaaattttatttttaagtgaaaagtaacctttcaggcatttcagcagcatacattgacaatctagggtatatatgtatgtatgtttcttattgtatgtctatatatgtatgtggggaggacaggagtgaatgttcacacacttttcttgcgtactcaactaaattggagaatgtttctgaagaaaattggatgaaattagctgctgagattgagtttctgccttaaaatctgaaacaaaaaaagggacaaattgctggtagatctactgactgtagccatcaccagaacacttagtttcttcccagacatgaatttcctgacaggctctgagccagaaacacactgtgggcgtgcatctggttcagccctggatatgcctccactgtggagggaagcattggaactggagttgtgcacagcaccgcagctagtgggcctggctgggggtgcagaagggcagggtagttctttccatttccccttgcagctacacttactttctccctgactaccaaatggagtgacggttgaagaatcaagctcataatatgatacacccagacagacccagaaatcttttgatttccccagcgagatacttaccactctctcttctctttcccatggttaaaacaggagttgtgttctctgtcgctgctaaattattcttcacttgagtgaagcaaatatttagcttccaaataaagtatattttgttctgaactggcagtttaagaggagataccgtagtctagattgtctttgaggtagaatatatgatggaccacatagtttaagattacaaggtactttccctcttctctcaggccatgcatttgaataaagtgcctcccttagcctgagctcctaaagacctcttgtacttggttgcaaactcagatctctagtctagtctagtctagtctagtctagtcatgtgtgactgtgtactgagataccactagcccagtttgctgggtctctatgttttggaagttgggggtttaataatatttaatgtctttttaggatcataaacataaataggtttgttgatattcaggccttcagaatttaagggttttaaatatagcattcagattgtaattggtatgtttttgccatctggtccactcaattgtatatttttattttgcaaaacaacccaaaacttactttacgttgctttgttcagtaccttttgaattcccccagaagagttgttttcaaaacaaacattccagaatgaatgtcgctcttcaatgg

SEQ ID NO: 13246 - DNA, 1798 bp, Homo sapiens
  CDS (213)..(974)
tgattgcaaacgagcaaaagacttctctcccaaatttgttccaggataaaaacagaccgtgtctcagtaactggccagaggatacggatgtcctctacatcgtgtctcagttctttgtagaagagtggcggaaatttgttagaaagcctacaagatgcagccctgtgtcatcagttgggaacagtgctcttttgtgtccccacgggggcctcatgtttacatttgcttccatgaccaaagaagattctaaacttatagctctcatatggcccagtgagtggcaaatgatacaaaagctctttgttgtggatcatgtaattaaaatcacgagaattgaagtgggagatgtaaacccttcagaaacacagtatatttctgagcccaaactctgtccagaatgcagagaaggcttattgtgtcagcagcagagggacctgcgtgaatacactcaagccaccatctatgtccataaagttgtggataataaaaaggtgatgaaggattcggctccggaactgaatgtgagtagttctgaaacagaggaggacaaggaagaagctaaaccagatggagaaaaagatccagattttaatcaaagcaatggtggaacaaagcggcaaaagatatcccatcaaaattatatagcctatcaaaagcaagttattcgccgaagtatgcgacatagaaaagttcgtggtgagaaagcacttctcgtttctgctaatcagacgttaaaagaattgaaaattcagatcatgcatgcattttcagttgctccttttgaccagaatttgtcaattgatggaaagattttaagtgatgactgtgccaccctaggcacccttggcgtcattcctgaatctgtcattttattgaaggctgatgaaccaattgcagattatgctgcaatggatgatgtcatgcaagtttgtatgccagaagaagggtttaaaggtactggtcttcttggacattaatctttgaatacttgctgactgctaagaaatgacagaggggaagaggagtttgacatgttagggcattaaagcaaaggtggatttaagaattaaaccattacatgccccttccaaaaggcagaaatccattcaaacgtgactgtcccaaatgccttatgtcaaataaagcagattgcactgatggacatcagacttgaaggaaatgtttccaattttatatttaaggggggtggtgggtgggagggggcaagtaaagacggaacaagtttagtagcagtaatagtaaatcatgtttacatatgagatttatagtcgtgggaggggaataaagttctgttatatttccttgctcgagtttcataccagatgcgttggtccataaaggattgtatcaagtagatgggacaacattctgctctgaacgaaaagtaattttagagacataacctgcttaccaatgcctgtctttgattcatattctactttcaataaagcatgaaagtgaagaacttgtcctaagtgtggaaaagtgtcttcagatttagactcttctccatgtcagctgcagcgccacccgccttacacctgcccggccgtctgtctcttggtattgggtaaaggagggggcacctgcatgtctcctgcaatgagcaaggaattatgtctcatgttttgacttcagaggctttttgctttggtgcatttcagaaaggatggagaacatttattatgtgtgaaagcatcctcttccggttttgctgttattcaaaagtgggaaatgtacctggcacgtttgaaaataaaaaatctgactacctatc

SEQ ID NO: 13247 - protein, 254 aa, Homo sapiens
MFTFASMTKEDSKLIALIWPSEWQMIQKLFVVDHVIKITRIEVGDVNPSETQYISEPKLCPECREGLLCQQQRDLREYTQATIYVHKVVDNKKVMKDSAPELNVSSSETEEDKEEAKPDGEKDPDFNQSNGGTKRQKISHQNYIAYQKQVIRRSMRHRKVRGEKALLVSANQTLKELKIQIMHAFSVAPFDQNLSIDGKILSDDCATLGTLGVIPESVILLKADEPIADYAAMDDVMQVCMPEEGFKGTGLLGH

SEQ ID NO: 13248 - DNA, 1981 bp, Homo sapiens
  CDS (218)..(853)
acactgctcagggaagagcctgctacggtggactgtgagactcagtgcactgtcctcctcccagcgaccccacgctggaccccctgccggaccctccacccttcggcccccaagcttcccaggggcttcctttggactggactgtccctgctcatccattctcctgccacccccagacctcctcagctccaggttgccacctcctctcgccagagtgatgaggtcccggcttctgctctccgtggcccatctgcccacaattcgggagaccacggaggagatgctgcttgggggtcctggacaggagcccccaccctctcctagcctggatgactacgtgaggtctatatctcgactggcacagcccacctctgtgctagacaaggccacggcccagggccaacccaggccaccccacaggccagcccaggcctgccggaagggccgccctgctgtgtccctgcgagacatcaccgcacgtttcagtggccagcagcccacactgcccatggctgatactgtggaccccctggactggctttttggggagtcccaggaaaagcagccaagccagagggacctgccaaggaggactggcccctctgctggcctctggggtccacatagacagatggacagcagcaagcccatgggggcccccagagggaggctctgtgaagccaggatgcctgggcattccctggcaagaccaccgcaggatgggcagcagagctctgacctaagaagctggacttttgggcagtctgcccaagccatggcctcccgccaccgcccccgccccagcagtgtcctcagaacactctactcgcacctcccggtgatccatgaactctgacccctccccagtaaaggcttctgtagagagcatgctgggtctgcatctcctctcgtctcctccatggtggtcactgcccctggcaggtctctgaaagggaaatgcttttctgcagaggcccctgcttgggcagttcacagtgagaccgaccccctctgaatatgataacagcctgtttcacatgaggagatgttaccaatcccgttcgctctgacccttgctggctgatcaccttgagcaacttacttaacatctgtgttcctcagtttctcatgggtaatatagggataattactggcacctgcctcccaggccattctgacgtgtaaccgcatataggagcccactggctgagtagctaccatcatcgctggtggggaaactggtggtaggggtgtgagggtagtgggggtgtcagccccccaggtgtttcagaacaaggcctcgggcactcccaagtctgcctcttggctcccaccctcaaagcccatgttctgtgaggcccaagagaacacatggagtcttagcaaatgcactaatgtattccgggggactgtcacctggcaccactggggcactctgctggctacaactcatacgtcctgtggtggcattgggagagttcccccatgatgagggccaagatagaatctgtaccactcagtgctaccatccccacccctacaccacttccacacaggggcctcatggcatggtcagggtcccagctgtgggtgagagcagggcactgtccagctgtccactggggaagtcaagatgtcctaaggcccaggccagggcatctggagtctgaaggaccctagttcctagaggcatctggcagcaagaaggtgaggcatcagggaacgggaatcaggctgggactgatcagaggtgaagggacagagagaggagaggaggaagattgagctgggggcaacagccaagctcacctgggcaggtctctgccacctccttgctctgtgagctgtcagtctaggttattctctttttttgtggctatttttaattgctttggatttgttaaatgttttctgtcttctgttaagtgtgttttctctggagatagaatgtaaaccatattaaaaggaaaaagtttcagac

SEQ ID NO: 13249 - protein, 212 aa, Homo sapiens
MRSRLLLSVAHLPTIRETTEEMLLGGPGQEPPPSPSLDDYVRSISRLAQPTSVLDKATAQGQPRPPHRPAQACRKGRPAVSLRDITARFSGQQPTLPMADTVDPLDWLFGESQEKQPSQRDLPRRTGPSAGLWGPHRQMDSSKPMGAPRGRLCEARMPGHSLARPPQDGQQSSDLRSWTFGQSAQAMASRHRPRPSSVLRTLYSHLPVIHEL

SEQ ID NO: 13250 - DNA, 1900 bp, Homo sapiens
  CDS (225)..(1172)
tatataaacaaaccaaaattatttcttcaaatcaagaacttatctacgaagggcgacgcttagtcttagaacctggaaggctggcacaacatttccctaaaactactgaggaaaaccctatatttgtagtaagccgggaacctctgaataccataggattaatatatgaaaaaatttccctccctaaagtacatccacgttatgatttagacggggatgctagcatggctaaggcaataacaggggttgtgtgttatgcctgcagaattgccagtaccttactgctttatcaggaattaatgcgaaaggggatacgatggctgattgaattaattaaagatgattacaatgaaactgttcacaaaaagacagaagttgtgatcacattggatttctgtatcagaaacattgaaaaaactgtgaaagtatatgaaaagttgatgaagatcaacctggaagcggcagagttaggtgaaatttcagacatacacaccaaattgttgagactttccagttctcagggaacaatagaaaccagtcttcaggatatcgacagcagattatctccaggtggatcactggcagacgcatgggcacatcaagaaggcactcatccgaaagacagaaatgtagaaaaactacaagtcctgttaaattgcatgacagagatttactatcagttcaaaaaagacaaagcagaacgtagattagcttataatgaagaacaaatccacaaatttgataagcaaaaactgtattaccatgccacaaaagctatgacgcactttacagatgaatgtgttaaaaagtatgaggcatttttgaataagtcagaagaatggataagaaagatgcttcatcttaggaaacagttattatcgctgactaatcagtgttttgatattgaagaagaagtatcaaaatatcaagaatatactaatgagttacaagaaactctgcctcagaaaatgtttacagcttccagtggaatcaaacataccatgaccccaatttatccaagttctaacacattagtagaaatgactcttggtatgaagaaattaaaggaagagatggaaggggtggttaaagaacttgctgaaaataaccacattttagaaaggtttggctctttaaccatggatggtggccttcgcaacgttgactgtctttagctttctaatagaagtttaagaaaagtttccgtttgcacaagaaaataacgcttgggcattaaatgaatgcctttatagatagtcacttgtttctacaattcagtatttgatgtggtcgtgtaaatatgtacaatattgtaaatacataaaaaatatacaaatttttggctgctgtgaagatgtaattttatcttttaacatttataattatatgaggaaatttgacctcagtgatcacgagaagaaagccatgaccgaccaatatgttgacatactgatcctctactctgagtggggctaaataagttattttctctgaccgcctactggaaatatttttaagtggaaccaaaataggcatccttacaaatcaggaagactgacttgacacgtttgtaaatggtagaacggtggctactgtgagtggggagcagaaccgcgccactgttatactgggataacaatttttttgagaaggataaagtggcattattttattttacaaggtgcccagatcccagttatccttgtatccatgtaatttcagatgaattattaagcaaacattttaaagtgaattcattattaaaaactattcatttttttcctttggccataaatgtgtaattgtcattaaaattctaaggtcatttcaactgttttaagctgtatatttctttaattctgcttactatttcatggaaaaaaataaatttctcaatttt

SEQ ID NO: 13251 - protein, 316 aa, Homo sapiens
MAKAITGVVCYACRIASTLLLYQELMRKGIRWLIELIKDDYNETVHKKTEVVITLDFCIRNIEKTVKVYEKLMKINLEAAELGEISDIHTKLLRLSSSQGTIETSLQDIDSRLSPGGSLADAWAHQEGTHPKDRNVEKLQVLLNCMTEIYYQFKKDKAERRLAYNEEQIHKFDKQKLYYHATKAMTHFTDECVKKYEAFLNKSEEWIRKMLHLRKQLLSLTNQCFDIEEEVSKYQEYTNELQETLPQKMFTASSGIKHTMTPIYPSSNTLVEMTLGMKKLKEEMEGVVKELAENNHILERFGSLTMDGGLRNVDCL

SEQ ID NO: 13252 - DNA, 2625 bp, Homo sapiens
  CDS (129)..(2624)
gttaatgacgtcacgttgtttcgcgggagaaattcgaaagtggattttgtgcaatttgacaggtggtataaatagttgaatatttcctattttctggacccagctggtttataacttcagaagaaataatggaaagccaagaatttattgttctatatactcatcaaaagatgaagaagtcaaaagtgtggcaagatggaattctgaagatcactcacttaggaaacaaagcaattttatatgatgacaaaggagcatgtttggagagtctgtttcttaaatgccttgaggtgaaacctggagatgacttagaaagtgatcgatacttaatcacagttgaagaggttaaagttgctggagccataggtattgttaagcagaatgtcaataaagaagcaccagagttaaattcaaggacatttatatcctctggccgatctcttggatgtcagccctctggcttaaaaaggaagtttactggttttcaaggaccacgtcaggttccaaagaaaatggttattatggaaagtggtgaatcagctgcatcacatgaggctaagaaaactggccctactattttttctccattctgcagcatgcctcctttgtttcctactgttggcaagaaagatgtaaataatatactggcagaccctgagaacattgtgacttacaagaacagggagagaaatgccatggatttttcttcggttttttctccatccttccagattaacccagaagtgctgtgtgaagaaaattatttttgctcacctgtcaattctggaaataagctttcagactctttactgaccaatgagcctgtgaaaagagatagtttggcatctcactattcaggagtttcacaaaacatcagaagcaaagcacagatattagctcttctgaagtccgaatcatctagttcatgtgaggaactaaattctgagatgacagagcattttcctcaaaaacaaccacaaggaagtttaaaaattgctactaaaccaaagtacctaattcaacaggaagagtgtgctgagatgaagagcacagaaaatttatactaccagcatcaatcagaaaataccatgagaaataaaagccggtgggccatgtatttatcctcacagagttcacctatacattcttctactgtagatgggaatgatacagaaaggaaacccaaggcccaggaagatgatgtaaattctaatttgaaagacctttcattacaaaaaattatacagttcgttgaaacgtatgctgaagagaggaaaaagtataatgtagaccagtcagtcggtaataatgatccatcctggaatcaggaagtaaaattagaaattccttcattcaatgaaagcagtagcttacaggttacttgtagcagtgcagaaaatgatggtatattatcagaatctgacattcaagaagataataaaataccttttaatcaaaatgacaaggggtgcattaaaggatcagttctcattaaagaaaatgctcaggaggtaaatacatgtggaacactggaaaaggagtatgaacaatcagagtcatctctgccagaactgaaacatctccaaattgaatctagtaataattctaggatctctgatgacattacagacatgatttctgaaagtaaaatggataatgaaagtcttaatagtattcatgaatctctgagtaatgtaacacaaccgtttttggaggtaacttttaatctgaacaattttgagaccagtgacactgaggaggaatcacaggaaagcaacaaaatttcccaggattcagagagttgggtaaaggacattttggttaatgatggcaattcatgttttcaaaagaggtctgagaatacaaactgtgaagagattgagggtgaacatttgccattcttaacatctgttagtgacttagacaaaaatgatgaacatgttttaccctcaacttctagtagtgacaacagtgtccaactattaaataccaatcagaatcactatgaatgtattgcacttgataaatcaaatacccacatttccaattctttgttttacccactgggaaaaaagcatcttatttccaaagacacagaagcacatatatctgaacctgaagatttgggaaagattagaagtccaccccctgaccatgttgaggttgaaactgccagagaaggcaaacaatactggaatcctagaaattcttcagaactttctggattagtaaataccatttctattttaaagtcgctatgtgaacacagtactgctttagacagcttggaaatattgaaaaagaaaaatactgtctttcagcaaggaactcaacagacgtatgagccagatagccctcctgaagtgaggaaaccatttattacagtagtttcaccaaagtctcctcatctgcacaaggattctcaacagatactaaaagaagatgaagttgaactaagtgaaccacttcagtctgtgcagttctcttcctcgggaagtaaagaagagactgcttttcaagctgttattcctaaacaaatagagagaaaaacctgtgaccctaaggtaaaatttgtgaagaacatcgatttatttaaccaactacattttcttttctgtttaaaac

SEQ ID NO: 13253 - protein, 832 aa, Homo sapiens
MESQEFIVLYTHQKMKKSKVWQDGILKITHLGNKAILYDDKGACLESLFLKCLEVKPGDDLESDRYLITVEEVKVAGAIGIVKQNVNKEAPELNSRTFISSGRSLGCQPSGLKRKFTGFQGPRQVPKKMVIMESGESAASHEAKKTGPTIFSPFCSMPPLFPTVGKKDVNNILADPENIVTYKNRERNAMDFSSVFSPSFQINPEVLCEENYFCSPVNSGNKLSDSLLTNEPVKRDSLASHYSGVSQNIRSKAQILALLKSESSSSCEELNSEMTEHFPQKQPQGSLKIATKPKYLIQQEECAEMKSTENLYYQHQSENTMRNKSRWAMYLSSQSSPIHSSTVDGNDTERKPKAQEDDVNSNLKDLSLQKIIQFVETYAEERKKYNVDQSVGNNDPSWNQEVKLEIPSFNESSSLQVTCSSAENDGILSESDIQEDNKIPFNQNDKGCIKGSVLIKENAQEVNTCGTLEKEYEQSESSLPELKHLQIESSNNSRISDDITDMISESKMDNESLNSIHESLSNVTQPFLEVTFNLNNFETSDTEEESQESNKISQDSESWVKDILVNDGNSCFQKRSENTNCEEIEGEHLPFLTSVSDLDKNDEHVLPSTSSSDNSVQLLNTNQNHYECIALDKSNTHISNSLFYPLGKKHLISKDTEAHISEPEDLGKIRSPPPDHVEVETAREGKQYWNPRNSSELSGLVNTISILKSLCEHSTALDSLEILKKKNTVFQQGTQQTYEPDSPPEVRKPFITVVSPKSPHLHKDSQQILKEDEVELSEPLQSVQFSSSGSKEETAFQAVIPKQIERKTCDPKVKFVKNIDLFNQLHFLFCLK

SEQ ID NO: 13254 - DNA, 1912 bp, Homo sapiens
  CDS (14)..(1144)
aggcctcagaaagatggcgtcctcggagcaggcagagcagccgagccagccaagctctactccaggaagtgaaaatgtgctgcctcgagagccgctgattgccacggcagtgaagtttctacagaattcccgggtccgccagagcccacttgcaaccaggagagcattcctaaagaagaaagggctgacagatgaagagattgatatggctttccagcagtcgggcactgctgccgatgagccttcgtccttgggcccagccacacaggtggttcctgtccagccccctcacctcatatctcagccatacagtcccgcaggctcccgatggcgagattacggcgccctggccatcatcatggcaggcattgcatttggctttcaccagctctacaagaaatacctgctccccctcatcctgggcggccgagaggacagaaagcagctggagaggatggaggccggtctctctgagctgagtggcagcgtggcccagacagtgactcagttacagacgaccctcgcctccgtccaggagctgctgattcagcagcagcagaagatccaggagcttgcccacgagctggccgctgccaaggccaccacatccaccaactggatcctggagtcccagaatatcaacgaactcaagtccgaaattaactccttgaaagggcttcttttaaatcggaggcagttccctccatccccatcagccccgaagatcccctcctggcagatcccagtcaagtcaccgtcaccctccagccctgcggccgtgaaccaccacagcagcagcgacatctcacctgtcagcaacgagtccacgtcgtcctcgcctgggaaggagggccacagccccgagggctccacggtcacctaccacttgctgggcccccaggaggaaggcgagggggtggtggacgtcaagggccaggtgcggatggaggtgcaaggcgaggaggaggagagggaggacaaggaggacgaggaggatgaggaggatgatgatgtgagccatgtggacgaggaggactgcctgggggtgcagagggaggaccgccggggcggggatgggcagatcaacgagcaggtggagaagctgcggcggcccgagggcgccagcaacgagagtgagcgggactagggctgcgcctgctgcctccagccctgaggatggcatctagtgtgcccgtgcgtggccataccctgcctccctctctggccctgggagggcagcttggagcccaggtagggggcagagctgtcctcagctgcactgcggcctggtggcagtgtggggagtcacacttctgtccacctggcctcctctcgcctggccgccagccccagccccagccccagccccaggcccagctgcctttggctttgatctcaagtcaggctgaaggcagcgaagcctcggggcccaagcccctccccagccccctctcccggacagacgccttgcccagggtgtgtttgctgagtgtcttgactaccgtgacaccacgcatggccagagctagcgtccctactgcctcccgactcctcagtggaggaggagctgcggtccctctggtgtctgccatccccctccctccctgggcccggccctggacccgtcaggtgcctgtccccagccccaaccccactcatgccccgtcgtcctcccagacaaatgaaaccacgctgcgcttccgatgcccccgcttgccgtgtaatggttcagctaatcccatggcgagatgggggctcactccggaggaggagccaggcagcagggccttcctgaccaacagccagctctgtccttccccccaggaaacacatgttcatttgtgtgatcatgtatagacctcagaacggaagataggactgtatataattgtaataaataccagttgccact

SEQ ID NO: 13255 - protein, 377 aa, Homo sapiens [sequence omitted]

SEQ ID NO: 13256 - DNA, 2487 bp, Homo sapiens
ttttgtatgaaattggaggaaatattggggaacgctgccttgatgatgacacttacatgaaggatttatatcagcttaacccaaatgctgagtgggttataaagtcaaagccattgtagaagacttaacaagctgcagataaccatgtggacttctgtcataattcttgctgagtcaagagtgtaaataaaagaaatggcaggactcatattattcagttgtacccaagtatttaaaaatgactctcttaagccttaaaaagtcatagatttgtgctgctgccagaattatattaattattattaatgttattattagaaaaaaaatttctggagtgagagtaaagaggcttaattagtttgtgggcagttttcatatgctctgtgaaatgtgtccggatgtgacatagtttttttttttaatatgtggaaatgtcttctcttcccattcttttctcctaaaatcatatatactgtaatatatgctctctcacctctattacctcctcacatctaccctttcccagttaggtttgctttttgaccaaaaagataacaaataccaggtatggcaagttgtgaagacagcacattaaaacatacctaatttcacagtattcctgtcacgacagaatgttagtattcatctctttgaatcatttgctcaaataataacattccaccttttcctgctgtatcacaggaagtgatttgcattttttttcagttcatctgacttatgttcacagaaccgtatcagcgaccaagaaaataggactgtcagaagctgccagttattactgaaccattaaatacttatatactaagaataaataaaatatacccatgtgaaataataattggattatggataacaagagagtgaaagccaaagcactttctgtctactgtactcttctaaatggaattttaaaagtcatagctggctttacgtgttgtcattattagcattataaatatgcatgatagtataatccagtaatggttgaagaatgtattttacttaaagagggatttttttttttaagtcctgaataagtctactggaagaattattcttctgggtgaaaaagcttttgtttgtgttcttattttaaataatcggagtcaatttattaaaatgttcttgaaagtactattcccagggattttaatgcacaaaccatattgtgacaagagatgagcctctgtactgtaaataagaaatgaagtagagaaatgttaaatattttatgagtttagaatatagtaaataaaaggtgatgtaaatgaatgctgcacaaacggtgttcatgatacttttagtagtactttaggaaaaactacacattctcagaagctcttgatgtctctaatgaagggggggaatgctgttaatgagaacagtcataaatttttagcatataattacaagaacagcctgtggatatgatcacttaaatgattttgtggtgattcgtgccattgcttttttatttaaaagaaaattttgtaattaaatgcctttttctaaattatcttctcttggaatcattacttttaatcctatgtgtttatgagtatttttgccttttttttattaatattgagaaatggacttttttgttattaaaagtcacctctattttctattttctttgtaatttttaaagtaggaagatgtcagagatgtaaatatgttttcgtctttagtttttttccttttacaaatttttattcttcaggattttcaaaatacagtttagtctgtttctttgacaatatgtattaatttcccaattaacaaaatggtacttattagtgggttgaaaacaattaataatataaaagaaaaattaagtgcttaaaacattttaggagtatacaacttcaaaaaaaaagatagcagtgaggataatgatttaagtaaaaggttgtctgaagcatatgccaactaaatttcgcaacgtttgctacctacctgaaaaggagggtcaggagggagacacaacatatttttgatcatgaaaaagtatcttaattttaaaaaagtgaaaatgccattttattttgaatcccttttagaactcacgacccaagttcatcaatgttgaataataccacgtttaaataacaaaaaaatatggactttaaaaaatctcaaattttttagagacagggtcctgctctgttttccagattggagtacagcagtgcattcgcggctaactgcagcctcaagcactggggctcaagcaaacctcctgcctcagcctcgtgagtagctaggaccacaggtgcatgccaccatgcctggctctaaagagaaaaaaaacttgataccatagagccttgaatataaatatcctgatgttaacctactgcttttgctgtgattttttttccttagtgagttttaaatctcaggctagatttttatctgtttttctgtgtgtgtatgagacaaaataaaaataaatatatttgc

SEQ ID NO: 13257 - DNA, 2134 bp, Homo sapiens
  CDS (166)..(1614)
gactgagctacggttctggctgcgtcctagaggcatccggggcagtaaaaccgctgcgatcgcggaggcggcggccaggccgagaggcaggccgggcaggggtgtcggacgcagggcgctgggccgggtttcggcttcggccacagctttttttctcaaggtgcaatgaaagccttccacactttctgtgttgtccttctggtgtttgggagtgtctctgaagccaagtttgatgattttgaggatgaggaggacatagtagagtatgatgataatgacttcgctgaatttgaggatgtcatggaagactctgttactgaatctcctcaacgggtcataatcactgaagatgatgaagatgagaccactgtggagttggaagggcaggatgaaaaccaagaaggagattttgaagatgcagatacccaggagggagatactgagagtgaaccatatgatgatgaagaatttgaaggttatgaagacaaaccagatacttcttctagcaaaaataaagacccaataacgattgttgatgttcctgcacacctccagaacagctgggagagttattatctagaaattttgatggtgactggtctgcttgcttatatcatgaattacatcattgggaagaataaaaacagtcgccttgcacaggcctggtttaacactcatagggagcttttggagagcaactttactttagtgggggatgatggaactaacaaagaagccacaagcacaggaaagttgaaccaggagaatgagcacatctataacctgtggtgttctggtcgagtgtgctgtgagggcatgcttatccagctgaggttcctcaagagacaagacttactgaatgtcctggcccggatgatgaggccagtgagtgatcaagtgcaaataaaagtaaccatgaatgatgaagacatggatacctacgtatttgctgttggcacacggaaagccttggtgcgactacagaaagagatgcaggatttgagtgagttttgtagtgataaacctaagtctggagcaaagtatggactgccggactctttggccatcctgtcagagatgggagaagtcacagacggaatgatggatacaaagatggttcactttcttacacactatgctgacaagattgaatctgttcatttttcagaccagttctctggtccaaaaattatgcaagaggaaggtcagcctttaaagctacctgacactaagaggacactgttgtttacatttaatgtgcctggctcaggtaacacttacccaaaggatatggaggcactgctacccctgatgaacatggtgatttattctattgataaagccaaaaagttccgactcaacagagaaggcaaacaaaaagcagataagaaccgtgcccgagtagaagagaacttcttgaaactgacacatgtgcaaagacaggaagcagcacagtctcggcgggaggagaaaaaaagagcagagaaggagcgaatcatgaatgaggaagatcctgagaaacagcgcaggctggaggaggctgcattgaggcgtgagcaaaagaagttggaaaagaagcaaatgaaaatgaaacaaatcaaagtgaaagccatgtaaagccatcccagagatttgagttctgatgccacctgtaagctctgaattcacaggaaacatgaaaaacgccagtccatttctcaaccttaaatttcagacagtcttgggcaactgagaaatccttatttcatcatctactctgtttggggtttggggttttacagagattgaagatacctggaaagggctctgtttcaagaatttttttttccagataatcaaattattttgattattttataaaaggaatgatctatgaaatctgtgtaggttttaaatattttaaaaattataatacaaatcatcagtgcttttagtacttcagtgtttaaagaaataccgtgaaatttataggtagataaccagattgttgctttttgtttaaaccaagcagttgaaatggctataaagactgactctaaaccaagattctgcaaataatgattggaattgcacaataaacattgcttgatgttttcttgtatgtctacattaaacttgagaaaaagtaaaaatt

SEQ ID NO: 13258 - protein, 483 aa, Homo sapiens
MKAFHTFCVVLLVFGSVSEAKFDDFEDEEDIVEYDDNDFAEFEDVMEDSVTESPQRVIITEDDEDETTVELEGQDENQEGDFEDADTQEGDTESEPYDDEEFEGYEDKPDTSSSKNKDPITIVDVPAHLQNSWESYYLEILMVTGLLAYIMNYIIGKNKNSRLAQAWFNTHRELLESNFTLVGDDGTNKEATSTGKLNQENEHIYNLWCSGRVCCEGMLIQLRFLKRQDLLNVLARMMRPVSDQVQIKVTMNDEDMDTYVFAVGTRKALVRLQKEMQDLSEFCSDKPKSGAKYGLPDSLAILSEMGEVTDGMMDTKMVHFLTHYADKIESVHFSDQFSGPKIMQEEGQPLKLPDTKRTLLFTFNVPGSGNTYPKDMEALLPLMNMVIYSIDKAKKFRLNREGKQKADKNRARVEENFLKLTHVQRQEAAQSRREEKKRAEKERIMNEEDPEKQRRLEEAALRREQKKLEKKQMKMKQIKVKAM

SEQ ID NO: 13259 - DNA, 1753 bp, Homo sapiens
ggagaatgcgcgggtcgagtggtgtagttcgatttttgcgtgtgtgcgttgcttgcggcctttgtgcctttttattctttgcttacctttatgatataaagaccttatttcttacaaggaggaaaagaccgctgacttcagaaacagcgggaaccccagctcgtcaccggtaattcaagaggaaacgcttgagcaattactgatgttgtaaactgggatcagaagacatacatggtatcgtatcccaggcaaggcacagtggctcacacctgtaatcccagcactttgggaggctgaagaaggcagatcacttgaggtcaggagttcgagaccagcctggcttacatggtgaaacccatctctactgaacatacaaaaattagctggacatggtggttagctgcacctctactccacgtgttcctcccttcaggtcccaggctgatggagtagcctctgtgtgtttgggatgttgtcagtcataatggtggacacaaaagagattatgacaaaccgtgtattgtctcctacaatttctgctcacagaagtggacaacatcacttctttccacatttcattgaccagagcaagtcatgtgaccaagcctgattcaaaataggctggagcaaggaggagcagcaaacataacattcccagtttacagctgaggaaattaagcttcaagttgcccaagtttatagaatgagtcaatggcagaggttgaactcagatgacaaaattggggtctggacgtgtgcaaggacttttccaaagtaagctggaaaggagctgcttagctgagaggttctggctccagagtctcctgtgaagttgcagtcaagatgtctgctgggaccccagtcatttgaagccctgtctggggcaggagaatctaggtccaaaatggccgttgcaggagtccttatccacaccatgtgggacctcttcatagatgttcgagtgtcctcatggcatggccactggctttccccaaagtaagcagtccaaaagagggtaagacagagcccacactgtcttttatgaattagccttagaagtctaacacggttacttccaccacattcattagtcgttaggtacagctcacattcatggggaggaaaatcagggcctgtctttagataggagatgtatcaaagaatttgtggacatattttaaaatcacagcactactcttgatgtactaagtcagtgactcccccaggagtctcacagagaattgactccttgcccacctatactacctttgtgggtagagactccagtagtgtgctggttaatgttcaaccagtggctttctagaaaacaaaatgtatggatacatatatatgttctaagttttactgatatgaagaatgtgtagcacagaatttataaataataaaatatacagtattatttattgtaaattccataaaacctgttgtttttcacaaaaggttttagtttatttttcccaaatgcttgtattggtaacattttctgtattacctttttatgtccagacaatcaacaaaactgaaaaagcccagccttgtagcatttgccagttattgtgtaaatgtccccactatggtggatttcaggttaccactatgatatcacagaatgcagaattggaaggagattcacagcagcaccccattatactatattttcaccatacagatgcagtcgatgtaaattacctgaggagcataaataataataaaatgaagttaaataattcgg

SEQ ID NO: 13260 - DNA, 1984 bp, Homo sapiens
ttctgatgaatgtgtgaaagagttgattatttcaacagtattggttaagtcacaacgacgaagtgctgagaaggttatgggtaccaggaagaaacaaacagaagtcttaagattagaatgagaaccaaagagaatttaaccctgccattttttttttttttaacaccaagatcctaagtaattccaaatgccttagatatcaatgaaagctacacaccattgagatgggcaaaattctttctctacaaagggagtaatcaagtaaatacctgttctctttcaatggactgttgcctattgagcattgtggatgatgtgttttcagatttccaggtgaagttctgaccctacctgtttggccaaagacgtaaattgagaggaaaggccttggtcttcctgatcaaccagcatttaacgaacagtggcttaatgcagatcactcaagaggcagcatagcaatgtaaaaggaatataagtaggtgttggatgcctttttcctagaccaggaatggggaatatataacacctgtgccaccgctcttttaaggaggcattatgaatgagtgcagcattcctgtcctctgtgccaggatttggtcttagaatccatgtcagattggtgcttccagacatctattcccagtccatcagagtgaaatgaaggctatttgccatccctgccttagacagaggagtgaaagaattaagtgggtagacaccaaccaaaatgactttgaaagcagtgagctgattgagctccagttctgtggttaccagaaatactgagtgtctgtcatgtgcaagacaatgctaagaacagaatacagacataaataagtcacggcccatgaccttgaagagcttacggccttataaagaggttcactgtaattgtcttcaccagggcgtccttctcaaagatgcccacttttgtctggcacattggggctcggtggtctggtggtcccttcggtcttggccctatctgtcctttgtttttgtgatttactaacaatcatcacgaaccagttttgtttttcttttaaatttgaacatcacatcttgtgttttagttttttgctctatgatttttttctcactgcttttcagtcttctctgtacttcatttttgtgaaaaagtgaaaatcacatataatctttatttaaaaatgctcaccaaccactgcagactttggagttagggattcagcagcttgttccagtgaaaaggaggagtgaagctggggaagttagtatctaagaggggcaagctgattgcatgtgcatttatacctatgcctttaaaatattcccataaaaagtattaataaagaaatttccattccacactagtactgatgaaaaggtggttgattttgccttgtgataattatcaaaggatagtttttcatccttagattttattcacatgagagattttttttattttctctgttgacttaggaacacatcataaattcaccccaactgacacgttgctgacgtctgtacttgacataaccatttttattcatacaggaagcattaaatataaaagatggtcagttttgaagagcaaagggtgctgaaatgacttgtacggttggctggtgctttctcaaatggattgccatagttcattactagtaaagaaaaggaaaatgtgatttacgttgtcatttttcctattaaaaaaaacccttaagaatggggcacttgagctgtccctgcaatgttttcatatctagtagtcattttagggaaagtgataatctgtagaatgaatagttatgttttgatatgactgatactttctttgttaaaaggttgtattaagtcttcaatttcaagtctagcttaaaagtgtaaacattatgtgattcatttgaatacaagaatgcctatgaaatacccactataacagcattccttttgtgtttagaactatagaagaaaatgtcttcaaataaagtagttttcagtc

SEQ ID NO: 13261 - DNA, 1900 bp, Homo sapiens
  CDS (199)..(1725)
tacaacggaatccggacgccgggcgcgagtggagctcagtgccagaggaggggattcccggcgccgggggacagagcccctttttttttttttgccgaaagaccctttctgctggggagcctcttgtgtccagcctaggcccgcgtgcagcgccgacggatgatcgtcttcttggaaagtgaataaacttaattgagaatgtctgaaaaccttgacaagtccaatgtaaatgaagcaggaaaatcaaaatccaatgattctgaggaaggccttgaagatgctgtggaaggtgctgatgaagccttacaaaaagcaataaagtcagactcctccagcccccaaagagtgcagagacctcactctagtcctcctcgctttgtgacagtagaagaacttctagagacagcgagaggcgtcaccaacatggctctagcccatgaaattgtagtaaatggagactttcagattaaaccagttgaattaccagaaaacagcttgaagaagagagtaaaggagattgtacataaagcgttttgggattgcttgagtgtgcagctaagtgaagatcccccagcatatgaccatgctatcaaacttgtaggagaaatcaaagagactctcttatctttcttgctgcctggtcatactagactgagaaaccagataacagaagtcttggatctggatctgataaagcaggaagcagagaatggggcgctagacatttccaagctggcagaattcattattggcatgatggggacactgtgtgcacctgctcgagatgaggaagttaagaaactaaaggacattaaggaaatagtgccccttttcagagaaattttttctgtgttggacctaatgaaagtggacatggccaactttgctatcagtagcatcaggcctcatctcatgcagcagtcagttgaatacgaaaggaagaagtttcaagagattttggagaggcaaccaaattccctggactttgtcacccagtggctggaagaagcctcagaggaccttatgactcagaagtataaacacgccctgccagtggggggaatggctgctggctctggggacatgcccaggctgagccctgttgctgtccagaattacgcttacctgaagcttctgaagtgggaccacctccagaggccgttccccgaaacagttttaatggaccagtctcgcttccacgagctccagttgcagctggaacaactgaccatcctgggggctgtgttgctggtcaccttcagcatggcagcgccaggaatttccagccaggccgactttgctgagaaactcaagatgattgtgaagattttgctaacagatatgcacctgccctccttccatctgaaggacgtcctcactaccatcggggagaaggtgtgcctggaggtgagcagctgcctctccctgtgtgggtcctctcccttcaccacggacaaggagaccgtgctcaagggccagatccaggccgtggccagtcccgatgaccccattcgcaggatcatggaatctcgaatcctgaccttcttagaaacctaccttgcctcgggtcatcagaagccattgcccacagtccctgggggactcagtccagttcagagagagctggaggaagttgctattaaatttgctcgcctggtcaactataacaagatggttttctgtccctactacgatgcaatcctgagtaagatcctcgtccgatcctaacgtgtatgcaccctacagcagcagtattactcactagccacagaatacctgttctgtactctaatgttgcattggaaaatggctatatagtacatgtctatttaacagcaccgattccaaagggaagaatattgtgtatcactgttgaaaagacttgttgagaaatccactg

SEQ ID NO: 13262 - protein, 509 aa, Homo sapiens
MSENLDKSNVNEAGKSKSNDSEEGLEDAVEGADEALQKAIKSDSSSPQRVQRPHSSPPRFVTVEELLETARGVTNMALAHEIVVNGDFQIKPVELPENSLKKRVKEIVHKAFWDCLSVQLSEDPPAYDHAIKLVGEIKETLLSFLLPGHTRLRNQITEVLDLDLIKQEAENGALDISKLAEFIIGMMGTLCAPARDEEVKKLKDIKEIVPLFREIFSVLDLMKVDMANFAISSIRPHLMQQSVEYERKKFQEILERQPNSLDFVTQWLEEASEDLMTQKYKHALPVGGMAAGSGDMPRLSPVAVQNYAYLKLLKWDHLQRPFPETVLMDQSRFHELQLQLEQLTILGAVLLVTFSMAAPGISSQADFAEKLKMIVKILLTDMHLPSFHLKDVLTTIGEKVCLEVSSCLSLCGSSPFTTDKETVLKGQIQAVASPDDPIRRIMESRILTFLETYLASGHQKPLPTVPGGLSPVQRELEEVAIKFARLVNYNKMVFCPYYDAILSKILVRS

SEQ ID NO: 13263 - DNA, 1873 bp, Homo sapiens
gagaccacatgttattatgcaaattatcaggcttttaactctgcttgaggtttgggccttatgaagatcaagatttcttaggcatttatataaaaccactttcttatttctggttttatatcaacaaccacataacctagatacgaaaggagcattctcgcggatttagtgttgacctaagttaacagacttttaaaagacagaactcttacaaaggggcttgagtttttttttttttttgctttttggaagacgtttaaatttagggtttccagaccctgaacctcaatagtgtgcagtagatttccaaagtatgaatcttagaccttgaaaaattctgtatctctgaccttaaaagttttgattattttattctgtttccaaagtgtataaccagttctccaagttctaattggagagctcattagttatcagcctcacagtcacggactctgggatgtcttatttcatatgcctgtaaatttgtgacttgcagtgtgactggccttctcctgtgtgtttatgtagcacaaccacatttgtcttgttggaaggagagccaggtatcatagacagcacattcatttagagccagtcttgactttagattgacctccatgttctccagggagaaaataattatgcaactgtgaacagagaaaaagggcaaggcacactaaccaagggataataaggatgtagtggcatttctaactctgtatttattggttttgtggttttgagatagatgcttaatgttatttctgggcagtttttaaaaaagagatgaaatctccagtgtcataaagactaatttcttcttattttttctaccttaacatcccactatttccaatggcaaaaataggaaacaactgtgttatttaaagtgacttataaatattttgaacaaatcctctgattataataagcctttgctttattttttaaaagaacatgttctgcattcttttctctccaacacagaagtcatatgtgaggcattaatggagggtgggtttactctttcaggccagtagggcattaccatggctgctttaaacttacacggttttttagactcctgaaacagctaacgtcactcatcacacacctgccatactagctgggagtgacttaggcacggcggaaagtctgactcactaaatgtaatgaatgtgactgccattattgagttggagagcagccgaggaggagggattggttcatggtacgtgttgaaaatctgtaaagtcagattttattggatcagtgtggaatgggaattccagagagcagagccttccagaatatttgcagtagaaatatatgtatggccccactgatcactggtagaaaatcagctttgaaaatctcagggtaacagtgactattgtaatctgcatttctgagacttgaaatatttggatggttatgagctacattggaatttacacgtatcagaaatctatgagagtaaactttgaaatgatctttatatctgtaagaaacatttataacacttgtgtcaagacgtatctacaaaaatatttattagaaacacatctaaaaattctaagtacctaagattattaaacagtgcacaaaatagggacagtgtaatacctttatattctattgcatgagtctcatttaatgctaatagcctgcattcaattcagtagttcaattagtctgacatttaaaatgatcatatgtagaggtaataagtgaaatgaaaccgttataaactcaaaatcaagaattttaattccaggccttcctgatgataatgaattaagtaaattattatatttattggatttatctgtatcacaccatttagcaaaagaaagtatctgagaccatttac

SEQ ID NO: 13264 - DNA, 1756 bp, Homo sapiens
  CDS (106)..(1086)
attttcgagtgaaggacccggagccgaaacaccggtaggagcggggaggtgggtactacacaaccgtctccagccttggtctgagtggactgtcctgcagcgaccatgccccgtaaaggcacccagccctccactgcccggcgcagagaggaagggccgccgccgccgtcccctgacggcgccagcagcgacgcggagcctgagccgccgtccggccgcacggagagcccagccaccgccgcagagactgcaagtgaggaacttgataatagaagtttagaagagattttgaacagcattcctcctcccccgcctccagcaatgaccaatgaagctggagctcctcggcttatgataactcatattgtaaaccagaacttcaaatcctatgctggggagaaaattctgggacctttccataagcgcttttcctgtattatcgggccaaatggcagtggcaaatccaatgttattgattctatgctttttgtgtttggctatcgagcacaaaaaataagatctaaaaaactctcagtattaatacataattctgatgaacacaaggacattcagagttgtacagtagaagttcattttcaaaagataattgataaggaaggggatgattatgaagtcattcctaacagtaatttctatgtatccagaacggcctgcagagataatacttctgtctatcacataagtggaaagaaaaagacatttaaggatgttggaaatcttcttcgaagccatggaattgacttggaccataatagatttttaattttacagggtgaagttgaacaaattgctatgatgaaaccaaaaggccagactgaacacgatgagggtatgcttgaatatttagaagatataattggttgtggacggctaaatgaacctattaaagtcttgtgtcggagagttgaaatattaaatgaacacagaggagagaagttaaacagggtaaagatggtggaaaaggaaaaggatgccttagaaggagagaaaaacatagctatcgaatttcttaccttggaaaatgaaatatttagaaaaaagaatcatgtttgtcaatattatatgtaagtgccttgattgatattaccaatttttatattagtttttaaccattaagtcaaagcccttctcttttcctagagaaacatgaagactgaagtgaaaaaaaatctctaaatattgttttgtgtgactgaatgtgttagctcatgcctgtaattccagcactttgggaggctgaggcaggaggatcacttgaggctgggagttcaagaccagcctgggcaacatggcaagaccccatctctacaaaaaaaggaattatgtggtgaacttatccaatgtgaggactatctggctgtgacacctgtcatcccgttgatcaccagggttgaatttattaaattaggcatattaattcattgaagttgactttttagtatcctgctttaagttgggagttatgagttgcagaaacgaattgctgaaatggaaactcaaaaggaaaaaattcatgaagataccaaagaaattaatgagaagagcaatatactatcaaatgaaatgaaagctaagaataaagatgtaaaagatacagaaaagaaactgaataaaattacaaaatttattgaggagaataaagaaaaatttacacagctagatttggaagatgttcaagttagagaaaagttaaaacatgccacgagtaaagccaaaaaactggagaaacaacttc

SEQ ID NO: 13265 - protein, 327 aa, Homo sapiens
MPRKGTQPSTARRREEGPPPPSPDGASSDAEPEPPSGRTESPATAAETASEELDNRSLEEILNSIPPPPPPAMTNEAGAPRLMITHIVNQNFKSYAGEKILGPFHKRFSCIIGPNGSGKSNVIDSMLFVFGYRAQKIRSKKLSVLIHNSDEHKDIQSCTVEVHFQKIIDKEGDDYEVIPNSNFYVSRTACRDNTSVYHISGKKKTFKDVGNLLRSHGIDLDHNRFLILQGEVEQIAMMKPKGQTEHDEGMLEYLEDIIGCGRLNEPIKVLCRRVEILNEHRGEKLNRVKMVEKEKDALEGEKNIAIEFLTLENEIFRKKNHVCQYYM

SEQ ID NO: 13266 - DNA, 2087 bp, Homo sapiens
  CDS (40)..(585)
caccttgtcaaggtggccctgctcgaggatgtcaaccgcatgtcacctggggcgctggccattatcttcgcaccctgcctcctgcgctgccctgacaactcggacccgctgaccagcatgaaggacgtcctcaagatcaccacgtgcgtggagatgctgatcaaggagcagatgaggaaatacaaagtgaagatggaggagatcagccaactggaggctgcagagagtatcgccttccgcaggctttcgctcctgcgacaaaatgctccatggcctctcaaactggggttttcgtctccctatgagggggtcctgaacaagagccccaagacccgggacatccaggaggaggagccggaggtgctgctggaggaggaggcagccggcggcgatgaggaccgggaaaaggagattctcattgaacggatccagtccatcaaggaggagaaggaggacatcacctaccggctgccggagctggacccaaggggctcggacgaggagaacctggactcggagacgtcggccagcaccgagagcctgctggaggagcgggccgggcggggggcctcggaaggtcagtattaaggtagcgtctgcttttctccttcccgtccatcccagcaggccccagggcgagggtcctccggctgccggccctgaagctgcagtaaccctgccatctgtctctcaaaagggccccctgcgcctgctctcccttgccccggcgcgcccaccccgagccccctccccaccgtggccgcccctccacgacgaaggccgtcgtccttcgtaacggtcagagtgaagaccccccggcggacccccatcatgcccacggccaacatcaagctcccaccaggcctgccctcccacctgcctcgctgggcaccgggtgcccgggaggcggctgccccagtgcggcgccgggagccacctgcccgccgcccggaccagatacattccgtgtacatcacgcccggggcagacctgccagtgcagggcgccctggagcccctagaagaggatggccagccacctggggccaagcggaggtactcggatcccccaacgtactgcctgccccccgcctcgggccagaccaatggctgagagccacagctgacaaagtctgcatgtccgaggacggcccctgcactggagctgggcgccagagctgcagagctagtgttcggccctcagagaaggatccagaatcaaaagctcaagagtgacgtgaggtgggcaccggccccaagtgcagagtcaaggcagggagaggccggctggagccaggccccctcgcacgcagcccccaaatcatggacgcacctgtggggagcaccacatctccacctgcggcctcacatctccccactcccctttttgtacgtttaactgtttctttgtacgtggtttacgtaactttaaactgtaacagccttaatggaagaccaaatggttttttatatgtgtatgtacaaagttttctattaacgctgcccgtctcccttataacctggacgtgagctgtcagagcagaagccactaggccactgcgcgtctgaggctcagaccctgctgtggttggcttggggtggccaatgggctgggaccctccatgagagttttggacacttgggtcacctgacccctgcctctctgacacatgtctccggggggcagccacctggccaatgtgcatttttgcacatgctggaaccttccatgggggtctgggctattggctggagccaggacatgagtcaggggcaccatggacctcacgtgccagggagacttgaatgtggctgtcactcttccggacgccaagggctgcaggaggctgcttttggcactacccaccccgtgtgacagaataggagccagcgactcaggactgctcacgggtcaggagggcaacgcctgaagtcagacctccctataggtcaacagggacaacctggggatctctggagcagggccctcctctctcaggcttggcccactcccccagacacctggacacgtggccacaaatctgggacaaggggcccccgcacagcatgaaataaaaagtgcctgag

SEQ ID NO: 13267 - protein, 182 aa, Homo sapiens [sequence omitted]

SEQ ID NO: 13268 - DNA, 2087 bp, Homo sapiens
  CDS (8)..(931)
gaataagatggcggggaagaagaatgttctgtcgtctctcgcagtttacgcggaagattcagagcccgagtctgatggcgaggctggaatcgaggcggtgggcagcgcggctgaggagaaaggcggattggtatctgatgcctatggggaggatgacttttctcgtctagggggtgatgaagatggttatgaagaagaagaagatgagaacagtagacagtcggaagatgacgattcagagactgaaaaacctgaggctgatgacccaaaggataatacagaagcagaaaagcgagacccccaggaactcgtggcctccttttctgaaagagttcggaacatgtcgcctgatgaaatcaagatcccgccagaaccccctggcagatgttcaaatcacttgcaagacaagatccagaagctttatgaacgaaagataaaggagggaatggatatgaactacattatccaaaggaagaaagaatttcggaaccctagcatctacgagaagctgatccagttctgtgccattgacgagcttggcaccaactacccaaaggatatgtttgatccccatggctggtctgaggactcctactatgaggcattagccaaggcccagaaaattgagatggacaaattggaaaaggccaaaaaggagcgaacaaaaattgagtttgtgacgggcaccaaaaaaggcaccacgaccaacgccacgtccaccaccactaccactgccagcacagctgttgcagatgctcagaagagaaagagcaagtgggattcggctatcccagtgacaacgatagcccagcccaccatcctcaccaccacagccaccctgccagctgttgtcacggtcaccaccagcgccagcggctccaagaccaccgtcatctctgctgtgggcaccattgtgaagaaggccaagcagtgacctgaggggccaccctaggacttgaaaggaccgtgcagcccagtgaccactgcccagtgggaggcgccactttgtatatttcaggactgggacctactccccagatgccacctgagaggagcttctgtttggcattccagatggaaggacaggcagcacgggagccaggcgctgtggacagggtctgtccacgcaccacctggggtctgccgcctattaaaagtgccgtattcttacctcttggcatctcagatgcactggcctctcctgcattctgtttgcaggcaaatgcttcagctcacatgtcccccaagactcaatagtcttggttgggactattgcctcagggttgacaacagggtgatggaggcctgggacgctgttcagaggggtgacccaagaagtcaccgttgttatccgtgtatgcctctgggcatggacaggcgggagtccccgagccccacgtatgccccatctgccgccttgatcccaaaacccagccagttctcgggtgatggtggagctgtgctcccttgagtgcacttgagcactccccagaccagatcactttttggacacacccaggaaggcttttgaagtcaagccagtttccagaagggctggggtgagatcctgacctgtgcagagagtggggaggcgtcagcgcctggccagggctgccccagtcctttggtgcccggtgagcgcagccagcaggagctgagcagcgggggagatgaatcacctcctgccttggcgaggcggcagctcattgtttacaggcaagccctgctcctgggagggctcctgccaccccacccttcctctgtgtgttatctctgccccacagcagcccctgggcagcaccagtggccactgggctccccccggggttgaaacgggtttcccagaccaggggttcagaggagactatttacccttcatgatctttggcgattctccactggagcggaagggctgtgtgtcaaaagaaggaagccaggctgtgaagggccgtgttgctttcagtgggtgggcagaggtttagaaaggtggttctgaaatggcacctggtactcttgtgggacctggggaatataaggaactctgtgcatgaggtttcaaaaataaaaattgagtccactctccccgt

SEQ ID NO: 13269 - protein, 308 aa, Homo sapiens
MAGKKNVLSSLAVYAEDSEPESDGEAGIEAVGSAAEEKGGLVSDAYGEDDFSRLGGDEDGYEEEEDENSRQSEDDDSETEKPEADDPKDNTEAEKRDPQELVASFSERVRNMSPDEIKIPPEPPGRCSNHLQDKIQKLYERKIKEGMDMNYIIQRKKEFRNPSIYEKLIQFCAIDELGTNYPKDMFDPHGWSEDSYYEALAKAQKIEMDKLEKAKKERTKIEFVTGTKKGTTTNATSTTTTTASTAVADAQKRKSKWDSAIPVTTIAQPTILTTTATLPAVVTVTTSASGSKTTVISAVGTIVKKAKQ

SEQ ID NO: 13270 - DNA, 1634 bp, Homo sapiens
aaaggtaagagcactttattcttatttgaaccacactgtattgttgattaccgagtgtgaaggtagtatgttcagagtcttgttttatgcctttgtagctgtgttgccagcatttgaaggtaactcctccacataagcggcaggaaaatggccttttttcccattcaaagatccaaaccaccatccttcttcttttttctcgtgtataatcacaatgtcacccttttccaaattcaactcatcatcttgcctggcttgaaaagaatacaaggccttgcaaagtctgctgctgagctgggctgcaccaggggctggagttgaagaacctggattgctctgcccaccagaagatgccttgctcacaatattctctaatctcttcattaaaaaaggccgagatattttcacatagctatgagtatgctccttttccctccacctgaagatggaattactacaaggatggctgggttgaggtctttgctcaagttctgctaacattgatgacagtttgtaggagttcgcttccaaaaggtctagtttcaaattgttctcatccattaacgctgctgtgtctttctggctctttgcatcagagaaggaggaggtgctggagtacgttttaagcattcgttccaggccttccttgtcttttgaggctttttcaatgtctctctgcagtctcaataattttggttttagtaaagactttcgtctctctttatccattgcactgttaggatcttcttcaaagtaatccgttaacaggaactcagatttgttttctgtagataaaattgcagtttcttccattacagcctggatatctttttcaatgtcaatcttgctgatggcacagtgaatctgcgtgtggcatgtggtcagggtttggccaaaaagagaaatatgttggctgtactggtttaagttattgcataaaagttgaattctttccttctccagctccagaatgctctggtagcagttctctagtgtgttttcccatttcagtctggtagaataacccgccatgtttttttggtagtaattttcatcttccttttccaacttttcagttgattttgtcagtttattgaggagcttccgcttctccttctcagtcatagattgcttggagctttctacaagctggaaaagtgcttcatgtttcttggtactaaccattaatttcttcttggccttaatttgctgattccagttgctaatgacaagatttgctgtcttttcaacttcattgtcaagtgattttctcttcttctcttgtacatttaggacttgataagtcggttttattgcttccaattcaattgctttgccaagtttttgatgcaggtccgctgtggatttcattccctctgaggcccaggcccaggcactgctaacacaactttttctcgtgttctgtaatgctttgctcagcttgcttgccagtttctgaagtcctttggcatagctaatttccaggtttgccctttgctgaagaacagatgtgacctgtttgcagaaattctctccattttgagaaaactcctttaggttcttgtatactttattatacggacaatctgtcagtgggtccctcatgttgaaatgtgtctggcttttgtcctttc

SEQ ID NO: 13271 - DNA, 2568 bp, Homo sapiens
  CDS (11)..(928)
aactacgaagatggcggttgcgcgcttggcagctgtggcggcctgggtaccttgtcggagctggggctgggcagccgtccccttcggtccccaccgtggcctcagcgtgctgcttgcacggatacctcagcgggcgccacggtggctcccagcttgtagacaaaagacgtcactctcattccttaatcgaccagaccttccaaacctggcttataagaagctaaaaggcaaaagtccaggaattatcttcatccctggctatctttcttatatgaatggtacaaaagcgttggcgattgaggagttttgcaaatctctaggtcacgcctgcataaggtttgattactcaggagttggaagttcagatggtaactcagaggaaagcacactggggaaatggagaaaagatgttctttctataattgatgacttagctgatgggccacagattcttgttggatctagcctcggagggtggcttatgcttcatgctgcaattgcacgaccagagaaggtcgtggctcttattggtgtagctacagctgcagataccttagtgacaaagtttaatcagcttcctgttgagctaaaaaaggaagtagagatgaaaggtgtgtggagcatgccatcaaaatactctgaagaaggagtttataacgttcagtacagtttcattaaagaagctgaacatcactgcttgttacatagcccaattcctgtgaactgccccataagattgctccatggcatgaaggatgacattgtaccttggcatacatcaatgcaggttgccgatcgagtactcagcacagatgtggatgtcatcctccgaaaacacagtgatcaccgaatgagggaaaaagcagacattcaacttcttgtttacactattgatgacttaattgataagctctcaactatagttaactagtatcacatgtttagttggtatgtaaactaatgtatccagaagattggaagagggataagaaatgaaagatcctgatactttaggcttttccctttcctctattttgtaaatataagatgagtattatttaatgatgtatttgcataagtaatgcaaattgtgaagaaggaccagctgctgtttagaaaattttctccttccttctgtccttgattttttttcattaaagtatttcctttttttaattcaagaaaagtttacctttcttatgcttatgttagctatgccagctcttaattgcatccttttctaattaggattattaataaagcgtgaatattttgttttttattatagacagaaatttgtaacattacttctgatttgaaaatgcaattcacaaaatatagggaaatttttattgaataaatttgaaatgatggagaaatttcagaagcataataaagttcacaataaggataatactttatataatgtataaagtatatataatataatatatatgttatataaactgcacattatattcaaacttaaaattgagctttttttttaaaggcccaaaattgtacagtgatacaaggagctatttctaaaatttggcttatgtataatatatttaaatggggaatttcatctaaagcaatgatgtagtatttttaatattctgattggtaaaattaaagaggaaattaatctttatatattatttcttgcagaaacattcattattttattaatattgccctaagtacaactaggcaagtgattgccacctaaatcagaagacgttctaaagtcagtaagaaagtgtgaaatgctagtataaaggttattttttttctttcctaaataactaaagtgaggtgtagattgagccttgatattatttagttaatgttttttattaattaattttggctggactttatttagcttgattaggttattatctgtcaaaccttttaagttgacaacatgactcatatatatacatgtgtataagatgagcatgtgtcaaagacttattcgactcattaatgaggaaaccagcagatagtaaacctggttcaaagtacaattcaagaaactgagtatttatgggcattgaagaaaaaatgttgagataaaattgctgtgcagaaaaaagtgttaatgaagccgacctgactacttaaccttagagacctgctttacaaggttggcccttgattggcatctgggaacttggagttcagggggcttccaccattcccagaactgatcaaagtagcttactatatctaaactgtaaaacaatatagtttctcctgaacacctgctttccttctgggagtctggaattttggtatgtgccaggcagagactacctttgtgaccagctcccagtaaaaaccccaggcactcagtctctaacaagcttttctggttgacagtgtttcacaagtgctgttacaactggttgctgggagaattaagctcatcctctgtgattccactggcggaggattcttggaagcttgcacttagtttcccctgacttcaccccatgtgtcttttttcctttgctgattttgttttgtatcctttcactgtaataaatcatggccgtgagc

SEQ ID NO: 13272 - protein, 306 aa, Homo sapiens
MAVARLAAVAAWVPCRSWGWAAVPFGPHRGLSVLLARIPQRAPRWLPACRQKTSLSFLNRPDLPNLAYKKLKGKSPGIIFIPGYLSYMNGTKALAIEEFCKSLGHACIRFDYSGVGSSDGNSEESTLGKWRKDVLSIIDDLADGPQILVGSSLGGWLMLHAAIARPEKVVALIGVATAADTLVTKFNQLPVELKKEVEMKGVWSMPSKYSEEGVYNVQYSFIKEAEHHCLLHSPIPVNCPIRLLHGMKDDIVPWHTSMQVADRVLSTDVDVILRKHSDHRMREKADIQLLVYTIDDLIDKLSTIVN

SEQ ID NO: 13273 - DNA, 2483 bp, Homo sapiens
  CDS (6)..(1199)
atattatggtcagtgaagatatgaaattaactgactcagagctaggaaagctggcaaataatatccaggaattattatatagtgcctcagatatatgccatgatcgagctgtcaaatttctcatgtcaagagcaaaggatggttttcttgagaagctaaattccatggaattcataacactttctagattaatggaaacattcattttagacaccgaacagatctgtggaagaaaaagcacgtcattacttggagcacttcagagccaagctattaagtttgtaaataggtttcatgaagagagaaaaaccaagctcagcctcctcttagacaatgagcgctggaagcaagcagatgttcctgcagaatttcaggatcttgttgattctctgtcagatgggaagattgctttacctgaaaaaaaatcaggagccacagaagaaagggaaccagctgaagttcttattgtcgagggacaacagtatgcagttgttggaaccgtattgctgttaataagaattatccttgaatattgccagtgtgtggataacatcccatctgttactactgacatgcttactcgtctgtcagatttattgaagtacttcaattcaagaagttgccagttagttcttggagctggtgcactgcaagttgttggactaaaaacgataactacaaaaaatttggctctttcttcacgatgtttgcagttaattgtgcactacattcctgtgatccgggctcattttgaagctcgactaccacctaagcaatatagcatgcttaggcattttgatcatatcactaaggactaccatgatcacatagctgaaatatcagctaagcttgtagcgataatggatagcttatttgacaagctgttatctaagtatgaagtgaaggctcctgttccttctgcctgtttcaggaatatttgtaagcaaatgacaaaaatgcacgaagctatatttgatctccttccagaagaacaaacacagatgttatttttaagaattaatgcaagttataaactccacttgaaaaagcagttatctcacttaaatgtgataaatgatggaggacctcaaaatgggttggtcacagcagatgtagctttttacactggaaatcttcaagccttaaaaggccttaaagatttggacctaaatatggccgaaatttgggagcagaagaggtgatgtcatcctggaaaactgggtagttcatctgaccatgggatgtgtttgttatgaagaaaatctggatgcctgtgattcgagaattgaacctgaaacccaaagtgaactggggtgggggaagggaaaaaggaaagtatcaagtgttgggaaactggattcagtgggatctacaaggaatgtcatttttgtgcatcctacagtgaggagtaactgatcaggtgtctataacatttttcattctctctggaaacagactcaggtttctttggaccaaatccaaaagaacacatagctgtaacacagctgtagttgactagaatgctctgtatactttatattaaaaaatgctttgcatttcttccagtgcaatgaaattcatatggtgtcccaccttatttaatgatggtacaatttaaaatcttagtcaacttctgtagaaagttttctctatgaaagtaaagctgtttgaaaaattattatttttttacagatctttctataaaaaataaacatcttttgattgcttggatttaggaattcaatttttgtttcagtgaccaatgtcaagttgcaggctttgtgtgttgcatatttaatatttctactaccaccgtatgtcaactgggtaaagccttccagagctctctaaatacctgaaagacttaagcctttttttaagtaattaatacttaaaaaaaaagatcctggcatctatttatgcaactaaatacttttcagaaatggtatataaaaggctacagtttaatatctgtatttttataaaagtatgatgaagggtttggggtgtttttatttgtagcagaggtaagaatatgtattcatataatctgcctacttttgagttctcatattaacatttagataacatatgaagtatggcccccttggatccttgtttttaagttactttcgatgtgtatacgaacaaagaccagggagaaacagaacttttaaaactataggctgctgtgttggggccagaaataaggtgacaagtaaagacttttataatacctaccttcaaaattagaatcagcagcactgtacaaataaagtgcctgtgcttcacctcacaccaagaatcttgcctaaccctgtcagagtgcctaatatcctgtggtgattatgtataatgaaacagtcttattttgtgctctttggtttcttaaaaggaaagcttgttttctttcctttatcattacagaggtatgtctttggttcttaaactatctgtctaaaataaagctgtaaaaaattaac

SEQ ID NO: 13274 - protein, 398 aa, Homo sapiens [sequence omitted]

SEQ ID NO: 13275 - DNA, 2503 bp, Homo sapiens
aacaatgcaggcctcaaagtccacaggaggctccatactggggaaaaaccatataagtgtgatgtgtgtgggaaagcctatatctcacgctctagccttaaaaatcacaaaggaatccaccttggggagaagccctataaatgtagctattgtgagaaatccttcaactacagctctgcccttgaacagcataaaaggattcataccagggaaaaaccctttgggtgtgatgagtgtggtaaagctttcagaaataattctggccttaaagtacataaacgaatccacactggggaacgaccttacaaatgtgaagaatgtgggaaagcatacatctctctctcgagccttataaatcataaaagtgtacaccctggggagaagccctttaagtgtgacgagtgtgagaaggccttcatcacataccgaacccttacaaaccacaaaaaagttcatcttggggagaagccctacaaatgtgatgtgtgtgagaaatcttttaattacacatcgctcctttctcagcacagaagggtccacactagagagaaaccctatgaatgtgacaggtgtgagaaggtcttcagaagcaactcaagccttaaagttcataaaagaatccatactggggagaggccctatgaatgtgatgtgtgtggaaaagcctacatctcacactcaagccttattaaccataagagtacccaccctggcaagacaccccatacatgtgatgaatgtggaaaagcttttttctcaagcagaactcttataagccataaaagagtccatcttggggagaaacccttcaagtgtgttgagtgtgggaaatctttcagttacagctctctcctttctcagcacaagaggatccacacaggggagaaaccctatgtgtgtgataggtgtgggaaggccttcaggaacagctcaggcctcacagtgcataaaaggatccacacaggtgagaaaccctatgaatgtgatgagtgtgggaaggcatacatctcacactcaagtcttatcaatcataaaagtgtccaccaggggaagcagccctataattgtgagtgtgggaaatccttcaattatagatcagtccttgaccagcacaaaaggatccacactggaaagaagccataccgatgtaatgagtgtggtaaggcttttaatatcagatcaaatctcaccaagcataaaagaacccatactggagaggaatctttaaatgtgatatatgtgggaagttatagtggcacatcccagaagagaacctatgagggagggaatgccctggatgggggcaggatgaggatgcctctgtagcaggcagagcttaccaagtctctccgaactcaaatggaagaaataccttatgaatgtaagaatgtagggggtcatggcttgtaatttacacagtgtaaatgaaaccatcctagaggattatgaggaatcctttctatgtgattttcaatcatagcaagcaagaaaggctccagtgtcaaggtagttcagctcttacaggatataaaacagtccatacttgagagaaaaacttagatctgagtgatggaatgtgaagcaagtcttcaaaatcagtagacatttctggacataaaacacagatgaggaaagggcttcaattagaagttacgtaatcaccatcagaaagttcatgtttggtaaattctgttactagaaatgtaggaaattcaggtatagctttgaatcccaattacacattggtcagtgggaaaactaagggcctccaacaggcaaattcagggaggataggtttcagggaatataaatttatttaatattagtggtctttaagtataaacttgatgtaattggtttgggagggggcagtgatgatgacttctgaaacaaaatttggatttccttttaggaaaagtagaaagcatagacttacaagtctaacaggagataggagagagtcactcataaaaaatgcaaattgatgaacgtactattgtgatacattagttgaatggatgaaacttttttaaagtttcagatgaactcccataatgaatgatgaatttgtgatgagggataacctggaagtggtattcacacattatgctacaataaaaggttctaccgtggagaggattttgacacattcagtaactaatggaacacaccgtcaacatgaattcgcaccttacatgacagaagtgattcagggattcctatgaatagaaatgctgagaaggaacgcattttattgcagaagctaaaaagctaaagtaccagtcatctagagagaaggaaattaatgtttcttaataatcctgttaaatgtttgattgtttttggaatgtgttattgtaaagatgtcatgcaggacatgtatatgttgtctgttgtaaaatgttaacgaatactttgttcagggctcactctctctttgtcatgaaagccagctccttgtggcgaggtaaagtggaattccaataaagaaattccttaaatc

SEQ ID NO: 13276 - DNA, 1885 bp, Homo sapiens
  CDS (118)..(1236)
gataattctctcgatacggttctaaaccgtcctcccgggtttcttcaggtttgtgactggttatatcctctagttcctgatagatctccggttctgaaatgtactgcgggagcctacatgtttcctgatacaatgctacaagcagcaggatgctttgtgggggtcgtcctgtcctctgagttaccagaggatgatagagagctctttgaggatctgttaaggcaaatgtctgaccttcggctccaggccaactggaacagagcagaagaagaaaatgaattccaaatccctggaagaactagaccctcctctgaccaactaaaagaagcctctggcactgatgtgaaacagttggaccaaggcaataaggatgtacgtcataaaggaaaacgtggaaaaagggctaaagatacttcaagtgaagaagttaacctgagtcacattgtaccatgtgagccagttccagaagaaaagccaaaagaattacctgaacggagtgaaaaagtggctcacaacattttgtcaggtgcttcctgggtgagttggggtttagtcaaaggtgctgagattactggtaaggcaatccagaaaggtgcttctaaactccgagagcggattcaaccagaagaaaaacccgtggaagttagtccagctgtcaccaagggactttatatagcgaagcaagctacaggaggagcagcaaaagtcagtcagttcctggttgatggagtttgcactgtagcaaattgcgttggaaaagaactagctccacatgtcaagaagcatggaagcaaacttgttccagaatctcttaaaaaagacaaagatgggaaatctcctctggatggtgctatggttgtagcagcaagtagtgttcaaggattttcaactgtctggcaaggattggaatgtgcagctaaatgcatcgttaacaatgtttcagcagaaactgtacaaactgtcagatacaaatacggatataatgcaggagaagctacccaccatgcggtggattctgcggtcaatgttggcgtaactgcctacaatattaacaacattggtatcaaagcaatggtgaagaaaactgcaacacaaacaggacacactctccttgaggactatcagatagttgataattctcagagggaaaatcaagaaggagcagcaaatgtcaacgtgagaggggagaagggtgagcagacgaaggaagtaaaggaggcaaagaagaaagataaatgatgaagtgctgggaatcacttataccaaagccttatgaaatggatgaaattttgttaaataggcaaatgtggaattcctcacagattaaccagtattttttaaatgtattcattcctacaaattaactttcataaattttatggcatgtcttctatttaaaaggaaaagaataagtattcttgcatctggccttagaaatgtgaagttatattctcaagtttatttttttccaagtgtagctaaaatatttttgcaggtaaaataaagctgatagtacatgtgttgttcaaaccttgttaaacctaatattgaactatttttatatctgctgtctttcagaaggcaaataggaaactatatatttgcttaaaaattggcatttagtaaccttaattctttttatagaaggaatgacttaaagtattgtcccctctttttgcactaattgtggatttttttagatgcttctcaaaattttcagtgtgtaagctaaacaaaaactaaaactaagaattctcaaaaaaacttgttcaaaacagggaaagactgatgaaaagtaaaatggactacttttgtaacttacctgtttgttaggaaatggaatggtctctttgatttaaaatgaataaaaatagattattacgtc

SEQ ID NO: 13277 - protein, 373 aa, Homo sapiens [sequence omitted]

SEQ ID NO: 13278 - DNA, 1859 bp, Homo sapiens
ttattacagccaacagactggcctctttcttccctttgactgggaatgggtcaaaggcggtgcaggaggaggatctggtccagataattcacaagcagggtgcattttcctctcattattgagaactgtgagtgttaatcaagaaggcagagcaggagaagatgaaccagtcttcttcccctcactacccagatctctgcctgccaacaagccccgtgttcaccctggcaaagagtctttacattcagaccaaggagagtgtgactccttctcagcactagctagaaacctcaagcccttgcttaagggcctttttcagagagacccaatgcccagaaggctagatgcgtggggaggagccacatacgagaaactgcctccctgcttcgggtcagaacaagccccaggaagaaagtatttcaaacaacaaggtgcatctgccccaacccatccagcctgcatgttggtgctgagaacagccttttatggggcttgcactgagccatgggcatgtctgaacacaacaaggaagaggccagagcagcaacagcacgcaaagggttgatgggcatttcttttaagacagagcagaaaactcttagatactttgcgtccttcctatttgactcagtctatgaaagccaggttagcttgctttcttcctccctaaatcctccatcctcatgaccaacaaagaaatagttgaatcattttccaggcacatcttggggaggatgtggggccattggaggctgtccttcctggataagtctttaggagtgagaacaaggagtcttaccctcctctgtccacccacccccatgaatgggcctggctccagccaggagttgtggtttttcctgagctcctcacctatctcttctggatttcacattggcaaacggggttgcaaagtgctcttcgtgctctttggacagtgccttgtggagaggaatgcccatgcccctgcattccaaggccttggtaagcaagctcagagtagctggatttttctaaagcaattgcagaacacctgctttttctttgtttcctctagaaaggaccaaccacaccgagctcagttatggcacacacagtgggacctagacaaagggagagggtgaccgacatcccaactaggtaaacacagaggaggttccacatggacttatctgggtggctgttttgaaaacgagaaacagtcaagagtccctggccccacagaccacctccccaactcagcactgtctgtctgtgcagcaggtgcaaggacgtgttgaactagctctctgcagcctccttggaggatgtgatcctatgggaggggtaggagtattcaggtccttgacatctcccaaatgtgtgattccgggatgccaaaggcctttggccaggtaatgcagtgtctacaggctgaggttgacatgcatccccaccctctgagaaaaagatcctcagacaatccatgtgcttctcttgtccttcattccaccggagtctgtctcatacccaaccagatttcagtggagtgaagttcaggaggcatggagctgacaaccatgaggcctcggcagccaccgccaccaccgccgccgccaccaccgtagcagcagcagcagcagcagcagcagcagcagcagcagcaagagtaactctgacttaggaatagagacagccagagagaaatgtgatcaatgaaggagacatctggagtgtgcgtgcttcttcagagggacgggtgatgggcggattggaaaaagcaccgcagatgggaaccttaatctttcttttctaaaattgatgctatgaaaatttgcgttttctataacttgtaaaaactaaaagttgcttgtctactg

SEQ ID NO: 13279 - DNA, 3132 bp, Homo sapiens
aacaaacaggtctgttcttattaccattttccaatctgtcacttcatgtcccatgtcccacatgggcagacaacatggcctgcccatgtggcggcacctccccaggccttccacctcgtgctcctctgcagccccttgcctgtccctgccatcttgccatgcccacgcctgcattgctaagaacacagtttacagcccgtgttttttgtgctgccattctgctggcatacggccaggactggaaagcttgattcagtattagaccatcatatatggacaataagtgcttaatttgttctaggcactgtgttaagggggcagaagcaaccatgagtaacatggattcaggccctgccaggttcttcttgtcctaagggaaccacagacacacagctgagtgcgattcagatcatgggcaccacaatgccctatccagaggtgggggacactcagtgctgcatctctctctgcggagtggctctgtgaccatggccaggcttcctgctgcagagcagccctgcacggcctcccccactgtccggggtctttctgtatctccacccccccattttttttttttttttttggagatggagtcacactttgtcgccaggctggagtgcagtggcgtgatctcggctcactgcagcctccacctcccaggtttcaagcaattcacctgcctcagcctcctgagtagctggaactacaggcacacaccaccatacccagctaatttttgtatttttagcagagacgggatttcaccatgttggccaggatggtctcgatctcttgacctcttgatccacctgcctcggcctcccaaagtgctgggattacaggcgtgagccaccacgcccagccatctccacccctttcttctctgctgtctgggtaactgtggactcctttccggagctccccgttctacattttcagtttcctcctgcctggttgccctcctcgttgaccttcagagtgctcagcctttcttcttctgctgaaaccctttttgtggcctttgcctgtttttgcccttgtcccacagccagcctcaacggtgttcttttctctctgctcaccctccctgtttgcctacagctctgcggagctgtcctgaaaggtgaagggggcgccttcatcagagcctcaccgccccgcgccactgggctgcatctcttcggtaccctcctgcctattctgtctcccccatctgagtgcctccagctctgcacccacagccgcccccagcctgacctgctgatgccgtatgtcccagtttgaaagcttcctcgaatgcctgcagacaggagcaaaaccctggagagcctggcccccatctgtgggtccatccccccatctccacctacccttgcgtgctgctgccatgggcccatctttccccaggcttctgctctggctgtcccatctgccaggaatgccttttctctcccagggctctccacctgcccaaagtctggaacagctagccatgccaccacctcatctttcgggtggaaggaggctttctcctgtggccctcatccattttacctgccctctcccgtggtggccaccagtccctgtgttcttcccacaagcagtttgagctacctgtcctggacctgtgtggctccatgggcccctgttttgtctcctttctttcttctacgagtcagatctctaagggccagtcctccgctgctatagccagcatggggcattgtaaacagtaggcgtgtaatatatgactcttcggcagctgcaccctctccctggggacaggtttcctagtcccagagttagcctggaggtgagctgaggttaaagccaggttccctgactcccacagttcttccccttaaatgtttctagttttaggttcatcctgaactcaccagtccaaccacaaaagttttctgaggagaagcagaatttaagtctctttcaggcccatcatcaaaattcccatatgtccttgacataaggctaaatagtctatggtgtggcttgtgctaggcttttgccatcaggtacctgcagggcacacagccacctgcactcattctgagggtctcctgcagcatatcgcaggttctcagcagtacagaggcgaagtgtcccagcacagtccagcacggagtggggatgggagtctttggtggctttgttttaggatgacatgcacttacctctcctttacttccctcccaggagatggctggccgagctctcaagcagactggcagcaggagcatcgaggccgccctggagtacatcagcaagatgggctacctggacccgaggaatgagcagattgtgcgggtcattaagcagacctccccaggtgagcccaggcctgcagcatagtgggcaaagatggtttgtggcttaaggacaacaaaaccacgtgcagaggggtccaacctggcctggcctggccagagccagtctcctggcacattgcctcattcagttaacaggcaagctgagcctgccctgccctgacagagtcaggccctggcgggagcagccccaagtggtagaccgtgggacacgcctggcgcttgccccatccagccttgtctgaaattaccttagtacttcctacctaggggaaggtgtgtgcttgttttatgaaagatcaaaaaagtcagcaaagcgggcgtaaaaatggtcttttcactttctcttgggcctgtggagggatctttgacaagggtggcttctttcctcaattctaaacacacctctctcacatcgtagcttctgagagtgggggttcaatggcaggcagtgtgggcagagcgctgggcccccctcagcatcccctgtgatgggcctgaggcaccgcaccaaacccctgctttttactggctatggatgaatgttactttcccaagatggagcacatgggccctgtgattggtacctgaggcccctggggtgtgataaaggattcatggccaggcgcagtggctcaagcctgtaacccaacactgtgtggcctggttttgttttgctttgttttgttttgtgtaatcccaactctttgggaggctgaggccagaggatggaggcaggagttggagaccagcctgggcaacagagggagacctcgtctgtatt

SEQ ID NO: 13280 - DNA, 5716 bp, Homo sapiens
  CDS (231)..(2549)
aagtctttctggaaattgacaaccgccagtgtgttcaagactcagaccactgcttcaagaacacggatgcagcagcagctctcctggcctctcacgccatacaggggaccctgtcataccctcttgtgtctgtcgtcagtgaatccctgactccagaacgcactcagctcctctatctccttgctgttgctgttgtcatcattctgtttattattctgctgggggtaatcatggcaaaacgaaagcgtaagcatggctctctctggctgcctgaaggtttcactcttcgccgagatgcaagcaatcacaagcgtcgtgagccagtgggacaggatgctgtggggctgaaaaatctctcagtgcaagtctcagaagctaacctaattggtactggaacaagtgaacactgggtcgatgatgaagggccccagccaaagaaagtaaaggctgaagatgaggccttactctcagaagaagatgaccccattgatcgacggccatggacacagcagcaccttgaagctgcagacatccgtaggacaccatcgctggctctcacccctcctcaggcagagcaggaggtggatgtgttagatgtgaatgtccgtggcccagatggctgcaccccattgatgttggcttctctccgaggaggcagctcagatttgagtgatgaagatgaagatgcagaggactcttctgctaacatcatcacagacttggtctaccagggtgccagcctccaggcccagacagaccggactggtgagatggccctgcaccttgcagcccgctactcacgggctgatgctgccaagcgtctcctggatgcaggtgcagatgccaatgcccaggacaacatgggccgctgtccactccatgctgcagtggcagctgatgcccaaggtgtcttccagattctgattcgcaaccgagtaactgatctagatgccaggatgaatgatggtactacacccctgatcctggctgcccgcctggctgtggagggaatggtggcagaactgatcaactgccaagcggatgtgaatgcagtggatgaccatggaaaatctgctcttcactgggcagctgctgtcaataatgtggaggcaactcttttgttgttgaaaaatggggccaaccgagacatgcaggacaacaaggaagagacacctctgtttcttgctgcccgggaggggagctatgaagcagccaagatcctgttagaccattttgccaatcgagacatcacagaccatatggatcgtcttccccgggatgtggctcgggatcgcatgcaccatgacattgtgcgccttctggatgaatacaatgtgaccccaagccctccaggcaccgtgttgacttctgctctctcacctgtcatctgtgggcccaacagatctttcctcagcctgaagcacaccccaatgggcaagaagtctagacggcccagtgccaagagtaccatgcctactagcctccctaaccttgccaaggaggcaaaggatgccaagggtagtaggaggaagaagtctctgagtgagaaggtccaactgtctgagagttcagtaactttatcccctgttgattccctagaatctcctcacacgtatgtttccgacaccacatcctctccaatgattacatcccctgggacattacaggcctcacccaaccctatgttggccactgccgcccctcctgccccagtccatgcccagcatgcactatctttttctaaccttcatgaaatgcagcctttggcacatggggccagcactgtgcttccctcagtgagccagttgctatcccaccaccacattgtgtctccaggcagtggcagtgctggaagcttgagtaggctccatccagtcccagtcccagcagattggatgaaccgcatggaggtgaatgagacccagtacaatgagatgtttggtatggtcctggctccagctgagggcacccatcctggcttagctccccagagcaggccacctgaagggaagcacataaccacccctcgggagcccttgccccccattgtgactttccagctcatccctaaaggcagtattgcccaaccagcgggggctccccagcctcggtccacctgccctccagctgttgcgggccccctgcccaccatgtaccagattccagaaatggcccgtttgcccagtgtggctttccccactgccatgatgccccagcaggacgggcaggtagctcagaccattctcccagcctatcatcctttcccagcctctgtgggcaagtaccccacacccccttcacagcacagttatgcttcctcaaatgctgctgagcgaacacccagtcacagtggtcacctccagggtgagcatccctacctgacaccatccccagagtctcctgaccagtggtcaagttcatcaccccactctgcttctgactggtcagatgtgaccaccagccctacccctgggggtgctggaggaggtcagcggggacctgggacacacatgtctgagccaccacacaacaacatgcaggtttatgcgtgagagagtccacctccagtgtagagacataactgacttttgtaaatgctgctgaggaacaaatgaaggtcatccgggagagaaatgaagaaatctctggagccagcttctagaggtaggaaagagaagatgttcttattcagataatgcaagagaagcaattcgtcagtttcactgggtatctgcaaggcttattgattattctaatctaataagacaagtttgtggaaatgcaagatgaatacaagccttgggtccatgtttactctcttctattggagaataagatggatgcttattgaagcccagacattcttgcagcttggactgcattttaagccctgcaggcttctgccatatccatgagaagattctacactagcgtcctgttgggaattatgccctggaattctgcctgaattgacctacgcatctcctcctccttggacattcttttgtcttcatttggtgcttttggttttgcacctctccgtgattgtagccctaccagcatgttatagggcaagacctttgtgcttttgatcattctggcccatgaaagcaactttggtctcctttcccctcctgtcttcccggtatcccttggagtctcacaaggtttactttggtatggttctcagcacaaacctttcaagtatgttgtttctttggaaaatggacatactgtattgtgttctcctgcatatatcattccaggagagagaaggggagaagaatacttttcttcaacaaattttgggggcaggagatcccttcaagaggctgcaccttaatttttcttgtctgtatgcaggtcttcatataaactttaccaggaagaagggtgtgagtttgttgtttttctgtgtatgggcctggtcagtgtaaagttttatccttgatagtctagttactatgaccctccccacttttttaaaaccagaaaaaggtttggaatgttggaatgaccaagagacaagttaactcgtgcaagagccagttacccacccacaggtccccctacttcctgccaagcattccattgactgcctgtatggaacacatttgtcccagatctgagcattctaggcctgtttcactcactcacccagcatatgaaactagtcttaactgttgagcctttcctttcatatccacagaagacactgtctcaaatgttgtacccttgccatttaggactgaactttccttagcccaagggacccagtgacagttgtcttccgtttgtcagatgatcagtctctactgattatcttgctgcttaaaggcctgctcaccaatctttctttcacaccgtgtggtccgtgttactggtatacccagtatgttctcactgaagacatggactttatatgttcaagtgcaggaattggaaagttggacttgttttctatgatccaaaacagccctataagaaggttggaaaaggaggaactatatagcagcctttgctattttctgctaccatttcttttcctctgaagcggccatgacattccctttggcaactaacgtagaaactcaacagaacattttcctttcctagagtcaccttttagatgataatggacaactatagacttgctcattgttcagactgattgcccctcacctgaatccactctctgtattcatgctcttggcaatttctttgactttcctttaagggcagaagcattttagttaattgtagataaagaatagttttcttcctcttctccttgggccagttaataattggtccatggctacactgcaacttccgtccagtgctgtgatgcccatgacacctgcaaaataagttctgcctgggcattttgtagatattaacaggtgaattcccgactcttttggtttgaatgacagttctcattccttctatggctgcaagtatgcatcagtgcttcccacttacctgatttgtctgtcggtggccccatatggaaaccctgcgtgtctgttggcataatagtttacaaatggttttttcagtcctatccaaatttattgaaccaacaaaaataattacttccgccctgagataagcagattaagtttgttcattctctgctttattctctccatgtggcaacattctgtcagcctctttcatagtgtgcaaacattttatcattctaaatggtgactctctgcccttggacccatttattattcacagatggggagaacctatctgcatggacctctgtggaccacagcgtacctgcccctttctgccctcctgctccagccccacttctgaaagtatcagctactgatccagccactggatattttatatcctcccttttccttaagcacaatgtcagaccaaattgcttgtttctttttcttggactactttaatttggatcctttgggtttggagaaagggaatgtgaaagctgtcattacagacaacaggtttcagtgatgaggaggacaacactgcctttcaaactttttactgatctcttagattttaagaactcttgaattgtgtggtatctaataaaagggaaggtaagatggataatcactttctcatttgggttctgaattggagactcagtttttatgagacacatcttttatgccatgtatagatcctcccctgctatttttggtttatttttattgttataaatgctttctttctttgactcctcttctgcctgcctttggggataggtttttttgtttgtttatttgcttcctctgttttgttttaagcatcattttcttatgtgaggtggggaagggaaaggtatgagggaaagagagtctgagaattaaaatattttagtataagcaattggctgtgatgctcaaatccattgcatcctcttattgaatttgccaatttgtaatttttgcataataaagaaccaaaggtgtaatgttttgttgagaggtggtttagggattttggccctaaccaatacattgaatgtatgatgactatttgggaggacacatttatgtacccagaggcccccactaataagtggtactatggttacttccttgtgtacatttctcttaaaagtgatattatatctgtttgtatgagaaacccagtaaccaataaaatgaccgcatattcctgactaaacgtagtaaggaaaatgcacactttgtttttt

SEQ ID NO: 13281 - protein, 773 aa, Homo sapiens [sequence omitted]

SEQ ID NO: 13282 - DNA, 5667 bp, Homo sapiens
  CDS (1560)..(2225)
gggtaggaaaacagttcctcgtggacagcagagctgcctgctcggtcctgacccagcctatttgcctcctctccaattgcaattgcagggtaatgggaatagacaggtgtcctaaggtaagaaaatttactttccctcttgcttgtgaggccatgtctaggcttttttctcctcatttctgtatgccccccggaatgtcctactccattgctgggtagagacttattaagcaaaatgggagccaccatctccctggaagaggacagactgcaggtagaggcagagccagaacagggaatccacctgctagcactcttaaatggacaggaacttgagacccaaaacatacccaaagaaagcaaggatcacatcaccccttccctatcggacacttcagtcctaggacaggctaataaagttccgccagtaaagacagacctgaagcctgggatgggctatccatggaggaaatcatacctcctaaaacctgtggcactgaatggggttcagccattactccacaaattcctatagcaagggctaaaccctgccagtccccaggcaacacctcggtcctccctgttaaaaagcctaatggagaatatcagtttgtgtaggacttgaagggggttaatgaggcagtcattcccatccacccaacactggtcccaagcttgtctgtgctcagatacctggagatgctcagtttttcactctactacacttcaaggatgctttcttttgtgtagccctctccacccagaatccctgtatctttttgctttgaatggagaaatctctgatacccagaaagccacatagtacacatggactgtgcttccccagggcttctgggaaggcccccacctttttgggaatgcagggagctaagcctacagaatgggacttttattacaatatgtggatgacttgttcattgtcagccaaacatggcaggattcagattttaatatcattaaaaccttgaatttcctggctgagcggtgatacaaggtcagccccatccaaggcccagatttctttacagaagttccgatatctggggttcattctgaccccaggagcccgaacactagttgtggactggaaaaagcaatcacttcattgctggtcccacaaacaaaaaggcagccccagggtttcttgggaatggtgggcttctgtagtatttggattccaaattatggcctgacggctaaacccctatgtgagacccaaaagggggaagaaagagagcccttgtactgggagaagaaatgtcaactatcttttgaacctctaaaaactgagctgggtcaagcccttgtccttggactccctgagaaaaaccacttaccttgtatgttcgtgagagactaggaatagctttgggagtcttaactcaaaggttaggacctgttcagaagccagtggctcatttttcgaaacagacaaatccagttgcacagaagcggcctggctgctggagggcagtggcagccactgccctgctgtttagtgaagcatctaagctgacacagggacaatatacagaagctatgactccccaccaggttcagactgggttagaagtcaagggacaccattggctcactgcagggaggctgaccaactaccaagctctcttattagacaccctggatattactttaagggtatgtcagactttgaacacagcaacctcactcccaaccacagatgatgaggactcacagcatcaatgcacagggcccacaaaacagactccagcaggcctagcttgtgagataagcctcttgagaatgcaaagacggaatgatatcctgatggcagtagctttgtggagggagacccaaaaggcaggacatgcagtagtaagcctgaaggagactacagaaactaaagcccttcctccccaaaatggcacaaaaagcagcactagaggccttaacagagcctcacaactgggagaaagggagggagtaaatttatacaccaactcaaagtataggtttctcctgctgtgtgcccatgcagccatatggaaggaaaagggcatgttaacagataaaaattccccaggcaaacgtaaggatccaatccaacttctcctggaagcggcacaacttccctgccaggtggcagtcattcactgcaaaggccaccagagggactggtccctcatcagccaaggaaatagggccacaaaacaggcaacctggttataggaatccagcaatgtgttggccttaatgacagaccctaccaaccttcctaatcacctacaatactcacaacaagagcaagagtaagctaaggggcaggggtaccaggaaaacagtgctggatggttcacagatggtgacaagttttattccaggaactgaccagttgaaagttactaagcatctccatgatgccactcattaatggagagatgttttatggaattctgtccataaaatattcaccagaaagaaactaagaaaaagtgtaaaacaagtaacctttgtcagtgaattgtgttcccgaaataatccccacacccatccaattcccccttcttgacttaaactggttcaacacaggggaacttatctgggagaagactggcaggttgttttaacccaaatgactccaaatctagggtacaaatatctcctggtgtttgtggatacttttactggacgggtcaagggtttccctacctgtacagaaaaagcagtagaagtctgtaaaccttcactaaaggaagtaatttctcaatttggactccccaagtcccctcagagtggtaacaggctctccttcatgggtaagattactcagagcctctccacaaccttaggaatagattatgaactggcaccccaatcatcagggaaagttaagatgaaccatacacttgagacgactctagccaaactctttcaggagatgcacgagtcctgggttaagatgctcccagtcttctcagggtccgcagggccccttcgtgcagcctaagacttagttcttctcagatgatctaccagaggcctttcctcaccactgacctcctgttaggtgaagaattacataaaaaattacagtatcgatttaggacagattcaaaaggtgacttcagaatatggaaacaaaatcctgccagtccccactaaggatgggaaaacccctttacaagttaatccaggggaccaagtcctcctaaaggcttgaagggcaggctccccggaggaccaccccttgcttaaatgggagggcccttgctgggtgatcctgaccactccaactgcagccaactcacaaggaatcactagctgggtacacctctcccgatcagaaatgctttctcctaaatgtttccagactcgcccagatggcccattttactcctgaaaacctgtggaagacctcaaattcaggagagccaattcatcatcggagaagtaatgtggttagagatcttgagtccaatacttttccttgtattactaattggtttactattattctgttgctttgctcagcctcctccctcaggtaaagacttcgtttgtccctgctgggtataaagatgctactctttactttgttcctactcctccccatcagggcacagggtaggctaggcctactaaaatgagaaacaaactctcttgacaacctttccggcattatagcttcaggtaataatttgtccaactgctgggtgtgctaccatcatccccaggctcagaggggctgcctcttgcactccctaaaagctcaactaccaacttcacaaaagaggtatggaaacctaaaataacctctgcacctcttatggtggacctaagtgtctccctttcctttgaatgtataaacctcattgggctgctaaatgctttggtcaccaaaaagggtggaaaaaagagaagttggactgcctactttgaaatcccaccgggttttctcttagcagtaaagaaaaaccctaatcaaacttgggctcaggaaggctatcttttcccccatgccaaaacagtcatacctctctccacagcttagctgctcacctgaactcctctcgccttgtgtaagtttgtgcacccatggggtattctgttcctttgtggacacccagactgccatctgatcaacagctacccttcagccaatttcacctttctgttacttgcactagcgtgcccttgtgtggataatgtacaacgcaataaggaatgcatgttaggtactttaagtcccagtagaataacagttcataatatcacacatgtggtggaatctaaaaaggcaatagggctaattttggcaggagttggaatagccccttgggatggctttgcatactgtcagacagctttgagaaactttcaaacccttgaaacactggcaactagtacaggcagagccataaaaggacatcaagcctccctgcactccctagccaatgctgtcttggataacagatttgccctggaatatcttctggctgaacaagggcgggtatgcacagtaataaaccacatctgttgttcttacattaacagttcaggattggctaaactgcaagttcaaaagatttaccaagaccaggcacaatggttcatgcctgtaatcccagcactttgggaggccaaggtgggtgggtcgtttgagcctaagagtttgagaccagcctgggcaacatggctaaaccccatctctacaaaattacaaaaaaagaaaaaaaaattaggtggccttggtggcatgtgcctttattcccagctactcaggaggctgaggtgggaggattgcctgagcccagaaggttgaggctgcagtaagccatgatggcaccactgcactcctacctggatgacagagtgagaccctgtctccaaaagaaaataaaagtaaagattcaccaagaggctacctggctacataatcgttatgactctactgctcaaaccatctggggctccatcagtggatacctacaaagtatgacatggtttttacctttcttcggaccctaagtggtcatttaattgctattacttttggcgtattgtgtttttaaccttttggtaaagtttgtgtctttcaggtttcaatagctccaagtcaagctaatgatggcccaagaattccaacccataacatcccaggagcaccccagtccctacaggtctttaggacagccagtgagagatttccccaccccctaaagttaggcagggacgacatccctgttcagcaggaagtcgcttcagaagatgagatcttcagccctttctccttaagaatagagggtgaaatctctcagggggaaatagagatagatcagaaatggaatggggttgcttcttcataatacttaaccatggcttctacttaaagttctaggaactggccttaggaaatctaactatgaaaccaaggttatggagtatcccacctcaggaaggaacactgaacaactgattgacagtcttcttgccgccagccagaccaccaagtggcccattaaccaagagaaccagcgcaaccagatacgctgacccgcatctcctacctctcatgtgctttgcccagcccagcctgcataccttactcatgatgtcaattcccaagtttcgctaataaaaacatctctgcaagcctcttcagggagcc

SEQ ID NO: 13283 - protein, 222 aa, Homo sapiens [sequence omitted]

SEQ ID NO: 13284 - DNA, 2601 bp, Homo sapiens
  CDS (176)..(571)
ggccatggatgggcttggataaagcaccataagttcttcctctaggccatggactccccctggaactggcagcctggcccccaggcttcaggctgtccctgggttgaaggtggtgtttcacctgggacctgcccctttctgcccaggagcctgtctgcctcctgctaccatcaacatggcatccacagcacccaggctgtgcatgctgagggacgcctgcaggcctgcactgagctgccctcagtctcctcttggcttccctcctgtgcctgtcggtgaccaaagtctggagggggccaagatgacaggggtcttgcatgtcaacaccacccagagtacatacacacccagctgggttgcgacagcacccaggctcagtttcaactttgctccaaaaatcagagtggacactgggagtggtgagatgccagggagcgggagcaggcaattacaagcctgcatgacaggggggcttcctgggtccccaagagcagagggatgcctgggtccagagctgtggctaggtagctgcagctgtgcctgggagctcagggctcctgccctgccaacttgatagaaggcagggttcccacctgttcctggtccctgccagctctgtggagcatgcagccccagctatgcctcccctgctgcagctggcatccccacagcagctgctccagataggccactgctgccatcactgacaattctttcagctcacaaaggtagccatgaattaggaaagttgggtcaggctccaggcagcctgcgttcaggcaagctcaagagctgaggatgcccacctttgcaaacatggcaactctacccatccctgtgtctcctagacactagagcccccaccctctgctattattctaccatactcattccccagccagagtctgggacctgggctcctgcagataattctacatcaaaaacaggggaagtagaaaagttcatgaaggctcctaagtctctccaaccacccagggccacaaaatccatgtagaggcctcatgaagggttttgtctaatcaaatagtttgctccaaccagccagcatctttcttttgatctagatgtctgtctccatagaaaaggacatctattgagggtcagggacctaatggcttgtgggttcctgagatacaattatgtgttacggagaaacaaagaaaattttgagacttttaggcaacagagaaaccactgcaaaaccctgtaattacagggcaagaagaaaaaagtgagctgccacagtgcctggggtagaaatagcctgacgttgcttcctggatggacctagaatgttgcacaaggtgacgtcagagtggttgcttagaagagaggtcattggatgcagttttccagctgagtacagtgggtggggtgcactgttgttcctggggcagagtgggcgagggagctgtggggagagatgaggaagcaggacaggaaaccacatttgctgaaggccaagggctgtgacaggcagacactgagacatatcgctgcactcagttctcagaacaactcagcgaagtcaggccttgtacccctagtcactagacaagaaaacagagggtcagagaggtgaggagacttgcccaagctcacctgatccctgacctgactgattgaaggcccagggcacccatccatgctaactaaggtgcaagttcgtactgtcacttctttgtgaaggggctgctctttaacaaaggataaaatgagaggttgttctactctgaggggaggggaggcagagagaaagaggggagagacttgcctctgtttgcctacaggtgccaagccaaaagaggggcttgagcttgtggagaaagcattgagttggaaatcgaatcacccagcttcaaattctgcctctactaatgccatgtggtctggggccaattactttagttctctgtgcaacaatgtcggcatcgggagtaaaggggttgaggtggtggggtgagaagtgtccactcttggtccctgcaagtctgaatcctttacactgcatgtcagcttagaataatgacggttatgagcaaggagcctggaatcagattgccaggttcaaatcccaactttgccctaagctacagtgtgacgtcaggcaagccacagatctgtgactcagtttaccctgtgtaaaatgaggataatgataatattcacaacctaggttgtcatgacaattaaatgacatcatgtgcgtgcaaccaaaatagcatttggctcatcctaggcacgggagaactatatgccaggactcagcccatggctcacgcagagctggagaagatctgggggaaggaaaaacagcttgcttgctgggcggtcccagactgcaaggtctccacctaccccagctcgcatcataactccttgaagtcaatccagatgggctctggccaccccaggggactgagcccattcccatcgagagctcattaaaattacccagaaatgggctgggcgtggtggctcacgcctataatcccaccactttgggaggccaaagtgggcagatcgaagtcaagagattgagagtatcctggccaacatggtgaaacctcatctctactg

SEQ ID NO: 13285 - protein, 132 aa, Homo sapiens
MASTAPRLCMLRDACRPALSCPQSPLGFPPVPVGDQSLEGAKMTGVLHVNTTQSTYTPSWVATAPRLSFNFAPKIRVDTGSGEMPGSGSRQLQACMTGGLPGSPRAEGCLGPELWLGSCSCAWELRAPALPT

SEQ ID NO: 13286 - DNA, 5672 bp, Homo sapiens
  CDS (2670)..(4781)
atgcctaaaatcatccagactgttggtggtggtgctgtgcaggagagagcgcctgagctggatggtggtgggcccacggagcaggacaaaagccattctaacagcagcaccttgtcggaccgaagactcagcaactccagcctctgtagcattgaagaagagcaccgaatggtgtatgaaatggtacagcggattctcttgtcaacacgaggttatgtcaacttcgtgaatgaagtatttcaccaggcatttttgttgccttcctgtgagatagctgtaacaagaaaagtagttcaagtgtacagaaagtggattctccaggacaaacctgtgttcatggaggagccagatagaaaagatgttgcccaagaagatgctgaaaaattaggattttccgagactgatagcaaggaggcctcatctgaaagttctggtcataaacgatcttccagttggggacgcacatactccttcacaagtgcaatgagcagagggtgtgtgacagaggaggaaaatacaaatgtgaaagccggcgtccaggctttgttgcaggtatttttgacgaactctgcaaacatctttttgttggaaccatgtgctgaagttcctgtgctcttgaaagaacaagttgatgcttgtaaagctgttttgattatttttaggcgcatgataatggagcttacaatgaataaaaagacatgggaacagatgttgcaaatactactcaggataacagaagctgtcatgcagaagccaaaggataaacgaataaaggacttgtttgcccagagcttggcagggttactatttaggacgctcatggtagcttggatccgagcaaacctctgtgtgtacatttctcgagagctctgggatgactttcttggtgtgctgtccttcctcacggaatgggaggaacttataaacgagtgggccaacattatggactccttgacagcagtgcttgcaagaaccgtttatggagttgagatgacaaacctacctctggataaattaagtgaacaaaaggaaaagaagcaacgaggcaaaggctgcgttctagatcctcagaaaggaaccaccgtggggaggtcctcttctctcagctggcggagccacccagatgtgaccgaaccgatgcgatttaggagtgccaccacgtctggagcaccgggagtggaaaaggcaagaaatattgttcgccaaaaagcaactgaagtggaggagtgtcaacagtcagaaaatgcacctgcagccggatctggccatctcacagtgggacagcagcagcaggtccttcggagcagcagcacctccgacatccccgagccgctgtgctcagattcttctcagggtcaaaaggcagaaaacacacagaattcgagttcttcagagcctcagcctattcaagagaataaaggacatgtgaagagagaacatgaaggaataacaatcttagttcgaagaagcaggagccctgctgaattggatttgaaatatgatttgcagcagacacaaggaaaatgtagggaaagacagaagagtgaaagtaccaacagtgacacaactctgggctgtaccaatgaggcagagctgtccatgggcccatggcagacctgtgaggaagacccagaactgaatactcccacagatgttgtggctgatgctgatgcccgtcattggttacatctgagtcccaccgatgcttcaaatttaacagatagcagcgagtgcctcacagatgactgtagtataatcgccggggggagcctcactggttggcacccagactctgctgctgtgttatggcgaagggtcttggggatcctcggagatgtgaataacatccagtcacccaagatccatgccagagttttctgctatctctatgaactctggtacaaactagcaaagatacgggataatctagcaataagcctggataaccagtcttctccatctcctccagttttgatcccaccactcagaatgtttgcatcatggctgtttaaggcggcgacactgccaaatgaatataaggaaggcaaactacaagcctacaggctgatctgtgccatgatgaccagacgccaggacgttctgccaaactcagatttcctggtgcatttttaccttgtgatgcacctgggattaaccagcgaggatcaggatatcttaaatacgatcataaggcactgtccaccccgctttttctccctgggttttcctggcttctcaatgctggtgggggacttcatcacggccgctgccagggtccttagcacagacattttgacggcgcctcgttcagaggctgtcactgtcctcggctctctggtctgctttccaaatacctaccaggagattcctttactgcagtcagtgccagaagtaaatgaggccattacaggaactgaagatgtcaagcattacctcataaatatttactgaagaatgccacagaagaaccaaatgaatatgcaagatgcattgctgtttgctcccttggggtctggatatgtgaagagcttgcacagtgtacaagccaccctcaggtgaaagaggccatcaatgtgataggagtaactctgaagtttcccaacaaaatcgtggcccaggtagcttgcgatgtccttcggttgctggtttcctactgggagaagcttcagatgtttgaaacctctctgcctcggaaaatggcagaaatcctcgtggccacagttgcttttcttttaccaagtgcagagtactcctcagtggaaacagacaagaagtttattgtgtccttgctactctgcctcttggactggtgcatggcattgcccgtgagtgtccttctccaccccgtgtccacagcagtcctagaggagcagcattcggccagagcccccttgctggattatatctacagggttttgcactgctgtgtgtgtggctcaagcacgtacacccaacagagtcactacatactgaccctggctgacttgtcatccacggattatgaccccttcctgccactggcaaatgtgaagagctctgagccagtccagtatcattcatcagcagaattgggtaacctgctgactgttgaagaggagaagaagagaagaagtttggagttgatccctttgactgctcgaatggtgatggcccacctggtgaaccacctggggcactaccccctcagtgggggccctgccatactgcacagccttgtcagcgagaaccatgacaatgcccatgtggaaggctccgagctgtcctttgaggtgttcagaagtccaaacctgcagctgtttgtatttaatgatagcaccctcatctcctaccttcagacacccacagaaggaccggtagggggatcaccagtgggctctctctctgatgtgagagtaattgtgagggatatctcagggaagtactcttgggatggtaaggttttatatggacctttggaaggctgcttagcacccaatggaagaaatccttcatttctgatttcgagctggcatcgtgacacatttggacctcagaaagactcttctcaagttgaggagggggatgatgttcttgacaaattacttgaaaacattggccatacaagtcctgaatgccttttaccgtcacagctaaatctaaatgaaccttccctaaccccatgtggcatgaactatgaccaagagaaggaaatcattgaggtcattttgcgccaaaatgctcaagaggatgagtatatccagagtcataacttcgattctgcaatgaaagtcaccagccaagggcagccctccccagtggagccccgaggacccttttatttctgcaggttattgcttgatgacttgggaatgaattcttgggacagaaggaagaattttcatctattgaagaaaaattcaaaattattgagagagctgaaaaatttggactcccgccagtgccgtgagacacacaaaatcgcagtgttttacattgctgaaggtcaagaagacaagtgttcaatcctctctaatgaaagaggaagccaagcatatgaagactttgttgctggacttggatgggaggtggatctctccacccactgtgggttcatgggtggccttcagcgcaatggcagcaccgggcagacggccccttactatgctacctcaactgtggaagtgattttccatgtttccactcgaatgccgtcagactcagatgattccctcaccaaaaagcttcgtcacttggggaatgacgaggtccatatcgtctggtctgaacactccagagactaccgcaggggtattatcccaactgcctttggagatgtttcaatcattatttacccaatgaagaatcacatgttcttcatcgcgataacgaagaaacctgaggttccattttttgggcctctgtttgatggagccacagtgagtgggaagctgctgccaagccttgtatgtgccacgtgcatcaacgccagcagggctgtgaagtgcctcatcccactctaccagagcttctatgaagagcgagctctgtatctcgaagcaataattcagaaccaccgcgaagtaatgacattcgaggatttcgcagcccaagtcttttctccctctcccagctactccctcagcggaacgggggccctggcctccagtctgagtgctgacctcgaagagcccctgagtgaggaggagacagaacaccctctcctgcctctgccccgagccactaaacccagaatctccaggaaatttcgttgctgtactagtgccctcagcaggtcttcccattagtggacttctgaagcccatggtgaatcccactaccgtgtcatcagatgggactcaaactaggctgtatcatcttgtcctgaaacctcacaaaccttggacttccaaagaagaaaagaaaaagtcaccaaaaaccagagatgaacccactgacacgtgggcactggtgtggctgctctgggcagatgactgcaggaaaagattctgcgctttcagggagggggcagagggcagcttgcttctgcaccccaagttgtttcttctcatttatgaacccaagcatgattcacaaaggggctggcaaaacaattgtctaattgaggaatctgatctgcattgattttgctagttccttttatgttaggatttatggtttactcaaaaatttcatcatcatggaaattggctttccccggggtcttttgcccaggagaagttttacctcagttgtccagtgttttcccacatggtacctgacgcccgctaactaagcagaggctctcctcaccacgcagaggcgcttcaggtcatgacagtgatgcccctatcttagaacactcagaagattccagaaatacagggtcctgtccttgcataagttcctgcaggacaggaagtgtcccaaggctcaaaacaacacagaccacatccacacaaaaggcgcatgccggcttcaggcgctaggctgagacgggtaccccccgaatggccttgtgcctccaaaagcctcacgctgcaactttgctgctcctgtctgttgcccagagaggcctcacacaggcctcagaaatgtttcttgtcacacaaagcttttggtagccgattccaagcgagggatttaatccttacatttttgcccatttggctccaaggaaggcttattagacctgt

SEQ ID NO: 13287 - protein, 704 aa, Homo sapiens
MFETSLPRKMAEILVATVAFLLPSAEYSSVETDKKFIVSLLLCLLDWCMALPVSVLLHPVSTAVLEEQHSARAPLLDYIYRVLHCCVCGSSTYTQQSHYILTLADLSSTDYDPFLPLANVKSSEPVQYHSSAELGNLLTVEEEKKRRSLELIPLTARMVMAHLVNHLGHYPLSGGPAILHSLVSENHDNAHVEGSELSFEVFRSPNLQLFVFNDSTLISYLQTPTEGPVGGSPVGSLSDVRVIVRDISGKYSWDGKVLYGPLEGCLAPNGRNPSFLISSWHRDTFGPQKDSSQVEEGDDVLDKLLENIGHTSPECLLPSQLNLNEPSLTPCGMNYDQEKEIIEVILRQNAQEDEYIQSHNFDSAMKVTSQGQPSPVEPRGPFYFCRLLLDDLGMNSWDRRKNFHLLKKNSKLLRELKNLDSRQCRETHKIAVFYIAEGQEDKCSILSNERGSQAYEDFVAGLGWEVDLSTHCGFMGGLQRNGSTGQTAPYYATSTVEVIFHVSTRMPSDSDDSLTKKLRHLGNDEVHIVWSEHSRDYRRGIIPTAFGDVSIIIYPMKNHMFFIAITKKPEVPFFGPLFDGATVSGKLLPSLVCATCINASRAVKCLIPLYQSFYEERALYLEAIIQNHREVMTFEDFAAQVFSPSPSYSLSGTGALASSLSADLEEPLSEEETEHPLLPLPRATKPRISRKFRCCTSALSRSSH

SEQ ID NO: 13288 - DNA, 1664 bp, Homo sapiens
  CDS (106)..(1044)
tcatggccggctcctaccctgaaggtgcacctgcaatcctcgccgataagaggcagcagttcggaagccggttcctgagcgatccggcgcgggtcttccaccacaatgcctgttgattatgagatcaatgcccacaaatactggaatgacttctacaaaatccacgaaaatgggtttttcaaggatagacattggctttttaccgaattccctgagctggcacctagccaaaatcaaaatcatttgaaggattggttcttggagaacaagagtgaagtatgtgaatgtagaaacaatgaggatggacctggtttaataatggaagaacagcacaagtgttcttcgaagagccttgaacataaaacacagacacctcctgtggaggagaatgtaactcagaaaattagtgacctggaaatttgtgctgatgagtttcctggatcctcagccacctaccgaatactggaggttggctgtggtgtgggaaacacagtctttccaattttacaaacgaacaatgacccaggactctttgtttattgctgtgatttttcttccacagctatagaactggtccagacaaattcagaatatgatccttctcggtgttttgcctttgttcacgacctgtgtgatgaagagaagagttacccagtgcccaagggcagtcttgatattatcattctcatatttgttctttcagcaattgttccagacaagatgcagaaggctatcaacaggctgagcaggcttctgaaacctggggggatggtacttctgcgagattacggccgctatgacatggctcagcttcggtttaaaaaaggtcagtgtctatctggaaatttctatgtgagaggtgatggaaccagagtttacttcttcacacaagaggaactggacacgcttttcaccactgctggactggaaaaagttcagaacctggtggaccgccgactgcaggtgaaccgagggaagcaactgacaatgtaccgggtttggattcagtgcaaatactgcaagccccttctgtccagcaccagctaagaggcacctgctgccaacacgatgcaagcccgttgtgtttccgagctttttttaaaaaaaaatttgtagcaccgggcatggtgcatgcctgtaatcccagccactcaggaggctgaggcagggaggatccattgagcccaggagtccagcctgggcaaaatagcgagagaccctgaatctgaaagtaatgataaaataaaaagaatataaatgaggtctcgttgatgctggacaattcaagaattcagacttgaaccttaaacctaggaaaagttactttgtatcaggattctaacaattatgcttcatatttgtgaagtcctttaaaacataattttctcaagttctttctttgagacctcaatctgtcttagcattttgtaactaataactgaaattttattcaaaggaattgtaaaccttaaaccaccaatttatttccatgtgaaaaagtgttatatatgacaagtgttttttgattgtaattgcgttaaatcttttgagagtgtaaatgccgggctaggcaattgcagttaatacatacaggggttagtgaagggcttattaagttgtaggggaagcaagctgggaagaatcagatcagatattttcctgac

SEQ ID NO: 13289 - protein, 313 aa, Homo sapiens
MPVDYEINAHKYWNDFYKIHENGFFKDRHWLFTEFPELAPSQNQNHLKDWFLENKSEVCECRNNEDGPGLIMEEQHKCSSKSLEHKTQTPPVEENVTQKISDLEICADEFPGSSATYRILEVGCGVGNTVFPILQTNNDPGLFVYCCDFSSTAIELVQTNSEYDPSRCFAFVHDLCDEEKSYPVPKGSLDIIILIFVLSAIVPDKMQKAINRLSRLLKPGGMVLLRDYGRYDMAQLRFKKGQCLSGNFYVRGDGTRVYFFTQEELDTLFTTAGLEKVQNLVDRRLQVNRGKQLTMYRVWIQCKYCKPLLSSTS

SEQ ID NO: 13290 - DNA, 20 bp, Artificial Sequence
  misc_feature (1)..(20): Description of Artificial Sequence:an artificially synthesized primer sequence
tacggaagtgttacttctgc

SEQ ID NO: 13291 - DNA, 20 bp, Artificial Sequence
  misc_feature (1)..(20): Description of Artificial Sequence:an artificially synthesized primer sequence
tgtgggaggttttttctcta

SEQ ID NO: 13292 - DNA, 17 bp, Artificial Sequence
  misc_feature (1)..(17): Description of Artificial Sequence:an artificially synthesized primer sequence
gttttcccagtcacgac

SEQ ID NO: 13293 - DNA, 17 bp, Artificial Sequence
  misc_feature (1)..(17): Description of Artificial Sequence:an artificially synthesized primer sequence
caggaaacagctatgac

SEQ ID NO: 13294 - DNA, 1387 bp, Homo sapiens
  CDS (56)..(1369)
cacaggcaacttcctcactttgacccaagctattgacaaattttcagcagatggaatgcgtttggctctggctgatgctggtgacactgtagaagatgccaactttgtggaagccatggcagatgcaggtattctccgtctgtacacctgggtagagtgggtgaaagaaatggttgccaactgggacagcctaagaagtggtcctgccagcactttcaatgatagagtttttgccagtgaattgaatgcaggaattataaaaacagatcaaaactatgaaaagatgatgtttaaagaagctttgaaaacagggttttttgagtttcaggccgcaaaagataagtaccgtgaattggctgtggaagggatgcacagagaacttgtgttccggtttattgaagttcagacacttctcctcgctccattctgtccacatttgtgtgagcacatctggacactcctgggaaagcctgactcaattatgaatgcttcatggcctgtggcaggtcctgttaatgaagttttaatacactcctcacagtatcttatggaagtaacacatgaccttagactacgactcaagaactatatgatgccagctaaagggaagaagactgacaaacaacccctgcagaagccctcacattgcaccatctatgtggcaaagaactatccaccttggcaacataccaccctgtctgttctacgtaaacactttgaggccaataacggaaaactgcctgacaacaaagtcattgctagtgaactaggcagtatgccagaactgaagaaatacatgaagaaagtcatgccatttgttgccatgattaaggaaaatctggagaagatggggcctcgtattctggatttgcaattagaatttgatgaaaaggctgtgcttatggagaatatagtctatctgactaattcgcttgagctagaacacatagaagtcaagtttgcctccgaagcagaagataaaatcagggaagactgctgtcctgggaaaccacttaatgtttttagaatagaacctggtgtgtccgtttctctggtgaatccccagccatccaatggccacttctcaaccaaaattgaaatcaggcaaggagataactgtgattccataatcaggcgtttaatgaaaatgaatcgaggaattaaagacctttccaaagtgaaactgatgagatttgatgatccactgttggggcctcgacgagttcctgtcctgggaaaggagtacaccgagaagacccccatttctgagcatgctgttttcaatgtggacctcatgagcaagaaaattcatctgactgagaatgggataagggtggatattggcgatacaataatctatctggttcattaaactcatgcacattgg

SEQ ID NO: 13295 - protein, 438 aa, Homo sapiens
MRLALADAGDTVEDANFVEAMADAGILRLYTWVEWVKEMVANWDSLRSGPASTFNDRVFASELNAGIIKTDQNYEKMMFKEALKTGFFEFQAAKDKYRELAVEGMHRELVFRFIEVQTLLLAPFCPHLCEHIWTLLGKPDSIMNASWPVAGPVNEVLIHSSQYLMEVTHDLRLRLKNYMMPAKGKKTDKQPLQKPSHCTIYVAKNYPPWQHTTLSVLRKHFEANNGKLPDNKVIASELGSMPELKKYMKKVMPFVAMIKENLEKMGPRILDLQLEFDEKAVLMENIVYLTNSLELEHIEVKFASEAEDKIREDCCPGKPLNVFRIEPGVSVSLVNPQPSNGHFSTKIEIRQGDNCDSIIRRLMKMNRGIKDLSKVKLMRFDDPLLGPRRVPVLGKEYTEKTPISEHAVFNVDLMSKKIHLTENGIRVDIGDTIIYLVH

SEQ ID NO: 13296 - DNA, 1424 bp, Homo sapiens
  CDS (75)..(1265)
agcactctgcgcgcccgctcttctgctgctgtttgtctacttcctcctgcttccccgccgccgccgccgccatcatgagggaaaacgtgcacttgcaggccgggcagtgcggcaaccaaatcggcgccaagttttgggaggtgatcagcgatgagcacggcatcgaccccacgggcacctaccacggggacagcgacctgcagctggaacgcatcaacgtgtactacaatgaggccaccggcggcaagtacgtgccccgcgccgtgctcgtggatctggagcccggcaccatggactccgtgcgctcggggcccttcgggcagatcttccagctgacccactccctgggtggggggactgggtctgggatgggtaccctcctcatcagcaagatccgggaggagtacccagacaggatcatgaacacgtttagtgtggtgccttcgcccaaagtgtcagacacagtggtggagccctacaacgccaccctctcagtccaccagctcgtagaaaacacagacgagacctactgcattgataacgaagctctctacgacatttgcttcagaaccctaaagctgaccacgcccacctatggtgacctgaaccacctggtgtctgctaccatgggtggggtcaccacctgcctgcgcttcccaggccagctcaatgctgacctgcggaagctggctgtgaacatggtcccgtttccccggctgcacttcttcatgcccggctttgccccactgaccagccggggcagccagcagtaccgggcgctgaccgtgcccgagctcacccagcagatgtttgatgccaagaacatgatggctgcctgcgacccccgccatggccgctacctgacggttgccgccgtgttcaggggccgcatgtccatgaaggaggtggatgagcaaatgcttaatgtccaaaacaaaaacagcagctattttgttgagtggatccccaacaatgtgaaaacggctgtctgtgacatcccacctcgggggctaaaaatgtccgccaccttcattggcaacagcacggccatccaggagctgttcaagcgcatctccgagcagttcacggccatgttccggcgcaaggccttcctgcactggtacacgggcgagggcatggacgagatggagttcaccgaggccgagagcaacatgaatgacctggtgtccgagtaccagcagtaccaggatgccacagccgaagaggagggcgagttcgaggaggaggctgaggaggaggtggcctagagccttcagtcactggggaaagcagggaagcagtgtgaactctttattcactcccagcctgtcctgtggcccgtcccactgtgtgcacttgctgttttccctgtccacatccatgctgtacagacaccaccattaaagcattttcatagtgaaaac

SEQ ID NO: 13297 - protein, 397 aa, Homo sapiens [sequence omitted]

SEQ ID NO: 13298 - DNA, 2613 bp, Homo sapiens
  CDS (224)..(2257)
agtttcagtttccatttctgatttctgctctctgcgctgagcacagcggcaccaggctgagctaagcagggccgccttgggcaggcctacgtggtggtgcaggcgagacccaggctgggcaaggcgcagtttcagtttccatcttgggtctctgagctgagcagagtggcaccaggctgagttaagtgggactgccctgggcagacctacctactagagcagaatggagcttcggtcctaccaatgggaggtgatcatgcctgccctggagggcaagaatatcatcatctggctgcccacgggtgccgggaagacccgggcggctgcttatgtggccaagcggcacctagagactgtggatggagccaaggtggttgtattggtcaacagggtgcacctggtgacccagcatggtgaagagttcaggcgcatgctggatggacgctggaccgtgacaaccctgagtggggacatgggaccacgtgctggctttggccacctggcccggtgccatgacctgctcatctgcacagcagagcttctgcagatggcactgaccagccccgaggaggaggagcacgtggagctcactgtcttctccctgatcgtggtggatgagtgccaccacacgcacaaggacaccgtctacaacgtcatcatgagccagtacctagaacttaaactccagagggcacagccgctaccccaggtgctgggtctcacagcctccccaggcactggcggggcctccaaactcgatggggccatcaaccacgtcctgcagctctgtgccaacttggacacgtggtgcatcatgtcaccccagaactgctgcccccagctgcaggagcacagccaacagccttgcaaacagtacaacctctgccacaggcgcagccaggatccgtttggggacttgctgaagaagctcatggaccaaatccatgaccacctggagatgcctgagttgagccggaaatttgggacgcaaatgtatgagcagcaggtggtgaagctgagtgaggctgcggctttggctgggcttcaggagcaacgggtgtatgcgcttcacctgaggcgctacaatgacgcgctgctcatccatgacaccgtccgcgccgtggatgccttggctgcgctgcaggatttctatcacagggagcacgtcactaaaacccagatcctgtgtgccgagcgccggctgctggccctgttcgatgaccgcaagaatgagctggcccacttggcaactcatggcccagagaatccaaaactggagatgctggaaaagatcctgcaaaggcagttcagtagctctaacagccctcggggtatcatcttcacccgcacccgccaaagcgcacactccctcctgctctggctccagcagcaacagggcctgcagactgtggacatccgggcccagctactgattggggctgggaacagcagccagagcacccacatgacccagagggaccagcaagaagtgatccagaagttccaagatggaaccctgaaccttctggtggccacgagtgtggcggaggaggggctggacatcccacattgcaatgtggtggtgcgttatgggctcttgaccaatgaaatctccatggtccaggccaggggccgtgcctgggccgatcagagtgtatacgcgtttgtagcaactgaaggtagccgggagctgaagcgggagctgatcaacgaggcgctggagacgctaatggagcaggcagtggctgctgtgcagaaaatggaccaggccgagtaccaggccaagatccgggatctgcagcaggcagccttgaccaagcgggcggcccaggcagcccagcgggagaaccagcggcagcagttcccagtggagcacgtgcagctactctgcatcaactgcatggtggctgtgggccatggcagcgacctgcggaaggtggagggcacccaccatgtcaatgtgaaccccaacttctcgaactactataatgtctccagggatcctgtggtcatcaacaaagtcttcaaggactggaagcctgggggtgtcatcagctgcaggaactgtggggaggtctggggtctgcagatgatctacaagtcagtgaagctgccagtgctcaaagtccgcagcatgctgctggagacccctcaggggcggatccaggccaaaaagtggtcccgcgtgcccttctccgtgcctgactttgacttcctgcagcattgtgccgagaacttgtcggacctctccctggactgaccacctcattgctgcagtgcccggtttgggctgtagggggcgggagagtctgcagcagactccaggcccctccttcctgaatcatcagctgtgggcatcaggcccaccagccacacaggagtcctgggcaccctggcttaggctcccgcaatgggaaaacaaccggagggccagagcttagtccagacctaccttgtacgcacatagacattttcatatgcactggatggagttagggaaactgaggcaaaagaatttgccatactgtactcagaatcacgacattccttccctaccaaggccacttctattttttgaggctcctcataaaaataaatgaaaaaatgggatag

SEQ ID NO: 13299 - protein, 678 aa, Homo sapiens
MELRSYQWEVIMPALEGKNIIIWLPTGAGKTRAAAYVAKRHLETVDGAKVVVLVNRVHLVTQHGEEFRRMLDGRWTVTTLSGDMGPRAGFGHLARCHDLLICTAELLQMALTSPEEEEHVELTVFSLIVVDECHHTHKDTVYNVIMSQYLELKLQRAQPLPQVLGLTASPGTGGASKLDGAINHVLQLCANLDTWCIMSPQNCCPQLQEHSQQPCKQYNLCHRRSQDPFGDLLKKLMDQIHDHLEMPELSRKFGTQMYEQQVVKLSEAAALAGLQEQRVYALHLRRYNDALLIHDTVRAVDALAALQDFYHREHVTKTQILCAERRLLALFDDRKNELAHLATHGPENPKLEMLEKILQRQFSSSNSPRGIIFTRTRQSAHSLLLWLQQQQGLQTVDIRAQLLIGAGNSSQSTHMTQRDQQEVIQKFQDGTLNLLVATSVAEEGLDIPHCNVVVRYGLLTNEISMVQARGRAWADQSVYAFVATEGSRELKRELINEALETLMEQAVAAVQKMDQAEYQAKIRDLQQAALTKRAAQAAQRENQRQQFPVEHVQLLCINCMVAVGHGSDLRKVEGTHHVNVNPNFSNYYNVSRDPVVINKVFKDWKPGGVISCRNCGEVWGLQMIYKSVKLPVLKVRSMLLETPQGRIQAKKWSRVPFSVPDFDFLQHCAENLSDLSLD

SEQ ID NO: 13300 - DNA, 1637 bp, Homo sapiens
  CDS (173)..(1300)
gtcgtctgcggcggcggcggcggctgaggagcccggctgaggcgccagtacccggcccggtccgcatttcgccttccggcttcggtttccctcggcccagcacgccccggccccgccccagccctcctgatccctcgcagcccggctccggccgcccgcctctgccgccgcaatgatgatgatggcgctgagcaagaccttcgggcagaagcccgtgaagttccagctggaggacgacggcgagttctacatgatcggctccgaggtgggaaactacctccgtatgttccgaggttctctgtacaagagatacccctcactctggaggcgactagccactgtggaagagaggaagaaaatagttgcatcgtcacatgatcacggatacacgactctagccaccagtgtgaccctgttaaaagcctcggaagtggaagagattctggatggcaacgatgagaagtacaaggctgtgtccatcagcacagagccccccacctacctcagggaacagaaggccaagaggaacagccagtgggtacccaccctgcccaacagctcccaccacttagatgccgtgccatgctccacaaccatcaacaggaaccgcatgggccgagacaagaagagaaccttccccctttgctttgatgaccatgacccagctgtgatccatgagaacgcatctcagcccgaggtgctggtccccatccggctggacatggagatcgatgggcagaagctgcgagacgccttcacctggaacatgaatgagaagttgatgacgcctgagatgttttcagaaatcctctgtgacgatctggatttgaacccgctgacgtttgtgccagccatcgcctctgccatcagacagcagatcgagtcctaccccacggacagcatcctggaggaccagtcagaccagcgcgtcatcatcaagctgaacatccatgtgggaaacatttccctggtggaccagtttgagtgggacatgtcagagaaggagaactcaccagagaagtttgccctgaagctgtgctcggagctggggttgggcggggagtttgtcaccaccatcgcatacagcatccggggacagctgagctggcatcagaagacctacgccttcagcgagaaccctctgcccacagtggagattgccatccggaacacgggcgatgcggaccagtggtgcccactgctggagactctgacagacgctgagatggagaagaagatccgcgaccaggacaggaacacgaggcggatgaggcgtcttgccaacacggccccggcctggtaaccagcccatcagcacacggctcccacggagcatctcagaagattgggccgcctctcctccatcttctggcaaggacagaggcgaggggacagcccagcgccatcctgaggatcgggtgggggtggagtgggggcttccaggtggcccttcccggcacacattccatttgttgagccccagtcctgccccccaccccaccctccctacccctccccagtctctggggtcaggaagaaaccttattttaggttgtgttttgtttttgtataggagccccaggcagggctagtaacagtttttaaataaaaggcaacaggtcatgttcaatctcttc

SEQ ID NO: 13301 - protein, 376 aa, Homo sapiens
MMMMALSKTFGQKPVKFQLEDDGEFYMIGSEVGNYLRMFRGSLYKRYPSLWRRLATVEERKKIVASSHDHGYTTLATSVTLLKASEVEEILDGNDEKYKAVSISTEPPTYLREQKAKRNSQWVPTLPNSSHHLDAVPCSTTINRNRMGRDKKRTFPLCFDDHDPAVIHENASQPEVLVPIRLDMEIDGQKLRDAFTWNMNEKLMTPEMFSEILCDDLDLNPLTFVPAIASAIRQQIESYPTDSILEDQSDQRVIIKLNIHVGNISLVDQFEWDMSEKENSPEKFALKLCSELGLGGEFVTTIAYSIRGQLSWHQKTYAFSENPLPTVEIAIRNTGDADQWCPLLETLTDAEMEKKIRDQDRNTRRMRRLANTAPAW

SEQ ID NO: 13302 - DNA, 1708 bp, Homo sapiens
  CDS (125)..(721)
actcgtaactcgcacccgggtcctggctgcaccgcatcccctcctgcaccccctggatggcccttcagccaacgggggcctgggcgatggtcgaccacggagctgcgcaaggaaaagtcccgggatgcggcccgcagccggcgcagccaggagaccgaggtgctgtaccagctggctcacacgctgcccttcgcccgcggcgtcagcgcccacctggacaaggcctctatcatgcgcctcaccatcagctacctgcgcatgcaccgcctctgcgccgcagctggagctcattggacacagcatctttgatttcatccacccctgtgaccaagaggagcttcaggacgccctgaccccccagcagaccctgtccaggaggaaggtggaggcccccacggagcggtgcttctccttgcgcatgaagagtacgctcaccagccgcgggcgcaccctcaacctcaaggcggccacctggaaggtgctgaactgctctggacatatgagggcctacaagccacctgcgcagacttctccagctgggagccctgactcagagcccccgctgcagtgcctggtgctcatctgcgaagccatcccccacccaggcagcctggagcccccactgggccgaggggccttcctcagccgccacagcctggacatgaagttcacctactgtgacgacagggttgcagaagtggctggctatagtccgatgacctgatcggctgttccgcctacgagtacatccacgcgctggactccgacgcggtcagcaagagcatccacaccttgctgagcaagggccaggcagtaacagggcagtatcgcttcctggcccggagtggtggctacctgtggacccagacccaggccacagtggtgtcagggggacggggcccccagtcggagagtatcgtctgtgtccattttttaatcagccaggtggaagagaccggagtggtgctgtccctggagcaaacggagcaacactctcgcagacccattcagcggggcgccccctctcagaaggacacccctaaccctggggacagccttgacacccctggcccccggatccttgccttcctgcacccgccttccctgagcgaggctgccctggccgctgacccccgccgtttctgcagccctgacctccgtcgcctcctgggacccatcctggatggggcttcagtagcagccactcccagcaccccgctggccacacggcacccccaaagtcctctttcggctgatctcccagatgaactacctgtgggcaccgagaatgtgcacagactcttcacctccgggaaagacactgaggcagtggagacagatttagatatagctcaggaccccagcaccccactcctgaacctgaatgagcccctgggttttcactttgtcacccagtctggagtgcagtggcacaaacacagctcaccgcagcctcgacctcctgggctcaagtgatcctcctacttcagctcccacaagtagctgggactgcagctatgtgccatcatgcctggctgatgtttatatgttttgtagagacgaggtttcaccatgttgcccaggctggtcttgaactcctgagttcaagcgatccacctgccttggcctcccaaagtgctgggattactggtatgaaccaccacgcccgacagtaaatatgttttgaatgaataaactctcataaatg

SEQ ID NO: 13303 - protein, 199 aa, Homo sapiens [sequence omitted]

SEQ ID NO: 13304 - DNA, 2636 bp, Homo sapiens
  CDS (375)..(2105)
gcttcccggaagtggcggcgcggtcagggctggccttggcttcagctgcggttttggggtcccggactctgggatcggcggcgctatgagttctttcgaggggcagatggccgagtatccaactatctccatagaccgcttcgatagggagaacctgagggcccgcgcctacttcctgtcccactgccacaaagatcacatgaaaggattaagagcccctaccttgaaaagaaggttggagtgcagcttgaaggtttatctatactgttcacctgtgactaaggagttgttgttaacgagcccgaaatacagattttggaagaaacgaattatatctattgaaatcgagactcctacccagatatctttagtggatgaagcatcaggagaggtttttatttcagggcaataatggaactgtcctgtacacaggagacttcagattggcgcaaggagaagctgctagaatggagcttctgcactccgggggcagagtcaaagacatccaaagtgtatatttggatactacgttctgtgatcgaagattttaccaaattccaagtcgggaggagtgtttaagtggagtcttagagctggtccgaagctggatcactcggagcccgtaccatgttgtgtggctgaactgcaaagcggcttatggctatgaatatctgttcaccaaccttagtgaagaattaggggtccaggttcatgtgaataagctagacatgtttaggaacatgcctgagatccttcatcatctcacaacagaccgcaacactcagatccatgcatgccggcatcccaaggcagaggaatattttcagtggagcaaattaccctgtggaattacttccagaaatagaattccactccacataatcagcattaagccatccaccatgtggtttggagaaaggagcagaaaaacaaatgtaattgtgaggactggagagagttcatacagagcttgtttttcttttcactcctcctacagtgagattaaagatttcttgagctacctctgtcctgtgaacgcatatccaaatgtcattccagttggcacaactatggataaagttgtcgaaatcttaaagcctttatgccggtcttcccaaagtacggagccaaagtataaaccactgggaaaactgaagagagctagaacagttcaccgagactcagaggaggaagatgactatctctttgatgatcctctgccaatacctttaaggcacaaagttccatacccggaaacttttcaccctgaggtattttcaatgactgcagtatcagaaaagcagcctgaaaaactgagacaaaccccaggatgctgcagagcagagtgtatgcagagctctcgtttcacaaactttgtagattgtgaagaatccaacagtgaaagtgaagaagaagtaggaatcccagcttcactgcaaggagatctgggctctgtacttcacctgcaaaaggctgatggggatgtaccccagtgggaagtattctttaaaagaaatgatgaaatcacagatgagagtttggaaaacttcccttcctccacagtggcagggggatctcagtcaccaaagcttttcagtgactctgatggagaatcaactcacatctcctcccagaattcttcccagtcaacacacataacagaacaaggaagtcaaggctgggacagccaatctgatactgttttgttatcttcccaagagagaaacagtggggatattacttccttggacaaagctgactacagaccaacaatcaaagagaatattcctgcctctctcatggaacaaaatgtaatttgcccaaaggatacttactctgatttgaaaagcagagataaagatgtgacaatagttcctagtactggagaaccaactactctaagcagtgagacacatatacccgaggaaaaaagtttgctaaatcttagcacaaatgcagattcccagagctcttctgattttgaagttccctcaactccagaagctgagttacctaaacgagagcatttacaatatttatatgagaagctggcaactggtgagagtatagcagtcaaaaaaagaaaatgctcactcttagatacctaagaattcaaagcgtttcaacctagagcaaccactaaaaaacctgcacagagatgacagtcaatattacaatagagaaaatacagtacttaaaaatgttcaaataacctggttgggtgtggtggctcacacttgtaatcccagcactttgaggtgggcaatggcttgagcccaggagttcgacaccagcctggccaacacagtgaaatgtgtctctacttacaaaaaaaaaaaaaaaaaaaaagccaggcatggtggtgggctactctggaggcccttgaggaccacttgagcccaggagattgaggctgcagtgagccatgactgtgccactgcacctctagtctgggtgacagagcaagaccctgtttaaaaaagaaaaaggccaggcacggtggctcatgcctgtaatcccagctacgcaggaggccaaggcaggagaatcacttgaacctgggaggtggtggttgcagtgagctgagattgtgtcattgcactccagcctgggcaacaagagcaaaactctgtctc

SEQ ID NO: 13305 - protein, 577 aa, Homo sapiens
MKHQERFLFQGNNGTVLYTGDFRLAQGEAARMELLHSGGRVKDIQSVYLDTTFCDRRFYQIPSREECLSGVLELVRSWITRSPYHVVWLNCKAAYGYEYLFTNLSEELGVQVHVNKLDMFRNMPEILHHLTTDRNTQIHACRHPKAEEYFQWSKLPCGITSRNRIPLHIISIKPSTMWFGERSRKTNVIVRTGESSYRACFSFHSSYSEIKDFLSYLCPVNAYPNVIPVGTTMDKVVEILKPLCRSSQSTEPKYKPLGKLKRARTVHRDSEEEDDYLFDDPLPIPLRHKVPYPETFHPEVFSMTAVSEKQPEKLRQTPGCCRAECMQSSRFTNFVDCEESNSESEEEVGIPASLQGDLGSVLHLQKADGDVPQWEVFFKRNDEITDESLENFPSSTVAGGSQSPKLFSDSDGESTHISSQNSSQSTHITEQGSQGWDSQSDTVLLSSQERNSGDITSLDKADYRPTIKENIPASLMEQNVICPKDTYSDLKSRDKDVTIVPSTGEPTTLSSETHIPEEKSLLNLSTNADSQSSSDFEVPSTPEAELPKREHLQYLYEKLATGESIAVKKRKCSLLDT

SEQ ID NO: 13306 - DNA, 1949 bp, Homo sapiens
accctgtacttactcactatcataatttatgagaatgacaaatttttagaaataagcaaattgacatctctaactctgacttctctgtctaaactactgttgcttgaatttcccaaaatatctgaactccatatatctgaacctaactcataacctctctttggcaagcctgttgctgctttcctatttttactattctatctcagggccttattcaaagctcaagcctggattatcaggacagttttgctaattcactgctctactttgtctctccttcgaaaccatttttacccactaccatgaaaatggctctctagaatctttatcggacaaaggtaaaatttctcaattcattattaccaaccttctaaaatccagcttcaatctgcctttcttcagactaacatctcattatcccccacaaatactggtctcactaatgttccttgaagagcttgttttccagcttccataactttgctctaaatgcccaccctccttggcaatactttccctccttcacctatcctccacccagctttcagggttggggtcagatcccatgaggcacttactgatctctttgtctcatggtaattgttgcctcctctgtcccactcatctggcattaatcttatgctgccttatatctcttaaaggctatccaccttaacacatatatatatctaacttccccagtccagcctgtgagacgaaggcaggtgggggcatgtttcatattttatgtgctttggtgccttctactcaagatatacttgctgactgacccattcaccaattctgaagtctttggttatatactctcttaatcttggactttccacactgaaaagttctaagttttaaagtctactgttggagatttcttgaatcctgtgatcattttaattattctcattgatcttttgcagagcttctctacatcattacatcttttttataattacagcaatgaagaagtccttgagggattttaggtactgacaatgatgttgaccaagaatagaacagagccatcaattttgtttcaactactttttggttagtgcctgacactctaatggctttgtgatactgatatgacttaggttcctttcctggttttctggtttgttactgatacatttaactgcatcaatcaatgagtaagtccagcactgattttccccaaatatatcactttatatgagtccttacagcttgctatgcccttcccttatttttggtaaatactttaatagcagaattaagaaatttagtactcaacatacatggtccagaatggcaataaggaggagtgatctatataaaggaaggaaatatgagaaaagtgggaatattgggtaagactcacatcaattattttcagaggtgcaggataaaggcctttagtctgctttcgcactttttcttccacttttttgtaaacctgttgcctgacaaatggaatagtcatggcatacgctgtcaattctgtaaaataaaatgcttttagatatttactataaagagcctagattcccttgttagtttatgctctaaactctataaaaatgaagtaattctagctatctgcaagaactgctctttattctgatacacacaatataaatttcaacctaagcactaccttaaacatgctaagtgatgaatgttaaagctgggccttgggtacatgagtgtttataacactgttatctagtctttttgtgttcatgcttaacattttctaaaatgaaaagttttctatgactcaagggtcatcataagaaaaaaaaaggttttaaaaattggctttaactggatagtgtaaagttgaggagttgtttcatctcctacctaaggctgactttatgctttgagtaaataatgcatttaccacttcctcattttgaatctacagcaaataaaattaaattctcagg

SEQ ID NO: 13307 - DNA, 1530 bp, Homo sapiens
  CDS (1196)..(1528)
gtcactgactaatccataatactaattcagcttctttgtccgagtgggagccagaattttaaaattgttacaggctaaaatggtagagtccacctgagctggatgtgaaggggacagggagaaggagcaagaagggaagtcatccttccccacagggctccatgtgcctctgggtgcaactttgaactttgaacctgaaacttgcactgctcccctccactcccttctccactttccccctcctgctcaggccctgtgtatgtggactgcagctgggggtaagggacagaggctggtactggggcaccagaggtcaagggggaagtggggtgttgagcaagagagagctgttcttgtttggtactgagcaaagcctacatccacaagcagttttctgtctttccagattcttgaactcttctgtgggcaaggagttcatgaactctttagaactggaagcaaccttagagcttttctagctccatgtttgtaaacttttgtaagctatggaacacttacttcaaattgatgcaggatttttgctccttagttcagctaaatccaggttcttgtctcacaaccaggaaaaattagacatgcggacacattgaagggtgaggcaggcagaatttattaagcgaaaggaaaactctcggcaaagagagggtttctccaagcaggtttccctctcacagttgaataccaggtctaccgtggatgagctgaagaggccaggcccctcccctgcataaggtgcaaattcctggtggatccccccattcccccaatgcacatgtgggcatgcccaggcaagccataggtagcatcggaaaaggcaacattcgattggttaaaaggcattattcagaaataatcatagtatccccaggtctaatgcaacccttgtcccccattctacaaattaggagactgaggccaacacagtgaagtgactggcccagtatcacacagcatgtcacacaggaaaccagaagaagggttaggcttacaggtggcatgatggaattagcagtagaatgctgtcatgtttcaccaaaagcaaagctttagcctcacttaatggagaagggaattgtagacagggaagtcaagagtcacacattaattgaagcaggccgaaaaatgagagggaggtggctgctgtgttcatgccagagagaacacctttgaatgaatgacaggaaggtgccctttccagggactgaggcagtcatgcccagggcatatagcttggctgagggcacccaggatcccagcacccatcctgtgcctcgtcccctcacctgcaggcctttatactcctagccatagacagtggcctgcacagcactaccaagaactaccgggagacaagaaagggacactctctagagaaggcttcaaggaaagcttatggccaggcctggtggcttgtgcctgtaatcctaacactttgggaagccaaggcaggatgatggctggagcccaggagttcaagaccagcctgggtaacataagaccctgtctctt

SEQ ID NO: 13308 - protein, 111 aa, Homo sapiens
MTGRCPFQGLRQSCPGHIAWLRAPRIPAPILCLVPSPAGLYTPSHRQWPAQHYQELPGDKKGTLSREGFKESLWPGLVACACNPNTLGSQGRMMAGAQEFKTSLGNIRPCL

SEQ ID NO: 13309 - DNA, 2075 bp, Homo sapiens
ttgaaaacagtttttgaatagaacctgttgagtccaccaatataataaaatcagctgtttgtttttgaaataaatacatatttatttcaatataataaaatcagctgtttgtttttgaaataaatacatatttcaaaaagtataaaattttagttgtttcagcgcttctttttactcttgtgtcccagtttgcatgataaattatatagtattcacactttaaagacatttctcataagttatatgagatttttctgcttacatcctgttgaccagaatttaattatatagccatacctagctgtaagggaagctagaaaatgtaattcttattgtaggtcatcatggatccagccaaaaatctggaagatacagataaaagatactaggagacaagtaacattctgccctaccttctcatcatgtgtttgcatttttggctagcacatatactcatgaggtagacctgcggaatttaagggagaaagtagtatggtacctttaatatctaatttatattcatatttttttaaaagctaaagtaaaaaatgaattgatcctattaagcagatattagagaatcttggtcaggcatggtggctcatgcctatcatcccagtactttgggagatggaggtgggaggatagcttgagcccaggagttggagaccagcctgggcaacatagcaagaccctgtctctacagaaaaaaaaaaacaaaaaacaaaaaacaggcatggtggtgcatgctgttagtcctagctactcagcaggctgaggtggtaggatttcttgggcttaggagttggagactgcattgagctatgaatgcaccactgtttctctagcctgggcaatagagcccctgtctcaaaaaaaaaaaaaaaagaaagagaatctgatgtctctctccaattctattttatttcatctcaaatgtctctctcctttatgcatatagtatactttgacgggtcccactaaattctctccttcactggaattcacatgttaacagaaggtgagtggttctttgcccctgggactcacaaactgtatcatccatctctccttttcaccatatttgcagtggtctgtgataaaacttagcccttgtttagagaagaaagaggcctcagaaagtgcagatctgacatagtgtctggacaccttgagctgcacatgaccagctctagcttcacaggctggccgttcatggattagacctacaaagctgaggggaggagatattctggaccttgatagtacctaggtccacattttggtaatttgcctcggtatagttgccaccttagaaaaccaagactcgttgcctttggacaaatttctatttgttttctgtaatcatttgttttaactttgaactattctgatgaaatcttacataaggttcaaacggtggtattgtatacaaacataatcatgttaaatgatacaaacaaataatcacttgtttaaactgcttccctttatgggactaatatttaacatgtccctttttcttaactagcttgtgtcagtcacacatgctttttttcaatgtggttcaagtacagtgaaaatggaagctttactcccatcaaaatcaaatcagattcacagcctgtgaaatccactcttggtgttttgcattcagaagcatcactataaatgttccagagtctaagacctccaccatctgctccattaggcactggatttcagtagcactacttgatttagaaaaagaaaaagaaaaacttagcatatccaagcaactattcagcctgaagcttcttgaaataagaatgatctggcatttccttccccttcagtgagcctcataactccatggtctctgcacaggtttacacctttaaatttgcattttatcaacctttctctggtgaggaattttttcctttttaggctatgatatgtttttttctgaatttgatagttgtatgttgaattgaaggctttattctgtgcagccctcctgttaatctcaaacgtgaatcttttgcaccttgttcttcaaagggtcattgaaggctctaccaggtcaatttcag

SEQ ID NO: 13310 - DNA, 2332 bp, Homo sapiens
  CDS (197)..(2332)
ctgagagacactgcgagcggcgagcgcggtggggccgcatctgcatcagccgccgcagccgctgcggggccgcgaacaaagaggaggagccgaggcgcgagagcaaagtctgaaatggatgttacatgagtcattttaagggatgcacacaactatgaacatttctgaagattttttctcagtaaagtagataaagatggatgaatcagccttgttggatcttttggagtgtccggtgtgtctagagcgccttgatgcttctgcgaaggtcttgccttgccagcatacgttttgcaagcgatgtttgctggggatcgtaggttctcgaaatgaactcagatgtcccgagtgcaggactcttgttggctcgggtgtcgaggagcttcccagtaacatcttgctggtcagacttctggatggcatcaaacagaggccttggaaacctggtcctggtgggggaagtgggaccaactgcacaaatgcattaaggtctcagagcagcactgtggctaattgtagctcaaaagatctgcagagctcccagggcggacagcagcctcgggtgcaatcctggagccccccagtgaggggtatacctcagttaccatgtgccaaagcgttatacaactatgaaggaaaagagcctggagaccttaaattcagcaaaggcgacatcatcattttgcgaagacaagtggatgaaaattggtaccatggggaagtcaatggaatccatggctttttccccaccaactttgtgcagattattaaaccgttacctcagcccccacctcagtgcaaagcactttatgactttgaagtgaaagacaaggaagcagacaaagattgccttccatttgcaaaggatgatgttctgactgtgatccgaagagtggatgaaaactgggctgaaggaatgctggcagacaaaataggaatatttccaatttcatatgttgagtttaactcggctgctaagcagctgatagaatgggataagcctcctgtgccaggagttgatgctggagaatgttcctcggcagcagcccagagcagcactgccccaaagcactccgacaccaagaagaacaccaaaaagcggcactccttcacttccctcactatggccaacaagtcctcccaggcatcccagaaccgccactccatggagatcagcccccctgtcctcatcagctccagcaaccccactgctgctgcacggatcagcgagctgtctgggctctcctgcagtgccccttctcaggttcatataagtaccaccgggttaattgtgaccccgcccccaagcagcccagtgacaactggcccctcgtttactttcccatcagatgttccctaccaagctgcccttggaactttgaatcctcctcttccaccaccccctctcctggctgccactgtccttgcctccacaccaccaggcgccaccgccgccgctgctgctgctggaatgggaccgaggcccatggcaggatccactgaccagattgcacatttacggccgcagactcgccccagtgtgtatgttgctatatatccatacactcctcggaaagaggatgaactagagctgagaaaaggggagatgtttttagtgtttgagcgctgccaggatggctggttcaaagggacatccatgcataccagcaagataggggttttccctggcaattatgtggcaccagtcacaagggcggtgacaaatgcttcccaagctaaagtccctatgtctacagctggccagacaagtcggggagtgaccatggtcagtccttccacggcaggagggcctgcccagaagctccagggaaatggcgtggctgggagtcccagtgttgtccccgcagctgtggtatcagcagctcacatccagacaagtcctcaggctaaggtcttgttgcacatgacggggcaaatgacagtcaaccaggcccgcaatgctgtgaggacagttgcagcgcacaaccaggaacgccccacggcagcagtgacacccatccaggtacagaatgccgccggcctcagccctgcatctgtgggcctgtcccatcactcgctggcctccccacaacctgcgcctctgatgccaggctcagccacgcacactgctgccatcagtatcagtcgagccagtgcccctctggcctgtgcagcagctgctccactgacttccccaagcatcaccagtgcttctctggaggctgagcccagtggccggatagtgaccgttctccctggactccccacatctcctgacagtgcttcatcagcttgtgggaacagttcagcaaccaaaccagacaaggatagc

SEQ ID NO: 13311 - protein, 712 aa, Homo sapiens
MDESALLDLLECPVCLERLDASAKVLPCQHTFCKRCLLGIVGSRNELRCPECRTLVGSGVEELPSNILLVRLLDGIKQRPWKPGPGGGSGTNCTNALRSQSSTVANCSSKDLQSSQGGQQPRVQSWSPPVRGIPQLPCAKALYNYEGKEPGDLKFSKGDIIILRRQVDENWYHGEVNGIHGFFPTNFVQIIKPLPQPPPQCKALYDFEVKDKEADKDCLPFAKDDVLTVIRRVDENWAEGMLADKIGIFPISYVEFNSAAKQLIEWDKPPVPGVDAGECSSAAAQSSTAPKHSDTKKNTKKRHSFTSLTMANKSSQASQNRHSMEISPPVLISSSNPTAAARISELSGLSCSAPSQVHISTTGLIVTPPPSSPVTTGPSFTFPSDVPYQAALGTLNPPLPPPPLLAATVLASTPPGATAAAAAAGMGPRPMAGSTDQIAHLRPQTRPSVYVAIYPYTPRKEDELELRKGEMFLVFERCQDGWFKGTSMHTSKIGVFPGNYVAPVTRAVTNASQAKVPMSTAGQTSRGVTMVSPSTAGGPAQKLQGNGVAGSPSVVPAAVVSAAHIQTSPQAKVLLHMTGQMTVNQARNAVRTVAAHNQERPTAAVTPIQVQNAAGLSPASVGLSHHSLASPQPAPLMPGSATHTAAISISRASAPLACAAAAPLTSPSITSASLEAEPSGRIVTVLPGLPTSPDSASSACGNSSATKPDKDS

SEQ ID NO: 13312 - DNA, 1555 bp, Homo sapiens
  CDS (221)..(1555)
aatatcagaagagagcaatcaaggtagcttattaactgtgccaggagatactagtccttctcccaaacctgaggtattctcaaatgtgcctgaaagagacctttcaaatgtatctaacatacattccagttttgcaacttctccaactggagcttcaaacagcaagtatgtttcagctgatagaaatctcatcaagaatactgccccagtgaacactgtaatggacagtccagtgcatttagagccatctagtcaggttggtgtgatccagaataaatcatgggagatgcctgttgatagactagagacattaagcaccagagactttatctgcccaaattctaacatacctgatcaagaatcctctcttcagagtttttgtaattctgaaaataaggtattgaaagaaaatgctgattttttatccctgcgccagactgaactgccaggaaactcttgtgctcaggatccggcatcctttatgcctccacagcagccttgctctttccccagccaatcactttcagatgctgaatcgatttctaaacatatgtctttgtcatatgttgctaatcaagagccaggtattttacaacaaaaaaatgcagttcagattattagttctgctttagatactgataatgaatctacaaaagatacagaaaatacttttgtcctaggagatgttcaaaaaacagatgcctttgtcccagtgtactctgacagcactattcaagaagcatcaccaaactttgagatagcttatactttacctgtgttaccatcagaaaaggactttaatggaagtgatgcctctacccagctaaatacacattatgcatttagcaaactaacttacaagtcttccagtggccatgaagttgagaatagcacaactgatactcaggtcatttcacatgaaaaagaaaacaaactggagagtttggttttaactcatttgagtaggtgtgattctgatttatgtgaaatgaatgcagggatgccaaaaggaaacctaaatgaacaagatccaaaacattgtcctgaaagtgaaaagtgtttgctttccatagaagatgaggaatctcaacaaagcattttatcaagtctggaaaaccattcacagcagtcaactcaaccagaaacgcataaatatggtcagttagttaaagtagaattagaagaaaatgccgaagatgataaaactgaaaaccaaatccctcaaagaatgactagaaacaaagcaaatacaatggcaaatcaaagcaaacagattcttgctagctgtacactattatcagaaaaagacagtgaatcctcatctcctagaggaagaataagattaactgaagatgacgatcctcaaattcaccatccacggaaaaggaaagtgtcacgtgtacctcagcctgtgcaagtgagtccctctttactacaagcaaaagagaaaactcagcaatctctggcagccattgtagattctctaaaactagatgagattcagccatacagttcagagagagcaaatccatattttgaatacttgcacataagg

SEQ ID NO: 13313 - protein, 445 aa, Homo sapiens
MDSPVHLEPSSQVGVIQNKSWEMPVDRLETLSTRDFICPNSNIPDQESSLQSFCNSENKVLKENADFLSLRQTELPGNSCAQDPASFMPPQQPCSFPSQSLSDAESISKHMSLSYVANQEPGILQQKNAVQIISSALDTDNESTKDTENTFVLGDVQKTDAFVPVYSDSTIQEASPNFEIAYTLPVLPSEKDFNGSDASTQLNTHYAFSKLTYKSSSGHEVENSTTDTQVISHEKENKLESLVLTHLSRCDSDLCEMNAGMPKGNLNEQDPKHCPESEKCLLSIEDEESQQSILSSLENHSQQSTQPETHKYGQLVKVELEENAEDDKTENQIPQRMTRNKANTMANQSKQILASCTLLSEKDSESSSPRGRIRLTEDDDPQIHHPRKRKVSRVPQPVQVSPSLLQAKEKTQQSLAAIVDSLKLDEIQPYSSERANPYFEYLHIR

SEQ ID NO: 13314 - DNA, 1909 bp, Homo sapiens
  CDS (30)..(431)
cccaacatctgtgctgatcctgctaggtaatgacgccccttccttatcgttctagagtcaagcctagatcccctacaaatacccatgcacacttagagctcactctggttaaatgttccaagaaggatgttggatggtcacttggtatcatcccatggagttcaggatacccccgccctctgagcagccattcctctcctgagcacattcccctagagaagctctgcacgtgtgcacaggcaccagctgcaggagtgccatccacagcacagctgtttatgaaaaaccgtaatcaacccaaacatctgtatgaagaaaaacgaagaaatgcagagtggcatgttcacatgatggaatactatgcagctgagaacatgaacaattggagccatggcatgaatgaagctgagagatttgaagcgtcaaccaagtaagctgtaggagattacatgtggtggaagactagtttataaatctcacagacaagccttaaagaaaatgtatctcttgaaataaatgtatacacacaattatacacatatatatgataaacccttttaaaaggcaagggaatgatcaataaaaacataaactgttccctctgggccaaggcggagggcaggccatcagatcagcaggaagttgatctggttttgaattgggttgtgtgtgcactggagtcaaacattattttacagaatatatttcatatatattttacacatatttgcttttttgtttcagatatttcacaagtttttaaaaatgtaagcaggtcatgaggccgctgtccaggacagcagcatgcccgtttctggtgatacttggtgcagagggtaactccagcagctgtgcgtgctgacccctccagccagctctgggcaaggggttgtttcctcccagctcagtggctgagcagagctccagctggcgaaggacccaggctctgccaacattgtggacatcccctccacaggccctggggtgccctgtgcagaggcagagggtgaccgggagcagtgggcagagcccggaccctcctatcccgggaggagcctcaggtcctctttggcaaagagcaggatccggtagcttgagaagctgtgcagctgccgctgggtgcaccctgtcactcagcaaggcagctgctccggaacaggcactgcttctagaatccacttccttctcgcaggaccagatgtgtcagcaggtgacaagaacaagtccaacgccacctcacaagggctttggctttgggatcccctacctgcagggcctgggttttggagaataaggcttggccccaagagtattcagatctgcagcagagcaagatgggatgcaacatatctagatagataacctcaccccaatcacaggcttcgtgcatggacccggtgcaaagggcaaaggttatgaagtatcacttacccaatgccccaaagagcccttcaggcctgggaggaaattctcaggagagcctgtggaagaagaggttcagtggagggacgctgctgcctgggaaggagcctccagcccttccaaaggccacactttcagcaaacttcacattaaaagacccgccagtgcctgatggttactgagactggtgtttgctagaccctttctcaaaaatgagtcaaggcagggcacagtggctcatacctgtaatcccagcagtttgggaggccaaggcaggcagatcacctgaggtcagagctcgagaccagcctggccaacatggtgaaaccctgtctctactaaaaatacaaaaattagccgggcgtggtggtgtatgcctgtaatcccagctactcgggaggctgaggcaggagaatcacttgaacctgggaggcggaggttgtggtgagccgagattgcaccactgcactccagcgagactctgtct

SEQ ID NO: 13315 - protein, 134 aa, Homo sapiens
MTPLPYRSRVKPRSPTNTHAHLELTLVKCSKKDVGWSLGIIPWSSGYPRPLSSHSSPEHIPLEKLCTCAQAPAAGVPSTAQLFMKNRNQPKHLYEEKRRNAEWHVHMMEYYAAENMNNWSHGMNEAERFEASTK

SEQ ID NO: 13316 - DNA, 1723 bp, Homo sapiens
  CDS (96)..(935)
ctcgaccctggacgtctaccttccggaggcccacatcttgcccactccgcgcgcggggctagcgcgggtttcagcgacgggagccctcaagggacatggcaactacagcggcgccggcgggcggcgcccgaaatggagctggcccggaatggggagggttcgaagaaaacatccagggcggaggctcagctgtgattgacatggagaacatggatgatacctcaggctctagcttcgaggatatgggtgagctgcatcagcgcctgcgcgaggaagaagtagacgctgatgcagctgatgcagctgctgctgaagaggaggatggagagttcctgggcatgaagggctttaagggacagctgagccggcaggtggcagatcagatgtggcaggctgggaaaagacaagcctccagggccttcagcttgtacgccaacatcgacatcctcagaccctactttgatgtggagcctgctcaggtgcgaagcaggctcctggagtccatgatccctatcaagatggtcaacttcccccagaaaattgcaggtgaactctatggacctctcatgctggtcttcactctggttgctatcctactccatgggatgaagacgtctgacactattatccgggagggcaccctgatgggcacagccattggcacctgcttcggctactggctgggagtctcatccttcatttacttccttgcctacctgtgcaacgcccagatcaccatgctgcagatgttggcactgctgggctatggcctctttgggcgttgcattgtcctgttcatcacctataatatccacctccacgccctcttctacctcttctggctgttggtgggtggactgtccacactgcgcatggtagcagtgttggtgtctcggaccgtgggccccacatcttgcccactccgcgcgcggggctagcgcgggtttcagcgacgggagccctcaagggacatggcaactacagcggcgccggcgggcggcgcccgaaatggagctggcccggaatggggagggttcgaagaaaacatccagggcggaggctcagctgtgattgacatggagaacatggatgatacctcaggctctagcttcgaggatatgggtgagctgcatcagcgcctgcgcgaggaagaagtagacgctgatgcagctgatgcagctgctgctgaagaggaggatggagagcaccctggctgccctacacatgctcttcctgctctatctgcattttgcctaccacaaagtggtagaggggatcctggacacactggagggccccaacatcccgcccatccagagggtccccagagacatccctgccatgctccctgctgctcggcttcccaccaccgtcctcaacgccacagccaaagctgttgcggtgaccctgcagtcctctttcccgcagctgcagagaggaggaagactattaaaggacagtcctgatgacatgtttcgtagatggggtttgcagctgccactgagctgtagctgcgtaagtacctccttgatgcctgtcggcacttctgaaaggcacaaggccaagaactcctggccaggactgcaaggctctgcagccaatgcagaaaatgggtcagctcctttgagaacccctccccacctaccccttccttcctctttatctctcccacattgtcttgctaaatatagacttggtaattaaaatgttgattgaagtctgg

SEQ ID NO: 13317 - protein, 280 aa, Homo sapiens [sequence omitted]

SEQ ID NO: 13318 - DNA, 2131 bp, Homo sapiens
gtgataggatgttaaccaccatgataaaaacttacaaaagaataaaaatcactaggaaatcagatgagaacgagaaagaaataaaatcttatcattacaaaaaccaccaaactgcaaagatagacactaagagaggaagaaaggaaaaaaggatatacaaaatgacaacaaaataaaaatcatatcaagtatcttctcagaccacagtgaaactagaaattaataccaagaataactttggaaactatacaaactcctggacacatataacttaccaagactgaaccaagaagaaatacaaaacatgaacggaccattaatgagtaacgagattgaatgagtaataaaaagtcccccaacaaagaaaagaccaggactgcatggcttcacagctgaattctaccaatctttaaaaagaaaaaatactaactcttctcaaactattccagaaacttgaaggcggggggtgtgggagtggaatttgtccaaactcattctatgaggccagaattaccctgacaccaaaaccagacaaggacacaactaaaagagaaaactataggccaatatccctggtgaaaatagatgtaaaaattctcaacaaaatactaacaaaccaaatccaacagcatatcaaaaagattatacaccatgatcaagtgggatttatttcaggaatgcaaggatggttcaatacatgaaaatcaataaatgtggtacatcacaacagcagaatggacaaaaaccatatgatcatcttaggagatgcagaaaaagcatttaatcaaatcaacatcccttcatgataaaaattcttaacaaattaggtatataaggaatgtacctcaatacaaaaaaaaggccatatatgacaaacccacagccaaaatcatactgattgggggaaaagtagaaagctttttctttaagaactggaacaagacaaggatgtctacttttaacactcttattcaacatagtactgaaggttctagccagaacagttagacaaaagaaataaaagccatccaaattggaaatgaggaagtcgagttgtccctgtttccagatgacataattttatatatagaaaaaccttaagactccacccaaaacttttagtactgataaatatattcagtaaagttgcagaatacaaaatcaacaaacacaaatccatagcatttctatgcaacaataacaaactacctaaaaaagaaattaagaaagcattcccattcacaatagctacaaacctccacccccaggaataaatttaaccaaggaggtaaaggatctctacaatgaaaactacaaaacactgatgtaagaaattgaacatgacacaaaagaaagaaaagacatcctatgttcatgaattggaagaattaatattgtccaaataaccatattatccacacaatctgtagattcaatgcaattcctatcaaaatataaattacattcttcactgaaatagaaaaaagattcctaaaattcctatgaaaccacaaagactctgaatagctaaagcaatcctgaccaaaaagagcaaagttggaggaatcacactacctgggttcaaaacatactacaaagctatagtaaccaaaacagcatggtactggtatgaaaacagacacacagggcagttgaacaaaatgcagaacccataaacaaatccacattagccctaactgacttttgacaaaagtgccaagaacacacttggggaaagtacaccctcttcaataaatggtgctgggaaaactggatattcatatgcagaaaataaaactaggcctctatctttcaccatataaaaatcaactcaaaatggattaaagacttaaatgtaagatccaaactataatactaccagaagaaaatataggggaaatgagtcaggacattggtttgggcaaagattttatgaacaaaacttcagaagcactggtaatgaaagcaaaaatggacaaatgggcatatatcaatctaaaattgctctgcacagcacaggaaacaaatgacaaggtaacaaccaacagaatgggagaaaatattcacaaattatccatctgaccaggagtgaataatcagaatatataaggaattcaaacaattgaatagc

SEQ ID NO: 13319 - DNA, 1583 bp, Homo sapiens
  CDS (741)..(1145)
ggacattttatccttaaaaaaaagaaaaaaaaagaaaatatttaatttttaaataccaatttttagagtaagaaattggtttgatagttatctctaatagtgtcaaatgagtattttttttcctttttctcttttttgaatatcatggactttggatgttttaaaatccaatattttaccctcagttacagtcactattcattttttattgagatataattcagataccataaaattcaccttttaaaacatacaattcaacatctaaaaatgtattcacaaagttgtggaaccaccactactatctacttccagaatattcatcccctgcccccctgaaagaagccctgccctcttcagcaatcacaccccattactccttcccttcagccgcaggcaaccgctcacctgctagttctgtcttgcagatgtgcctgttctggacatttcgtataaatggaatcagacaatatgtggcctttcatgtctggcatctttcagcacagtgtttcgaggttcatgcatgtttgtagcacttcatttctaatattccattgtatggatataccacattttgtacatcagttgatggatacgtgtacgttttatatgaacagttcccatggcttttccactcaagttaggatttcttggtttaagccaggtagggtaaaaggtggagctgagtttggtgactgtgcttattgtcaaatgctgcttcttccatatgttgcagtctaatgctggcgtgctatgcgggacacctagatgttgtgaaatatctccgaagacatggcgcttcttggcaggctagagacctgggaggctgtacagctctgcactgggctgcagatggagaccactgcagtgtgattgagtggatgataaaggatggctgtgaggtagacgtcgtggacactggttcaggatggaccccactcatgagagtctctgcggtgtcgggaaatcagagggtggcctctcttctaattgatgctggggccaatgtgaatgtgaaggacagaaatggaaagacgccccttatggtggctgtgttaaataatcatgaagagttagttcagttacttcttgacaaaggggcagatgcaagtgtaaaaaatgaggtaaatgagtccatctttatgtaaagattttcctcggagggggagaaaacatttataagcatgtaaaatttttgttgtttcctgtttcagttcggcaaaggtgtcctagaaatggccagagtttttgacagacaggttgggatgctctttctgcctatcaaggctaatttttagtccttctagactcagaaaaaccaccaaaaccctggattacattcgcctgtctgttttgtttatctagagtgtagtctccttattagaagaaaggaaaaaaaagcagaggccaaagaagtcttgtgtctgctgatgagagcaccactcatctgcgaaacgcacgtaaaacaaagtgaaccgtgactgttaagctagggatgggaaattctgcatcttggggggctgtacatttatttatttagttgaagattcactgatcccactttgaaatacatctttttacct

SEQ ID NO: 13320 - protein, 135 aa, Homo sapiens
MLACYAGHLDVVKYLRRHGASWQARDLGGCTALHWAADGDHCSVIEWMIKDGCEVDVVDTGSGWTPLMRVSAVSGNQRVASLLIDAGANVNVKDRNGKTPLMVAVLNNHEELVQLLLDKGADASVKNEVNESIFM

SEQ ID NO: 13321 - DNA, 1530 bp, Homo sapiens
ttaaataattagaatttcagatcggtcaaaatactttggcatctgaaagcaggagcttagaaccagaattccttctcagacataatcccagcatccccagcccagtgcttttgctctttcgcaccaggccagataactctgtgatcatggacgtatgcaggaatttgtaaatatttggtggatgatagtcagattgccaaatggcagaaaggtttctggttttgcagtttgaaaaggattatagagcggggaacaaggtaaatatctgaaggtctgcatgatagtacttcttttcctattgctttggagttattttttatacctctttacacaatgtgtgagactaccaaatttacattgcactgttccaggtgacttgtgcagttgacaaactatgacccagcatagcaacctaggcaagaggagcctatataattcattcttattcctattttgctatttcaacttgtttctgttttataactgcaaatggcctcccaggggtagcaactgttggcaacttaaagttaagccagtagttctcctcactccatatctatgctgcttgtctttgcatataagtgagtggatgctgggggcatggaaaaacaaaactatttaagtgtgggagaggcctgtgacttttgtagtcctttggggaatttttcacatgaccagggccaaatagttctgactgctcttgtgccatcctgggaatagagcagtgggatgtaaggagtgaaaggggccatggatcagtggttctcaaagtgtggtcctcagacctgcagcatcagcatcaccagggagcatgttagaaatgcagatcctcaggccctggccccaacctactgaattaaaaccttttcaggcgggcccacgagtctgttataacgaggtcttcggatgatgactgtgcatagtgaaatgtgagaagtaccgcttgattcatcatccagccagatctgtccagcccatttttgtgattgtggaaattgagggcaagagtgggcaggtcactttcccaccatgaaacagctagctcagggtaggtgctggccttctgattcccagtccagacctctgctagtcacagtgcccagccaggtatgctgtggggatgtcagtggcctcagaaagagtgacgacttgggactgatgtccccacatgctggggtcacaggacaaaggaaagggtttgtgactttgagctctcttcttaccctgggcaacctctctctctgtttaaaagcctggtgaccctgctgtgaacttcctcttttaaatgaacagctccctagagcatccttggctgagcttagcaacaaggggggagggagtgaggaggggtgggaggaaaatgggctcccccgttatcatgtcagtgcaatcactgggaattatggttgaggattaagagtcacttggggataattcagccaggctggagagggaaacacacacaaatacacacacactcacaacataaacagattgctaaagctcatggcagaaaacaaacagcatagg

SEQ ID NO: 13322 - DNA, 1657 bp, Homo sapiens
  CDS (27)..(545)
aatagtggtgatgtcatgcaggcaagatggcggaaggggaggacgtgggatggtggcggagctggctgcagcagagctaccaagcagtcaaagagaagtcctctgaagccttggagtttatgaagcgggacctgacggagtttacccaggtggtgcagcatgacacggcctgtaccatcgcagccacggccagcgtggtcaaggagaagctggctacggaaggctcctcaggagcaacagagaagatgaagaaagggttatctgacttcctaggggtgatctcagacacctttgccccttcgccagacaaaaccatcgactgcgatgtcatcaccctgatgggcacaccgtctggcacagctgagccctatgatggcaccaaggctcgcctctatagcctgcagtcggacccagcaacctactgtaatgaaccagatgggcccccggaattgcttgacgcctgccaaccagagctctgggcacagattctggtggctccctgctggccctcttgggcctctgctcacacctgggaaggggctctctaaatcccggccagaaactctgacttgtgccaacaataggatgacccaagggagaggaaacctatcctcctcaccagaagagcctgtgtttttctgctgaacacccactgttcctgaggactcctgctgggaagtcccaagggatagttctagcccttctgcctgtgtagacagaagctaaaccaccagtctctctcggaggaagctgagacaacatactctgtccatacataagcaggcagggagggccatgccacctacccttggctaaacagggacagtgaacacattttggttcctatcccagtgggtaagaggcacttatctctgggaaatttgcctctcttgggactctccccctcccaggcattttccattcctggaaaggctcctttggggttcagaatccagagaccaaaccctgacccacctccttcctttcctccagcccacgctggtctgtccccatgccttcccagggcttcttcatgtcagatgcacccaagtccttagcccagctgtgccacctgcaggagttcgctcttgcgtttcttcccctccccaagaagggagggggctacttcaggcccttctgtgtgttgcctggcaggataccttgtccaaccagctacccacctcaactcccctgtagtttaggacacaaaacagctaccagcggtacagagcggtgatcaaagccgagtacttacaactctggtaagcctagcttctccgcctcagcccttctgcttctggaagggctatcctgggggtgaacttgaaactctcatcaggcttccacttcaaaccttcagtgagggggtgggatggagagaatgctgaatcttttttttgacgggatggggtttttctctttgtaattatttctttagtttaattaaccttttggttgtttgtgcaatattatatattttaaattataatgcatctccccagagtattttgtagctgggaaaagaaaaaaggaaaaaaagaaaaaaagattctaacagctgttagttttataattaaaaaagaaagaaaaaagaactttgtcctgaaccttttacagacttgccgttaacagcattaaagtgattcacccgaagctg

SEQ ID NO: 13323 - protein, 173 aa, Homo sapiens [sequence omitted]

SEQ ID NO: 13324 - DNA, 1611 bp, Homo sapiens
agaaacctgaattcagactgattaaagaaggtgaaacaataactgaagtgatccatggaggtgcgttccttatgttacctggggccgactaccttcgctgtgattattttgaaatagtgttggtttagaaatattgaacatctgatattttctcttagttcttattttataaaaattgtgggaattatttcctcagctatgagttcttattagctggtcagaaataaaacatagttagcttttaatggatctagttggaattaatttatctattaagtcactgggcccaacaaaatgtcatgatttttgcatatacaagtgaggattgtggaataaaattgtaacattaatgtcagtataaaaggaaatattagaaacagtaggaaaaaatgaccattgtataagtctctgtctaataagccactccactactaggatttatgatagggctcccattccaatgatatagaactccctggattctcactaagtatttattccacatccagaaaacaagtatggcatggagagttaggatgtcaaatggccctctctctcaaccaagattcaggacatagctattaccttttagatccctattgatatgatttttgggggatatgttctaaaaatgtttatgattgaatcttaaatggtaatatttgtagaaatatagttaatcattacaatgtctagcttatggatgtatagtcacaatatgagggtaaatcaaatgcatttgtattcccctgcttttagagccaattattaaaaaatacaccaaaatcattgatggagtgcctgtggaaataactgaaaaagagacacgagaagaacgaatcattacaggtcctgaaataaaatacactaggatttctactggaggtggagaaacagaagaaactctgaagaaattgttacaagaagaggtcaccaaggtcaccaaattcattgaaggtggtgatggtcatttatttgaagatgaagaaattaaaagactgcttcagggaggttagtaaaaggacaacaactaacccccttaacaggttctagtgactgagttcaactttttaaagaccgagcaagcagattttttcttttaattgggttaaaaaaaaaaagacaacatccactgttgtcttaatagatggattggttcaatggtagttaatagttatgaagaaatgattactagtttaaacagtctttaaaaagttctatggtataaagtttggggagcaatgaatattttttttgctttgattcagataattttaagggccttttaagtatgcaaaagggaaataattgttaaattgctagctgttaaacaagcccaaatttgatatactttttatattttaaaaattatattcactgcccccataagagcaatcaaggcatgtctttaaattctatacatagatatagccaaaaatagtgcatttagtaacattcttttccaaaactatattcttgggaatgaatatctgtttcttctaacagtttgagtgataatctatacctgtagatataagttattttgcatataaaattaatcttaatcttttatggaatgttctctgtctgtggcattaaatgaaccttaag

SEQ ID NO: 13325 - DNA, 1833 bp, Homo sapiens
  CDS (315)..(1172)
aaaaaactagcaccggccccgcatgcactcagcctgccaagaccacagccttgtaaggataagttacttaatttagtttcacttggtcataaagcatgagacagcctcatttactggcttctgcttttaatgctttatcaaggataaggaggaacttctaatcattttttttgaaacttttatatgtgttaagttttcagggcaatagacaaagacagataatctacagggtaacttcccaacaagatagttctgtcttgcaagtcatcagtgggcctgaaacatctgtacaagaagagatatctgtggatgctatgcatgtcttcattgatgaacatggggaaattagatcctgttatttaaaatctggaaatcagaaagaaggccctttacagcctctaccatcaaataatgactgtctctctcaggctcgagagatgcaggtcagctcctccagtaccacaacttctgagagtcaagatccgtcttctggggaccctgccgtcagtgcccttcagcaacagctgttactgatggtggctcgcaggacccagtcggaaaccccacggcatgtgagtcaggatctggaagcctcgtcatgttcttcaacacaaggaaaatttaaccgagagcagttttacaaatttatcattttccctggcaagtggattaaagtctggtatgatcgactgaccttgctggcattacttgatcgaactgaagacatcaaggagaatgtactggcgattttactcattgtcctggtttccctccttggatttctgaccttgagccaaggcttttgcaaagatatgtgggtgctcctcttctgcctcgtcatggccagctgccagtactccctgctaaagagtgttcagcctgaccccgcctcaccaatacacggacacaaccaaatcataacatatagcagaccaatctatttttgtgtgctgtgtggccttattttgcttcttgatacaggggccaaagccaggcaccctcccagttacgttgtgtatggcctgaagctcttctctccagtgtttctacaatcagctagggactacttaatagggaaaattatgaacagccacaaagacttttttacttctgaaaaaaaaaaggacaaaataatttcagcaatttcaagtgtcattttcctgaagtcctggtaacataacaagcatttggctgctttttccttcacgttcactgcaacctgacagatgagacacatggactccctcttcctcccattccacctccacgacatttattttaaagactagagctttcctcctccaggatgttttggagaggatctagtgcatggacctccttgttgactgctgttcttcctgtattgtttcattaagttccaattctacacccacagccagagcatctccagggatgactttctggtatttcttaccattttatcttcctcatgccatttttcattgtgttccaattctttccatttctttgggttttgttgcactggctaatgtatttcttatacagaatatctctttatccttgatttaccaaatagctcccaatatctggctttgcctttcatatcattccatacctagacttttccctgtggttcttcattctcagagtagtttttgtcacatacacatacagcatttggaaaggcaattaataaatctcattggaccttccctctgccctgatccggaattggcagatatagcatagcacaaaattgttattgctgggttttgaccccaaagtaaagagaagctcttctcagtttgtttgaaattttatggaattttgtggattaaaatttctatgctc

SEQ ID NO: 13326 - protein, 286 aa, Homo sapiens
MHVFIDEHGEIRSCYLKSGNQKEGPLQPLPSNNDCLSQAREMQVSSSSTTTSESQDPSSGDPAVSALQQQLLLMVARRTQSETPRHVSQDLEASSCSSTQGKFNREQFYKFIIFPGKWIKVWYDRLTLLALLDRTEDIKENVLAILLIVLVSLLGFLTLSQGFCKDMWVLLFCLVMASCQYSLLKSVQPDPASPIHGHNQIITYSRPIYFCVLCGLILLLDTGAKARHPPSYVVYGLKLFSPVFLQSARDYLIGKIMNSHKDFFTSEKKKDKIISAISSVIFLKSW

SEQ ID NO: 13327 - DNA, 1496 bp, Homo sapiens
aataatttatagcctttcccttaaatcaagatcgagtttaaaattatagtttgtcttttgtcttaacagttctgaatgctgtcctcaaagtatataatgtttcatgtaccaagacccttttcacagtacaataaacagatctattcataaatttttgttattttataaataaatgattacataattttagttatatggcaatggatttcttttagttgggttataaatttctattataaatttaaattactgagttgtgaatatatgcagctttattaagagaatttacaaattcaatgatataaaataaggtaggccttgattcacttggttgttttttacttatttaatattccaacattgctatctctaaaaatgcattatcatgttttgaagggatttgctcttgaatttagctccagggagaaagtatcaaaataacttttttttttttttttgagatggagtctggctctgtcacccaggctggagtgcagtggcgtgatcttggctcactgcaagctccacctcccgggtttacaccattctcctgcctcagcctcccaagtagctgggactacaggtgcccgccaccacgcctggctaattttttgtatttttagtagagacgggctttcaccatgttggccaggatggtctcgatctcctgacctcgtgatccgcccgcctcagcctcccggagtgttgggattacaggcatgagccaccgcacccggcccaaaataacttgagaaaacagatcgctctgcagtttaaagaagtattatgtacccgaactgaaatagatatactgttcttaattatcctgaatcataatgaagagtagataatccaaaatagattttttaatcattcacatttagtttggggtgttctatgtttgttaggaataaaactggttctaaccaattactgaagctggtactgggaggattcaactagagaggattcaaaaagctgcctttttctctgttgcctccgtgccttactcacatttagtttagggtgttctatgtttgttaggaataaaactggttctaaccaattactgaagctggtactgggaggattcaactagagaggattcaaaaagctgcctttttctctgttgcctctgtgccttactcactcgtctccttttcctcacttcacactaggactgggtaccatcacactgcagtataattccaaatgcatttccaagctaagtttcccagcgtctgattgtgctttccttttggcctttactttcattgggggtgattgaggtagtctgattttttagctaagtctaaacttaaggctattatttgtctaccagctagggttcaggctgcattccctgtgagtccttagataaggtctgtgaaagactgaaagcatctcctatttcattaagaatgaaatgatttgtttggagtataaggagattgataccttgtatgatgtcataaactgtgaagccacttgctttt

SEQ ID NO: 13328 - DNA, 1585 bp, Homo sapiens
  CDS (26)..(1147)
agaaattttttctgtgttggacctaatgaaagtggacatggccaactttgctatcagtagcatcaggcctcatctcatgcagcagtcagttgaatacgaaaggaagaagtttcaagagattttggagaggcaaccaaattccctggactttgtcacccagtggctggaagaagcctcagaggaccttatgactcagaagtataaacacgccctgccagtggggggaatggctgctggctctggggacatgcccaggctgagccctgttgctgtccagaattacgcttacctgaagcttctgaagtgggaccacctccagaggccgttccccgaaacagttttaatggaccagtctcgcttccacgagctccagttgcagctggaacaactgaccatcctgggggctgtgttgctggtcaccttcagcatggcagcgccaggaatttccagccaggccgactttgctgagaaactcaagatgattgtgaagattttgctaacagatatgcacctgccctccttccatctgaaggacgtcctcactaccatcggggagaaggtgtgcctggaggtgagcagctgcctctccctgtgtgggtcctctcccttcaccacggacaaggagaccgtgctcaagggccagatccaggccgtggccagtcccgatgaccccattcgcaggatcatggaatctcgaatcctgaccttcttagaaacctaccttgcctcgggtcatctgaagccattgcccacagtccctgggggactcagtccagttcagagagagctggaggaagttgctattaaatttgctcgcctggtcaactataacaagatggtcttctgtccctactacgatgcaatcctgagaaaaagatggatatcttttggcaatttctttgggtccagcaatactgatatgagtccttggaattgtaggactgattatcccatgagtctgcacattagatttccaaagaaccgtgtgatagaggcaccaatgacaatacaactttgtttccaagaaccttgtaacaaagcgttgtctcttttaaacataccacttgaggcaaaaggaatcctggacaggagttttctgcagaggcgtttaaaaccctaccgaatccgcttctgctgccgtgctctgtaaatgtcatgaacaggggggacaacggctcccttttcttcatcttcatctgaatcctcgttgggccttttgacggccttgtctctccagagctgttcaatgttgatcatcggattaacacaacctcgttgataaactcttcggacagctgttattctttgattttctgcataagatcctacagcttccctgagattggataagaaatgccatcaattatattataaccaaatctcattcaacccagcaatctcactactggatatctacccaaagaacaactctatggaaaatagtatggagatttctcaaagaactaaaaattatattttagctaaaccaactgtagatgtaaaaaaaaactatacaaatacttacacgccttttaggaaattgatgtaatccacccaaatctaagaaataaaatgaaatgttaat

SEQ ID NO: 13329 - protein, 374 aa, Homo sapiens [sequence omitted]

SEQ ID NO: 13330 - DNA, 1292 bp, Homo sapiens
  CDS (37)..(987)
gagtctgcgaacggagcagctgctgcagcagggcccatggcggacacccagtacatcctgcccaatgacatcggcgtgtctagcctggactgccgtgaggccttccgcctgctgtcacccacagagcgcctctatgcctaccacctgtcccgtgccgcctggtacggaggcctggctgtgctgcttcagacctcccctgaggccccctacatctatgctctgctcagccgcctcttccgcgcccaggaccccgaccagctgcgccaacatgccctggctgaaggccttaccgaggaggagtatcaggcgttcctggtctatgccgcgggtgtttactccaacatgggcaactacaagtcctttggtgacaccaagtttgttcccaacttgcccaaggaaaagctggaacgggtgatcctagggagtgaggctgctcagcagcacccagaagaagtcaggggcctctggcagacctgcggggagcttatgttctctctggagccaaggcttcgacacctcggactggggaaggagggaatcaccacctatttctctgggaattgtaccatggaagatgcccgggtccgcctcgaccgcagcaagatccggtctgtgggcaagcctgctctagagcgcttcctgcggagacttcaggtgctgaagtccacaggggatgtggccggagggcgggccctgtacgaggggtatgcaacagtcactgatgcgccccccgagtgcttcctcaccctcagggacacggtgctgctgcgtaaggaatctcggaagctcattgttcagcccaacactcgccttgaaggctcagacgtgcagcttctggaatacgaggcgtcagctgctggcctcatccgatccttctctgagcgtttcccagaggatggacccgagttggaggagatcctcacacagctggccacagccgatgcccgattctggaagggccccagtgaggccccatctggccaagcttgaggaagatgtgtggccttgcccccaattccatcagaccaaggctgcaagtggccctccattcgtcactttccagcctgccaattgcttcccctctgtgatctcatttcatctgcactgccatacgtggagtgagcaagacagggcttaccatcctgtctaccagatgaggaaatggcagttctgagaagtcactggtctagatcccgcaggtggcacgtgacagctagggttcaaaacgttctcaccaaatccaatgctcctcacatattaattttataaccagacaaataaatattagagac

SEQ ID NO: 13331 - protein, 317 aa, Homo sapiens
MADTQYILPNDIGVSSLDCREAFRLLSPTERLYAYHLSRAAWYGGLAVLLQTSPEAPYIYALLSRLFRAQDPDQLRQHALAEGLTEEEYQAFLVYAAGVYSNMGNYKSFGDTKFVPNLPKEKLERVILGSEAAQQHPEEVRGLWQTCGELMFSLEPRLRHLGLGKEGITTYFSGNCTMEDARVRLDRSKIRSVGKPALERFLRRLQVLKSTGDVAGGRALYEGYATVTDAPPECFLTLRDTVLLRKESRKLIVQPNTRLEGSDVQLLEYEASAAGLIRSFSERFPEDGPELEEILTQLATADARFWKGPSEAPSGQA

SEQ ID NO: 13332 - DNA, 1291 bp, Homo sapiens
atcttcaacaaactttacaaaaacaagcaatggggaaaggaatccctattttaacaaattgtgctgggagaactagctagccatatgcagaaaattgaaactggaccctttccttataccttatacaaaaattaactcaagatggagtaaagacttaaatgtaaaatccaaaactataaaatccctagaagaaaatctaggcaataccactcaggacacaggcatgggcaaagattgtatgatgaaatcgccaaaaggaattgcaacaaaagcaaaaattgacaaatgggatctaattaaactaaagaccttctgcatagcaaaataaactgtcatcagagtgaacagacagtctacagaatggaagaaaatttttgcaatctatccatctgacaaaggtctaacatccagaatctacaaggaacttaagcaaatttacaagaaaaaaagaaccccattaaaaagtgggcaaaggacataaacagacatttctcaaaagaagacatacacatggccaacaaacaagaaaaaaaggtcaacatcactaatcattagagaaatgcaaatcaaaaccataatgagataccatctcatgccagtcagaatggtgattattaaaaagtcgagaaacaacagatgctggcaaggtttcagagaaacacttttacactgttggtgggaatgtaaattagttcaaccattgtggaagacagggtggtgattcctcaaagatttagaactggaaatatcatttgacccagcaatcccattactaggtatatacccaaaggaatataaatcattctgttataaaggttcatgcacacttatgttcattgcagcactattaacaatagcaaagacatggaatcaacccaaatgcccatcaatgatagactgggtaaagaaaatgtggtacgtatacaccacagactactatgcagccataaaaaggaatgagatcatgtcctttgcaggaacatggatgaagccagaagccattatcctcagcaaactaatgcaggaacagaaaaccaacaccacatgttctcacttataagtgggagccgaataatgagaacacatggacacagagaggggaacaacacacactggggcctttcagaggagggcggaggtcgcgggagagcattaggaaaaatagctattgcatgctgggcttaatacctaggtgacaggttgataggtgcagcaaaccaccatggcacacatttacctatgtaacctgcacatcctgcacatgtaccctggaacttataaaataagattt

SEQ ID NO: 13333 - DNA, 1381 bp, Homo sapiens
gtgttactgatgtcaaccttaaataacaatatccagataatattgttaccagcggtgagtccagctatctggagaaactccagaatggcaactttgtggcaatttcagttctttgtcttctggaaggaaagatttcaaatgagagacacaggcaaggtttaaagcaggagggagaatttattttaagcaaagcgagaatttattagagagagtacacttgaaggagagccatgtgggtgacttgaaaaatcaagtgtgttgtttgcttcagtcacgccccccacagccatgcctgggcagttgtttaaaggtattttgttcctaactgcctcccccattatcttcatgtacctggaatttgtgatacaatgaacaataatatagccaatccatagcttatgttattttaatgtaaattctttgtaaacaacttaggaacagcctcttcctttatctttaaaatcccacttgtaactgctactaattgaagtgtatattcagggcacttgaatctatgctcccactgagctgttcttaagttttgggctcaggtgaactctaaacttagtcatagaatagggtgttagacatgagcagggcaggagagagggcccccaagaatgttgggcagttgtcaagccatggtcaggcaattataaatctgtccccctgaaataatgagcaggagaagggaggaaccccagagctgtctggttctcattaagtaacggacaggcaggcataaaaccgtccctctaagataataagtggccatgactggtgcctggaatgacaggagtcttagaacagacagaagacacctggaattagcaagccataatccccgatagggttttaagcatgtgcagtgaaagggcaagatggtgaaatttaactggtatatgaccttcctctggagcgctggaccagtgagaactgcccctactgagcatgtgcaccacttcaataaacacgctgcacatgcagctctcccaagtgctggcagggccactgcacatgtgatagataaaggcccgcccaggggaagaacaaaaggaggacacagcccaggaaaagatagggggtataaaaactctaaacaggccaggcgcggtggctcacgcctgtaatcccagcactttgggaggccaaggcgggcggatcacgaggtcaggagatcaagaccatcctggctaacacggtgaaatcctgtctctactaaaaatacaaaaaattagcaaggcatggtggcgggcgcctgtagtcccagctactcggcaggctgaggcaggagaatggcgtgaacctgggaggcgaagcttgcagtaagccgagatagcgccactgtactccagcctgggcaacagagagagactgtctc

SEQ ID NO: 13334 - DNA, 1470 bp, Homo sapiens
  CDS (102)..(749)
tgagaagagatttaaatttccatgtcttcttggaatataatcaagatttgagtgtgcgaggaaaaaataaaaaagagaaacttgaagacttctttaaaaacatggttaaatcagcagatggagtaatcgtttcaggagtaaaggatgtagatgatttctttgagcacgaacgaacatttcttttggaatatcataaccgagttaaggatgcatctgctaaatctgatagaatgacaagatcccacaaaagtgctgcagatgattacaatagaattggttcttcattatatgctttaggaactcaggattctacagatatatgcaagttttttctcaaagtttcagaactgttcgataaaacaagaaaaatagaagcacgagtgtctgctgatgaagacctcaaactttctgatcttttaaaatattacttaagagaatctcaagctgctaaggatctcctgtatcgaaggtctaggtcactagtggattatgaaaatgctaataaagcactggataaagcaagagcaaaaaataaagatgttctacaggccgaaacttcccaacaattatgttgtcagaaatttgaaaaaatatctgagtctgcaaaacaagaacttatagattttaagacaagaagagttgctgcattcagaaaaaatttagtggaactggcagagttagaactgaagcatgcaaagggtaatctacagttgctgcagaactgcctggcagtgttaaatggagacacataagccacactccgccttcctgttaaaaagggctgccttccttcaaattttatttttgttttcttaatgatgttaagcatttatgctcactggaaacaaacaaaaagcagctgaaaaagtgcatcaactcctctttttctgagaaacatggagcagcgcacgcccaggcgatgccagtctgtgtgccgtgatgccgcactgtgttccccatgacagtgatccatcatcgtgcactcgtcatactcagaagtccaaagttcattcttctttaaagtagcctctataactctgtttattttataaatagtattccttatggctgccactcttatttacctttaaataatttctgaaatttaaccttttcagaatgcattgttgaaacaagataaagattgccttttttgaattttttaaattttgtttttaaaagcatataccaccttagttcattcatgtatcctggtaaagcatcttaatcagacttatttttaattactgaatatttcttagacgttttgggacagattttatgtaatctttataagtatgatttctgaagaaaagcaaatgcattagtatgtttgccttaaacttgtagactaaaccaagtattgtaaaataaacagcgataacagtgatagtttttaactctatggtcattgtatcactctggaaaatgtggagtagctgtaataaatctactcctgtattatgcttt

SEQ ID NO: 13335 - protein, 216 aa, Homo sapiens
MVKSADGVIVSGVKDVDDFFEHERTFLLEYHNRVKDASAKSDRMTRSHKSAADDYNRIGSSLYALGTQDSTDICKFFLKVSELFDKTRKIEARVSADEDLKLSDLLKYYLRESQAAKDLLYRRSRSLVDYENANKALDKARAKNKDVLQAETSQQLCCQKFEKISESAKQELIDFKTRRVAAFRKNLVELAELELKHAKGNLQLLQNCLAVLNGDT

SEQ ID NO: 13336 - DNA, 1807 bp, Homo sapiens
ttcaagatgcttgtaaatgatatcaaccgtttatttagtccacccctgaagaactgagggtcctgggaactgaaccatatcaatgcaatcttttctacattattaactgaagaaaaatgggtactttttaaactttttttttttaagattaggaaacaaaaagaagtcagaaggagccaaatctggactgtaaggtgcatacctaatggtttcccatcaaaactcttacaaaatttctcttttttgatgagaggaatgagtagaggcattgtggtgcagaagtctctagtgaagctttcccaggcatttttctgccgaagctttggctaactttctcaaaacactcataataagcacgttatcattctttgttccttcagaaagtcaacaagcaaaatgtcttgagcatcccagaaaactgtttccatgatctttgctcttcatctgtctgcttttgctttgactgaatcacttctgcctcttggtggccattgccttaattgtgctttactatcttcaggattatactggaaagaatgctttagtatcttggtcctacttgttgaaaatttctattgaaagctctgcttttgcagctgatcgggatgcagtggttttggtacccatcgagtggaaagtttactcaactttaattcttcagtcaaaattgttcaggctgaaccagttgagaggcctatagtgttggcaattgtttctgctgttaatcattggtcctcttcagttaggttacaaacaaaatgaatttttttcctcgtaaattgatgtggaagatctgctgctgcaggcttcgtcttcaacatagtcttgtcccttcttaaaacaagttacccatttgtaaactgctgctttctttgaggcattcttctcataaacttttcaaaaagcatcagtgattccacaattcttccactcaagcttcaccatcaatttgatgtttgttcttgcttcagttttagcagaattcctgttgctctggtaaaggctgttttcaaactgatgtcttatccttcttagtgtttcaaactaggttctgttcagacatgttataacagcttagtacatgtttattttggtgcaaaaagttttgaaacctatgtatagttttttcttaatactcatttttcataaactttttaaagaccccttgtatatgagatgtccactcacaaaagtgttcagttgcctgactatagtgaggaataattactaagtcaaaagaaaatatcagtaatggtagttatcctttctgtgacatgtgattataaactaagcttcagttcatcagtaactaccaagtattgtgttttggtttgggctataatgttgtcatctacaaaaagattaaaagctattaaaagaatattggaaaacagaaaaactcattggttaccatcagagtttgctagggcatcagattcttactctgaagattgataaaggagagaatataatatttatcctgcccttcttgttatgaactgtattttaggcagccaagtaactgagggaaaattcttaggaaaatttccagctaataggtgcaaaagaaatgatagacttttaaaaaataaaagtttgaaagtcttaatgaagtagtgaatctagacagcagtatttcttggatgtgaaaaccattagatgataggttaatgggaaattttataatgtagaaatctgatcaaacccactgattgaagatgagacagtcaattattgtgtacctcctggtttgatgcaagagacagtacacaacagtagtaatagcaccaataaagaactcttgtcc

SEQ ID NO: 13337 - DNA, 1459 bp, Homo sapiens
attccgaaagaaacgtgtcaggcaagaagcgctagttcacgcctgtcattccaccgctttgggaggccaaggcagggggatcacttgccccagaagtttgagaccagcctgggcaacatagtgaggcccctgtctctacaaaaaacttaaaatcaataaacaggtctccttccttcctcaatagtcctgttggtggctcacctctctgcctctccagatgtgaggcagatccacacgtttagctattgagataaggctgggcgtggtggctcacacctgtcattccggcctcagatctcttgtgcccaggagttttaagactagcctgggcgacctggctggcaacatggcctccacaaaaataaataaaacattttaaatatataaacattgagataatagcatcttgatgcctgtcttcattttttgtcttctgttttaaggactattagagacaaactaaccaaagataattctcccctcccacgtggctcgtgctgggacgccggcaccgtgagatggcgcccgtggccagatagagggtggcgtgtaaagcaggtggtcacccgtcactcgacttttcgcgtgctggtgagggtggtcgcatgtccatggatcagggctcacacctggcccatctggtggctgtgccatgggaggagcagagccacagccccgctccttgctgtgggtttcccgtgtcctccctgccctgcagtcccctgactccagctctggattagacaccccctgcttcccactgtgcacccgcccagagaagcacagcatgcgtgcctgcacttgcccccacgctgctaccctgctctgggtaccaaggacacaggcacagcagagcccccaccctcgaggcacctgtcatcttgtgacagggacaggctgaggggcaaatgaccagaaagggtggcaagtgccatgtcagacatatggtcttcatacaggggatgtcccaggactgctgggccagagacccctccatgtgggtcagcatcacccaagccaaaggccaaggaggtctcttggggggtgtggccgtcagaacaaagctgccaatgcgcgtacttttaaaggtgcggtcagctagtgaggctgtggctggccctggctgcatccagaccctggagtgtcctgcagccaggggcggatgcaggttttgtggggcctgaggcttctgtggtttaagggaccttccttaagaaaatacaaaattaggaacaggccttgaagcttctgctgctaaacatggtcaggtgaacccactgccagctgtgcccagaagacagtcccccaggctgagtcaaaagtggttcataggccggtcatggtggctcacgcctgtaatcacagcactttgggaggccaaggtgggcagatctcaaggtcaggagatcaagaccatcctggctaacacagtgaaaccccgtctctactaaaaaactac

SEQ ID NO: 13338 - DNA, 1512 bp, Homo sapiens
gtacgctttcttagaaatgtgagcaaagaggagtgccttaaatgtatgaaaacaactgaaattgaaataatatgatgcataagaactaataaagcattttcttattttttaaaaatttgtaggctgggtgcagtggctcatgcctgtagtcccagcactttgggaggctgaggtaggaggatcactgtagcccaggagaccagcctgagcaacatagtgggacaccatctctacaaagaattaaaaattagccaggcatgggtgacatgtgcttgtggtcctagctattcgggaggctaaggcatgaggattgcttgaactgcagtgagtgaggctgcattgagccatgttcatgccactgcattccagcctgggcaacagagcaagacccagtctcaatgtttttttaaaaattttattttatctgtatttgtattttattaattttttttctagactaggtactgataattatagttaactcttcttactaggtaacttgtttttaatactctaaatttcatactatattactcaaaattcagaatgtaagccaaagagagataaagtatattaataaatgttaggtttaaacttgtatgatacatttccaaataggtattatatatttttaaaatatataatgtccatcttttctgtattgatgcctatacaaccataaccccagaagtactctcatactgtgaaagtcattgctaaattaggtattcactttcttaaacacatttctgagaaaagggtgtctttttagggcagatgacttagaagttcttttacgtagccaaggcaaaagattgtctattgaaagcttggaagggctatatgtacatttggaggggaaaaaaaatttatcttacctccagcaagaagagatttctaaaatattgtgctgaaacacaatatacctaggattagacacttttagatagttaaatataagaaatgctaggcaagcataatttgtatatgtataatacaccctgaaaattttattctcaacttcacttctgtttagatctgagacactaaaaatatttcctttagcaaaaaattcttcaatgattatagaaagaaaatttgctgtatagtcacaaatttaatatacaaaattaagaagtgccttaaaaaaattgtaacctgataatacttcgcattagtcctcatttcaaatatgtgaagcagccaagatccacaaaagtgtgtattttcatgtattgaatgaatatattaaaatgtttcttttaaattttattttagaaaagatacagtgaaaaccactgaaactgagttagatgaatttgagatttgactttgtttgctttaatatatactagatagatagatagatagatacatagacagatagatacatagacagacagacagatagatataaatctcagcactttaagaggctgagctgggaagatagcttaaagccaggagtttgaccagcttaccagcctggataagggaagactttgtctctac

SEQ ID NO: 13339 - DNA, 2490 bp, Homo sapiens
  CDS (1062)..(2210)
ggctccgtgacctcctcggcctcaggccctgcccaatctgttgccaagatgttcagggcagtggaggagggcctgacgtacaaattccatgcggcctggagctccgtgttgcagctgctgtgtgtcttcttcgaggcgtgtgggagacaggcccaccctgtgatgaggaagtgcctccagtccctgtgtgacctgcgcctctcccctcatttcccccacacggcggctcttgaccaggcagtgggggctgcggtgaccagtatgggacctgaggtggtgctgcaggctgtgcctttggaaattgatggctctgaggagactctggatttcccacggagctggctgctgcctgtcatccgagaccatgttcaggaaacgcgacttggttttttcaccacctacttcttgcccctggctaacaccctgaagagcaaagccatggacctggctcaggcaggcagcacagtggaatctaagatctacgacacactccagtggcagatgtggacactcctgcctgggttctgcacaaggcctacagatgtggccatctccttcaaagggctggcacggacgctgggcatggccatcagcgagcgtccagacctgagggtcaccgtgtgccaggccctgcgcaccctcatcaccaagggctgccaggcaggctgaccgtgctgaagtgagtcgctttgccaagaactttctgccgatcctcttcaacctgtatgggcagcccgtggcagccggggacactccagcccctcgccggctgatcataagggaggaggcagacggcaacaagatggaggaagaggaaggtgccaaaggcgaagatgaagagatggctgacccaatggaagatgtgatcatcaggaataaaaagcaccagaagctcaagcaccagaaagaggctgaggaggaggagctggagataccccctcagtaccaagctggaggctctggcattcatcgccctgtggccaagaaggctatgcctggggctgaatacaaggccaagaaagcaaaaggtgatgtgaagaagaaaggccggccggatccctatgcctacatccccctcaacagaagccagctctgactttaccagattgtctgtcctggacctggtcgtggccttggctccgtgtgctgacgaagctgccatcagtaagctatactccaccatccggccctacctagagagcaaggcccacggggtgcagaagaaggcctaccgagtgctggaggaggtgtgtgccagtcctcagggccccggggccctcttcgtgcagagccacctggaggacctgaagaagacactgctggactcgctgcggagcacctcctcacccgccaagaggccccgtttgaagtgcctcctacacatcgtgaggaagctctcagctgaacacaaggagttcatcactgccctcatcccagaggtgatcctgtgcaccaaggaggtgtcggtgggcgcacggaagaacgcttttgcactgctcgtggagatgggccatgctttcctaaggtttggctcgaaccaggaagaggccctgcagtgctacctcgtcctgatctaccctggcctggtgggcgcggtgaccatggtcagctgcagcatcctggccctgacccacctccttttcgagtttaaaggtctgatggggcccagtacagtggagcagctgctggagaatgtgtgcctgcttctggcctcccgcacccgtgacgtggtcaagtctgcactgggcttcatcaaggtggcagtgactgtcatggacgtggcgcacctggccaaacatgtgcagctggtgatggaagccattggggagctttcagatgacatgcggcggcacttccgcatgaagcttcggaacctgttcaccaagttcatccgcaagtttggatttgagctggtgaaaaggctgttgcccgaggagtaccacagagtcctggtcaacatccggaaagctgaggcccgggccaagaggcaccgagccctgagccaggctgccgtggaggagatctgtgctgttctggctgctgtcactgaggttcccaggtgggacacaaaaaccgcagaaaggatcgtcgaccctgaggcccagggcccctgggctgccctgtggtccagtctgaggccctttcagcccccaggctgccttgccaccagctccaggtgctcaagattctggcagagcctggactcaggatgacttggaactagggcttggctctcagaagtcctggattttggaaactccaaatggaatcacccttcagagacatccctggtgcctggagatgggaatgtggcctcagtgcctctgagtaggtgccatgaggcacctttgctttctgcccagagtggccatgagcaccagaacagatgatctccatttccgccagctgcctgtagccacgtggcatcctgcctgtggtctgggtgagatttactgtgaccagatgtagaataaatgtgtctcatcctgc

SEQ ID NO: 13340 - protein, 383 aa, Homo sapiens
MPTSPSTEASSDFTRLSVLDLVVALAPCADEAAISKLYSTIRPYLESKAHGVQKKAYRVLEEVCASPQGPGALFVQSHLEDLKKTLLDSLRSTSSPAKRPRLKCLLHIVRKLSAEHKEFITALIPEVILCTKEVSVGARKNAFALLVEMGHAFLRFGSNQEEALQCYLVLIYPGLVGAVTMVSCSILALTHLLFEFKGLMGPSTVEQLLENVCLLLASRTRDVVKSALGFIKVAVTVMDVAHLAKHVQLVMEAIGELSDDMRRHFRMKLRNLFTKFIRKFGFELVKRLLPEEYHRVLVNIRKAEARAKRHRALSQAAVEEICAVLAAVTEVPRWDTKTAERIVDPEAQGPWAALWSSLRPFQPPGCLATSSRCSRFWQSLDSG

SEQ ID NO: 13341 - DNA, 2210 bp, Homo sapiens
tgatattttgaccttctcctttgaattatgaatgttcttaatggcatctagaatggttaatactttcgcagaagattgtcaatttattttgcccagatccatcggaggaataactgtggcagctttagccctaggaaatgttatttcttaaataataagactttaaagtcaaaattactccttaatccatgggctgcagactagatgtatcagcagacatgaaaacattaatcgttttatacatctccatcagagttcttgggtgactatgtgcattgtcaatgagcagtaatattttgaaaggcatcttttctaagcaataggtcttaacagtggacttaaaatttcagtaaaccatgctgtaaacagatgtgctgtcatccagaccttgttgttccccttatagcacataggcagagtagattaaacataattcttacaggccctagaatttttagtatggtaaatgtgcattgacttcaacttaaagtcaccagctgcattagccccaaacaagagagtcagactgtcctttgaagctttgtttccatgcattgacttctctctagctataaaagcctcagatcgcatcttcttccaatggaaagctattttgtctgcattaaaaatccgttgcttagtgtattagtccattttcatgctgctgataaagacgtacccaaggctgggcaatttataaagaaaaagaagtttaatggactcacagttccacgtggctggggaggcctaacaatcatagcagaaggtgaaaggcatatcttacatggctgcagggaagagagaaaatgagagacaagcaaaagaggtttccccttataaacccaccagatctcttgagacttattcactaccatgagaacagcacaggaaagacccatccacatgattcaattacctcccacgggtccctcccacaacacatgggaattgtggaagctacaattcaagatgagatttgagtggggcacagtcaaaccatatcacttagtgtggccgccttcatcaatgttcttagctagctcttctggataacttgctgtagcttctgcattagcacttgctgcttcaccttgcactttaatgttgcagagatggcttctttccctaaacctcatgaaccaacctctgctagcttcaaacttttcttctgcagctttctcacctctctcaacccagatagagttgagttagggccttgctctgaattaggttttggctttagggaatgttgtggctggtttgatcttagaagatcactttagacagcccactaaaactttctccatatcagcaatatgaggctgtttcacttgcttatcattcatgtgtttcctggaattgcatgtttaatttctttcaagaacttttctttgtgttcataacttggccaactgtttggcaggagaggcctcgcttttggcctttcttggctttcaacatgccttcctcactaagcttaatagttcctagtttttgatttaaattgagagatgtgagactctttctttcacttgaatgcttagtagccattgtaggattattaattgacttaatttcaatattgttgtgtctcaggcaatggggaggcccaaggagagggaaagagatgtgggaatgaccggagcagtcagaacacacacaacatttatcaattacatttgccatcttatatgggtggggcttctagtgccccagaacaattactaggataacatcaaagattactgattacaaatcactattacagataaaataataaagtttgaaatacattttttttttgagacggagtcttgctctgtcgcccaggctggagtgcagtggcactatctcagctcactgcaagctctgcctcctgggctcacgccattctcctgcctcagcctcacgagtagctggaactacaggcgcccaccacgacgcctggctaattttttatatttttagtagagacggggtttcaccgtgttagccaggatggtcttgatctcctgacctcatgatccacccacctcagcctcccaaagtgctgggattacaggcgtgagccactgcacccagccataaagtttgaaatattgctaagcattaccaaaatatgacagagacatgaagtgtgcacaaaccattgaaaaaatgtcaccaatggatttgctccatgcagggatgctagaaaccttcagtttgtt

SEQ ID NO: 13342 - DNA, 2228 bp, Homo sapiens
  CDS (22)..(1050)
agctttgtgcgctctgttactatggacaagtggaaggacattgagcttgagaagatgaaagctggtgggaatgctaagttccgagagttcctggagtctcaggaggattacgatccttgctggtccttgcaggagaagtacaacagcagagccgcggccctctttagggataaggtggtcgctctggccgaaggcagagagtggtctctggagtcatcacctgcccagaactggaccccacctcagcccaggacgctgccgtccatggtgcaccgagtctctggccagccgcagagtgtgaccgcctcctcggacaaggcttttgaagactggctgaatgatgacctcggctcctatcaaggggcccaggggaatcgctacgtggggtttgggaacacgccaccgcctcagaagaaagaagatgacttcctcaacaacgccatgtcctccctgtactcgggctggagcagcttcaccactggagccagccggtttgcctcggcagccaaggagggcgctacaaagtttggatcccaagcgagtcagaaggcgtccgagctgggccacagcctgaacgagaacgtcctcaagcctgcgcaggagaaggtgaaggagggaaagatttttgatgatgtctccagtggggtctctcggttggcgtccaaggtccagggagtcggtagtaagggatggcgggacgtcaccacctttttttcggggaaagcagagggccccttggacagcccctcggagggccacagttatcagaacagcggtctggaccacttccaaaacagcaacatagaccagagcttctgggagacctttggaagtgctgagcccaccaagacccgcaagtccccgagcagcgacagctggacgtgcgcggacacctccaccgagaggaggagctcggacagctgggaggtgtggggctcggcctccaccaacaggaacagcaacagcgacggcggggagggcggggagggcaccaagaaggcagtgccgccggccgtgcccactgatgatggctgggacaaccagaactggtagggcccactgcgcccccgtccccagcgcccccgggcgacttcgtgtttgcactctgccctcgtcgttcctcctccttccatttgacccaagaatcagcaactgcagtgtgaggacagcgtctcgggaggcaggaccctagggagacccgggtgtgcgccgcctgcgcgtggggagtcttcggtgcgtgggggcggcttgctgtccagcctgtgtgggggccgtcccgtcccacactcccctgggcattcttggactcaaggccggggctctgcgtggcttgccgggaggtgggctgcagcacagaggcctgtgactgcgttccagcggccagttcactacgcagtatctctggggcctgggaccagccacgtgccgagctgtcagcgacgtgaggtgtccctcctcgttgagatatttaactttggttttgctctagttctttctttttgaagagagtgactggagtggtaaagatggaaatgctggaaatgatactggcgctcacgctgccatccgaccaccctcggctcccgagtccacgcctgcctgggcctgtgctgtcagacccgcgtcggtcgtaaccctctgtggctcccctgcatcagcaccgtcccaccaccaagttcaccaggttcaccagacacggcctccacaatagccacacccacacctgagctgttctcagtgctggaacttgaccatcctggaacaccctggaagaaaaaggagcgcagggtgggccctcggccctgatgcaggagggtgcgatagcggacgtggccaggcaggaggggccgggttcaggagctgagcaggggatgcctgtgcgtggtgcctgggtctagggaagctccagccccaggatggggctgccctgcacaccggtgcccgccacatgccaaccctcacctccccgaggactggatgatgtgctgccacgtgtgactcgtctcccttgtctgccctgtgtgaccctcagtcttggccagccatgcatgcgcccgaagctcgtgcagtttgtacgtgaggtgctctcctccctgccaccatgctcaccaccaagttcaccaggttcaccagacacggcctccacaatagccacacccacacctgagctgttctcaggtggaaggcgcggacctgacagcattccaataaagcatacgggaacatgc

SEQ ID NO: 13343 - protein, 343 aa, Homo sapiens [sequence omitted]

SEQ ID NO: 13344 - DNA, 1521 bp, Homo sapiens
gaaagtaaataaggaaatcagctctctaaggcaatgctattctttttatactctcaggatagaagatcttggcgttgtggtagattgccttcctgtgctcaccaattggtaaaaacaatatttttcagaaaaaaaataagattaaaggaggtcaaattatggcccatccatatttttataacttggtatttattttagtttacaggaagaaaaacaatatatctcacttggctgctgtgttgacttgttgcctctagtaaagtcactacttaaaagcaaatttgaagagtaagtgctaatctgaatcttgattcatttttctttttcagcatccttgattttgtgctttgtgagtacatagtagattgggctccatgagacatgcaaggtttctgttttcaagaagctaatagtacaattaggaaaagaatatgaaatgactaaaggacaattataaaagcatctctaaacaaattacatgaaatatacttttgtgtaatagatcatgaaggtaacaattttttaaaagggaagggaccaatgtgtgtgtgtgttttttgggagggaaagtatcatcttttataagaagggctcttagatgaaaacacttgaattttgtaacaaaatgtcatttcagatatgttatagttggtttaaactggcttcaagcagtcattaaaaggtggtggtcagaactatcatccaaaacagaaattataaatgatgggtgagtatacctttaaagataaactcatgctgaaattttcttcaggaaagcagcttgattaaactaggtaataattttatcccattatcatcagtgtatggtatttattctttttatattcagagagatactaacttaagagactgttcatttgtgaaaaccacacctggaaattgaattccagagcctactaacctcctgtatctcttcttctggcacaaccctacccttcattttagaagaaaaacacaatagtggtttaattctcatattcattatgagtaagggaggaaaaagagatgcccacagtgtaataaggaatggaggcaccctgcggggtcctttacctagacattaacctgagagtccggtgttgatgtttacacttctaaaaactgtattattactgccttgatgtgaaaattcgtgggtattctaccagagtatagccagattatcatgaaaccacagaaaaatatctcccaacagtttccttaaagtccataattttgggccaggcacggtggctgatgcctgtctgtaatcccagcactttgggaggccaagaagggcaaatcacttgagctcacaagtttgagacagcctgggcaacatgatgacatcccgtctctacaaaaaatacaaaaattagccaggcatggtggtgtgcgcctgtagtcccagctactcaggctgaggcaggaggatcgcttgagcccaggaggtggaggttgcagtaagccgagatggcaccactgcactccagcctgggcaatagagccagcccttgtctc

SEQ ID NO: 13345 - DNA, 2264 bp, Homo sapiens
atctctttgcattattacagttgttgttatttttagttctatttatatgaaaaatgtactttttagcccacaaaaatagcatagcagcagcttatcaaaatgtcccagacaagtttacttcaacaaattagtaacaccttcatgcttcctgtggtggaagaaatgcagagtccacttcctcccagtgaacatctgagccagatttctgctccactcggtcccccttcccacctcttacagccatgaaataatgtgagagtatttgtttcccctgcaaagggaagagggtccagagacaaaagggaagttagtattcactggaagcctccctgtacaagcaacagtgttaggacttttatacacatttttacaattattacagcagttctcaattattgaaacagagggtaggcatttcccctttttcagaagggaaaagtgagaattaagttaattccaaagtcacacagctagtgagagaaaaagcctggacaggaactcagactgtatgactccaaaggctaagtgcattctatacacacaggccgccctcctggcagtgagagttcaggatctgttggagaaaacctcagaccatggttttcttgcagcttctgctggagaacattaggtgcctgttcccccgtggtgagtgttacaaagtgcagcaccacccaggggaagagtctgggccttggagttagacctgagtttgaatcctccttcagatatttactattgatgacattggcaatcaatgctgctgaatttctccagccctccatttattcatctattaaggggagagctacctacagggcggggaacttacaaggattagatgaggggatatgtgtaaaggcctaacacccagtaggtgctcactaaatgatgttccttattattatggtgattaccactgtactcttttcagatgaaagtgttcggtcacctggaacctgtgagtatgtggtttttgatctgtgactaaactgttcacccatttcccagtttctctgctgtgtcaaatatcaacattttaccaggtttctctgttgttgccaaacctgtcatttttatttggtgtggcttcttgggaaacttccatggcccatttgatgggaatcaaacagagtgaaaacaaggacagatgcagcagaggtggcatcaggaacaaatgggtcataagaacttaccttggcagcagccccagaatggtcaggaggaaaggcactttaaggtatcagaaggtagaaaggagaggttggatgatagaatggggaagggattcctccttgtgttcacagaagtgaatcaatgggagacacaaggttaccacttaatattcctgctctcctaggcatgggtcaggtacatcttcagccatgggtaagtttgttcaacaaatgagtgatctttgggaggctgaggcgggcggatcacgaggtcaggagattgagaccatcctggctaacacgatgaaaccccgtctctactaaaaatacaaaaattagccgggtgtggtggcgggcgcctgtagtcccagctactcgggaggctggggtaggagaatgtcgtgaacctgggaggcagagcttgctgtaagcagagatcgtgccactgcactccagcctgggcgacagagcgagactgcatcccaaaaaaaaaaacaaaaaaacgaaaacaaaaacaaaaccaaatgagtgatgcattgacctttcgtaattcttggatgcaaaagtagaactcaagctacttaataacaatcatggtggcatgggcaccagcaagtcagggtggacaacagccatagttctggagcatggtcctcaagactaccttttgtatgcagagtattaacactttaactcttagatccttggaacataaggaagagaggctggaacaaaaaggggttggcatttggaggtggagaggtagtgtaaggcacaactgtttatcaactggtatctaagtatttcaggccagacacgtggctcacacctctaatcccagcactttgggaggctgagccaggaggattgcttgagtctaggagttcaagaccggtctgggcaacatggtgaaaccctgtctctacaaaaaatacaaaaattagccaggtgtggtggggcacgcctatggtcccagctactggggaggctgagatgggaggatccacctgagcccttgggggtcgaggctgtagcaagtcatgattgcaccactgcactccagctgggtgataaagtgagaccttgtct

SEQ ID NO: 13346 - DNA, 1766 bp, Homo sapiens
tctctggaacagttgagagacaaatgcataagcattttagaaagaccaaatgtgaagccatactccaaatattcaacatcactgcagttatttttgagtttatcaagatgtgattacaggagagtcttactgtagtcctgcttttatgtttccaaggtgtttgtgcatggactttcctcttttccaatagccaaacttgtttggatgtgatccaagatgtaccaaaaggtattgaaaattaaatgtaagagtagtcttctagcaatattgcaccattcccaggcagtttccaacgtgcatcagcatgtctgtctccagtggaacaagataacttccagcccctgaacccctggggaaactccttccctctttactgtatgttgttgccactgtaggagaaatctctcctctgcctgactctgcagctgctttacccagaacctcaggaggaactctgagtccagagccaggctgagttcagccaggcaagtctggccttggggctgtatatatctgtctcagacatcgtctgtgttttcatatattttttgactttttaaaagatgacccagaccacaatagtatgttctatttttgttttgttgtgttgtgtttttccattacattgcttagtacagtatttctaggatagaaaatttgctttcttggtctgccttggaacatacctaccaattacaacattgattttccataaaaattgagtttaaagttccaacttgcaaatgaacttttggatagccatccatttgttagtgggaaagtgtgtctgatttaggtattttcttagtaaataaccactaaaatgaatgtttaaatatcttattttgcttaagtcagggatctcactgtactgtaataaccgtttgggtacaccactgattgataacttaatgcagatagtggaggattaacataaactgtgtgcttgttacatcctcaatgaaaacaaaactaatggtttaaaatgtcctagtgtcaccacaagatggtgcatgtgacgaggaaaaaaaacatgtcttaatatggtttcaaaccaaaatccatatatttgtttaatctgtagttgtactctaactgtatatatatttttttctcatatttaactcccttctacaaagaatagcaacatcagattttaatacaggataccaaatagctattgctgttgctattccctggttgtatacctgccctcattgactattagtgggtcttagattttgacttcatccaggcttatttcgtaagttcaggaccatcctatttcatacctcctgttcctatttttctaattgaaacttcattgacattggagccaggtgtttttttcctaacacttattcctagtgttgctgatagccagtcaggccagatgagatctgatagtgacctccacggagtgcactaaagaagggtcagaagtctcctttactctttcaaccccagaggccttaatttattaatagcatctctttgaaaaagacaatctctgcatattcaagaaatgttaccagtggacactgctgaggattggaaggggccaaaagcatggtggcttttgtttttaccttgttctcttttgcattacttaaaatttttatcatgaccaagtagtaattttctaaaaataaatatttgataaaaacagtaaaattaagcaaagtattatgtcatcctcaaataaattagtatctacaacatgatcaaagaaattgtgactatacaggatatttgcataaaagacc

SEQ ID NO: 13347 - DNA, 1443 bp, Homo sapiens
tgaacaagaaatcttttttctttagctgggcatggtggcttacgcctgtaatcccagcactttgggaggctaaggcaggagaatcgattgcgcctaggagtttgagaccagcctgggcaatatactgagacctcatctctacacaaaatacaaaaatcaggtggttatggtggtgtgtgtttataaccccagctacttgggaggctgaggtgggagaatcacttgagcccaggagttggaggctatagtgagtcatgattgtgccactgcactccagcctgggtgacagaacaagacctcgtctcttagaagaagaatttttgtctctaatgctttgctaaaagaaaagcaatatctaatatcttttctttgttcaaagaaaagcagtatctaaaagtgcagagttttctgcattttctaaagggaacttgttgggaggtgctctctcctgatgcgctgttcttgagtgccatccatgatcagggttaggtttggaacagagagggaggagaagacagagaggctcttttgggataagtgagcaagaggtgggatggatgaggaaatgaggttaaacgagacccgttcttgtaagagcaaggagagtgcctggcgtggctcctggttttccatggtgggtggagggcccgggcagccgctgatgccctgtggggaggaacggaggccactctgcaaaggggcctctcgcttccccagtgtcttcatctcgaaaagcaggcagtcagtagcccccaggatgctcttcccaccaccagggaatcccaggaaattcacttaaacacacaagggagaaagcatcctggccagaggtcatgagtgtaagagagtttggttacagtagatccataaaggaagagctgggtggggggccctgaggggggacctctgtcatcctgatagttccagcgtcccggttctagtgtgttctagaagtcttatgtccttcccattttctaactgacgttgtcccctgggaggacaggttgttaaaactaccctataaatggatttcctggcaagcccagtgcattttaaaagatataacaaggatatttgggtccattcaatacaattatttggaaggatcatctgctttgaaattttgggaagttctgtgtagctttaagagatagatatggccgggcgtggtggcttacgcctgtaatcccagcactttgggaggccgaggtggcggatcacaaggtcaggagatcaagaccatcctggctaacacagtgaaaccccgtctctactaaaaatacaacaaaaaattagccaggcatggtggtgggcacctatagtcccagctactcgagaggctgaggcaggagaatggcgggaacccgggaggcggagcttgcagtgagctgagatcgtgccactgcactccagcctgggccacggaacgagactccgtctcat

SEQ ID NO: 13348 - DNA, 1551 bp, Homo sapiens
  CDS (2)..(307)
gatgaaccagtatggatttgcttttctaagcctcctgttggttactaatctcacttggcacattataactaaaggaatcccctcaattcaaaagcatagatggatacaaatgtcagaccgtgggtttaatttgtttagaacacatggcatttcttcacaaggtaacctgctgtatttatttattttcttttggttaaatataatttccaaactttgtggtcaggcagcgtctaaggttacgttaccacagactgacagttggtatatgtaccagccaatcccttcattaaatgtatacagatttagttaagtagcattaaataggattcttagaagtatgtcctcatagaacttttaatacttaaggctttgtaaaaactatccatgaagggaaagctcctcagcataactgctcagggaaatagggctaaataactgaacattaaataattggttaaaggtgctgttagtcgagcctcaatgcttgctacaaggatgtatgtacaaggactgactttaataatttgcattatattgtcccaaccagtagtttattttttgccacggagatgtagaagatattacaagctactggatgcactgtcagattaacttatttcattaaagaagttgggagaacaaataggaaaaaaaaaacttatttttctagtaaatattaatgtattacatttcaaataatggtgcctgacatattgaataattattttctacagtgtacgtatgcaacaaagatattccatcatgcattagagtcagttctggctctgcctagctgtttacatttgcaaatgtagcaaacaaggtaatgaagcaactatttctattgcagtagatatccttttgtgtgtgtgtgtgtgcattaaagttgtaaacggtaacatgaaacaaatgaaagttcttgctataatggtatggaaaacaagaaggaaatgaaaatatttttatgcctacttaggaaaaaaagggtagcacttattcattccaagtacttttttttttttaatttttaagctcttaactcacattgttatgcttaagatgataaacatatatcctctttttattgctttgtctatgtttcatatgaaacatttcagaaattattttgataagtgttgctggaatctgcaacgctgatgtttttttttgcattctgtagtcgcatttgcactccatttttacattaattcgcagttgctttgtatcattgttttgtttgggttttgtttctttttcacagtgccgggtcttcgtttcttaaagttggatggcaggtagagttcaaccagttcgtgactgttgtagcgaatgaagttaaaaaaatgtctttctgatgttgtgttgtcattttcatttttgcatttttttgtttgcatattaaaaaaagagaaaagagaaagcaagagacagaaatcaggactaagtcctctgcttcagtttcattgttaacgggccttattctgatctcacctgtcgcgtagctctaatattcacataaactgaaataaagaagtggaatgaggagctttg

SEQ ID NO: 13349 - protein, 102 aa, Homo sapiens
MNQYGFAFLSLLLVTNLTWHIITKGIPSIQKHRWIQMSDRGFNLFRTHGISSQGNLLYLFIFFWLNIISKLCGQAASKVTLPQTDSWYMYQPIPSLNVYRFS

SEQ ID NO: 13350 - DNA, 2280 bp, Homo sapiens
attgagtttctcgctacttctgccactcatcacacttgcttcccagagctttgctgggtgtgctgaagtctccagagaaagtggggaatatgggtgcctagagacttctagggggtgttttcagcccctagagagtagagaagtgtgagaaggggttggtccccgaatattctgtagttttggggaagaagcaatggggacagtggagttggttgccttaagagaggctatggtcccaagagatgggacttggagagtctctacttgcattcctggctaagcccttaatattctcgcacccctccttgcaagactagttccttttgaggtggttcttggctagcttttgagaggctgcagtggctgtgtgcccaggcttaagtcctagctttctccccactctttacctcctaggaaccgggcccatcctgggggaggcagggaggagctcctttttatagtccacatgtaggctttgtgtataggctctgctgcttccttccggccctggcccttcctggtgttggccggtggccctggcttcagcaagactcaggatgcagagtaaacggggcagggcgttctcctacagaagactggcatccctttttactgagcccaggcctggcacagaggaggctggagttaggaagcaagaaaacgaggtgacccagtccttgatcctgagaagcttgtgatctggaccatgcagaaaaccgctaatgcccagggctggcaggagacagctgtgcctaaagtgctgtaggctgggcctgagggccaagatggaatcgcttttctccctgtagcagcccatcctaccccctggggtccctccacctgccagctggcacacaggtgttgggtaaagcatctgtacaaaggctgtgaggggcctgggcgcaaggcagcaaggcttgggtacggaggagagtgggtggtcttactgatgttctgggccctgacagtgaacagctggccaaactggtgaggagttgggccatggcgagtttggccacttgtttgtgtgtgtttagttcttcctgggcacaggtggggagttcactttggggttggcttcctgttttcttggacacctggggatatggttgagttaaaatgttctgagggaaatgattgttgagggcatgggcttgggtcatagtgtccttggcttggccttgcccatggtaggagtcgggtattgaccacactgggttctggctgtgtaggtgtggatgtgtggtgggagaattccaaccccaccttgacttcagcctaaggcccagagagtgtgggcctgagttcacagggtgactaaccctaggaaggagtgaaggagagctccagttggccataggtcccacaggtttctcagcttacttgggggcaggaggtgagctaaggaatacaactccattccctcagttgggaggttgggcagcgatgggggcaggggtgatggtccttctctgaggcactgaagacccactttatggtcaccctattctgcctgatagtccaccacctgtttggaggcagctcccctcttcctgccctagtcacttcctccaccttcaacagtaattgagtataatgtgcctgtgttagcttgtccatcctaactgggactgtggccttttcttgggcgttcttagcatatctaccaaggaggttggaaaaggtaacatatgtcactttgttaaggattttgctgagggccttttgaggccagcagtgaaacacagagcattccctccagtgagaacagaatgtctgttgccagactgatcacaagaggatggcctggttctggcctgagaactggtctacactggaagcatgaagctccatacaatcatgtgtgctagtaaagtttgggcaagcagctgtcctaagcaggtaaaacgataggttattcaacttcaacttcagagaaagaaatccaaggtagccatctctctcagtaggggaggtgagttcaaagaatttaagctgggctgggcacggtggctcacgcctgtaatcccagcactttgggaggccaaggtagggggatcacgaggtcaggagttcaagaccagcctggctaagatggtgaaatcccatctctactaaaaatacaaaaattaaccaggcgtggtgtcaggcgcctgtaacccagctactcaggaagctgaggcaggataattgcttgaacccgggaggcagaggttgcagtgagccaagatcgcgccattgcactccagcctgggtgacagagcaagactctgtctcttt

SEQ ID NO: 13351 - DNA, 2033 bp, Homo sapiens
aaagccttggcactagcggcgtccgggcgcggagtgcgcagggcaaggtcctgcgctctgggccagcgctcggccatgcgatccgccgcgcggaggggacgcgccgcgcccgccgccagggagctgaggcacgctcggcacatgagttcctgtttcattactgtgggcagcatcttcacgcagcacgctggcaccagaaggacaaaaggtagtagatcgacgctgaacagtttcaacacaggggaaaggggaagaattaaggaacctctatgattctgatttctgaaagcagccacagtgagcgctctgcaatgagtccctttgcctggggcatgcaatgcagagacacaaacggacacacatgggcgcacgcgcgcacacacacatgctctgactttgcaagctgaaggctgtgattgtgtggactgcctcgtgtccctcctccttttcactgaatagggaggttcatgctgataccacagggccgacacctgcgttctgcgttcacacctgcgtggatttctgccaccctgactcccttcttgtctgcatccaggtggaagcgtctggaaggttcattacacgaccccgcagttccaccccgagggagcgggggcctgctacggccgaggcgtctgcccatgctccggggagggcgtgacccatcacagaccccctttgctctttgacctctccagggacccctccgaggcacggcccctgacccccgactccgagcccctgtaccacgccgtgatagcaagggtaggtgccgcggtgtcggagcatcggcagaccctgagtcctgtgccccagcagttttccatgagcaacatcctgtggaagccgtggctgcagccgtgctgcggacatttcccgttctgttcatgccacgaggatggggatggcaccccctgaatgccaggactgtgagagaggatccaggagagcctgactgcgttgcaaacaaaattctccaagcttggttctatcttcagcttccctttttgcaaggaacatgccctggactgagagtgggtccccactttctttctttctttctttcttttttgagacagagtgtcgctctgtccctcaggctggagtgcagtggcacgatctctgctcactgcaacctccgcctcccgggttcaagcgattttcctgcctcagcctcctgagtacccaggattacaggcaccaggcacctgccaccatgcctagctaatttttgtagttttggtggagacagggtttcaccatgttgcccaggctggtctcgcactcctgacctcaagtcatccacctgcctcggcctcccaaagtgctgggattacaggcacgagccactgcgcccatgtagggtttccctttcctgatttgtgaaataagactgtcccagtaggcacccactgatgcctcctcttcctcttctaaatctcagggttcgtcattgtgccaatgcccgatgttttcacccctccgtcttaaagcattgttgcaatttcatcacctagatgacataacagccttacaaaaggacagggaggagtgtctgttcttactctcacatagcggaggaaagttagagcctctcagtctctgtttatgaggactcattaatctcaaataattgatgcatttttcatacattagggtctctgtccatgtgtcttcctgatattgttatagaaatggcttcaggctgctggtaacagatgctgcggaaaaagaatgccttaaacaaagccaggcacggtgactcacacctgtaatcccagcactttgggaggctgaggtgggaggatcacttgagcctaggagttagacacctacccagcctgagcaacacagtgagacctcatctctacaaaaaacaaataattagctagatgtcgtggcgcacagctgtagtctcagctacttaggaggctgaggcgggaggattatttgagcctgggaggtcaaaactgcaatgagctaagattgcactactgcactccgggctgggagacagagtaagaccctgcctt

SEQ ID NO: 13352 - DNA, 1952 bp, Homo sapiens
  CDS (916)..(1251)
tcagataaagcccaaactcctatccattcttcccaggtgtgatggggcaccccgtgccctccagcctcctcattcccacttttctcactatgttggctttcgtttaggtctctgaaccctccaggctccctctggccacagacttgccacctggctagctccctctgcctacccctagcctctgagagcctttctgcctcctctgatgaggcccaatcccctagtaaatgattttatttacacagtagacaatagaggctagatgcatattttttttcttaaaatattggactacttttattttcttacataataatgatatttatttaaagtgctttaggatagttcctggatatcattatgtacagattaaagtttaaaaattaaacttctgaaccatgagatagattggttcccattcaagtaatccattcacattttacctactgtaatgactggaatgtgctgtaacatactttgcacccctggcctcccttcctgtctcctataataatggagctgtgttttcaagtttggcaggatggcttctgttggaaatttgcccttttaagttaggaagactgacccccatcttactgctctctttcgaagctagtctaatggaacaagtagactcaggacaacttggactaaatgcactgtaaaccacaatggaaaaactgcagtgaggtattcccagtagaaatcttggaattccttcaagtatattgagattttgttagaaattgaattgccagtgtaatccatcttccttttgagaaaacattcagataaagagctgaggcctagcagcattaactgttagaacatcccttaaatcaataagctacaaatctggccgcacattcctgccgcgcctggtggtgcgctcaagtggctttaggctgaagcagcatgactgatagcacatcctcaaccaggcacatgcctggcgatgcagattcctgtgtttaccgtaagcattgccttgttccattctacagaatgcaattatattttgtttcacataagaaaagcagtttttcttttttttttctttttttttctttttttcagattttccaaatgtggttattgaaggagtcctccatgggatattttaccctcatctacagcccaggtagaaatcctacatggctaaaagaagcagaagcaagtttcgaagtcacagtcaaggaaatcaatacctaccaatttaacctaaacgctatgatatataacagctctagctagtggtaaagtgcacagtcccagcttaattcagggcagggacatttccattagaatggtgctcttaaaaatagaaactgaaccggggcggtggtcaggctaaggccaagtgtttaagaagtagagtgtagctgccagcgtagaaacccatgaaaaggaggccacaggagattcctgggagcactgggtgtagcaaaacaaagccactctctgcttcagtcgcaccatttgctaattgaaaatcatatcctgaatcatactgagactgatcgactttggtagcttttttgttcagatcttatgacacactactcttctcaccgtgagattttctcagccagtgatagtacattctgaaatgctggcaccaggagacggccacagacacacactgctaaatgtgaagatggaactaaactggaaattaaattatactgacaatattatggcatttttaagatcatggcattttaatttacattagagtggagttgcatcatactcaggggttagcttccaaggtcagtacataggtaaaatgggctattaggatgatccttgaaagccctttagaagggtgccatgttggaaacctgtacatccacaacaagtagcttttcctcctatgttggaaaaaaagactgtttctttgtttgaagaccaagtgaagttgttggtgtttgtttaggggccattttgtt

SEQ ID NO: 13353 - protein, 112 aa, Homo sapiens
MTDSTSSTRHMPGDADSCVYRKHCLVPFYRMQLYFVSHKKSSFSFFFLFFSFFQIFQMWLLKESSMGYFTLIYSPGRNPTWLKEAEASFEVTVKEINTYQFNLNAMIYNSSS

SEQ ID NO: 13354 - DNA, 2096 bp, Homo sapiens
  CDS (119)..(601)
accaacgcctactccccggtgcagcagggagtcatcatcaaaaggaagagtggggagatcccatgccccttggccgtggaggcgtttgccgctcacctgagctacatctgtagatacgatgacaaatacagcaagtatttcatttctcataaaccaaacaagacctggcagcaggtgttctggttcgccatcagcatcgccatcaacaatgcctacatcctgtacaaaatgtcagacgcctaccacgtggagaggtacagccgggcgcagtttggagagagactcgtcagagagctgctgggcttggaggatgcctctccgacccactgatgctgggggcgcaggactcggtcaagggaggggcaagaggaggaggagagcctgccgttccaacttgcccatcagagacccggacacggcctggtgtgtggcttgctgcctgggagggatgcacagggcctctggagggacaggatggacctggtcagaggacggttgctgtcctcatttgcattccaagaagagcatgtcctccctcgagaaacagtgccgccggtgtgatgagcacttacacccacgttctcaagggcagattctctcatgacatccgtggagcttgcgaggcagcgtggactggtgactgtgaaggaaggcccccgtggtagaatgagctggagcacgctctaagagagatgcctgcttcctaaagatctacagcaatctgggacgtggttcaagttcaagacttgaaggaagcaaagacgccctgcatggttacaatggctcaggtgtcaggggaggccggagggttttccagcatttgcctcatgccagcacctttgaaccggtctcttagaagaagacacacatcctgggtgtacagtggtgaaatggggagtgggtgcccattctgaaaaacgaggcattcctgctcattccctctgcttagctggtgggcaggggagagagggaaatgccaaaaacttggagtgaaggatgatgctattttttatttttaaatatatcttcaggttattttcttactgttgcttcagatctaatgtaaaaggcagatgtcccctcctctccacccccgacgctgaccccggcctcagtcacggctctttgcatgatcacagttctgtgttctggcctgtggcagggccgggaagggccgctggcttccgaacagacgtggttgctctccacgaggcgcatggggagcccgcgggccctaagctttgtcgcagatgtcatcattggcagaattacttgtcttgaaaaataagtagcattgctgaaacacacaaccgaattctctacgatggccatttgctcattgtctttcctctgtgtgtagtgagtgaccctggcagtgtttgcctgctcagagtggcccctcagaacaacagggctggccttggaaaaaccccaaaacaggactgtggtgacaactctggtcaggtgtgatttgacatgagggccggaggcggttgctgacggcaggactggagaggctgcgtgcccggcactggcagcgaggctcgtgtgtcccccaggcagatctgggcactttcccaacccaggtttatgcgtctccagggaagcctcggtgccagagtggtgggcagatctgaccatccccacagaccagaaacaaggaatttctgggattacccagtcccccttcaacccagttgatgtaaccacctcattttttacaaatacagaatctattctactcaggctatgggcctcgtcctcactcagttattgcgagtgttgctgtccgcatgctccgggccccacgtggctcctgtgctctagatcatggtgactcccccgccctgtggttggaatcgatgccacggattgcaggccaaatttcagatcgtgtttccaaacacccttgctgtgccctttaatgggattgaaagcacttttaccacatggagaaatatatttttaatttgtgatgcttttctacaaggtccactattcctgagtttaatgtgtttccaacacttaaggagactctaatgaaagctgatgaattttcttttctgtccaaacaagtaaaataaaaataaaagtct

SEQ ID NO: 13355 - protein, 161 aa, Homo sapiens
MTNTASISFLINQTRPGSRCSGSPSASPSTMPTSCTKCQTPTTWRGTAGRSLERDSSESCWAWRMPLRPTDAGGAGLGQGRGKRRRRACRSNLPIRDPDTAWCVACCLGGMHRASGGTGWTWSEDGCCPHLHSKKSMSSLEKQCRRCDEHLHPRSQGQILS

SEQ ID NO: 13356 - DNA, 1568 bp, Homo sapiens
aaaaaaaaagtaaagggaaacagacatgaacactaggtgacatggagtgttaggggcgctatggtagaagtctgcagagagtgcaatgggcgtccaaatgaggaagtgatcacttgcacaagagtgggaggcttggctggaaaggcttctctgaataggatgacatttgatctgtgttttgaagggcatcgttggcaaggtaagtaatccaattaaaggaggttgcctcagctaaagcacagtatgctcaaaggtgcggatcatttgaaaatttgagttcaggtgcagtaggggtaaggtaagtatccaacagaatttcctacaatgatggaaatgttctatattgtcactgtccaatacggtagcctctagccacatttggccagtacaactgaagaattgaatattaactttcatttaattctagctaatttaaatttaaatagtttcatcagttagtggctaccatattgaacagtgcaggtttagagataaacagaggccagttgcaggagggtcttgcatcccattgaggaggactgaattttcttctgcagggccttctgtggtctgcagaaagggcagtacacaggcagtaatattatcagctttgcctatgggagtgccccagcctggaagcagataatacagttaggagattcccataacctgcctgagtgagagcattagtaattagggaaggaaatggatgtgagacttgctgagaagggctggacaggcttagtgacaggtctgagtgtgaggggagagggagtgggggaagtgggatcaggtttgagccagctattaaatcaatgccaattcatcccataaagaatgcagagagtgggacaggtttggagagtgtaaggaacatggctgtgctgtagccaagcaggcatagggtagcaggaataggccgaggtaaacagcctagacatctcagcgggattggggtgcaagtgcacagtcctgtgtcttatatagtcacagccatgtaggcataacatagagcagctccccacctggctctcagccactagtgtttgtgtagtgtataaatgtaacactgaccctgtgaaggggctgctgaataaagccatgtctcatttacctgctgtctctccagtgttcttccagctccctgccccacatccacccactgtcctcggacctcagctggggctgcaccccaaccctgagtgtgacagagagaagatgagtgttagagatcatgatcctgaagtgctgacgagaaattcagcctgcaagcctagaggtcagctcagtggccaccttctgaagcccagggcaccattggaagctgcctagtttgaggcacggatggaagaggaaaacactgagaacaacatccctcttcctgaggaatgcatacaagggtgcttgggggtgggttggggatcccaaggcaggagagccaaagctggagtcagaggaagctcttcttctgaaacctgtaatttcaatgtcttttcctttcccttcaaaattgtaatttccttctgaaatcattctaaccctttagtaaagacattaatttaaagatg

SEQ ID NO: 13357 - DNA, 1474 bp, Homo sapiens
  CDS (1074)..(1415)
ttcatattttaaccagtttagccagagtttttagtactagtattaacttttgaattatgtttaaggtcttagactttacagcatgtttagtttattttcatttcttattagtatttttcagtacttaatagtctcttgcccccacctccaacaagaactttcctctctgttcaacatcagaaacattttccttttggcatgtgctttctagttccccaaacagtataagcaaattggaaagtttagctgtcattcttggaaggttacagatcacactagcagcctgagtaatccaagaggttttaagtatcatagcatttagtttaaagtgaaatttgctctgacagggctggcagaccaataggaaaaagaaatatttgtgcttggagaagtgcatatgtagagaccaaaagtataactgatggctggaagtgatttcagtctaaaaaaacaaatcattaagagagtgcataggggtaaaatacacagttcatattttaaagagtctcaaaatgaaccagcaactaaggttagcattacatagtaattagttgtggtgttcaggctttaactcactcagtaccagacagtatagttaaactgtcgctgaaaaaacattgctacttacatgatattctctagtttaaacctatagcagtaatttttgtaccttaaaaaaccaaggtattatgacagattatataaatgttgaaccagtaacagacaaacaattatttaaaggacgtgctaatgactcagtttattgacctaggggttatttaagccgctcagcaagttcccttaacatttggtggtatgaaatgaagcattgcttgatagtatagaactgccagtttcaagaagtccttgtacttaatggaagaaatgtaagttaaagatgactagatggcataccttcattaaaatattgccagaaaaagccaaagacctttacaggtttgagtaaatattcatttcaacttgataatcacatctgacaacttccattaggtacctattagagcattttttctgttaataactacaaataaggaaaaataaaatatattttaatggctccagttatttcttgcacgtcatttttctcttcaagaaagcctattatgagccagaggaatctaaaatttatatttttttccttgaatatgcagataaataataataaaatgggtcagacacggtggcttacgcctgtaatctcagcattttgggaggctgaggcaggcggatcacctgagttcaggagttcgagactagcctggacaacgtggcaaaaccccatctctactaaaaatacaaaaattagccaggcattgtggcacgggcctgtaatcccagctacttgggaggctaaggcaggagagtcacttgaacccaggaggtggaggttgcagtgagccaggattgcaccattgcactctagcctgggcaagaagagtgaaactccacctcg

SEQ ID NO: 13358 - protein, 114 aa, Homo sapiens
MAPVISCTSFFSSRKPIMSQRNLKFIFFSLNMQINNNKMGQTRWLTPVISAFWEAEAGGSPEFRSSRLAWTTWQNPISTKNTKISQALWHGPVIPATWEAKAGESLEPRRWRLQ

SEQ ID NO: 13359 - DNA, 1878 bp, Homo sapiens
ttctaatgcagcctgaactccaaagtccatgggcaggtctgtactgatgtagcttctgtggtaaatcctgcatccttccgttgggatggagggtcctcacgtagaggttggggcctgcaaaggggcacagggaagctgcagggacctctgtgcctaccctccatgctgagtccattctcatagccagggtgatgtgtttacagcctagatatgattcctcactaccctgttccatggttcacccccacccctggggctacgtatggcagctgaacactggaagtcctggccagggcctgtggagtcctgtggggcctggttctctctggctctgctctgctctcttgtcttcattgcacctgcagcctcgctgatctccttgccgttctgcagatgttgaatcccttcagtgtcagggctgtgtgcctgtggttctttctctctgcctgggacatcttgtctccagctgtctgtagggctctttctctcacctccttcaggtctcccactctgtgagccttctctcaccattctgtccaaaatagcagccctagctctacccctttgttgcattctgtccttatccgggatggcattcattgctacctgacaccatcctgcatagctacttgtctgttgatttgttgtctgactcctccaattagaactaaagtgctgtgcagggtgggagtggagtgtacccatcgccagcccctgggcagcacctgctcactgtctgtgctcaaatgcaagtacagagagtctcccacttagcgtggttcaacttaagatggtgtaaaagccagatacattctgtagaaactgtactttcagtacccatactgtcactctgtttttcactttcagtccagtagtcaataaattatatgagctatttaatacttaattataaaataggctttgtgttagatgacttttttcccaaccataggctaatgtaaatgttctgagcacgattaaggtaggctaggctacactacgatgtttggtaggttaggtgtattaaatgcatttttgacttatgacatttttaactcatgatgggtttattgggatgtaacctgattgtaagtcgaggagcacctgtatcactcaccatccatttggttcctatgtccacagggccagagagtgtcaggagtttccatgttttccaaattgatttggcttctgaattgcagttagcatacagtaggataaccgcaagggagctatctgaaaatccagatctgctcagttcttgaatttgggtagtgagagttcaagttgggagagtttgagaatttggggaatgagggaaacttctatttgtcaataagagagggaaggtatagtaagacaaatgtaattgcagagctcctagggccattgagtctgaggggacaggagtgggtgtcactgcagctgcccagggctccctgttgccagtttctgttatctggggtgatgacagcagcatctggattcatcactaaagggaccctctgctttagagtacatcgtttaagaaggaaaggaagtaggtaagacccgtttattccgtctcccattgttaaaatacttctgcacttaaaagcagaatctgtgggccgggtgccatggctcacgcctgtaatcccagcactttgggaggctgaggcaggtggatcacgaggtcaggagatccataccatcctgactaacacggtgaaaccccatctctactaaaaatataaaaaaattagccgggcatggtggcacgcacctgtagtcccaggtactcgggaggctgaggcaggagaatcgcttgaacccaggaggcggaggttgcaatgcaccactgcactccagcctgggtgacagagcatgactccgtct

SEQ ID NO: 13360 - DNA, 1811 bp, Homo sapiens
  CDS (854)..(1306)
ggtttccttgcccgtacttttaacttaccttattttccccaaaacggtggctggcgttgagactcccgggagcatgtccaggttccccggccttagggtcttcccaggcacttgttctgcttgtcccttgccttcccccacctgtgaggcccagcttcggcatcgtacggggtggttctgggccgggtggcgcatcagggtcccccagtgcctgtgaccaggcccgcccgccccatcttacagcaccactgccgggcgtgtgggcagatattctgtggaaagtgttcttccaagtactccaccatccccaagtttggcatcgagaaggaggtgcgcgtgtgtgagccctgctacgagcagctgaacaggtgagtccccgccccccatttgggctgcaggtggggcaggctctccaggctgggttttctgtccctcttggccatggtgcctgaggcctgcagaccccagaggaccctcacagcacagcagctggaaggtcaagggaaacccagggtggccgcatgccctcggaccctgccccacactagggcaggtgggtgtgagagacagggcgccgcggctccagggaccgaggctgccccgacaaacctgttgcttgggtttgggtttgggtttgtttgcatttcaactttcggaataaaacttacagaaaagttgcaagagtagcacagagaagctgcggggccgcggccagtgcctcagcggtgggaacctgcggggccgcggccggtgcctcggcggtcggtgttttgtcgcagagtttactctgcctcccctctcctgcgcgtgcgtgtgttcacacaggttttattttgaatttgcatgagtgcagatgtcatgccccttggcactcagatcttcgcctgtgatctctgagagggacagtgctctcatggccacagcagtcactcgggactgcgctgccacccagtgctggcttctgctctgtggtccacgttccatttctgccgtggtcccagcagcgtcgctgtgggtctggcctgggttgcgtgtgtttcgtatgtgggccgtgctccctgcttggttcccttttcctggaacgtgtcactgcctccctgtctcgctccgtggacatttctgggaggtcaggccgtggccacctggccccctgttcaggtctgaggctcccacctgcttaggttcgggaagctcaggagtgaggccatgccctcctcaggacatcccatccaagccagccatgtccggtgatgggccgctgcccggaaagttccttttccttcttgtaactgagaagaacttgccttgagccacgtcaagtcccgtccgtcgcagccactgcccacaagcgtgagtctgctgtgagccagcggctccatggcagggcatcccagcgccattcctgccttcacacacacttgctgccgtttccctgtgctgggggctgtgcaggtctgcctcggtgtggacttttctcttaggaaagagccccaggtcggccgagcacggtggctcatgcctgtaatcccagcactttgggaggctgaggcgggcagatcacgaggccaagagatcaagacaatcctggccaacatggtgaaatcccgtctctactttttaagtattttatacttaaaatttttgtattttatacaaaaattagcgggcttggtggcagatgcctgtagtcccagctactcgggaggctgaggcaggaaaatcacttgaacctgagaggcggagattgcagtgagccaagatggcgccactgcattccagcctgggcgacagagcaagactctatctcaaat

SEQ ID NO: 13361 - protein, 151 aa, Homo sapiens [sequence omitted]

SEQ ID NO: 13362 - DNA, 3422 bp, Homo sapiens
ttttttagatgaagtttcactcttgttgcccaggctagagtgcaatggcacaatctcagctcactgcaacctctgcctcccgggttccagcgattctcttgctttagcttcccaagcagctgagattacaggcatgagccaccatgcccgactaattttgtatttttggcagagacagggtttcaccatgttggccaggctgatcatgaactccttacctcagatgatccacccactcgacttcccaaagtgctgggattacaggcgtaagccactgtgcccagcccatgaaactatttaaacaacatgtgattacttggccacttttctattcaaaaatatggtttattagtcctgattatgtgcccttcttggcagacagaatgatactgtgtacttctgctgaaagaaatagaaactctcttccattttctagataagagagtcctaaaacagaatttccaaaaactccagttagtggaggtaacttaaaatcctctttaagaaggataattatctttaaaggttgattcccaccctccctccccagttacttaaggaactaagtgagtacatctccagttgcccatgaaagcataagtttgttttcctcagctgaggcaagtggtagagtatacaggataacgaagtaacatgtaaaaggcaggacgcacataaaggtgtacatggctattgtttcacctggagaaaccacatgattgggacctgaaggtttactgactgactacaggggctgattgtgaagcacgaggaaccccatgtgtgtggagactgtagggtgagagcacacaattattagcatcatttctgagtgatctcacagattttttttcttgtgtttgttttgctttttgacaactgcttctcccacgttccttgcaattctattctctcaccttcactttactatttgtattcgatggaccaggataattcaggcaaggttaccttgtaaacttgaattggccacacaccatgttgtcacccagctggctatgaagtgaataatggtactgaaagtaaacctgaagacctttctcagatctattttaagtctgagtctgaccaaccatggaaaatattcgacatgaattaatgtagagaactataaagcatttatgacagctccaagaaaaatcatctactctatgcaggagatatgtttagagacctctcagaaaaacttgcctggtttgagggtacacagtaccattttaatcttctgaaaatatctgtattcctgctctttttctgctgtcactgtcaatctgctatatttttcactatcctattaaaatattactgtctcctttatctgttcaatgtccatattttaaaaaaatcttccttgtatgagctattctgatccaaataatttctctgatatttctctatatggctcccacaacaatttcattgttgttagcatatctatttctccatacattgtaaaactgtaatccttaggtatttctaaaacataaagaggagaattaagtcagctgcagaacaatggggctgattcttctgctttttctctggaaaatctttcattgcttttggtggaaatttacctagaggttacaaccacaggatgtagcttggtctcttatttgcctttttgggaaaccaattaagattaatacaggataaaggaaaaaagcaatctattcattatataacacagttgtttgtattacttgttccctgcaaaggaaatctgttgaatgcttgcattttgaattcttttctaatagaacaaccaaaaaaggcttcttatggtgcagcaggaaaaaagatcatttttatagctttgcattcttaacatagcatttaaagagcggcatgaattagaggaaagacatggaacacacaggtagtcggtttgagatcatcggcttaaaagtatcctaggatggtaatgacccagaagtatttccagttgtctagtggtgtggtatgcaggaatgagaagtgttttctttccatttcctgttggacaggtggcaatcttagcagagccactatttggagttgataactaaagatgcaaataacgtgactatgccttctggtcatcctacgactatttggagttctccaaaaccttgtaagaggcatgtcaggcatgcagtaaaagcatctacaacttcagctgggcactggcagcataggtctcatcttggaccatacagtcccactttatagaagagagtggaagttctccaaaacaatatccacaacaaagtctgacctcactctgagggagatgggaagtgggaggaagaaggactaaccagctccctggagtaagaggaatttgctttccctgtctgcccaccaggggctatatgtgccacctttcaggttggggccaaggaagtgatgtcagtgtgacagaagggagagttagacctccagacgtcagcctccctcccatggggtacattttcaatctgagtgttgttgccttagctgtgttggtattagcttgattggttggtccgctggttatgaggtgtagggaggcagtttttgtttagtttttaggactttgcctcttcctttgtccttagcataatttctaggcagagcatccacgaagtcggttttcattgccagctcaagagcgacaatcatttacgagttcctatgttatgttaggtgccttatgtatattatcccaaatccactgcatggtttaaatacaggcactggaatataaatgaaaaaggtcattacagtcactgactttctgcaggaccttaaacatttctctttccacaagtttccccttaatcatgtgtcaaacctctcttcctgacgggaatgttgtgctataatgaatctgcataacgcttgggattctaggaggaaggaaggttccatggacatgtaagtacagcatattcccctcagtcttctaggagggcagagtgaatcccagaactggtaagattgggaatctgagcattgccactttaatcttagaatatttatcattttgacacatcctgttttttagagaggaaaacaaacacagtttctgcattggtagtgtaaagcataccttgttaggaacgtgttttgtaagacacatttgggttgtcattctagagcatgtcaaactttgtacttcaaaatatatttagtatgattgttagtggtaacatatatcaaggctttgaattaactgttttatttaattttcacaagaagcacttattttagccataggaaaaccaatctgagctacaaatagttctttaaaataagcccaggttatttagctattctagaaagtgccgacttctttcaagaagcaggcattgtaggacagctgagaattatcacatagcctaaattctagcctggcagcaagagtcacatctgagatgtcc

SEQ ID NO: 13363 - DNA, 1445 bp, Homo sapiens
  CDS (130)..(744)
ctgcacgtcgcggacaacaccttcgtcttcttcacgtcggacaacggcgctgccctcatttccgcccccgaacaaggtggcagcaacggcccctttctgtgtgggaagcagaccacgtttgaaggagggatgagggagcctgcccccgcatggtggccagggcacgtcactgcaggccaggtgagccaccagctgggcagcatcatggacctcttcaccaccagcctggcccttgcgggcctgacgccgcccagcgacagggccattgatggcctcaacctcctccccaccctcctgcagggccggctgatggacaggcctatcttctattaccgtggcgacacgctgatggcggccaccctcgggcagcacaaggctcacttctggacctggaccaactcctgggagaacttcagacagggcattgatttctgccctgggcagaacgtttcaggggtcacaactcacaatctggaagaccacacgaagctgcccctgatcttccacctgggacgggacccaggggagaggttccccctcagctttgccagcgccgagtaccaggaggccctcagcaggatcacctcggtcgtccagcagcaccaggaggccttggtccccgcgcagccccagctcaacgtgtgcaactgggcggtcatgaactgggcacctccgggctgtgaaaagttagggaagtgtctgacacctccggaatccattcccaagaagtgcctctggtcccactagcacctgcgcagactcaggccaggcctagaatctccggttggccctgcaagtgcctggaggaaggatggctctggcctcggtcctcccccaaccctgcccaagccagacagacagcacctgcagacgcagggggactgcacaattccacctgcccaggacctgaccctggcgtgtgcttggccctcctcctcgcccacggcgcctcagatttcaggaccctcctcctcgcccacggcgcctcagacctcaggaccctgccgtctcacgcctttgtgaaccccaaatatctgagaccagtctcagtttattttgccaaggttaaggatgcacctgtgacagcctcaggaggtcctgacaacaggtgcctgaggtggctggggatacagtttgcctttatacatcttagggagacacaagatcagtatgtgtatggcgtacattggttcagtcagcctcccactgaatacacgattgagtctggcccagtgaatccgcatttttatgtaaacagtaagggaacggggcaatcatataagcgtttgtctcaggggagccccagagggatgacttccagttccgtctgtcctttgtccacaaggaatttccctggacgctaattatgagggaggcgtgtagcttcttatcattgtaactatgttatttagaaataaaacgggaggcaggtttgcctaattccc

SEQ ID NO: 13364 - protein, 205 aa, Homo sapiens [sequence omitted]

SEQ ID NO: 13365 - DNA, 1325 bp, Homo sapiens
gtattcattaaaagaaaactaactggaaaacaggttagattaattcagtactattaaaaaagaattcagagctgttaatattttatcacaggataggatacttaaaatatagcattctgtgctgagatctaaggtgaagtctataaagattaaagttcccttttttctgatgttcaagttgattgttgttcagtatggcatatatgacaaaagtatatttgagtcaaatgtggctttctaaaatggatgcaacatgtagatccatacaagttggggtaggatatacccaagcgtgtatatatttgctcagcatgtgaaataataaaaataatacaaaactactcattcttcaaggtagttacagtttcaatgccactcttcctgtccccatattcattaagacagaagcttgatgcttaaacacacactggtatgaaaatgttttgtgttttctgttatattgtcagaagtgacattgatttgaaaggatgagagccttattttcttgcaacccttactgaaaggcatgatttcaggtgaaaatcttcagtgatttttaacatatgtcacatgtttgcagtaaggtcagtctttccaatcacagatagagttatgcatctatattctaccaaatattagcaaaaccaatgcaatacgtgtctgtctttgcaatataaagtaagcttggtgattatatttagtggagttacttgaaataggtcatttagtttacatacagtttaattctcatgccacaattaataaggtatcacatgactgcaaaatacactgcagcaaactttctagcatctgatattggataaggatagcttgtgctagaagttggagattaatctggtctgctgactggcagcattagagactgtatctgatggttggtgtgaggatgttgttgacagttctgaaagttagccatcaattcctgtgcagggtggagtcagacccagtgacttccttttcaatgtcagcaagagttttctcatgcctgctttggtcactttctcttggaaacttcacgcatttgacttgcagcttcttgacccgaggaatcaactgagctcccagtgctggctaccttgggcaaataaaatctgtggttgagagagttctctttgctgtgccacagtccctgtgatgtgccaaatggcaccagcatttgcagcaaagctcgttaaatctttttggaatgggcaaatattttttcaacttgagccctgctgagccaaaccaaatacttgctggcagaataaagttcaaactggcaactgttttggagaccaaagtaatgccatatatcttttttt

SEQ ID NO: 13366 - DNA, 1639 bp, Homo sapiens
  CDS (231)..(1007)
gttcgcaccgcccccgcccgcaagaaagatggcagtggcctgatccgggcccgttggcggcgtcactgacgcttcgctccggtcctcggatcccgagcgcggggaggcagaccgactgtgagctgcttgtccccatcctgcggccgtcctggggacacagagccctccgtggtgcccggggattggattggagccaggacgcggagccgcggcggagccggaggaagctgatggtcatcttttccaaggtggatgtgaacactgaccggaagatcagtgccaaggagatgcagcgctggatcatggagaagacggccgagcacttccaggaggccatggaggagagcaagacacacttccgcgccgtggaccctgacggggacggtcacgtgtcttgggacgagtataaggtgaagtttttggcgagtaaaggccatagcgagaaggaggttgccgacgccatcaggctcaacgaggaactcaaagtggacgaggaaacacaggaagtcctggagaacctgaaggaccgctggtaccaggcggacagcccccctgcagacctgctgctgacggaggaggagttcctgtcgttcctccaccccgagcacagccggggaatgctcaggttcatggtgaaggagatcgtccgggacctggaccaggacggtgacaagcagctctctgtgcccgagttcatctccctgcccgtgggcaccgtggagaaccagcagggccaggacattgacgacaactgggtgaaagacagaaaaaaggagtttgaggagctcattgactccaaccacgacggcatcgtgaccgccgaggagctggagagctacatggaccccatgaacgagtacaacgcgctgaacgaggccaagcagatgatcgccgtcgccgacgagaaccagaaccaccacctggagcccgaggaggtgctcaagtacagcgagttcttcacgggcagcaagctggtggactacgcgcgcagcgtgcacgaggagttttgagcgcccggccgcgccccgcgccgccccccacgcaccaccggggcggcctcgcgggtgactccgggctccgtggctgtcccggaccccacctcttccctgccgcccgccaccggccgaccgaccgcggctgccccagttgatgagcggcgtgtcccctctgcagcgcgcaccccggcggggctttggctgtgacgcggtcggggcgcggggctgggctgtggccccgcggcgccgcctcctccctggtccctcgaaatcgtggcatctcacttctgagaacgaaatctcgcttcagtcactctgccgaaggcgctgacggcatcgcggccggaacctctgggcccggcccctcccagggccgccgctccgtgggaaaaaacagctcctccatttccttgaaaactgaacgattattaaaaatagattaaacttcgctggaaatgagtagccaacagggaggagaatgagatcctgcccccagaccacctgaacggggtgaagctggagatggacgggcacctcaatcgcggcttccacccaggtcccgcagctgccgctgagaaaatgcaaatatttgttgtgacaagaatcacatacatttactttaaatatagttgccttttttggtc

SEQ ID NO: 13367 - protein, 259 aa, Homo sapiens
MVIFSKVDVNTDRKISAKEMQRWIMEKTAEHFQEAMEESKTHFRAVDPDGDGHVSWDEYKVKFLASKGHSEKEVADAIRLNEELKVDEETQEVLENLKDRWYQADSPPADLLLTEEEFLSFLHPEHSRGMLRFMVKEIVRDLDQDGDKQLSVPEFISLPVGTVENQQGQDIDDNWVKDRKKEFEELIDSNHDGIVTAEELESYMDPMNEYNALNEAKQMIAVADENQNHHLEPEEVLKYSEFFTGSKLVDYARSVHEEF

SEQ ID NO: 13368 - DNA, 2423 bp, Homo sapiens
gttcagtattcaaagaatgtcttaagattatgataattaaagaagtcccaggacgagacaaaatgaatcaaagattttgtatgcaagtccacaaagtctgtcagacatattgtaaataatttaccattgattttattttcaacaatgttaatgtattgacatttagcatatatctgttagatagatattctatcacaatgttttattccttgcaccagccctttactattttctaacaaaaaaaaaaaaacacaatttcagggcataaacaagaagtgtttatttttccgtagtacatctttgggttgactagagattggctgttctaagatgtgctcatgcaggcttgactctaaactatgcatttagagtcattttgttctggtctggtctacacgtaggttattcttttgaaagcagtactctgtcttaagcatgttcttctcttagtggagtttggagatgctaatatcgacaggtggaggcagaatgctccttaaagtctaaactagaattgccacactgtcttcctaaggttcataagccaaaggaaatctcatggcaatttccaacattagtgggacaagagattatactactcccaaggaagtggaggtggggaaaggaatgattatttctgtatcataatctaccatagtccttaagtgactgcctcttgctacttcccaatgttttactaatcacattgacttttaaaaaatagattccctaggaattcaagaaaaatacttattttctaaataaatcacagcaagacagacacaattgtctcactacccccaatatcctaacacactaacaaatacgtgtataatcatacacacacaaacactacaacatacacccctctatgatgttattaatgttatacagataaatagatgtaatatttctgtggattgtgctgcggctgtcctaaatcattgcacagaattataggtaactgcaattcatagggcttataatgttaatcattctaggaagtaattagctgaatgccttctgtacatttgctaggctaccagctcagcgacatgtattccatctgaaggacactcttcttgaaatacattatgctcccagtgtggttgtaatattatcatcttattatcaccaattcccttgcatggtggctttgctgagcagctgtttcacagacaagccaatttcttttaagtattgctctatcagactctgaaaccagttctaccagaagggttcttggtaatgaatgttaatgagcagacaagtatcctttctctgacagaggctcactaatcctttgagtaagtatgggtgaattacaggagaaattttatttaagttaaattgatctgctactaagtagagaaaacttattttcttattttaatgaaaatcaagaaaaaatatttaatggggatgtaaattacagctccctggaaacatttttgtcttctgactggagaacacagtagctcagtagactggttcaactgcatagtgtgcttaacactagcaaactcatgatctccagtgaggcctgatcttcagtgggacagtgggaaatggagtagaaaccactcactctctctgggatttggtaccagcagattctttatgttccttagtgataagtaatagggataaaaaattattctttcttcttccactgagccagtgtaagagttcctttttttttccaaaacaaataagatagtaaagccataagaacagcacttgtatgcttttgtattctaagaatatgagaaaaataatttcagtgaacctttatctgaaaggatataaccatgtcctgatggaatactgcgatgggcaggtagaagggaatgagatgggccaggcgcagtggcttacgcctgtaatcccagcactttaggaggccgaggctggcagatcagaaggccaggagttcaagaccagcctggcccgcatggtgaaaccccgtctctactaaaaaaaatacaaaaaattagctgggcacgggggcatgcgcctgtaatcccagctactcgggaggctgaggcaggagaatcgcttgtacccaggaggcagaggttgcagtgagctgagattgtgccattgcactccagcctgggtgacaaagcgagactccatctcaaaaaaaaaaaaaaaaaaaaaggagaggaatgagatgggcagaaagatgatcattgttgaagctggttgatgagtctttagggagttcatagactattctgggttgtgtatagtttctgaatttccataataaagagattaaaagagagagagaaagagagttggccagcacagtgcctcgtgcctgtaatcccacactttgggatgctgaggtgggcggatcacctgaggtcaggagtttgagaccagcctggacaacatggtaaaactccgtctctact

SEQ ID NO: 13369 - DNA, 1540 bp, Homo sapiens
aaggaaatgcagattaaaaccacatttctcacccatcagattgtcaggggcctaagagtttagtaacaaactctgtgatggggctataaggaaatggtgatacttagatatttctggcaggagattaaattgttataatccgggtgggcatggtggcttatgcctgtaatcccagcactttgggaggccgaagtgtgcagatcacctgaggtcatgagttcgagaccagcctggccaacatggtgaaactctatctctactaaaaatacaaaaattagacaggcgtggtggtgcactcctctaatcccagctactcgggaggctgagacagaagaatcgcttgaacctgggagatgaaggttgcagtgagctgagatcattccactgcactccagcctgggcgacagcgagactctgtctcaaaaaaaaaaggacaaaggaaaggaggggggaggggggaggtgaggggaggaaattctagaaggaaacgtaaaaaattaaaaataatgtttacttgtctaccatagagacgaggatgggagagagacttcatggtataactttgtatacttcctggtttttgaaacgtgtgactgtgttacctattcagaaagttaaataaaatagaacatagatatgagatatagttctgctattcagtagttgagtgaacttgggcaagacacttaagctctctgagtcatagttttctcatttatagaagggctgtaatagtagtatcaagctcacaggactgttctaaggattaatgaaggacaggtggaacagaaagtgctgagcagagtgccagcacttagtaaatactcagttgaatggtcatgacttgtgttactgaacttaatcttggtaataaatgagtatgttcttgaaaggacaccagccttggctaacattcctttgcagaaccagacgtcctgggtcctctccagcatggcagccctctactggagggtgaaaggccaaggaaagaaggcaatcgactgcctccgccaggctctgcactatgcgccacaccagatgaaggtgagtgggactcagaaggtgggaacttctgcccctttgtcctttccattccccatggtttattctgccctttgaaccagcctccctcatgctcagccagtgaggacatattccaaggagagaatggggcaggagaccttctgactgggcttgtgccccagcaagcctatgaactatccctgctgccttcccagcttcagcaggttggaacgtggggaaggccttccagatcactgtaagacagtactgcatttagtcccctttctgctgtgttcagagccacccaacatacagcaaatgcactggcctaagtgggctgacacatagaagtcaatctgaatttagcttgtcatcaggggcctggtgacctcttagacttgttttgcttatcctcttggcttgagcttgcttccaagcacagagatagaagcaaatttccatttattcatgtacattggccagttcctggtccttgtctgacttctactttttccac

SEQ ID NO: 13370 - DNA, 1479 bp, Homo sapiens
gggaccccaggcttcctctgagacatccaccagcggtgatgggttgggaccaatctcccccactcctctccaccctagcagtctgctaccgctgccacggccccccctgctgccccggctggggagggtggtccccctgcaccccctccaaacctcaccagtaacaggagactgcagcagacccaggcccaggtggatgaggtggtggacatcatgagggtgaacgtggacaaggtcctggagcgagaccagaagctgtcggagctggacgaccgtgcagatgcactccaggcgggggcctcccagtttgaaacaagcgcagccaagctcaagcgcaaatactggtggaaaaacctcaagatgatgatcatcttgggagtgatttgcgccatcatcctcatcatcatcataggtgagtagggtgagaatggccggggccctttccctggagaggtttccccagtggattctaggttttgaaggtcattaatctagtttttactcttcagccaaaaacacatatagctgctaatggcaattctgattcatctagagccaaaaactttgatgttatttagcctgcattttgcctagttcttggcagtcttgttaacatttggaaataggaaagctggtgtatccattgaggaccctttaggcctaagagcccagtctgagaaccctggaattgaggagtgggagaaaggaaaggaccaggggcttgagacatgaccaggaagccaaccaccccattatttgagagcttgcggtctcagaggctcagaggattagggtctgtggcttcaaggccataccatggagcggaagggacctcagaacctacctgtctagccccttgctttgtagatggaaaaactgagtccaagagagggtgtcagccagctggggagtggggaggattggagcagggccaggcctgacacactgctttcttgttctctctctttctctcccctctccctcttcctcatcttcttcccctctctccacagtttacttcagcacttaaatccccgaggagtctgccctgcctagagaagggcctctcccccaaccctcagccgttcctccacctctcagccatatctttcagcccccactcccctggatccgtgtgtgtgtgtgtccgtgtgtgtgtccccctgtaaatagccagctgttatttatacatatataatattatatatatttggtctgtttgtagttttattactagatgatttttccggttgtccttaacaccccttcctgaggttcccttcacccctctctcttgccttccttccctttccctttcttcctgactagccccaagtcccttcatttgcatctgctatgcaatagtccctctcctttccttcttcttccctcagatttagctgatccttcctcccaccctggccttcctttcctctttcctcctcactctccccgtcatgctccctctgccccgccctc

SEQ ID NO: 13371 - DNA, 1320 bp, Homo sapiens
atccaaatgcattagtcttagatgaacacacctggaatctcacttttatgagaatttcatagactatactcttgaattccagttgtacatttttgcttgcaaacacaggcatttcagagtataatgagaggaggctggtgctcataaagaagactgactttacagtaaaccacctcccaggagaactgaagatggggcttgagctgaggtggggtctcttctccactatcccgagcagcacctgggccccaggtcttcacctagacagtcaaggacctcagcctaaacagcatccagctcttagaagtcctgtgaaattgggccaggcactgtgggtcacgcctgtaatcccagcatttagaaggaggctgcggcaggtggatcacttgaggccaggagttcgagaccagcctggccaacatggcgaaaccccgtctctactaaaaatacaaaaattagctgggtgtgatggtgcatgcccgtaatcccagctattgaggagactgaggcaggagaattgcttgaacccgggaggtggaggtagcagtgagccaagatggcgccactgcactccagcctgggcgacagagcgagaccccatctcaaaaaaaagaaaagaaaaaagaaaagaaaaaaaaagatttcttgtaaaattgaaaacaaaattcagactttggctacttgaatcttgtttaatgtaataggaaagctgataatttaaaggtaacaagttgtggaatgtcttctttaagattagcatgcagtctcattgtacctgttacctgttctttttttttttatattgaatgtgttcaaagctcatcccacctgtatgcagagtgtgttagaaactgtgctggatgtggttgttctctttctagaaggtagggctcccatgacagccatataggttctcttggttgcataagtaaacataaataaaccagtaaacaaaatgcctgctttctgtgtgaatacgttgtcatttgatgtcatggtgttaagtatgaaggtgctataaagaaaaggggaggccaggtgcggtggctcacccctgtaatcccagcactttgggaggccaaggtgggtggatcacgaggtcgggagatcgagaccatcctggctaatacggtgaaaccccttctctactaaaaatagaaagaaaaaaaatttagccaggcgcagtggtgggcgcctgtagtcccagctactcgggaggctgaggcaggagaatggcgtgaacccgggaggcggagcttgcagtgagccgcgatagcgccactgcagtccggcctgggccaaagagtgagactctgtctc

SEQ ID NO: 13372 - DNA, 1818 bp, Homo sapiens
  CDS (51)..(1724)
ccgcgctgtccgccgccgctgcctgagtcgactctgcgccgcccgccgcgatggaggccgccgcccagttcttcgtcgagagcccggacgtggtctacggccccgaggccatcgaggcgcaatacgagtaccggacgacgcgcgtcagccgcgagggtggcgttctcaaggtgcaccccacgtccacgcgcttcaccttccggaccgcccggcaggtgccccggctcggggtcatgcttgtcggctggggcgggaacaacggctccacactcaccgccgcggtgctggccaatcgactgcgtttgtcctggcccacgcgcagcggccgcaaggaggccaactactacggctcgctgactcaggcgggcaccgtgagcctgggcctggacgccgagggccaggaggtgttcgtacccttcagcgcggtgctgcccatggtggcgcccaacgacctcgtgttcgatggctgggacatctcgtcgctgaacctggccgaggcgatgcggcgcgcgaaggtgctggactgggggctgcaggagcaactgtggccgcacatggaggccctgcggccccggccttctgtttacatccccgaattcatcgcggccaaccagagcgcgcgcgcggacaacctcatcccaggctcgcgtgcgcagcagctggagcagatccgcagggacatccgagacttccggtctagcgcggggctggacaaagtcatagtgctgtggacggcgaacacggagcgcttctgtgaggtgattccaggcctcaacgacacagccgagaacctgctgcgcaccattgagctcggtctggaggtgtcgccctccacgctcttcgccgtggccagcatcctggagggctgtgccttcctcaatgggtctccgcagaacaccctggtgcccggagctcttgagctcgcgtggcagcaccgggtttttgtgggcggagatgacttcaagtcaggccagaccaaagtcaagtccgtgcttgtggacttcctcattggctccggcctcaagaccatgtccatcgtgagttacaaccacctgggcaacaacgatggggagaacctatcggcgccattgcagttccgctctaaggaggtgtccaagagcaacgtggtggacgacatggtgcagagcaacccagtgctctatacgcccggcgaagagcctgaccactgcgtggtcatcaagtatgtgccgtacgtgggtgacagcaagcgcgcgctggatgagtatacctcggagctgatgctgggcggaaccaacacactggtgctgcacaacacgtgtgaggactcgctgctggccgcacccatcatgctggacctagcgctgctgaccgagctgtgccagcgcgtgagcttctgcactgacatggaccccgagccgcagaccttccaccccgtgctgtccctgctcagcttcctcttcaaggcgccactagtgccgcccggcagcccggtggtcaatgcgcttttccgccagcgcagctgcatcgagaacatcctcagggcctgcgtggggctcccgccacagaaccacatgctcctggaacacaaaatggagcgcccagggcccagcctcaagcgagttggacccgtggctgccacctaccctatgttgaacaagaaaggaccggtacccgctgccaccaatggctgcaccggtgatgccaatgggcatctgcaagaggagcccccaatgcccaccacctgaggccccggtcacacagtttctcggctcttcctccccgctgccccccacgaccctaccttgaaggcccccacaaataaaggcgctgccactc

SEQ ID NO: 13373 - protein, 558 aa, Homo sapiens
MEAAAQFFVESPDVVYGPEAIEAQYEYRTTRVSREGGVLKVHPTSTRFTFRTARQVPRLGVMLVGWGGNNGSTLTAAVLANRLRLSWPTRSGRKEANYYGSLTQAGTVSLGLDAEGQEVFVPFSAVLPMVAPNDLVFDGWDISSLNLAEAMRRAKVLDWGLQEQLWPHMEALRPRPSVYIPEFIAANQSARADNLIPGSRAQQLEQIRRDIRDFRSSAGLDKVIVLWTANTERFCEVIPGLNDTAENLLRTIELGLEVSPSTLFAVASILEGCAFLNGSPQNTLVPGALELAWQHRVFVGGDDFKSGQTKVKSVLVDFLIGSGLKTMSIVSYNHLGNNDGENLSAPLQFRSKEVSKSNVVDDMVQSNPVLYTPGEEPDHCVVIKYVPYVGDSKRALDEYTSELMLGGTNTLVLHNTCEDSLLAAPIMLDLALLTELCQRVSFCTDMDPEPQTFHPVLSLLSFLFKAPLVPPGSPVVNALFRQRSCIENILRACVGLPPQNHMLLEHKMERPGPSLKRVGPVAATYPMLNKKGPVPAATNGCTGDANGHLQEEPPMPTT

SEQ ID NO: 13374 - DNA, 1476 bp, Homo sapiens
aacgtaatgaaacctcgtctctacaataagtagaaaaattagccatgtgtggtagtgcatgcctgtggtcccaggtacttgggaggctgaggcagcaggatcacttggacctgaggggtcgaggctgcagtcagccctgattgctgccactgcactccagtctgggcaacagagaagactgtctcaaaacaaaaacaacattactcaggaatgaaggaaatggtggaattgagaagacgggactaaagccaattaatggggtatggcaatagtctagttggaagaggttaaggtcatgcagtaggacataatagggctgaagaagtatggatggaattgacaaacttttaaagggtagaattcacaagatttgatgaacaaatgcatgtaagagaacatatacaatgcattgtaagggacttactgctataattaaccattgtatgtttccaaaatgtatgtgtataaatagtcaacagtgataacaggatccaatcatggacaaccagtttgattggatataaattttgaaagaaagtgtgtgtgtgtttgtgtgtgtgtatgtgtgaatgtgtctggggaagttaagaaaaattttgagtttgccctattgatggcagccagctgcggcagggaggtgtgactggggctgcacactccatggagcctgtgggagccccgccccttctgagttgaggcaggagcccctggtgccattgtggctgccctcccaggtgcaggacctgggcatctctgcagcctgcacccttgggggaccagcaagacaccctactgcaatccctgcaggctcaggagtgtctgctcccaccgcctggactctctctactcccggggcctgctccaatctcagagcgggcttggggccaagaatggcaatgggaggcagattgattccagggtagaagtgggtgagtccccagtaagaccccaccttcaggtcagggagggcctgaagacaggggtccaggctgccagtcctgcagactggagtagggactcgtggtgcatcttctggcctgcccatggaccaatcggcatgtacttcctcccctcggaggtccataaaaaccctgggttcagccagagtagggcagaggactgccagaggaccaagagggcagagacctatgggtcaacaagcctaagagaggagctaccctctctgctgatagttggagatgatggaacagccagttgcagaaaggacctaccctccctgctgacagctgcagagacaacctgtgggcagagaagagccaccctctccagggcctcctctcttctgagagctgcagacattaggacgatcagttgcagagaggagccatcctctccagggcctcctctctactgagaactgaatacctgatggacaacctgcctacagagaggaaatacccactggaggtctctgagctgttgtaacactcaataaagttcatctttgtcttgttc

SEQ ID NO: 13375 - DNA, 1737 bp, Homo sapiens
gatacccttaagggagaactctggagcactaactgtgtgttccctacagatgcgtccaccacctcccccgccggctaaagccccggatcctggccacccagatcccctcacctgaaggccagggaagccttgacccccagtgatgctgctgtccctatcttcaagctgtcagaccacaccatcaatgatccagagcaacacagccaaaagctggaatcgcccttatttccaccctcacctccaagggtggaaacttgccccttcccatttctagagctggaacccactcctttttttcccattgttctatcatctctaggaccggaactaccttctcttctgtcatgaccctatctagggtggcgaaatgcctgaaatctctggggctggaaaccatccatcaaggtctctagtagttctggcccacctctttccccaccctggctccatgacccaccccactctggatgccagggtcactggggttgggctggggagaggaacaggccttgggaatcaggagctggagccaggatgcgaagcagctgtaatggtctgagcggatttattgacaatgaataaagggcacgaaggccaggccagggcctgggcctcttgtgctaagagggcagggggcctacggtgctattgctttaggggcccaccacgggcaggggcctgctcccagctgccacgctctatcatatggagcgaggtgttggggaaggcggggcaggcagcctgttgcaggcaggggaaggagaagagactgaggggctgtgacctctcctgaggcccccagcctgagactgtgcaactccaggtggaagtagagctggtccctcagctggggggcagtgctgtccagtggaggggagggctttcacgcccacccaccccctggccctgccagctggtagtccatcagcacaatgaaggagacttggagaagaggaagaataacactgttgcttcctgttcaagctgtgtccagcttttcccctggggctccaggaccttccctacctccaccaccaaaccaagggatttatagcaaaggctaagcctgcagtttactcggggggttcagggagccgaaaggcttaaatagtttaagtaggtgatgggaagatgagattacctcatttagggctcaggcagactcacctcacatactccctgctccctgtggtagagacatcctgagtttggtggctacttccctctggcctaaggtaggggaggccttctcagattgtggggcacattgtgtagcctgacttctgccggagctcccagtccaggaggaaagagccaaggcccacttttgggatcaggtgcctgatcactgggccccctacctcagcccccctttccctggagcacctgccccacctgcccacagagaacacagtggtctcccctgtccgggggcggctttttccttccttggagcgtccctgacggacaagtggaggcctcttgctgcggctgcaatggaggcaaggggctgcagagcccaggtgcactgtgtgatgatgggagggggctccgtcctgcaggctggaggtggcatccacactggacagcagggaggaggggagtgagggtaacatttccatttcccttcatgttttgtttcttacgttctttcagcatgctccttaaaaccccagaagccccaatttccccaagccccattttttcttgtctttatctaataaactcaatattaag

SEQ ID NO: 13376 - DNA, 2142 bp, Homo sapiens
  CDS (4)..(657)
aagatgaacaagagccgccagcgcgtgcgctacgactcctccaaccaggtcaagggcaagcccgacctgaacacggcgctgcccgtgcgccagacggcgtccatcttcaagcagccggtgaccaagattaccaaccaccccagcaacaaggtcaagagcgacccgcagaaggcggtggaccagccgcgccagctcttctgggagaagaagctgagcggcctgaacgccttcgacattgctgaggagctggtcaagaccatggacctccccaagggcctgcagggggtgggacctggctgcacggatgagacgctgctgtcggccatcgccagcgccctgcacactagcaccatgcccatcacgggacagctctcggccgccgtggagaagaaccccggcgtatggctcaacaccacgcagcccctgtgcaaagccttcatggtgaccgacgaggacatcaggaagcaggaagagctggtgcagcaggtgcggaagcggctggaggaggcgctgatggccgacatgctggcgcacgtggaggagctggcccgtgacggggaggcgccgctggacaaggcctgcgctgaggacgacgacgaggaagacgaggaggaggaggaggaggagcccgacccggacccggagatggagcacgtctagggcagaggccctgccgagagcccgtgctgcctgctggagccgcctgcagacgcggtcctcggccccacgtgaaccaggctcggcgaagcccagccttggagacacccaggaggaaggccgtgctcctggctccctcctcggcccgtccccacttcccggggcctcggggcacacagctggggctgcccccacccgaaagaccctccacgctcgtcctctacagagtccggcttcgggaagggccgggtgctcctgggccctgcctggctccctacgacctttgggctcgaggccagctcctccccatgcccgctgtcccagctccttgagactggagagcagccagcaggtgcccggcagctcggcgccacggcttgctgacagctgggagggtttctcggtctggaggcgtagttttgaaactcacatcacccactgtgcagcgtgaggacgggactctggtctgctgtggggggcatgcaggacggcgccactctctgccctgccatgcggctggtggtgccacagagcctcaccgtgcctgagtggcgtgcccaggaggccgctctccttcagtaaatgtaacacagtcgaggcacgtcatcgggcagccttccctgtgtgccaacgccagccttcgcttctgaaaaccagactccagccgctgccagtcgggacttggtcgcccggcgctgccagaatgctccactgccagccggcccccctgtctcggtttcccttctgtttagtggcgacacaggcacccagctttggggtggtgctgacgctcccaggggtgccaggagccactgggacagggtgaggctcccagacgctcctcgaggtgcccagctctccagggagcttctggcccaaggccgtctgagggatctgctccttaaccccccagtgccttggcgagggcaggttccaagccacagacgcctgccccgagtggactctgcggccagtccctggtgccctcctggccctgctgcccagtgagggctcctacgggtgggttcattggcctgggcccagcaagcccccacctgcattgaccttaggcccatagagagggcctgtcccggtgctgccccagccaggatctggtcgctgccccagggggactgatgggcagagtcgcccctgtggctggactgtggccatccctgatggggcctgaccgcgggagctgaggaagcgccgctccaccgtctgccctccaaggacccgcatggaggcagtgggctggcagcttcctgctgctccctgtcagagtcaaagcacaaatcctcaggacgggctcaagggccagggcagccgagggaagctccaggtggggaccacgtcttcctgaggttggtgcccactggctgggaccctttgcagtggggtggcctcccctctgtctgcctggtggagtgagccgtgggcgtggggacgtgactgaataaagccaccatgggtggatgtgcttgg

SEQ ID NO: 13377 - protein, 218 aa, Homo sapiens
MNKSRQRVRYDSSNQVKGKPDLNTALPVRQTASIFKQPVTKITNHPSNKVKSDPQKAVDQPRQLFWEKKLSGLNAFDIAEELVKTMDLPKGLQGVGPGCTDETLLSAIASALHTSTMPITGQLSAAVEKNPGVWLNTTQPLCKAFMVTDEDIRKQEELVQQVRKRLEEALMADMLAHVEELARDGEAPLDKACAEDDDEEDEEEEEEEPDPDPEMEHV

SEQ ID NO: 13378 - DNA, 1342 bp, Homo sapiens
attaagatgtggccttacatatggcattccttgtgttcgtaatgtgagatttttgatttagataaatcaagattcaggattaaagtttcattgtaagttgaaatagaaaatgtattaaaatgtctaggcttctgggaggaagttcttatactcttctttcttggcattagaaagaagcaatatgaatttttgtgaatattctaaatattcaggcaacactgttcagattgatttaggtttgtcttaaccaatgttctttttttagaatttcaggtagtggcattcactgagtatgcagctactatggtttttgtatgggacgtataaatacttgattatatacgacagattttaatgtctttaaagacttcctgctgtattaacatattgtaatggagtcttttaaatactaggttgaatttaattgaagtcacacacatcttgaagtggtaactgcatagtaaatactaccaagagtttttttcacgtgggagtatcctaaaactctgccatgggtgtaaatgttttacattaatttcataattggacagaccctgcatttagcgaaaacattttgttttgaaagtgtgttctttttgtcgcactgttactgcgtaacacttctcaacattctgtaagttaaattattttaaaataactatggtgaattcatgtttattttttttactttgaaaattgtagtactcaggtggtatttaatgggaaaggatcctttgggtataaatcataatgtattttaaggaatgcatctataacattgataactttagccttaaaaaaaaggtctattattccttcctctgcatcccatggtatattagcaaagtagtttacagccctgtacagccttacaaagttgttttacaatttttaatggaaagcccttaacaacaacaacaaaaaattgtatcattttaccaatatccacgaattactgatcacagtttgtaaataatttgtttaatatcagaaggccaaagaaagtcttaaaattttagctattgactctatggtgacttcacaataagatttctgtgcaaaaaggtaaggtgataattgatctaatagactttttttttttttttttttttgctgtccatgagaattagacttcatattagcttcaattaaaaagctcattccattttattaaaatgtttgtaattgcaattttgtgtttaatgtttactttgtctttcctttctttagcatttaggtgactgttcggcagtttgatatatggccattgtcggccttaaactgcactagtaacaagcatggtatttatcttgtattgaaaataaaacaaacttttgataag

SEQ ID NO: 13379 - DNA, 1860 bp, Homo sapiens
  CDS (364)..(1338)
agcgcgacccgacagcctgggaaacggacagccgtgtcagaagggcaggtgccagtgggcaggaggccggagagaaagccgcagcttccttccacctcgcgccgggcccgcggccgcgcacggggaccgctccgagttcctcccggcgggaaccccccgccccagaactttggtctcgtcccacccacccccgcccgcgccatggtctcgccctagggagccatcgataactctacgctcggcctcgatcgactcgctccggctcccctcgccgtcctggacacggcggagtgcggagccgcccgtaagatgctctgacctttgaccctgccgttcagctctagggcccgtgcaggccacaccatgaacacctccccaggcacggtgggcagtgacccggtcatcctggccactgcaggctacgaccacaccgtgcgcttctggcaggcccacagcggcatctgcacccggacggtgcagcaccaggactccgtgaatgccttggaggtcacaccggaccgcagcatgattgctgctgcaggttaccagcacatccgcatgtatgatctcaactccaataaccctaaccccatcatcagctacgacggcgtcaacaagaacatcgcgtctgtgggcttccacgaagacggccgctggatgtacacgggcggcgaggactgcacagccaggatctgggacctcaggtcccggaacctgcagtgccagcggatcttccaggtgaacgcacccattaactgcgtgtgcctgcacccgaaccaggcagagctcatcgtgggtgaccagagcggggctatccacatctgggacttgaaaacagaccacaacgagcagctgatccctgagcccgaggtctccatcacgtccgcccacatcgatcccgacgccagctacatggcagctgtcaatagcaccggaaactgctatgtctggaatctgacggggggcattggtgacgaggtgacccagctcatccccaagactaagatccctgcccacacgcgctacgccctgcagtgtcgcttcagccccgactccacgctcctcgccacctgctcggctgatcagacgtgcaagatctggaggacgtccaacttctccctgatgacggagctgagcatcaagagcggcaaccccggggagtcctcccgcggctggatgtggggctgcgccttctcgggggactcccagtacatcgtcactgcttcctcggacaacctggcccggctctggtgtgtggagactggagagatcaagagagagtatggcggccaccagaaggctgttgtctgcctggccttcaatgacagtgtgctgggctagcctgtgacccctcgggactgcctggtgcaggtggtggcagctggagggacccatgcagcacccaggtcagagcagaccctcccctgccggcctgcgccagctggacctgatggccccctgtggcgccttgacctgctgggccaggctgccctgggactctcagcccccagttgcttatccagatgtgacagagctcgacccaagccaggctgcacactcctggactgggctagcctgcactgcctgggaaagtcggccgagggcccaaagctgctgaggggtctgaggctggtgcccacccccaagctagtgtgttctctgcccctccctgcccgcgtttcagggcctcggtccatagagaacaccaccaccatggccaggtggaagggtttattagtccctgccagcagctgtcctccctggtgcaggtggcctggccagcccactggattggggacgggccaggctgggccaggtcgggggctcagtctgggaggtaataaaagcagaccgacacgc

SEQ ID NO: 13380 - protein, 325 aa, Homo sapiens
MNTSPGTVGSDPVILATAGYDHTVRFWQAHSGICTRTVQHQDSVNALEVTPDRSMIAAAGYQHIRMYDLNSNNPNPIISYDGVNKNIASVGFHEDGRWMYTGGEDCTARIWDLRSRNLQCQRIFQVNAPINCVCLHPNQAELIVGDQSGAIHIWDLKTDHNEQLIPEPEVSITSAHIDPDASYMAAVNSTGNCYVWNLTGGIGDEVTQLIPKTKIPAHTRYALQCRFSPDSTLLATCSADQTCKIWRTSNFSLMTELSIKSGNPGESSRGWMWGCAFSGDSQYIVTASSDNLARLWCVETGEIKREYGGHQKAVVCLAFNDSVLG

SEQ ID NO: 13381 - DNA, 3288 bp, Homo sapiens
  CDS (41)..(2305)
acaaaaatacctggaaaaaatatgggttattactgaggaaatgtacgagtattccaaggtccgctcatggggcaaacagcttctccataaccaccaagccactaatatgatagcattactcacaggggccttggtgactggagtagataaaggatctaaagcaaatatatggaaacaggctgtagtggatgtcatggaaaagacaatgtttctattgagtcatattgttgatggttctttggatgaaggtgtggcctatggaagctacacagctaaatccgtcacacagtatgtttttctggcccagcgccattttaatatcaacaacttggataataactggttaaagatgcacttttggttctattatgccacccttttacctggcttccaaagaactgtgggtatagcagattccaattataattggttttatggtccagaaagccagctagttttcttggataagttcatcttaaagaatggagctggaaattggttagctcagcaaattagaaagcaccgacctaaagatggaccgatggttccttcaactgcccaaaggtggagtactcttcacactgaatacatctggtatgatccccagctcacaccacagccacctgctgattatggtactgcaaaaatacacacattccctaactggggtgtggttacttatggggctgggttgccaaacacacagaccaacacctttgtgtcttttaaatctgggaagctggggggacgagctgtgtatgacatagttcattttcagccatattcctggattgacgggtggagaagttttaacccaggacatgagcatccagatcagaactcatttacttttgcccccaatggacaagtatttgtttctgaagctctctatggacccaagttgagccaccttaacaatgtattggtgtttgctccatcaccctcaggccagtgtaataagccctgggaaggtcaactgggagaatgtgcgcagtggcttaagtggactggcgaggaggttggtgatgcagctggggaaataatcactgcctctcaacatggggaaatggtatttgtgagtggggaagccgtgtctgcttattcttcagcaatgagactgaaaagtgtatatcgtgctttgcttctcttaaattcccaaactctgctagttgttgatcatattgagaggcaagaagattccccaataaattctgtcagtgccttctttcataatttggatattgattttaaatatatcccatataagtttatgaataggtataatggtgccatgatggatgtgtgggatgcacattacaaaatgttttggtttgatcatcatggcaatagtcccatggccagtatacaggaagcagagcaagctgctgaatttaaaaaacgatggactcaatttgttaatgttacttttcagatggaatccacaatcacaagaattgcatatgtcttttatgggccatatatcaatgtctccagctgcagatttattgatagttccaatcctggacttcagatttctctcaatgtcaataatactgaacatgttgtttctattgtaactgattaccataacctgaagacaagattcaattatctgggattcggtggctttgccagtgtggctgatcaaggccaaataacccgatttggtttgggcactcaagcaatagtaaagcctgtaagacatgataggattattttcccctttggatttaaatttaatatagcagttggattaattttgtgcattagcttggtgattttaactttccaatggcgtttttacctttcttttagaaaactaatgcgatggatattaatacttgttattgccttgtggtttattgagcttttggatgtgtggagcacttgtagtcagcccatttgtgcaaaatggacaaggacagaggctgagggaagcaagaagtctttgtcttctgaagggcaccacatggatcttcctgatgttgtcattacctcacttcctggttcaggagctgaaattctcaaacaaccttttttcaacagtagtgattttctctacatcagggttcctacagcctacattgatattcctgaaactgagttggaaatcgactcatttgtagatgcttgtgaatggaaggtgtcagatatccgcagtgggcattttcgtttactccgaggctggttgcagtctttagtccaggacacaaaattacatttgcaaaacatccatctgcatgaacccaataggggtaaactggcccaatattttgcaatgaataaggacaaaaaaaagaaaatttaaaaggagagagtctttgccagaacaaagaagtcaaatgaaaggcgcctttgatagagatgctgaatatattagggctttgaggagacacctggtttactatccaagtgcacgtcctgtgctcagtttaagcagtggaagctggagttaaagcttcatttttttcaggaagttttaggagcttcgatgagggcattgtacatagtaagagaccctcgggcatggatttattcaatgttgtacaatagtaaaccaagtctttattctttgaagaatgtaccagagcatttagcaaaattgtttaaaatagagggaggtaaaggcaaatgtaacttaaattcgggttatgctttcgagtatgaaccattgaggaaagaattatcaaaatccaaatcaaatgcagtgtccctcttgtctcacttgtggctagcaaatacagcagcagccttgagaataaatacagatttgctgcctactagctaccagctggtcaagtttgaagatattgtgcattttcctcagaaaactactgaaaggatttttgcctttcttggaattcctttgtctcctgctagtttaaaccaaatattgtttgccacctctacaaaccttttttaccttccctatgaaggggaaatatcaccaactaatactaatgtttggaaacagaacttgcatagagtacaatagacacttcaaacaatagattctaacattctctgaaacacttgagatgtttgagctaccatttatatgggttatttatatttagtctaagtaacacatacatgtttaattgattctgttttcatggatagattcaactaagtcttccaagcaattaattttttgttcgtcgtcgtttttccttcatacgttatctagttatgcagcactggaaacagactgaagatcataaaccagttttatcagacctatgtgtaataagactcctgttaatacaaaaataaaaagctaaaagc

SEQ ID NO: 13382 - protein, 755 aa, Homo sapiens
MYEYSKVRSWGKQLLHNHQATNMIALLTGALVTGVDKGSKANIWKQAVVDVMEKTMFLLSHIVDGSLDEGVAYGSYTAKSVTQYVFLAQRHFNINNLDNNWLKMHFWFYYATLLPGFQRTVGIADSNYNWFYGPESQLVFLDKFILKNGAGNWLAQQIRKHRPKDGPMVPSTAQRWSTLHTEYIWYDPQLTPQPPADYGTAKIHTFPNWGVVTYGAGLPNTQTNTFVSFKSGKLGGRAVYDIVHFQPYSWIDGWRSFNPGHEHPDQNSFTFAPNGQVFVSEALYGPKLSHLNNVLVFAPSPSGQCNKPWEGQLGECAQWLKWTGEEVGDAAGEIITASQHGEMVFVSGEAVSAYSSAMRLKSVYRALLLLNSQTLLVVDHIERQEDSPINSVSAFFHNLDIDFKYIPYKFMNRYNGAMMDVWDAHYKMFWFDHHGNSPMASIQEAEQAAEFKKRWTQFVNVTFQMESTITRIAYVFYGPYINVSSCRFIDSSNPGLQISLNVNNTEHVVSIVTDYHNLKTRFNYLGFGGFASVADQGQITRFGLGTQAIVKPVRHDRIIFPFGFKFNIAVGLILCISLVILTFQWRFYLSFRKLMRWILILVIALWFIELLDVWSTCSQPICAKWTRTEAEGSKKSLSSEGHHMDLPDVVITSLPGSGAEILKQPFFNSSDFLYIRVPTAYIDIPETELEIDSFVDACEWKVSDIRSGHFRLLRGWLQSLVQDTKLHLQNIHLHEPNRGKLAQYFAMNKDKKKKI

SEQ ID NO: 13383 - DNA, 1407 bp, Homo sapiens
  CDS (243)..(575)
tgttagcgtgcacagttctgcatacttgcttcccctcacctgccaggaacaggttagtgttccccattctgcacactttcttcctctcacctgccgggatcatgttagcgtacaccattctgcacactttcttcctctgtgtacgtgtgtgtggttttcctttcagaaatgggtcatactctgtggacatctttttccacttaaagtgatggcacagccattttcccagtcaagtaacatgaatgtacaagtttagcaaacttcctcctgagagatggagagatcaaggcttctgctccgtggcagccatccgtgcacatgcatcactgtgcgtgagttggtcccagtggcttgctgagacatgctctgcacaggggagatttcttataccagcagtgtgggaggcagtggggcaggtagagccacaagtggggatgagggagcagagtctagggcaggctcctggatggacaccagctacactgtctattggatgtgggacttccctcactgatgaaatgaataagagaatcttcctcatcctgctgttgttggcgttaaaacgggttaatgcatgaaagcaacaaagcccggcctgcagacagcacttggtaagtctcctcttcccagcatgttcaacaggaagccctcattccctctagaatgtaggagtcttgccagcagtggcctgtttgttctctgcctgttgccgacctgatgagaacataaaattggtgtcttctgtatagatttccttcttattgcccctactgtggctgaacataccttcccccgtgcttgaagtctgttcatatatgttctgctgtgataactgcccattcttgttctctatctaagaaggcatttagttttgaaaatattttgttggcttgtaagatatttgtacatattaagcacagcaaacctgtaacatattcactgtaaatcattattcctcatgcatcatttgccatttaactgtatttttttcctttttgatgtaacctgctatagtttacatttttaaatcagaaatgcctgcacattttaaaacgaagactcttatgctctagcctttgaggtcatgcttggaaagtcctttctcacacaaagattgtttacactttcatctctttttctctgagtacgtttcagtgtttaattgaccaggaatgtatttcgaggtgtgatatgagacaaggatctgaaatgcttcgcccactgaatcatcatgcactgaccgaaatgccacctgtatgagtgctaaaatcattgtcgctggacctgtgtctgcactgtttaattttagtgttgtttctcacatcagcttctgttgttttcatggttgtggttctcatacttttaatatctgttggagcaaataaagcctcgtttctcatcttttcc

SEQ ID NO: 13384 - protein, 111 aa, Homo sapiens [sequence omitted]

SEQ ID NO: 13385 - DNA, 1738 bp, Homo sapiens
  CDS (126)..(1736)
acactgcgccgcggctgcgcagtacacgggaggcttttaattccattgtggagaggacggcgttatttttattaactggaggcgacggcggctgcggcggcggcgggacccgcctcctccggggtatgaaaatcggcagtgggttcctgagtggcggcggaggtaccggcagtagcggtggtagcggctccggcggcggtggtagtggcggcggcggcggcggcggcagcagcggcaggagggcagagatggaacccacctttccccagggtatggttatgttcaaccaccgtcttcccccggtcaccagcttcacccggccggcggggtcggccgcccctcccccgcaatgcgtgttatcctcctctacctccgcagccccggccgctgagcccccccctccgccagccccggacatgactttcaagaaggagccggcggcgtcagccgcggccttcccctcgcagaggacctcctgggggttcttgcagtctttggttagcatcaaacaggagaaacccgcggatcctgaggagcagcagtcccaccaccaccatcaccaccaccactatggggggctgttcgctggagctgaagagaggtctccaggcctaggaggcggtgaaggggggagtcacggcgtcatccaggacctcagtattctccaccagcatgtccagcagcaaccagcccagcaccaccgtgacgtattactcagcagcagtagcaggactgatgaccaccatggcactgaggagccaaagcaggacactaatgtcaaaaaggcaaaaaggccaaagccagaatctcagggaatcaaagccaagaggaagccaagtgcatcttccaaaccttctttggttggagatggagaaggtgccatcctctccccaagtcagaaacctcatatctgtgatcactgtagtgctgctttccgaagctcctatcacctgcggagacatgtcctcattcatacaggagaaagacctttccagtgcagccagtgtagtatgggtttcattcagaaatacctactacagagacatgagaaaattcatagtagagagaagccatttggatgtgatcagtgcagcatgaagtttattcagaagtaccatatggagagacacaagaggacacatagtggagaaaagccatataagtgtgacacttgccaacagtatttttcaaggactgatagattgttgaagcacaggcgcacatgtggtgaagtcatagttaaaggagccactagtgcagaacctgggtcatcaaaccataccaatataggtaatctggctgtgttgtctcagggaaatacaagttcttcaaggagaaaaacaaagtcaaaaagcatagctattgaaaataaggaacagaagaccggtaaaacaaatgaatcgcaaatttcaaataatataaacatgcagagttactcagtagaaatgcctaccgtgtcttccagtggaggcataattggcactggaatagatgaactgcagaagagggtgccaaaattgatctttaagaaaggaagcagaaagaatacagataaaaactaccttaactttgtgtcaccattaccagacatagtaggacagaaatccttgtctggaaaaccaagtggctcacttggcatagtatcaaataatagtgtggagaccattggtcttctccaaagtacaagtggcaaacaaggtcagataagtagtaattatgatgatgccatgcagttttc

SEQ ID NO: 13386 - protein, 537 aa, Homo sapiens
MKIGSGFLSGGGGTGSSGGSGSGGGGSGGGGGGGSSGRRAEMEPTFPQGMVMFNHRLPPVTSFTRPAGSAAPPPQCVLSSSTSAAPAAEPPPPPAPDMTFKKEPAASAAAFPSQRTSWGFLQSLVSIKQEKPADPEEQQSHHHHHHHHYGGLFAGAEERSPGLGGGEGGSHGVIQDLSILHQHVQQQPAQHHRDVLLSSSSRTDDHHGTEEPKQDTNVKKAKRPKPESQGIKAKRKPSASSKPSLVGDGEGAILSPSQKPHICDHCSAAFRSSYHLRRHVLIHTGERPFQCSQCSMGFIQKYLLQRHEKIHSREKPFGCDQCSMKFIQKYHMERHKRTHSGEKPYKCDTCQQYFSRTDRLLKHRRTCGEVIVKGATSAEPGSSNHTNIGNLAVLSQGNTSSSRRKTKSKSIAIENKEQKTGKTNESQISNNINMQSYSVEMPTVSSSGGIIGTGIDELQKRVPKLIFKKGSRKNTDKNYLNFVSPLPDIVGQKSLSGKPSGSLGIVSNNSVETIGLLQSTSGKQGQISSNYDDAMQF

SEQ ID NO: 13387 - DNA, 1329 bp, Homo sapiens
  CDS (21)..(1328)
ttaatactcttgacaaaagtatgagtggatatctctcaggttttcaagctagaaatgcccttcttcagtcaaatctttctcaaactcagctggctactatttggactctggctgacattgatggtgatggacagctaaaagcagaagagtttattcttgcaatgcaccttactgacatggccaaagctggacagccattaccactgactttacctcctgagcttgttcctccatctttcagaggaggaaagcaaattgattccattaatggaactctgccttcatatcagaaaatgcaagaagaggagcctcagaagaaattaccagttacttttgaggacaaacggaaagccaactatgagcgagggaacatggagctggaaaagcgacgccaagccttgatggagcagcaacaaagggaggcagaacgtaaagcccagaaagaaaaggaagagtgggaacgaaaacagagagaattacaagaacaagaatggaagaaacaacttgaattagaaaaacgcttagagaagcaacgggaattggagagacaacgagaggaagaaaggagaaaagacatagaaagacgagaggcagcaaaacaggaacttgaacgacaacgtcgcttagaatgggagagaattcggcgacaggagcttctcaatcaaaagaatagagaacaagaagaaattgtcaggttaaactctaaaaagaagaatcttcatcttgagttggaagcactgaatggcaaacatcagcagatctcaggcagacttcaggatgtccgactcaaaaagcaaactcaaaagactgagctggaagttctggataagcagtgtgacttggaaattatggaaatcaagcaacttcaacaggaacttcaggaatatcagaataagcttatctatctggtacctgagaagcaattattaaatgaaagaattaaaaacatgcagttcagtaacacacctgattcaggggtcagtttacttcataaaaaatcattagaaaaggaagaattatgccaaagacttaaagaacagttagatgctcttgaaaaagaaactgcatctaagctgtcagaaatggattcttttaacaatcaactaaaggaactgagagaaacctacaacacacagcagttagcccttgaacagctttataagatcaaacgtgacaagttgaaggaaattgaaaggaaaggattagaactaatgcagaaaaagaaactagaagatgaggctgcaaggaaagcaaagcaaggaaaagaaaacttatggaaagaaaatcttagaaaggaggaagaagaaaaacaaaagcgactccaggaag

SEQ ID NO: 13388 - protein, 436 aa, Homo sapiens
MSGYLSGFQARNALLQSNLSQTQLATIWTLADIDGDGQLKAEEFILAMHLTDMAKAGQPLPLTLPPELVPPSFRGGKQIDSINGTLPSYQKMQEEEPQKKLPVTFEDKRKANYERGNMELEKRRQALMEQQQREAERKAQKEKEEWERKQRELQEQEWKKQLELEKRLEKQRELERQREEERRKDIERREAAKQELERQRRLEWERIRRQELLNQKNREQEEIVRLNSKKKNLHLELEALNGKHQQISGRLQDVRLKKQTQKTELEVLDKQCDLEIMEIKQLQQELQEYQNKLIYLVPEKQLLNERIKNMQFSNTPDSGVSLLHKKSLEKEELCQRLKEQLDALEKETASKLSEMDSFNNQLKELRETYNTQQLALEQLYKIKRDKLKEIERKGLELMQKKKLEDEAARKAKQGKENLWKENLRKEEEEKQKRLQE

SEQ ID NO: 13389 - DNA, 1737 bp, Homo sapiens
  CDS (147)..(1388)
cttacgagcccacaggccccggagtagcagcggggaggccgggagcccgcgggccggagccgcccggccgaggcgtgggggctgcggggccggcccatccgtgggggcgacttgagcgttgagggcgcgcggggaggcgagccaccatgttcagccagcagcagcagcagcagctccagcaacagcagcagcagctccagcagttacagcagcagcagctccagcagcagcaattgcagcagcagcagttactgcagctccagcagctgctccagcagtccccaccacaggccccgttgcccatggctgtcagccgggggctccccccgcagcagccacagcagccgcttctgaatctccagggcaccaactcagcctccctcctcaacggctccatgctgcagagagctttgcttttacagcagttgcaaggtaacctccgaggctatggcatggcatccccaggcctcgcagcccccagcctcacacccccacaactggccactccaaatttgcaacagttctttccccaggccactcgccagtccttgctgggacctcctcctgttggggtccccatgaacccttcccagttcaacctttcaggacggaacccccagaaacaggcccggacctcctcctctaccacccccaatcgaaaggattcttcttctcagacaatgcctgtggaagacaagtcagaccccccagaggggtctgaggaagccgcagagccccggatggacacaccagaagaccaagatttaccgccctgcccagaggacatcgccaaggaaaaacgcactccagcacctgagcctgagccttgtgaggcgtccgagctgccagcaaagagattgaggagctcagaagagcccacagagaaggaacctccagggcagttacaggtgaaggcccagccgcaggcccggatgacagtaccgaaacagacacagacaccagacctgctgcctgaggccctggaagcccaagtgctgccacgattccagccacgggtcctgcaggtccaggcccaggtgcagtcacagactcagccgcggataccatccacagacacccaggtgcagccaaagctgcagaagcaggcgcaaacacagacctctccagagcacttagtgctgcaacagaagcaggtgcagccacagctgcagcaggaggcagagccacagaagcaggtgcagccacaggtacagccacaggcacattcacagggcccaaggcaggtgcagctgcagcaggaggcagagccgctgaagcaggtgcagccacaggtgcagccccaggcacattcacagccgcatctgccacaagttctatcacagcaactcaggggcacagctctcccactgcaagtccctgggccactttgagaacctgcagaaatacaaggcggccaagaaccccagccccaccacccgacctgtgagccgccggtgcgcaatcaacgcccggaacgctttgacagccctgttcacctccagcggccgcccaccctcccagcccaacacccaggacaaaacacccagcaaggtgacggctcgaccctcccagcccccactacctcggcgctcaacccgcctcaaaacctgatagagggacctccctgtccctggcctgcctgggtccagatctgctaatgctttttaggagtctgcctggaaactttgacatggttcatgtttttactcaaaatccaataaaacaaggtagtttggc

SEQ ID NO: 13390 - protein, 414 aa, Homo sapiens
MFSQQQQQQLQQQQQQLQQLQQQQLQQQQLQQQQLLQLQQLLQQSPPQAPLPMAVSRGLPPQQPQQPLLNLQGTNSASLLNGSMLQRALLLQQLQGNLRGYGMASPGLAAPSLTPPQLATPNLQQFFPQATRQSLLGPPPVGVPMNPSQFNLSGRNPQKQARTSSSTTPNRKDSSSQTMPVEDKSDPPEGSEEAAEPRMDTPEDQDLPPCPEDIAKEKRTPAPEPEPCEASELPAKRLRSSEEPTEKEPPGQLQVKAQPQARMTVPKQTQTPDLLPEALEAQVLPRFQPRVLQVQAQVQSQTQPRIPSTDTQVQPKLQKQAQTQTSPEHLVLQQKQVQPQLQQEAEPQKQVQPQVQPQAHSQGPRQVQLQQEAEPLKQVQPQVQPQAHSQPHLPQVLSQQLRGTALPLQVPGPL

SEQ ID NO: 13391 - DNA, 1493 bp, Homo sapiens
  CDS (50)..(709)
gataacatttagtaatttaggagagaaaattaaaggcattgttgaaaatatgggaatcaacgcaaataacatgagtgactttattatgaaagttgatgcccttatgtcctctgtgcctaagcgtgcatctcgatatgatgtcacatttcttagggagaatcacagtgttataaagacgaatcctcaagagaatgatatgttcttcaatgtcattgctattgttgatccattaacaagagaagcacagaaaatggcacagttgttggttgtacttggcaagattatcaacatgaagataaagttgttcatgaactgtaggggcaggctttcagaagcccctttagaaagcttttaccgttttgttctggaaccagaactgatgtcaggggctaatgacgtttcttctcttggaccagtggcaaaatttttggatattcctgaatcacccctcctaatcctcaacatgattactccagaaggctggttggttgaaacagtgcacagcaactgtgaccttgataatattcacttaaaggatactgagaaaactgttacagcagaatatgaactagaatacttactactggaaggacaatgctttgataaagtgacagaacagcctcctcggggtctgcagttcacactaggcacaaaaaataaacctgctgtggttgatacaatagtgatggcacatcatgtaagtattatttaattgatggtgtttaatttgatgttttggtgaattctctgttttcctaagagtaaaatgaaataatctttattctgctgttgctgaacagtttgcagaaaacaaaattgaatctttgaataagataaataaaaaatggggaaaatcatactttaataatttttgacaggttattgtaaaatctctttacttggaattgatttatagaatttattcattctacagttaataaatactttcttagatcactcgtgtattcatgagcaattcgatggtttttagtcatattactcaatgattatttttttctcatcttaaaaggggtattttcaattaaaagcaaacccaggtgcttggatactgaggttacaccaaggaaaatctgaagatatttatcaaatagttgggtgagttatgcaggctgcttttaaatttttacacataaatacgtttttagtgtaatacaaccaagagaatcaaaacaacaattaaaatgttaagattggcctggcgcagtggctcaagcctataatcccaacactttggtaggccgaggcaggcagatcacaaggccaggagttcaagacctgcctggccaacatggcaaaaccccatctgtactaaaaatacaaaaatttgccagacatggtggcgcacacctgtaacttcagctattcaggagactgaggcccaagaattgcttgaatcttcgggaggcggaggttgcagtgagcagactgcaccactgcactccagcccaggacagagagcaagactctgtctc

SEQ ID NO: 13392 - protein, 220 aa, Homo sapiens
MGINANNMSDFIMKVDALMSSVPKRASRYDVTFLRENHSVIKTNPQENDMFFNVIAIVDPLTREAQKMAQLLVVLGKIINMKIKLFMNCRGRLSEAPLESFYRFVLEPELMSGANDVSSLGPVAKFLDIPESPLLILNMITPEGWLVETVHSNCDLDNIHLKDTEKTVTAEYELEYLLLEGQCFDKVTEQPPRGLQFTLGTKNKPAVVDTIVMAHHVSII

SEQ ID NO: 13393 - DNA, 1846 bp, Homo sapiens
acactgacttctggacgtggtcagggtggctttctctggctggcatggacttgagcagaaactcattgccggcttcctccttgcacgagcaccaagtgattcccaggtcccccatcctcccctgggacatcgaggacacacaaaaaccttgttcaccctccactgagagcggggctagagatggatgctgagtacaggaagggtgtgtgaggattcctttggctccactcttgtttccaactattgctggtcctaggcgcccagtcctgagcaaccatgacgatggagactctccccaaggttctagaggtcgatgagaagtctccagaagccaaggacctgctgcccagccagaccgccagctccctgtgcatcagctccaggagcgagtctgtctggaccaccacccccaggagtaactgggaaatctaccgtgcccctggacatgacaacatgactctaggggttagtcagctgaagaagtttagttcctaattatataatatttacatcagaggcagtggggtaggctaggggatgtcactgtttccgcttgaccttatctttctcattgaccactgtcttctctgaacttgatcattagccaaggacaaaatgcatgttgccctaatttctttcctacccctgcctctatctctgcatctagaacagctaaatggaaagatacagagggatcctgtaaggttgttttccctttcacgtccatcaagatcaaaattgagagaatcaagttccatatctgaatgatctgtaggtttctagagatggaattaggaaactgcacggccatttgtctgacctcccagatgtttttacttcatccctctctttcccggcttcccacctcttcatcaagtgcctagcgcagcttctcctggaggcacattgagggcctcctggtgtctatggtagagacgggaagtgggtttccagagggcctggcaagcaaagagtccctgagaagtgcttctgtaactccctgtggcaaccaagaggcccgtaggtgaaagaacagaagcagtacctgtgagggagccagccacgctgccctaggccaaagacccctggagagcatttggtaatgaggtgtgagaggagagcatcctgcaccagaaccacccttgtcttgagctaattctcttcactcctcagccttgtggccttcccagtcaccatggccctccagatatccccatcctgcatggcagttccatatgcagagccagatcactcactggaaacccacactccaggtgcctcatttcctctgcccaggagattgtagcctgggcacagctatatgaggagggcccatttggatactgctatcatggatgtcttagtggaaggaagtttagggataaccacaactctagaagtccaggttctggactcactttgcagactctagcagtacctgcctccattccctgcccactcaagctagtttctcagcaaagagaatatgaggaaatatccccaaacatcgtcatccccactgggatcctccacatgagtgtgggctggaaaggttccagggtcacactgaggcaggacattttttgccaatgcctgttaccccatggaaggctgaggtacggatgcacctgatctggaaatgcagcccaggtcagactccacatttctgcaacaaagcatcacctgcaatgactcttttcacgtcagtgggtcaaaggacagaaccagcttccgtgttttaggctcactagattgtctcatgctccccatggctattctgtttgggagaatttgatctaacccgaagcctaaaggaatcaatgtaatgttgaattgtattctatgt

SEQ ID NO: 13394 - DNA, 1746 bp, Homo sapiens
  CDS (1123)..(1437)
agtggaacatggcgacttgcgccgaaatcctgcggagcgagttccccgaaattgacggacaagtcttcgactacgtgaccggcgtcttgcacagcggcagcgcggacttcgagtctgtggatgacctggtggaagctgtaggggaactattgcaagaggtgtccggggacagcaaggatgacgcgggcatcagggccgtgtgccagcgcatgtacaacactctgcgtctggctgagccacaaagccagggaaatagccaggtgctactggacgcccctatccagttgtcaaagataacggagaactacgactgtggaaccaaacttccaggactgctaaagagggaacagtcctcgacagtgaatgcaaagaagttagagaaggccgaggctcgacttaaggcaaagcaggagaagcgctcagagaaggacacgctcaagaccagcaaccctctagtcttagaagaggcatcagccagccaggcaggcagcagaaaggagagtcggttggaatcatctggcaagaacaaatcctagtcgtctcccacgaccgcaacttcttgaatgccatcgccacagacatcatccacctgcacagccagcggctagatggttaccggggagactttgagaccttcatcaagagtaagcaggagcggctgctcaaccagcagcgtgaatatgaggcgcagcagcagtatcgccagcacatccaggttttcattgaccggtttcgctacaatgccaacagggcctctcaagtgcagagtaaactcaagatgctggagaagctgcctgagctgaagcctgtggacaaggaatcagaggtcgtaatgaagttccctgatgggtttgagaagttctcgccgccaattctgcagctagatgaggtggatttctactacgatccgaagcacgtcatcttcagtcgcctctctgtgtctgctgatctcgagtctcgcatctgtgtggttggagagaatggggctgggaagtctaccatgtggagcagctggacctaaacgtcagtgctgtggaactgctggcacgcaagtttcctgggcggcctgaggaggagtaccgtcaccagctgggtcggtatggcatctccggagaactggccatgcgtcctcttgccagcctgtctgggggccagaagagccgagtggcctttgctcagatgactatgccctgccccaacttctacattctggatgaacccacaaaccacctggacatggagaccattgaggctctgggccgtgccctcaacaatttcaggggtggtgtgattctggtgtcccacgatgagcgctttatcaggctggtgtgccgggagttgtgggtatgcgaaggaggcggcgtcacccgtgtggaaggaggatttgaccagtaccgcgccctcctccaggaacagttccgccgcgaaggcttcctctagggccaccaggctgaggactcgcccaggacatggactggtctctcagacccctgggccaccatgtaggccaccactccaggccgtggacttcccccaacttggggacagccttattcccaaatgtctctatccttttgactggagcatcttctgcacaaccttgggagcccatccaagggttggtgaggactggtctcccgggggtgggggtctggggggtaccctctggggttatagattcccccactgccccagctctgactggaccccaagtggctgctatgtaaattaaatctctccccgcgt

SEQ ID NO: 13395 - protein, 105 aa, Homo sapiens [sequence omitted]

SEQ ID NO: 13396 - DNA, 1849 bp, Homo sapiens
  CDS (8)..(511)
gtttgaaatgctggtagttcctgaacaggagtaccctttagtttgtgttggtgtcagtagaggtagagacttcaaccaagtggttcgatttgagacggtcaatccaaattctacctcttcatggtttacagaatcagataccccacagacaaatgttactcatgtaacccaactggagagagataccatccttgtatgcttggactgttgtataaaaatagtaaatctccaaggaagattaaaatctagcaggaaattgtcatcagaactcacctttgatttccagattgaatcaatagtgtgcctacaagacagtgtgctagctttctggaaacatggaatgcaaggtagaagttttagatctaatgaggtaacacaagaaatttcagatagcacaagaattttcaggctgcttggatctgacagggtcgtggttttggaaagtaggccaactgataaccccacagcaaatagcaatttgtacatcctggcgggtcatgaaaacagttactgagaattgttgtgctttgacagttaactctagaaagaaagaacactaccactgcaacattaatggatgcttgaagctgtacaaaagctgcagtaacctgtcttcagttactttgtaatttattgtggcatgagataagatggggaaaattttgttttaagtggtatggatatatttagcatattgaaccacacaagtgcttaattcattgttatgtaatctttgtacatataggcagtattttttctgtgaaacttcatattgctgaagacatacactaagaatttatgtagataatgtacttttatgagatgtacaagtaagtgtcttatctgtacagatgtaaatgttgatgaaaatgcaattggggttaatattttaagaattctttagtatattcttgggtgtggctatattacaaaatgggatgctggcaatgaaacaatacatttaacactattgtatttttattatatgtaatttagtaatatgaatataaatcttgtaacttttaaaattgtaatggaggctgtaatcattttataatctttttaattttaatgcaagtacactggtgtttatatttgcacaaagtattgatatgtgatgtattaagtcacaaaagtaagctgtgacattgtctataagcatttggctccacaaatgtatttggattgttttctatgtgaagcaaaccaattataattaaccacatgttgtagtaactggtctttttatatttaagcagaatcctgtaagattgcttgtctttgcttaaaaacaatacctttgaaatttttgaatcacagaatagcggtaccatgatagaatactgcaattgtggtcagaattacagtatgcacaaagaattaattagcattattaaagagtcctcactaaacatttcatatgatcacactgaagaactgtaacattccatagagtgaagtggttcaaatttctcttggaatttttacttttgttggccttattttatgatccttttcatatttcttttgacttagagtattaatacatggccaaaataatttagttactacctcatacaaacaatataatggttactacacatcacaggaacttagttttggtttaagtcatttttgattgcttttttccaatggaatatgtatataccaggttttagcaaaatgcacacttttggctctttttggtatatgttctttatattttaatgtgagtatatacactaagaacaaactaaattgtgatttatgatcttcatttattttaatgataatggttttaaaatatgttcctgattgtacatattgtaaaataaacatgttttttaac

SEQ ID NO: 13397 - protein, 168 aa, Homo sapiens
MLVVPEQEYPLVCVGVSRGRDFNQVVRFETVNPNSTSSWFTESDTPQTNVTHVTQLERDTILVCLDCCIKIVNLQGRLKSSRKLSSELTFDFQIESIVCLQDSVLAFWKHGMQGRSFRSNEVTQEISDSTRIFRLLGSDRVVVLESRPTDNPTANSNLYILAGHENSY

SEQ ID NO: 13398 - DNA, 1850 bp, Homo sapiens
  CDS (54)..(386)
aaaataatttctaggttaagttggaaacatgtgataacattaaaaaatttaaaatgtctttgggcctgaaagattatgcctttacattcaacatgaaatccatggatggagtttatataaataaccatgtaggcttaccaatccttaaccctcttgtattagtccatactcacatggatatttccatatccacttttactcttgtgtcaaaagacaaaattaaaactcatttagttatgtatctaattggcttttattctcgattcatgaatcggtgcagcctccattctaatagaatcacagcttctactgggcaatggcagactattgggttttgtgaggtgggaatgaggaaacataacaatggggaaaataagctgattagttaacaatagattacttcagtttactttttttttataagggttaaagcagaggggactttcttgttctgactcaggtaggctagaatctcctgtttttaggaaaaactcgtctgttttgggatctatctgctttcttacagttgcagtttgattatatgacatttggcatgagtgactccactttgttaacacttgaaaggttattattcccatatggagtattcacatggatgtagccattgtcagttatacaagatcgtgtttcttttctttgcccccctgcccccgtcacctaagaacttgttagatattccatttctttttttaaaaaaagatacagtgagtaaaggtgatagagagcatatggataaatagtgaagaagcttgatgaggggagtggttaggttagaaacacaagggaatttactcaggttaaaacactgtcattttatattcaagccaatatatatttgttttgttagcgttgacgtaatttttttctgggaaggctttcctgacctctggtttgagtaagcagctcctcctatgtgttttagtcagcactcttggcttaatccatagtaacttttgcttgtttgcattgtagttggttatatctgtctcctatagcttgtgggctcactttgacggggagaggccttgttctattcatcattaatcctcagggtctagcacctagtaaatactcagtaaatatttattaaatgtaattgctttatctgatttcttattgatattttttggagcagcagtgttgcgggaggtcatgttaatttaatcaaagtaaaaagaatttgggggttagtactggaaggtggttgggaagtgtatgtatatatatttccaaactctttagattttcaaactttgttctcctgaggactttgccacttccagaactgtttcaggagctgctgtgggagaaggaggtcagtgcacgtccactgatgtggtttgaatgtgttctccaaagtttgtgtgttagaaacttaatccctggtgcaatagtgtcgggagttggggcctattaggtgattcggtcatgacgggtctgcccctgtgaatggattactgtctttatttgggagtgggttagttataaaggagtgtgcaccgtctcttgctcttctgccctctgacctgggatgatgtaaaatgaagtcccttatcagatgcagacctcatggtcttgtacttctcagccagaactataagaaatacgtttattttcttcataaattaccgagtctcagatattctgttatagcagcataaaataaattaagacatctactttgcccatttatactggaggctttagccagaattctgtttataaagtttgcaggccaggcacggtggctcacgcctataatctcagcacattgggaggctgaggcaggaggatcacttgaacccaggggtttgagaccctgtctctac

SEQ ID NO: 13399 - protein, 111 aa, Homo sapiens
MSLGLKDYAFTFNMKSMDGVYINNHVGLPILNPLVLVHTHMDISISTFTLVSKDKIKTHLVMYLIGFYSRFMNRCSLHSNRITASTGQWQTIGFCEVGMRKHNNGENKLIS

SEQ ID NO: 13400 - DNA, 2415 bp, Homo sapiens
  CDS (212)..(2110)
agaagcgcagcttctcggggaagctgtcatggctgctcctgtacgtagtcacggtcttgtgctctaaggtgagtggaggacgagcttgggcttagcggcagcccgtatcacatcctagactttttacttcgaggagaagagtctcacgagttgtcctggaagaaaacgacagcacgtgttctttttcactagtagaagtgacgttggtttcatgttgacaactttgaagccatttggaagtgtttcagtggagagcaaaatgaataacaaagcgggctcctttttctggaaccttagacaattcagtacattagtttcaacaagcagaactatgaggctatgttgtttgggactttgcaaaccaaaaatagttcattcaaactggaacattttaaataactttcataacagaatgcaatcaactgatatcattagatatctctttcaggatgcattcatttttaaatcagatgttggctttcaaacaaagggcataagcactctaacagcccttagaattgaaagactactttatgctaaaagactgttttttgactcaaagcagtctcttgtccctgttgataaatctgatgatgaattgaagaaagtaaaccttaatcatgaagtctccaatgaagatgttcttaccaaggaaacaaaaccaaaccgtatcagcagtagaaaactgtctgaggaatgtaattccctgagtgatgtgttagatgcattttcaaaagcgcccacatttcctagtagcaactatttcacagcaatgtggacaattgccaaaagactgtctgatgaccagaagcgctttgaaaaacgactgatgtttagccaccctgcatttaatcagctctgtgaacatatgatgagagaagccaagatcatgcagtataagtacctactgttcagtcttcacgccatagtgaagcttggaatccctcagaacactattttggtgcagactttgctgagggtgacccaggaacgtatcaatgagtgtgatgagatatgcctttcagttttgtcaactgttttagaggcaatggaaccatgcaagaatgttcatgttctacgaacgggattcagaatactagttgatcagcaagtttggaaaatagaagatgtcttcacattacaagttgtgatgaagtgtattggaaaagatgcaccgattgctcttaagaggaaactggagatgaaagccttgagggaattagacagattttctgttttgaatagccaacacatgtttgaagtactagctgccatgaatcaccgatctcttatactcctggatgaatgcagtaaggtggtcctagataatatccatgggtgtcctttaagaataatgatcaacatattgcagtcctgcaaagacctccagtaccataatttggatctcttcaagggacttgcagattatgtggctgcaactttcgacatctggaagttcagaaaagttctttttatcctcattttatttgaaaaccttggctttcgacctgttggtttaatggacctgtttatgaagagaatagtagaggatcctgaatccctaaacatgaaaaacattctatctattcttcatacttactcttctctcaatcatgtctacaaatgccagaacaaagaacagttcgtggaagttatggctagtgctctgactggttatcttcacactatttcttctgaaaacttattggatgcagtatattcattttgcttgatgaattactttcccctggctccttttaatcagcttctgcaaaaagacatcatcagtgagctgctgacatcagatgacatgaagaatgcttacaagctgcatactttggatacttgtctaaaacttgatgatactgtctatctgagggacatagccttgtcactcccacagctgccgcgggagctgccatcgtcacatacaaatgcaaaggtggcagaggtgctgagcagccttctgggaggtgaaggacacttctcaaaggatgtgcacttgccacacaattatcatattgattttgaaatcagaatggacactaacaggaatcaagtgctaccactttctgatgtgatacaacttctgctacagatattcaaagagtagctgtgctatgtgtttccagatctgcttattgtttgggttcaagccaccccagaggattccttgctatgaaaatgcggcatttgaatgcaatgggttttcatgtgatcttggtcaataactgggagatggacaaactagagatggaagatgcagtcacatttttgaagactaaaatctattcagtagaagctcttcctgttgctgctgtaaatgtgcaaagcacacaataaagtgaaaatcaaccttttcatattaggagacatgcatttgtaaaaattaataaagatgacaagtcagttgtc

SEQ ID NO: 13401 - protein, 633 aa, Homo sapiens
MLTTLKPFGSVSVESKMNNKAGSFFWNLRQFSTLVSTSRTMRLCCLGLCKPKIVHSNWNILNNFHNRMQSTDIIRYLFQDAFIFKSDVGFQTKGISTLTALRIERLLYAKRLFFDSKQSLVPVDKSDDELKKVNLNHEVSNEDVLTKETKPNRISSRKLSEECNSLSDVLDAFSKAPTFPSSNYFTAMWTIAKRLSDDQKRFEKRLMFSHPAFNQLCEHMMREAKIMQYKYLLFSLHAIVKLGIPQNTILVQTLLRVTQERINECDEICLSVLSTVLEAMEPCKNVHVLRTGFRILVDQQVWKIEDVFTLQVVMKCIGKDAPIALKRKLEMKALRELDRFSVLNSQHMFEVLAAMNHRSLILLDECSKVVLDNIHGCPLRIMINILQSCKDLQYHNLDLFKGLADYVAATFDIWKFRKVLFILILFENLGFRPVGLMDLFMKRIVEDPESLNMKNILSILHTYSSLNHVYKCQNKEQFVEVMASALTGYLHTISSENLLDAVYSFCLMNYFPLAPFNQLLQKDIISELLTSDDMKNAYKLHTLDTCLKLDDTVYLRDIALSLPQLPRELPSSHTNAKVAEVLSSLLGGEGHFSKDVHLPHNYHIDFEIRMDTNRNQVLPLSDVIQLLLQIFKE

SEQ ID NO: 13402 - DNA, 1750 bp, Homo sapiens
  CDS (368)..(1678)
aggtttccgcagctgagggggcagctccgcggcggcgtccggggtctccagtagggctgacgctccggtgctcgcacaatcccccgcctcggctggcaacgggcgtccctccactccccgagtccccggcagccgccgccaccccagcgcgccccgatctggccccctgccccgcgaagatggctgccgtacgccgggcccgcagttattgccgctgcctggtgcgcttctccgaccgagaactctgctaagctccgctgcagagacaggcaggagtagacacccggacacccagcacccctcctccggggggcggtgcagagggggcacggagagcccctcgagcgcagcaggccgccccgccagcatggcagaagctgaggaagattgtcattctgatactgtcagagcagatgatgatgaagaaaatgaaagtcctgctgaaacagatctgcaggcacaactccagatgttccgagctcagtggatgtttgaacttgctccaggtgtaagctctagcaatttagaaaatcgaccttgcagagcagcaagaggctctctccagaaaacatcggcagataccaaaggaaaacaagaacaggcaaaagaagaaaaggctcgagaactcttcctaaaagcagtagaagaagaacaaaatggagctctctatgaagccatcaagttttatcgtagggctatgcaacttgtacctgatatagagttcaagattacttatacccggtctccagatggtgatggcgttggaaacagctacattgaagataatgatgatgacagcaaaatggcagatctcttgtcctacttccagcagcaactcacatttcaggagtctgtgcttaaactgtgtcagcctgagcttgagagcagtcagattcacatatcagtgctgccaatggaggtcctgatgtacatcttccgatgggtggtgtctagtgacttggacctcagatcattggagcagttgtcgctggtgtgcagaggattctacatctgtgccagagaccctgaaatatggcgtctggcctgcttgaaagtttggggcagaagctgtattaaacttgttccgtacacgtcctggagagagatgtttttagaacggcctcgtgttcggtttgatggcgtgtatatcagtaaaaccacatatattcgtcaaggggaacagtctcttgatggtttctatagagcctggcaccaagtggaatattacaggtacataagattctttcctgatggccatgtgatgatgttgacaacccctgaagagcctcagtccattgttccacgtttaagaactaggaataccaggactgatgcaattctactgggtcactatcgcttgtcacaagacacagacaatcagaccaaagtatttgctgtaataactaagaaaaaagaagaaaaaccacttgactataaatacagatattttcgtcgtgtccctgtacaagaagcagatcagagttttcatgtggggctacagctatgttccagtggtcaccagaggttcaacaaactcatctggatacatcattcttgtcacattacttacaaatcaactggtgagactgcagtcagtgcttttgagattgacaagatgtacacccccttgttcttcgccagagtaaggagctacacagctttctcagaaaggcctctgtagagcctcaagtccagtcctctatcacttttgcatgaattaaagtatatagcgcaaaagagcacctaagtt

SEQ ID NO: 13403 - protein, 437 aa, Homo sapiens
MAEAEEDCHSDTVRADDDEENESPAETDLQAQLQMFRAQWMFELAPGVSSSNLENRPCRAARGSLQKTSADTKGKQEQAKEEKARELFLKAVEEEQNGALYEAIKFYRRAMQLVPDIEFKITYTRSPDGDGVGNSYIEDNDDDSKMADLLSYFQQQLTFQESVLKLCQPELESSQIHISVLPMEVLMYIFRWVVSSDLDLRSLEQLSLVCRGFYICARDPEIWRLACLKVWGRSCIKLVPYTSWREMFLERPRVRFDGVYISKTTYIRQGEQSLDGFYRAWHQVEYYRYIRFFPDGHVMMLTTPEEPQSIVPRLRTRNTRTDAILLGHYRLSQDTDNQTKVFAVITKKKEEKPLDYKYRYFRRVPVQEADQSFHVGLQLCSSGHQRFNKLIWIHHSCHITYKSTGETAVSAFEIDKMYTPLFFARVRSYTAFSERPL

SEQ ID NO: 13404 - DNA, 2145 bp, Homo sapiens
  CDS (58)..(1482)
gtatcaacaaatgcaagtacaccacaatcagtgagcagtgtggttcattatctggcaatggcactctttcaaatagagcagggcattgagcggcgttttctgaaagctccacttgatgccagtgacagtgggcgttcttataaaacagttctggaccgttggagagagtctctcctttcttctgctagtctatcccaagtttttcttcacctatccaccttggatcgtagcgtgatatggtctaaatctatactgaatgcgcgttgcaagatatgtcgaaagaaaggcgatgctgaaaacatggttctttgtgatggctgtgataggggtcatcatacctactgtgttcgaccaaagctcaagactgtgcctgaaggagactggttttgtccagaatgtcgaccaaagcaacgttctagaagactctcctctagacagagaccatccttggaaagtgatgaagatgtggaagacagtatgggaggtgaggatgatgaagttgatggcgatgaagaagaaggtcaaagtgaggaggaagagtatgaggtagaacaagatgaagatgactctcaagaagaggaagaagtcagcctacccaaacgaggaagaccacaagttagattgccagttaaaacaagagggaaacttagctcttctttctcaagtcgtggccaacaacaagaacctggaagatacccttcaaggagtcagcagagcacacccaaaacaactgtttcttctaaaactggtagaagcctaagaaagataaactccgctcctcctacagaaacaaaatctttaagaattgccagtcgttctactcgccacagtcatggcccactgcaagcagatgtatttgtggaattgcttagtcctcgtagaaaacgcagaggcaggaaaagtgctaataatacaccagaaaatagtcccaacttccctaacttcagagtcattgccgcaaagtcaagtgaacagtcaagatctgtaaatattgcttcaaaactttctctccaagagagtgaatccaaaagaagatgcagaaaaagacaatctccagagccatcgcctgtgacactgggtcgaaggagttctggccgacagggaggagttcatgaattgtctgcttttgaacaacttgttgtagaattggtacgacatgatgacagctggccttttttgaaacttgtttctaaaatccaggtcccagactactatgacatcatcaaaaagcccattgccttaaatataattcgtgaaaaagtgaataagtgtgaatataaattagcatctgagtttattgatgacattgagttaatgttttcgaactgctttgaatacaaccctcgtaacacaagtgaagcaaaagctggaactaggcttcaagcattttttcatattcaggctcaaaagcttggactccacgtcacacccagtaatgtggaccaagttagcacaccaccggctgcgaaaaagtcacgaatctgactttgtccttctaaaggatatatttgaagaaaaacaaattgttcatgaaaatggaacattaaatcatgctgtataaagcaatgacaattgattgaccacatgaaagtgtggcctgcactatattctcaattttaatattaagcactcaggagaatgtaggaaagatatcctttgctacagttttgttcagtatctaataagtttgatagatgtattggatacagtactggtttacagaggtttttgtacatttttgagatcattcatgtgtccagagatcttggaaaatattttttcacccacgatttattttgttattgatgatttttttttaaagtggtggtattaagggagagttatctacatggatgagtcttccgctatagcacagtttagaaaaggtgtttatgtcttaattaattgtttgagtacattctttcaacactacacatgaatgaatccaatcttataaccttgaagtgctgtaccagtgctggctgcaggtattaagtccaagtttattaactagatatttatttagtattgagagtaatttgtgaatttgttttgtatttataaaatttatacctgaaaaatgttccttaatgttttaaaccttttactgtgtttttattcctctaacttccttaatgatcaatc

SEQ ID NO: 13405 - protein, 475 aa, Homo sapiens [sequence omitted]

SEQ ID NO: 13406 - DNA, 1584 bp, Homo sapiens
  CDS (112)..(1029)
gttcataacaactccaagcatggacggagagcaagaagactcgatccatcggaagctaccccctgcatcaaagccattagcccgagtgaaggctggaccacaggaggagccatggtcatcatcatcggggacaacttctttgatggtctccaagtggtgtttgggactatgcttgtatggagcgagctaataacccctcatgccatcagagtacagactcctccccggcacatcccaggcgtggtagaggtgacattatcttataaatctaaacagttctgcaaaggagccccaggaaggttcatttacacagcattaaatgaacccaccatagactatggcttccagagactgcagaaggtcatccctaggcatcctggagatcctgagagattagctaaggagatgctgttgaaaagagctgcagatctagtggaagctctttatggcacaccacacaataaccaggacatcattttgaagcgagccgcagacattgctgaagctctctacagcgtccccaggaatcccagccagcttccagccctctctagctccccagcgcacagtggcatgatgggaatcaactcctatggcagccagcttggggtcagcatctcagagtcaacacaaggaaataatcaagggtacatccgcaacacaagcagcatctctccgcggggatactcttccagctccacgcctcaacagtctaattacagtacctccagcaacagtatgaatggctacagcaatgtccccatggccaacttgggtgttccaggttcaccaggatttctaaatggctcacccaccggctctccttatggaatcatgtcattaagtcccaccgttgggtcttccagcacatcctccatcctcccattttcctcttcagtttttcctgctgtcaaacagaagagtgcctttgcccctgtcatcaggccccaaggctccccttcacctgcctgctccagcggcaatggaaatggattcagagccatgaccggacttgttgtacccccgatgtaaagaagaactgctttcttatagcacaaaactacttactctgatggaccaataatgaagaaagcactaggagctcttttgggggtgtagtggtgcccccacatgaacatgatggacacccttgggtctgcaaggagccagcatcttacttggtcccacgtcctcctatagctctgatggtggctacacaaactgaccctcttgggacaaggacaaaagatgtcattgacgtagtcagtgctaagagcagaaatgcaattctttgttatgaacattatgaaaaccaccttcctatgtttgtaaaatatttaagaaaaaattggcaaacaattaatgcttaatattttggatactatttgtttttctttgtaggaaaaaaaagttgaaagtttctattttctatgaagcctttcagataccaatttagtttatgcagaaaaaaattgaacaaaacagggtaccagcacggaagactttcttaaaacgcaacctgaattgaatgatgaaatgttgtatgtgtgtttgcttatagcttaatctctttaaaaaatgaac

SEQ ID NO: 13407 - protein, 306 aa, Homo sapiens
MVIIIGDNFFDGLQVVFGTMLVWSELITPHAIRVQTPPRHIPGVVEVTLSYKSKQFCKGAPGRFIYTALNEPTIDYGFQRLQKVIPRHPGDPERLAKEMLLKRAADLVEALYGTPHNNQDIILKRAADIAEALYSVPRNPSQLPALSSSPAHSGMMGINSYGSQLGVSISESTQGNNQGYIRNTSSISPRGYSSSSTPQQSNYSTSSNSMNGYSNVPMANLGVPGSPGFLNGSPTGSPYGIMSLSPTVGSSSTSSILPFSSSVFPAVKQKSAFAPVIRPQGSPSPACSSGNGNGFRAMTGLVVPPM

SEQ ID NO: 13408 - DNA, 1664 bp, Homo sapiens
  CDS (28)..(447)
gtcgccgcgcggccgccggtgagccgcatggagccccgggcggcggacggctgcttcctgggcgacgtgggtttctgggtggagcggacccctgtgcacgaggcagcccagcggggtgagagcctgcagctgcaacagctgatcgagagcggcgcctgcgtgaaccaggtcaccgtggactccatcacgcccctgcacgcagccagtctgcagggccaggcgcggtgtgtgcagctgctgctggcggctggggcccaggtggatgctcgcaacatcgacggcagcaccccgctctgcgatgcctgcgcctcgggcagcatcgagtgtgtgaagctcttgctgtcctacggggccaaggtcaaccctcccctgtacacagcgtcccccctgcacgaggccagctttccccgcctcctgagcaccctggcttcgacgccctggatcaactgagccaggtggaactcctgggggacatggatcgcaatgaattcgaccagtatttgaacactcctggccacccagactccgccacaggggccatggccctcagtgggcatgttccggtctcccaggtgacaccaacgggtcccacagagaccagcctcatctccgtcctggctgatgccacggccacgtactacaacagctacagtgtgtcatagagctggaggcgccccgtccggtcagccctcgcgccctctccttcttgtgccttgagtggcagaggagccgtccagccacaccagctttcctcccaccgctcagggcagggaggtctgaactgcggccccagagcctttggcctaagctggactctccttatccgagtgccgcctctatccccttccccacgttccagcccctgcagcccacattttaagtatattccttcaagtgagttttcctccagcccctgagagttgctgtctcccagtggaatgttcactgacgtcttttcttggtagccatcatcgaaactaatggggggacagacttgatagccaaggtcccttctggtccagttttctgatttagggttctctcaagattaataaaggaagatggggaaatttgactcattaatgagctcgctaacctacgatctggtgataattttgtgtgcacagcccaaggaccacgaggctttctgcactttctgcacccccttccaaagtgaccacaaaatttcaaagggactcatacaatttgagaaaaaacagtcaacctgatttgagaaattaaccagtatggctaactatatcacagaaaatgggattgagttaaaactattttattttaaatatacattttaaagcagttcttttttttttgttaatttgtttattatacacacacttcaagagaatatgcacagtctaggccgggcacggtggctcacgcctgtaatcccagcactttgggaggccgaggcatgtggatcacctgaggtcaggagtttgagaccagcctagacaacatggtgaaaccttgtctctatgaaaaatacaaaatttgctgggagtggtggtgcatgcctgtaatcccagctacttggaaggctgaggcaggagaatgtcttgaacctaggaggtggaggttgcagtgagctgagattgcaccattgcactccagcctgtgcaacaagagtgaaactccatttcaag

SEQ ID NO: 13409 - protein, 140 aa, Homo sapiens
MEPRAADGCFLGDVGFWVERTPVHEAAQRGESLQLQQLIESGACVNQVTVDSITPLHAASLQGQARCVQLLLAAGAQVDARNIDGSTPLCDACASGSIECVKLLLSYGAKVNPPLYTASPLHEASFPRLLSTLASTPWIN

SEQ ID NO: 13410 - DNA, 1672 bp, Homo sapiens
  CDS (112)..(1410)
gggccacaaggctacagctgccactgtcgcctgggtttccggccagcggaggatgatccgcaccgctgtgtggacacagatgagtgccagattgccggtgtgtgccagcagatgtgtgtcaactacgttggtggcttcgagtgttattgtagcgagggacatgagctggaggctgatggcatcagctgcagccctgcaggggccatgggtgcccaggcttcccaggacctcggagatgagttgctggatgacggggaggatgaggaagatgaagacgaggcctggaaggccttcaacggtggctggacggagatgcctgggatcctgtggatggagcctacgcagccgcctgactttgccctggcctatagaccgagcttcccagaggacagagagccacagataccctacccggagcccacctggccacccccgctcagtgcccccagggtcccctaccactcctcagtgctctccgtcacccggcctgtggtggtctctgccacgcatcccacactgccttctgcccaccagcctcctgtgatccctgccacacacccagctttgtcccgtgaccaccagatccccgtgatcgtagccaactatccagatctgccttctgcctaccaacccggtattctctctgtctctcattcagcacagcctcctgcccaccagccccctatgatctcaaccaaatatccggagctcttccctgcccaccagtcccccatgtttccagacacccgggtcgctggcacccagaccaccactcatttgcctggaatcccacctaaccatgcccctctggtcaccaccctcggtgcccagctaccccctcaagccccagatgcccttgtcctcagaacccaggccacccagcttcccattatcccaactgcccagccctctctgaccaccacctccaggtcccctgtgtctcctgcccatcaaatctctgtgcctgctgccacccagcccgcagccctccccaccctcctgccctctcagagccccactaaccagacctcacccatcagccctacacatccccattccaaagccccccaaatcccaagggaagatggccccagtcccaagttggccctgtggctgccctcaccagctcccacagcagccccaacagccctgggggaggctggtcttgccgagcacagccagagggatgaccggtggctgctggtggcactcctggtgccaacgtgtgtctttttggtggtcctgcttgcactgggcatcgtgtactgcacccgctgtggcccccatgcacccaacaagcgcatcactgactgctatcgctgggtcatccatgctgggagcaagagcccaacagaacccatgccccccaggggcagcctcacaggggtgcagacctgcagaaccagcgtgtgatggggtgcagacccccctcatggagtatggggcgctggacacatggccggggctgcaccagggacccatgggggctgcccagctggacagatggcttcctgctccccaggcccagccagggtcctctctcaaccactagacttggctctcaggaactctgcttcctggcccagcgctcgtgaccaaggatacaccaaagcccttaagacctcagggggcgggtgctggggtcttctccaataaatggggtgtcaacctt

SEQ ID NO: 13411 - protein, 433 aa, Homo sapiens [sequence omitted]

SEQ ID NO: 13412 - DNA, 2106 bp, Homo sapiens
  CDS (10)..(954)
agcgcagctatggctgctggcgtaccctgtgcgttagtcaccagctgctcctccgtcttctcaggagaccagctggtccaacatatccttggaacagaagatcttattgtggaagtgacttccaatgatgctgtgagattttatccctggaccattgataataaatactattcagcagacatcaatctatgtgtggtgccaaacaaatttcttgttactgcagagattgcagaatctgtccaagcatttgtggtttactttgacagcacacaaaaatcgggccttgatagtgtctcctcatggcttccactggcaaaagcatggttacctgaggtgatgatcttggtctgcgatagagtgtctgaagatggtataaaccgacaaaaagctcaagaatggtgcctcaaacatggctttgaattggtagaacttagtccagaggagttgcctgaggaggatgatgacttcccagaatctacaggagtaaagcgaattgtccaagccctgaatgccaatgtgtggtccaatgtagtgatgaagaatgataggaaccaaggctttagccttctcaactcattgactggaacaaaccatagcattgggtcagcagatccctgtcacccagagcaaccccatttgccagcagcagatagtactgaatccctctctgatcatcggggtggtgcatctaacacaacagatgcccaggttgatagcattgtggatcccatgttagatctggatattcaagaattagccagtcttaccactggaggaggagatgtggagaattttgaaagactcttttcaaagttaaaggaaatgaaagacaaggctgcgacgcttcctcatgagcaaagaaaagtgcatgcagaaaaggtggccaaagcattctggatggcaatcgggggagacagagatgaaattgaaggcctttcatctgatgaagagcactgaattattcatactagggtttgaccaacaaagatgctagctgtctctgagatacctctctactcagcccagtcatattttgccaaaattgcccttatcatgttggctgcctgacttgtttatagggtccccttaattttagtttttagtaggaggttaaggagaaatcttttttttccacagtatattgtaagagagtgaggaatacagtgatagtaatgagtgaggatttcttaaatatacttttttttttgttctaggaatgagggtaggataaatctcagaggtctgtgtgatttactcaagttgaagacaacctccaggccattcctggtcaaccttttaagtagcatttccagcattcacacttgatactgcacatcaggagttgtgtcacctttcctgggtgatttgggttttctccattcaaggagcttgtagctctgagctatgatgcttttattgggaggaaaggaggcagctgcagaattgatgtgagctatgtggggccgaagtctcagcccgcagctaagtctctacctaagaaaatgcctctgggcattcttttgaagtatagtgtctgagctcatgctagaaagaatcaaaaagccagtgtggatttttagactgtaataaatgaggcaaaggatttctattccagtgggaaggaaacctctctactgagttgtgggggatatgttgtatgttagaaagaaccttaaggagtccttgtatgggccatggagacagtatgtgataacataccgtgattttcatgaagaaattcttctgtcttagagttctcccctgctgcttgagatgccagagctgtgttgttgcacacctgcaaaacaaggcacatttccccctttctctttaaagccaaagagagatcactgccaaagtgggagcactaaggggtgggtggggaagtgaaatgttaggcgataaattcctgagcaccttgtttttcttccaaggttcgtagctcctctctgcccttccaagcctgtaacctcggaggactatcttttgttctttatcctttgtcttgtttgagtgggtcagccccagaggaactgataagcaaatggcaagtttttaaaggaagagtggaaagtactgcaaataaaaatccttatttgtttttgt

SEQ ID NO: 13413 - protein, 315 aa, Homo sapiens
MAAGVPCALVTSCSSVFSGDQLVQHILGTEDLIVEVTSNDAVRFYPWTIDNKYYSADINLCVVPNKFLVTAEIAESVQAFVVYFDSTQKSGLDSVSSWLPLAKAWLPEVMILVCDRVSEDGINRQKAQEWCLKHGFELVELSPEELPEEDDDFPESTGVKRIVQALNANVWSNVVMKNDRNQGFSLLNSLTGTNHSIGSADPCHPEQPHLPAADSTESLSDHRGGASNTTDAQVDSIVDPMLDLDIQELASLTTGGGDVENFERLFSKLKEMKDKAATLPHEQRKVHAEKVAKAFWMAIGGDRDEIEGLSSDEEH

SEQ ID NO: 13414 - DNA, 1610 bp, Homo sapiens
ttttttcttttttttaagagatggaagggggtgggtcttactttgtcacccaggctggtctcgaactcctgggctcaggcatgagccaccatgcctggcccaatttttgaattttttcaaaggttctcactgtattgcccagaatggtctcgatctccagatgtgaagtgatctttcccacttggccgcctaaagtgctgggattacaccgcacctggcccatgcttttctttaaggaagatagattaccttatttctctcagtttttatgatagccgtatacctgcaaagttccatcttccatttcagattattttgtttttatttttaattctttcagtgtatgctgtgtctgttaacttgaagtaaggataataatttcataccttgcttatgctctccctttgtggtgaaatcattatactacttttctttcttttgttttttcttcaacttttattttaaattcccgggtacgtgtgcaggtttgttacataggtaaatgtgtgccatggtggtttgctgcacagatcaacccatcacctaggtattaagcccagcatccattagctattcttcctgatactctctctccctctgcccctttgtactacttttcaccattatgatttttaccatatccacctgccagttttacagttgataaatgcaaggctggggaacaaagtgagaccccccatctctacaaaataaaaatttctaaattagccatgtgtggtgttaaacacctgtggtcccggctgcttggggctgaggcaggaggattgcttgagcccagaggtcgaggctacagtgagctgtgactgagccactactccagcctggctgatgaagcaagaccctgtctcagaaaaaaaaaaatgtagctcgggcacagtggcccacatctgtaatcctagcactttgggaagccaaggtgggggaggattgctcaaggccagaagttcgatacctgcctgggcaacatagcaagaccctgtctccacaaaaagtttagaaaattagctgggcatgtggcacatacttgtagtcttagctactcaggaggctgaagccagagaattgcttgagcccaggagtttgaggctggagtgcagtgccacgatcatagctcactgcagcctcaaactcttaggctcaagtaatcctcctaccttagcctcccaagtagctgggactgtagacacatgccaccaggcccagctgatttatttttaaattttttcaggggaggtgggatcttactgtgttgcccagactggtcttgaatttcctgcctcaagcaatgctcctacctcaccctcctgagtagccaggattatagctgtgagctaccacacctggcccattttagtttttaaatgccactatgtaatgaggcatttaaatttttttccgaaaagtcaggaaagaaggacttggagcacatacctgttacgggtttaaagcctactttagtcttggccgggtgcggtggctcacgcctgtagtcccagcactttgggaggccgagacgggcagatcacgaggtcaagagatcgagaccatcctggctaacacggtgaaacctcatctctactaaaaatacc

SEQ ID NO: 13415 - DNA, 1498 bp, Homo sapiens
  CDS (160)..(1422)
actgggcggcggaagttcgacggcgccgggcgagtggctgttgagcggcgccgcgggagttccgcaggtttcccgtgttcgcagcggagccggaggccagctgaacccggccgtgggatcccggataggaggaggaggggacccataggacgcgttaacatggacctggaaaacaaagtgaagaagatgggcttaggtcacgagcaaggatttggagccccttgtttaaaatgcaaagaaaaatgtgaaggattcgaactgcacttctggagaaaaatatgtcgtaactgcaagtgtggccaagaagagcatgatgtcctcttgagcaatgaagaggatcgaaaagtgggaaaactttttgaagacaccaagtataccactctgattgcaaaactaaagtcagatggaattcccatgtataaacgcaatgttatgatattgacgaatccagttgctgccaagaagaatgtctccatcaatacagttacctatgagtgggctcctcctgtccagaatcaagcattggccaggcagtacatgcagatgctacccgaggaaaagcagccagtagcaggctcagagggggcacagtaccggaagaagcagctggcaaagcagctccctgcacatgaccaggacccttcaaagtgccatgagttgtctcccagagaggtgaaggagatggagcagtttgtgaagaaatataagagcgaagctctgggagtaggagatgtcaaacttccctgtgagatggatgcccaaggccccaaacaaatgaacattcctggaggggatagaagcaccccagcagcagtgggggccatggaggacaaatctgctgagcacaaaagaactcaatattcctgctattgctgcaaactgagtatgaaagaaggtgacccagccatctatgccgaaagggctggctatgataaactgtggcacccagcttgttttgtctgcagcacctgccatgaactcctggttgacatgatttatttttggaagaatgagaagctatactgtggcagacattactgtgacagcgagaaaccccgatgtgctggctgtgacgagctgatattcagcaatgagtatacccaggcagaaaaccagaattggcacctgaaacacttctgctgctttgactgtgatagcattctagctggggagatatacgtgatggtcaatgacaagcccgtgtgcaagccctgctatgtgaagaatcacgctgtggtgtgtcaaggatgccacaatgccatcgacccagaagtgcagcgcgtgacctataacaatttcagctggcatgcatccacagagtgctttctgtgctcttgctgcagcaaatgcctcattgggcagaagttcatgccagtagaagggatggttttctgttcagtggaatgtaagaagaggatgtcttaggaggagggcacccagaagtatcgagccatagctatccaaagtggtctgcatttctactgtaaaatgcaatttg

SEQ ID NO: 13416 - protein, 421 aa, Homo sapiens [sequence omitted]

SEQ ID NO: 13417 - DNA, 2136 bp, Homo sapiens
ttgcaatgtaaaaatatatcttggtctctgcatgatgatatattaacatctataccatggaacttttaaaaggaaaattgtgtggtataattaaaagaatattgcatgttatagagaaacttcacctgttgatttagcaggtgccattgtgtagatgctaagcaaatcttaatatgtttccttggatttttgaaatttgaatttgttgtgtaactttgctagttaaaagatttagagggatttggctgggcgcatggctcacgcttgtaatcccagcactttgggaggccgaggtaggcagatcacgaggtcaggagttcgagaccagcctggccaatacagtgaaaccctgtctcttctaaaaatacaaaaattagctgggcctcgtggcgggcgcctgtaatcccagctacttgggaggctggcaggagaatcacttgaaccagggaggtggaggttgcaatgagccgagatggcgccactgcaccccagcctgggtggcagagctagactctgtctcaaaaaaaaaaaaaagagtgggatttatcatagtttttttttcttaactgttattgactatttttaatttttattttttaattcagtggcctctcaggattattacctgcatttttttttcaggaaaatcccaattctgcaactaactctgtggccttagacaagtctcttgccttatccagggctgtttccttgtctgtaaaataaagagttggactagatgatctctaaggtcccttttacatctatagtttccttggtactatattagtgtttgatacaaaacaatttaatatatctaagccagttctccctgttatcgttgttgttttctatcattttatcattggaaacaacttggatttggttatggtaatttatatgatgcctcttggtacagttttgtgtatagtgttcctacatgcttgcatttgccagtacaaattacattcagcctataaaatagagatgaacttctgtattcaccagcacttcctttttccaattgtaacttttcattttccttctaaattcagagttttaaagtagaagtacttgctagtaatgcagatagagtcagttctctcaccagtatggatttaaattgtcctttccatctcagtttactcttttttttaaaaaaaacaaaccaatatgctacctgaaactagaaacacatttttaattctgcagctctcctaacagattattttgctttagtacagagctgggctgcaggctgagttgggagttggtaaaggattgaggacagcaatgtaggtcgcctcttcctacaggaaaaaattgaggaacgttgtgtattactggttaaaagattgattaggattatttcaagggatggttgagttgtcgttttacttatttcacccaatattttgtgtctctacttaagcagtgttgttttaaatgttactggataattgtaacataatcaaattaaattttatatttaactgatacccaagcatttgatgaaaacatgttgcaggaatgggagagtattccatagcttttgttttattgtgatttgattaaatgtgacaactaatagtttaaagacaggacttcactgttttagctgatttcctgtagaaagtgtggctaagtttaattgaaagaaatgtcttcttactagaactgattttgggggactttatccactcttacttggaacactaactgttggctataagggttcaaaaaggaagcaacagttgcttatttggcatgttgaaatatcactggctattttagagtatgaagcaaactttatcaatatgttttcttttccctccttacacacaatgtagactgatagaaaattagttttagttcttctagaatttatataaattttgtaagctccacccatgacctgccgacagtgttgcccaccggaacttttgtggcccctaccgctcagcccttcccagcacttctcccactttgtcccgagcctccttctcccccagcaggggcacaggcctggcacctccctgccttgtgtcctgagccatagtgactcttttatctgtgtgtcttttgctaaatatgccctttttatattaataaaagatgatttggagttgtgctctc

SEQ ID NO: 13418 - DNA, 1484 bp, Homo sapiens
  CDS (580)..(1137)
ttttttttcgctcgtgtcccgccgggtggcgctcaccacctccccggaacacgcgagtctcctgtcgcggttccggtcggaattaccccgtggagcacgccgatatggctgcgctgacactgaggggtgtccgggagctgctgaagcgtgtggacctcgcgacggtcccgcggagacatcgatataagaagaaatgggctgccacagagcccaaattccctgctgttcgactggctttgcagaattttgacatgacttacagtgtgcagtttggagatctttggccatcaatccgtgtcagtctcctctcagagcagaagtatggtgcactggtcaataactttgctgcctgggatcatgtaagtgctaagctggagcagctgagtgccaaggattttgtgaatgaagccatctcccactgggaactgcagtctgagggtggccaatctgcagccccatcccctgcctcctgggcctgcagtccgaaccttcgatgcttcacttttgacagaggggatatcagtcgcttccctcctgccagacctggcagcctgggtgtcatggagtactacctgatggatgctgcctccttgctgcctgttctggccctcggcctgcagcctggggacatcgtgcttgacctatgtgcctgaagagatcagggatggaaatcaagttcgagttacctcatgggatggcaggaaatggggagaactggagggggacacctatgaccgggtgctggtggatgtgccctgtaccacagaccgccactcccttcatgaggaggagaacaacatctttaagcggtcaaggaagaaggagcgacagatattgcctgtgctgcaagtgcagcttcttgcggctggactccttgccaccaaaccaggaggccatgttgtctattctacctgctcactctcacacttacagaacgagtatgtggtgcaaggtgccattgagctcctggccaatcaatacagcatccaggtacaggtggaagatctgactcacttccgaagggttttcatggacacattttgtttcttctcatcctgtcaggttggggagctggtagtaccaaacctcatggccaattttggccccatgtacttctgcaaaatgcgtaggctgacatagtatcacccaatccctgaagcaagaatacaaagggtatactctgttggatgcaccagaaactggaaactgggaccagtggcagagatgcactctcggtcctgtctccatcctgttcgtgtctttctgcagttttcggcaataagaagtagaagatttgctgtcctgctgtccaattgtggagcatcagcaggtttccaactcactcattaacccctaccccatctccaggcctgtactaaagtttgctgcccgcttaggggcttagaaggagaagccagtgagcaggctcacactaagttgtaaacataggagaagcatttggccaataaagttgttgaaactct

SEQ ID NO: 13419 - protein, 186 aa, Homo sapiens [sequence omitted]

SEQ ID NO: 13420 - DNA, 1513 bp, Homo sapiens
tgcctcaaccataagcgacattgaaactgctgcagacaagtgtgaggagatggaggaaggctacatccagtgctcccagtttctatatggggtgcaggaaaagctgggtgtgatgaacaaaggtgtggcgtatgctctgtgggactacgaggcccagaacagtgacgagctgtccttccacgaaggggacgccctcaccatcctgaggcgcaaggacgaaagcgagactgagtggtggtgggctcgccttggagaccgggagggctatgtgcccaaaaacctgctggggctgtatccacggatcaaaccccgacagcgaacactcgcctgaacttccttttggagcaccgcatggtcttgccagctaccaggagccacttaagagattattgtgctgttttccaggaaagctgcagctagaaaatggtcttaatggtgctcactttagcagacagcgtccacaatgtgaatcctacagtttccaggtgaggccctttctccagtttgcccattaactgggagaggtactttcgcctccaaggactgaattttgccaattactataaatccaaataaatacccactttcaaaacacccacccctcttgccattaagaagtcccataacccccggttggttgccagtgaagacagaagctcttactgacttggccccgaggccatcaccccctccagcagtgaacactgtccgccgctgtgaggcctgctcccctgcgaccgccctgccccccgtcaccgaatcggacactcatcctttctcacacttcccacacatgatccttcttcccttcatcaccaaaggagcctctgtatggaaacatgtccagtgttgctgcccagtgtgtatgcctcccagtacccgctctgctcggccgccttgggggttccgcttcctgttccagttcacctaaaggctgattgtgcaggcccagcactgtggctggactgccgcgccacgggcaccaggacccctaagaccaagtgacaactgggagagcctcagcatatactcttctcctccgatctcacagcctgtcatgctgctcagtgtggttctcacccctgcaagctcaaattcagttccctgaatggagtcaggtgctggaggccgtggcagcggagggtggttggggttggggctgggggtggactggtgtgagggcagaccagggccaggtagacggggctgtttggtgcctgaaggatggcagacgcctggtgtcaggaggggccgccaccaaggagcagcagctggggcagaggagctggggtcaggggccacccctctctgccgatctccctgcctgggctggctgtgaggccacctttgtcccaggcccagcctcaaggcaaggagggcgcttcactgaggtgtgaattgtacgtacaggctttttatataccaaaagtattttttgactagaccattcaaagctacccgaactatgttggaaattttttttttctcattaaaatacaggcccttaggctct

SEQ ID NO: 13421 - DNA, 1831 bp, Homo sapiens
  CDS (57)..(1700)
cagagttgcccagggaaagcagctatgacatctacagagtgcccagcagtcagagcatggaggatcgtgggtacagccccgacacgcgtgtggtccgcttcctcaagggcaagagcatcgggctgcggctggcagggggcaatgacgtgggcatcttcgtgtccggggtgcaggcgggcagcccggccgacgggcagggcatccaggagggagatcagattctgcaggtgaatgacgtgccattccagaacctgacacgggaggaggcagtgcagttcctgctggggctgccaccaggcgaggagatggagctggtgacgcagcggaagcaggacattttctggaaaatggtgcagtcccgcgtgggtgactccttctacatccgcactcactttgagctggagcccagtccgccgtctggcctgggcttcacccgtggcgacgtcttccacgtgctggacacgctgcaccccggccccgggcagagccacgcacgaggaggccactggctggcggtgcgcatgggtcgtgacctgcgggagcaagagcggggcatcattcccaaccagagcagggcggagcagctggccagcctggaagctgcccagagggccgtgggagtcgggcccggctcctccgcgggctccaatgctcgggccgagttctggcggctgcggggtctgcgtcgaggagccaagaagaccactcagcggagccgtgaggacctctcagctctgacccgacagggccgctacccgccctacgaacgagtggtgttgcgagaagccagtttcaagcgcccggtagtgatcctgggacccgtggccgacattgctatgcagaagttgactgctgagatgcctgaccagtttgaaatcgcagagactgtgtccaggaccgacagcccctccaagatcatcaaactagacaccgtgcgggtgattgcagaaaaagacaagcatgcgctcctggatgtgaccccctccgccatcgagcgcctcaactatgtgcagtactaccccattgtggtcttcttcatccccgagagccggccggccctcaaggcactgcgccagtggctggcgcctgcctcccgccgcagcacccgtcgcctctacgcacaagcccagaagctgcgaaaacacagcagccacctcttcacagccaccatccctctgaatggcacgagtgacacctggtaccaggagctcaaggccatcattcgagagcagcagacgcggcccatctggacggcggaagatcagctggatggctccttggaggacaacctagacctccctcaccacggcctggccgacagctccgctgacctcagctgcgacagccgcgttaacagcgactacgagacggacggcgagggcggcgcgtacacggatggcgagggctacacagacggcgagggggggccctacacggatgtggatgatgagcccccggctccagccctggcccggtcctcggagcccgtgcaggcagatgagtcccagagcccgagggatcgtgggagaatctcggctcatcagggggcccaggtggacagccgccacccccagggacagtggcgacaggacagcatgcgaacctatgaacgggaagccctgaagaaaaagtttacgcgagtccatgatgcggagtcctccgatgaagacggctatgactggggtccggccactgacctgtgacctctcgcgggctgccagctggtccgtcctccttctccttccctggggctgggactcagtttcccatacagaacccacaaccttacctccctccgcctggtctttaataaacagagtattttcacagc

SEQ ID NO: 13422 - protein, 548 aa, Homo sapiens
MEDRGYSPDTRVVRFLKGKSIGLRLAGGNDVGIFVSGVQAGSPADGQGIQEGDQILQVNDVPFQNLTREEAVQFLLGLPPGEEMELVTQRKQDIFWKMVQSRVGDSFYIRTHFELEPSPPSGLGFTRGDVFHVLDTLHPGPGQSHARGGHWLAVRMGRDLREQERGIIPNQSRAEQLASLEAAQRAVGVGPGSSAGSNARAEFWRLRGLRRGAKKTTQRSREDLSALTRQGRYPPYERVVLREASFKRPVVILGPVADIAMQKLTAEMPDQFEIAETVSRTDSPSKIIKLDTVRVIAEKDKHALLDVTPSAIERLNYVQYYPIVVFFIPESRPALKALRQWLAPASRRSTRRLYAQAQKLRKHSSHLFTATIPLNGTSDTWYQELKAIIREQQTRPIWTAEDQLDGSLEDNLDLPHHGLADSSADLSCDSRVNSDYETDGEGGAYTDGEGYTDGEGGPYTDVDDEPPAPALARSSEPVQADESQSPRDRGRISAHQGAQVDSRHPQGQWRQDSMRTYEREALKKKFTRVHDAESSDEDGYDWGPATDL

SEQ ID NO: 13423 - DNA, 1996 bp, Homo sapiens
  CDS (379)..(1617)
atccccagcaagcaccagggcccgtgtgaccaggccccgtccccatgcctcggggtgcagtgtgcatttggggcgacgtgtgctgtgaagaacgggcaggcagcgtgtgaatgcctgcaggcgtgctcgagcctctacgatcctgtgtgcggcagcgacggcgtcacatacggcagcgcgtgcgagctggaggccacggcctgtaccctcgggcgggagatccaggtggcgcgcaaaggaccctgtgaccgctgcgggcagtgccgctttggagccctgtgcgaggccgagaccgggcgctgcgtgtgcccctctgaatgcgtggctttggcccagcccgtgtgtggctccgacgggcacacgtaccccagcgagtgcatgctgcacgtgcacgcctgcacacaccagatcagcctgcacgtggcctcagctggaccctgtgagacctgtggagatgctgtgtgtgcttttggggctgtgtgctccgcagggcagtgtgtgtgtccccggtgtgagcaccccccgcccggccccgtgtgtggcagcgacggtgtcacctacggcagtgcctgcgagctacgggaagccgcctgcctccagcagacacagatcgaggaggcccgggcagggccgtgcgagcaggccgagtgcggttccggaggctctggctctggggaggacggtgactgtgagcaggagctgtgccggcagcgcggtggcatctgggacgaggactcggaggacgggccgtgtgtctgtgacttcagctgccagagtgtcccaggcagcccggtgtgcggctcagatggggtcacctacagcaccgagtgtgagctgaagaaggccaggtgtgagtcacagcgagggctctacgtagcggcccagggagcctgccgaggccccaccttcgccccgctgccgcctgtggcccccttacactgtgcccagacgccctacggctgctgccaggacaatatcaccgcagcccggggcgtgggcctggctggctgccccagtgcctgccagtgcaacccccatggctcttacggcggcacctgtgacccagccacaggccagtgctcctgccgcccaggtgtggggggcctcaggtgtgaccgctgtgagcctggcttctggaactttcgaggcatcgtcaccgatggccggagtggctgtacaccctgcagctgtgatccccaaggcgccgtgcgggatgactgtgagcagatgacggggctgtgctcgtgtaagcccggggtggctggacccaagtgtgggcagtgtccagacggccgtgccctgggccccgcgggctgtgaagctgacgcttctgcgcctgcgacctgtgcggagatgcgctgtgagttcggtgcgcggtgcgtggaggagtctggctcagcccactgtgtctgcccgatgctcacctgtccagaggccaacgctaccaaggtctgtgggtcagatggagtcacatacggcaacgagtgtcagctgaagaccatcgcctgccgccagggcctgcgaggggctatcgagaggagctcactgtgggatggggttgacctctgccgcctgcctgggtatctgggcctggccatggctgtgttcttcatgtgttgattttatttgacccctggagtggtgggtctcatctttcccatctcgcctgagagcggctgagggctgcctcactgcaaatcctccccacggcgtcagtgaaagtcgtccttgtctcaggatgaccaggggccagccagtgtctgaccaaggtcaaggggcaggtgcagaggtggcagggatggctccgaagccagaaatgccttaaactgcaacgtcccgtcccttccccacccccatcccatccccacccccagccccagcccagtcctcctaggagcaggacccgatgaagcgggcggcggtggggctgggtgccgtgttactaactctagtatgtttctgtgtcaatcgctgtgaaataaagtctgaaaacttt

SEQ ID NO: 13424 - protein, 413 aa, Homo sapiens
MLHVHACTHQISLHVASAGPCETCGDAVCAFGAVCSAGQCVCPRCEHPPPGPVCGSDGVTYGSACELREAACLQQTQIEEARAGPCEQAECGSGGSGSGEDGDCEQELCRQRGGIWDEDSEDGPCVCDFSCQSVPGSPVCGSDGVTYSTECELKKARCESQRGLYVAAQGACRGPTFAPLPPVAPLHCAQTPYGCCQDNITAARGVGLAGCPSACQCNPHGSYGGTCDPATGQCSCRPGVGGLRCDRCEPGFWNFRGIVTDGRSGCTPCSCDPQGAVRDDCEQMTGLCSCKPGVAGPKCGQCPDGRALGPAGCEADASAPATCAEMRCEFGARCVEESGSAHCVCPMLTCPEANATKVCGSDGVTYGNECQLKTIACRQGLRGAIERSSLWDGVDLCRLPGYLGLAMAVFFMC

SEQ ID NO: 13425 - DNA, 1503 bp, Homo sapiens
  CDS (442)..(1419)
cttcccgtcccagcacgccacgctgtcagccttcgccgcggtctatgtgtcgatgtacttcaactcggtcatctcggacaccaccaagctgctgaagcccatcctggtcttcgcctttgccatcgccgcgggcgtatgcgggctcacgcagatcacgcagtaccgcagccaccctgtggacgtgtatgccggcttcctcatcggggcgggcatcgctgcctacctggcctgccacgcggtgggcaacttccaggccccacctgcagagaagcccgcggccccggcccccgccaaggacgcgctgcgggccctgacgcagcggggccacgactcggtttatcagcagaataagtcggtgagcaccgacgagctggggcccccagggcggctggagggcgcgccccggcccgtggcccgcaagaagaccccgcgcgccgccacatgaccatccacgtgccgctggacgcctcgcgctccaagcagctcatcagcgagtggaagcagaagagcctggagggccgcggcctggggctgcccgacgacgccagccccgggcacctgcgcgcgcccgccgaacccatggcggaggaggaggaagaggaggaggacgaagaggaagaggaggaggaggaagaggaggaggacgagggcccggccccgccctcgctctaccccaccgtgcaggcgcggccggggctggggcctcgggtcatcctcccaccgcgcgcggggccgccgccgctggtgcacatcccggaggagggcgcgcagacgggggccggcctgtcccccaaaagcggcgccggggtgcgcgccaagtggctcatgatggccgagaagagcggggcggcagtggccaaccctccgcggctgctgcaggtcatcgccatgtccaaggctccgggcgcgccgggccccaaggcggccgagacggcgtcgtcgtccagcgccagctccgactcctcgcagtaccggtcgccgtcggaccgcgactccgccagcatcgtgaccatcgacgcgcacgcgccgcaccaccccgtggtgcacctgtcggccggcggcgcgccctgggagtggaaggcggcgggcggcggggccaaggcggaggccgacggcggctacgagctgggggacctggcgcgcggcttccgcggcggggccaagcccccgggcgtgtcccccggctcgtcggtcagcgacgtggaccaggaggagccgcggttcggggccgtggccaccgtcaacctggccacgggcgaggggctgcccccgctgggcgcggccgatggggcgctgggcccgggcagccgggagtccacgctgcggcgccacgcgggcggcctggggctggcggagcgcgaggcggaggcggaggccgagggctacttccgcaagatgcaggcgcgccgcttccccgactagcgcggcggggccgggggcgggcggggggcgggccgagggcgcgggcggccgcgcggatgctcaataaagcggcagaaaccg

SEQ ID NO: 13426 - protein, 326 aa, Homo sapiens
MTIHVPLDASRSKQLISEWKQKSLEGRGLGLPDDASPGHLRAPAEPMAEEEEEEEDEEEEEEEEEEEDEGPAPPSLYPTVQARPGLGPRVILPPRAGPPPLVHIPEEGAQTGAGLSPKSGAGVRAKWLMMAEKSGAAVANPPRLLQVIAMSKAPGAPGPKAAETASSSSASSDSSQYRSPSDRDSASIVTIDAHAPHHPVVHLSAGGAPWEWKAAGGGAKAEADGGYELGDLARGFRGGAKPPGVSPGSSVSDVDQEEPRFGAVATVNLATGEGLPPLGAADGALGPGSRESTLRRHAGGLGLAEREAEAEAEGYFRKMQARRFPD

SEQ ID NO: 13427 - DNA, 1464 bp, Homo sapiens
ggacaatgttgaatgaatgtctggctcagtgatggagagccaggttcatctttgaaatctagggctcttcactcatgaagcagactcctagtcctggagtgactgtgtacgagagcgtggttgtggtgctgtatgtgaacgcatgcaagcttgattcaccttcagggggctgataacctagtaaatcatcaaaatgagatcataagtgttaatgtacactggacatgaaaacaaagactggtttagcagcagacattggtttactctgcagcctgtgttttctgtttccccctttcccacctccttccccccacccaatcctttttttttttcttttttgcttttcttttctttttttttagtttttatttactttacctagtatgcctttttttagttgcttctcaagtcagaaaacttttcaggaaggtttccctgtgcatttgcaccagatgaatgtttgatgctatgaaaagctttccatatcatcaaaactaatttgtgtagatttttgcatgaaaaaaatcataaatttccctcaaaatagactgtgttgcagtacacaagttgccataatagtataaaacagtaaaatgtgcttaaaaggccacccttttcattttcagagataacataaagatctttgcatgaggtaaatctacagcatagttcatttttagattttgttgagtcctgtaaagaagaagaagaaaaaagtttcagttgtggtagaataccgtgctgtgtttaaatgttacttgttttcaaactttgttttctatgaaaatgatatggaaacttctaaaatggaatttggtgcatatgtactgctgaataaagaccgatgaagaggtttgagtagatgtacaaatcaagtaatggtttgaacacctttaataatatgcctaatctgttcaattgttttagaatctttttatcttagatgtaggcagccatgaacaatctattttgagccactttagggagaaaactttgtatttttaaaacttgcataaaagttatgcaagtggtttttataaattggaataatacctcagttttgaggttatgcacactaaattaaatgtgacataaattaatttgtacaaaaagaactctttataaggtggctcattgtaggaaatcctgtgccttcccctttgagcacaagtgttgcatgaacaacagtttgctataagaaacataccagattagccaccattagcatctatatctactttgtgtttaaaaatcaactggtaattctgaaacactgtagaatggataaaaattattttgtgatcataactctttgttgaactagagtatttttgcagcattccttgtcatcagaaacatggttaaagtttaaaactagaagcagcagaaaactagcttgtaaaatttatccaagtagagtgcaggctaggctgtcttggggaaataaacattaaaacttaaagc

SEQ ID NO: 13428 - DNA, 1528 bp, Homo sapiens
  CDS (65)..(1465)
ctgccgcggctttgcggggacgggggagtggtagtgggggctgcagctgccggacccaggcgcgatggctacgggcgcggatgtacgggacattctagaactcgggggtccagaaggggatgcagcctctgggaccatcagcaagaaggacattatcaacccggacaagaaaaaatccaagaagtcctctgagacactgactttcaagaggcccgagggcatgcaccgggaagtctatgccttgctctactctgacaagaaggatgcacccccactgctacccagtgacactggccagggataccgtacagtgaaggccaagttgggctccaagaaggtgcggccttggaagtggatgccattcaccaacccggcccgcaaggacggagcaatgttcttccactggcgacgtgcagcggaggagggcaaggactacccctttgccaggttcaataagactgtgcaggtgcctgtgtactcggagcaggagtaccagctttatctccacgatgatgcttggactaaggcagaaactgaccacctctttgacctcagccgccgctttgacctgcgttttgttgttatccatgaccggtatgaccaccagcagttcaagaagcgttctgtggaagacctgaaggagcggtactaccacatctgtgctaagcttgccaacgtgcgggctgtgccaggcacagaccttaagataccagtatttgatgctgggcacgaacgacggcggaaggaacagcttgagcgtctctacaaccggaccccagagcaggtggcagaggaggagtacctgctacaggagctgcgcaagattgaggcccggaagaaggagcgggagaaacgcagccaggacctgcagaagctgatcacagcggcagacaccactgcagagcagcggcgcacggaacgcaaggcccccaaaaagaagctaccccagaaaaaggaggctgagaagccggctgttcctgagactgcaggcatcaagtttccagacttcaagtctgcaggtgtcacgctgcggagccaacggatgaagctgccaagctctgtgggacagaagaagatcaaggccctggaacagatgctgctggagcttggtgtggagctgagcccgacacctacggaggagctggtgcacatgttcaatgagctgcgaagcgacctggtgctgctctacgagctcaagcaggcctgtgccaactgcgagtatgagctgcagatgctgcggcaccgtcatgaggcactggcccgggctggtgtgctagggggccctgccacaccagcatcaggcccaggcccggcctctgctgagccggcagtgactgaacccggacttggtcctgaccccaaggacaccatcattgatgtggtgggcgcacccctcacgcccaattcgagaaagcgacgggagtcggcctccagctcatcttccgtgaagaaagccaagaagccgtgagaggccccacggggtgtgggcgacgctgttatgtaaatagagctgctgagttggaccagg

SEQ ID NO: 13429 - protein, 467 aa, Homo sapiens
MATGADVRDILELGGPEGDAASGTISKKDIINPDKKKSKKSSETLTFKRPEGMHREVYALLYSDKKDAPPLLPSDTGQGYRTVKAKLGSKKVRPWKWMPFTNPARKDGAMFFHWRRAAEEGKDYPFARFNKTVQVPVYSEQEYQLYLHDDAWTKAETDHLFDLSRRFDLRFVVIHDRYDHQQFKKRSVEDLKERYYHICAKLANVRAVPGTDLKIPVFDAGHERRRKEQLERLYNRTPEQVAEEEYLLQELRKIEARKKEREKRSQDLQKLITAADTTAEQRRTERKAPKKKLPQKKEAEKPAVPETAGIKFPDFKSAGVTLRSQRMKLPSSVGQKKIKALEQMLLELGVELSPTPTEELVHMFNELRSDLVLLYELKQACANCEYELQMLRHRHEALARAGVLGGPATPASGPGPASAEPAVTEPGLGPDPKDTIIDVVGAPLTPNSRKRRESASSSSSVKKAKKP

SEQ ID NO: 13430 - DNA, 2325 bp, Homo sapiens
actcttgctgtactacaaagagatagaatcaaactgctttttttcgacatactggtttttctttctgtttttcttctccttcttctatttcttgtggatattatggctaataacacaacaagtttagggagtccatggccagaaaacttttgggaggaccttatcatgtccttcactgtatccatggcaatcgggctggtacttggaggatttatttgggctgtgttcatttgtctgtctcaccttccggcgacaagcttccctggaacaagcaaattcctttccaagaaaatcaagtttcagagcttctactttccatccctttctgcaatgtccaccacttcctgtggaaactgagagtcagctggtgactctcccttcttccaatatctctcccaccatcagcacttcccacagtctgagccgtcctgactactggtccagtaacagtcttcgagtgggcctttcaacaccgcccccacctgcctatgagcccatcatcaaggcattcccagattcctgagtagggtggcttttggtttttgtttctttcttgtcttgtcttttattgaaaggaaatcaaaaataggctaaacagaattttgagggcatggcccaaataactcatgagttccaagttgaaacatggttgtgcaagttggacattacaatgtttttagtagagatgaagtgtcactatgttaccaaggctggtctcaaactcctaaactcagatgatcctcctgcctcggcctcccaaagtgttggaattagcctggccaatcttggatttttaatggaatatgtgggcacaaaatgacagaacataggacattctaaagttccttgatttgatcattataagaagtgtgggactcaagcacaggaaactgaactcttttggtgtcattggatgtttcatttttgacactaattttttctggacaaactctttatgtgtttttcccaagaatagttatctacttcctggaggcaaaatccttggatttactaacatgatgatttaccttttcttcaccgttgtcgttacattgttagaaaagcaacaggaaaaaatccaattcatttgacctaaaaacaagcctcaagtttaaaaccaagctcacgtttttcttaagggaaaaattttctttcttaaacttacatctagcaacttggaaagcactttctctggggatcttcttttgtaactttgcagacaaataagtatgagtcactggggagagagtttgttattgaaatagatgttgcccatgaagaattctccttcctgggattgactcttaatcatcaggcatcattcctggtttgcttctctacgaatctcaattccaacttctctgcagagtctgtacagtgattaagccatgccagatggtctttggtgcacacagttatttaagaatccacttccacaggtggctgcccttgtaaggaagaatgcatccctaaatgtggccaccagagagttccagtgggcagatgtctgtggctgcccttctcatttaaggacatgagttcactggagtattactcaaaaagtctgtggttcatttccagtattgtgaatatttagtttatgtggccgtttctttgtttctttgaacagtgggattttcagtgaaaaagtaccctctttttcatttcctattgcagtggtcacagctaatagtgtctgaacatggttcaagaataagagattccatgtagcattttctttattattttcatttcccttatattatccatcattccttaaggacaattattcttaataatgcttatagaaaatgttctctaattaaacatgccaaaaggaaaaagtaagagaaagagggagcaagaagaaaatggaagaaaaagggaaaaaagctaaccggataaccaatttgttataagttggttttcaacaaagaaatttagcagccaagtaaggtttcaagggaatattaacttggtatcagggctacttttttttttttttttttacttgcatgtcatccttaatgtctaacatgaaaaatcagcaaagagtatggtttttatcaagaatttgtgttgggagtaaaaactgctttatagctcccaaattaggaagagaagagcagaaatcctctggggcatttaaccatctggcagaattgttgctgcacccttatcccagttataagacagtcaaaatgactatttcctaaatattgtgagtgtatgaaatgtgaaattaaagcaaaaactggagacttttaatgtatttctttaatttgaaatgttttgtggattgtgaaataaaaataaatttatgtc

SEQ ID NO: 13431 - DNA, 1653 bp, Homo sapiens
  CDS (106)..(1491)
ctagaagagttccggtccgattctgcgaaagaggaagtgagagaaagcgcgtactaccttcggtctaggcagcggaggcagccgcgaccccaggaaaccgaggaaatgaagacgcgaaggactacccgccttcagcagcagcactcagagcagcctccgctacagccgtctcctgttatgaccaggagagggctgcgggactctcattcctctgaagaggttgaagcatcttcccaaactgatttaagccaaacgatctcaaagaaaactgtcaggagcatacaagaggctccagtgagtgaagatcttgtaatcaggttacgtcgaccccctctaagatacccaagatatgaagccaccagtgtccaacagaaggtcaatttctctgaagaaggagaaactgaagaagatgatcaagacagctctcacagcagtgtcactactgttaaggccagatccagggattctgatgaatctggagataaaaccaccagatcatctagtcaatatatagaatcattttggcagtcatcacaaagtcaaaacttcacagctcatgataagcaaccttcagtgctaagctcaggatatcaaaaaactccccaggaatgggccccacaaactgcaagaataaggaccaggatgcaaaatgacagcattctgaaatcagagcttggaaaccagtcaccatcaacctccagccgacaagtgactggacaaccccaaaatgcatcttttgtcaagaggaaccggtggtggctacttcctctgatagctgctcttgcctctgggagtttttggttctttagtactcctgaggtagaaaccactgctgttcaagagttccagaaccagatgaatcaacttaagaataagtaccaaggtcaagatgagaagctgtggaaaaggagccaaacattcctggaaaaacatcttaatagctcccatcctcggtctcagcctgctatcttactgctcactgctgcccgagatgctgaagaagcacttaggtgtctgagtgaacaaattgctgatgcctattcttcttttcgtagtgtccgtgccatccggattgatgggacagataaagctactcaagacagtgatactgtcaaactagaggtagaccaagaactgagcaatgggtttaagaatggccagaatgcagctgtggtacaccgctttgagtcatttcccgcaggctctactttgatcttctacaaatattgtgaccatgaaaacgcagccttcaaagatgtagccttagtcctgactgtcttattggaggaagagacacttggaacaagtctaggcctaaaggaagttgaagaaaaagtaagagattttcttaaagtcaagttcaccaattctaacacacccaactcctacaatcatatggacccagacaaactgaatggcctctggagccgtatttctcacttagttctgcctgtgcaacctgaaaatgccctgaaaaggggcatctgcttataagaagtgagagagaagaaaaatcatgtcccaagttctgagaattgttcacactttctaaccagagacagaattcagagctctttttgaaagaactagtttctttttaaagaagttaagtgcttacataaacatggaacatataaatcattcattcaacct

SEQ ID NO: 13432 - protein, 462 aa, Homo sapiens [sequence omitted]

SEQ ID NO: 13433 - DNA, 1617 bp, Homo sapiens
ggagaatgctgatagaatggtatttttggatcaagataggagggtgtgatatgggaacttctagtccccccctttctcaggagagagctgtcttttgaagaaatccatcgcacgaaaagcaggcgagagaggggaaacctgacattgtttgagcccctgcagtcagctgccatcaaagcctttgacttcgcatgacttgaaccactgaatcattttttttctttttttttttttttgacagagtctcgctctgtcacccaggctggagtgcagtggcacgatcttggctcactgcaacctgcgcctcttgggttcaggcggttctcgtgcttcagcctcccgagtagctgggactacaggcacccgccaccacatctggctaatttttgtatttttagtagagacaggattttgccttgctggccaggctggtcttgaactcctggccttaagtgatccacctacctcagcctcccaaagtgctggaattacaggtgtgagccaccacacccggcctgaattgtcttttatctcaagttccttcattgctactcaaagtgtgctccacaacccagcacagccacatcatcggagagcttgctagaatgttgggccctatcttagacctactgagtcagactctgtattttaagaaggtgcccacgtgactcacgtccacgctaaagtttgaaaaatgctgagctacttcaacctggactttgtcacctataatagaattaaatccccttcatcagttgcgacaacagaaaccccaactcaaacttccctaaatcattagggtatctttgattggccaggtgcaatggcccacatctgtagttctagcactttgggaggctgaagcaggggcatcgcttgaggccaggagtttgagaacagcccaagtaacgtagcaagagacctcatctttacaaaaagttaaaaaaaagaaaagaaaagaaaagaaaaagaaattagctaggtggtagcacgagcctatagtcctagctactcaggaggctgagctggaggatcccttgggcccaagagctggaaggctgcagtgagctatgtttgcaccactgcactccagcctgggccagagcgagacactgtctctaacaaaaaaggatatattttacttaagaagccccatggtagagcagactcgagagactcaactgagccaagcaaagatccagattttcttcatctcagctctgtcatcctcagtgtggacttcattatcacaccataccaaggtaatcatcagcaggtctaggcctgatcatgtctctaggccttcttaggagtgatagaatctttattagaagcctcctaggccgggcgcagtggcttacgcttgtgatcccagcactttaggaggctgaggcgagcaggtcacctgaggtcaggagtttgagaccagcctggccaacatggtgaaaccccgtctctgctaaaaatacagaaatttgccaggtgtgatggcgcacacctgtaatcccagctactcgggtgactgaggtatgaaaatcgcttgaacctgggaggtggaggttgcagtgagccgggaacgtgccattgcattccagcctgggtaacagagcaagactc

SEQ ID NO: 13434 - DNA, 2267 bp, Homo sapiens
  CDS (228)..(2174)
cctcagtgtaggagtgatctgaagcaggacaagctcagcctgcagctgccgtgggctttgtgtggactggacgcagagcttgggagacgggggagggctattactccaattcactgtcaatggaattacagctatagcggcagtgtatataggattgctttttctcgtcttcctgggttctgaagtaacggaagctaccttgtataaagacctcaacactgctgaccatgatcagcgcagcctggagcatcttcctcatcgggactaaaattgggctgttccttcaagtagcacctctatcagttatggctaaatcctgtccatctgtgtgtcgctgcgatgcgggtttcatttactgtaatgatcgttttctgacatccattccaacaggaataccagaggatgctacaactctctaccttcagaacaaccaaataaataatgctgggattccttcagatttgaaaaacttgctgaaagtagaaagaatatacctataccacaacagtttagatgaatttcctaccaacctcccaaagtatgtaaaagagttacatttgcaagaaaataacataaggactatcacttatgattcactttcaaaaattccctatctggaagaattacatttagatgacaactctgtctctgcagttagcatagaagagggagcattccgagacagcaactatctccgactgcttttcctgtcccgtaatcaccttagcacaattccctggggtttgcccaggactatagaagaactacgcttggatgataatcgcatatccactatttcatcaccatctcttcaaggtctcactagtctaaaacgcctggttctagatggaaacctgttgaacaatcatggtttaggtgacaaagttttcttcaacctagttaatttgacagagctgtccctggtgcggaattccctgactgctgcaccagtaaaccttccaggcacaaacctgaggaagctttatcttcaagataaccacatcaatcgggtgcccccaaatgctttttcttatctaaggcagctctatcgactggatatgtccaataataacctaagtaatttacctcagggtatctttgatgatttggacaatataacacaactgattcttcgcaacaatccctggtattgcgggtgcaagatgaaatgggtacgtgactggttacaatcactacctgtgaaggtcaacgtgcgtgggctcatgtgccaagccccagaaaaggttcgtgggatggctattaaggatctcaatgcagaactgtttgattgtaaggacagtgggattgtaagcaccattcagataaccactgcaatacccaacacagtgtatcctgcccaaggacagtggccagctccagtgaccaaacagccagatattaagaaccccaagctcactaaggatcaacaaaccacagggagtccctcaagaaaaacaattacaattactgtgaagtctgtcacctctgataccattcatatctcttggaaacttgctctacctatgactgctttgagactcagctggcttaaactgggccatagcccggcatttggatctataacagaaacaattgtaacaggggaacgcagtgagtacttggtcacagccctggagcctgattcaccctataaagtatgcatggttcccatggaaaccagcaacctctacctatttgatgaaactcctgtttgtattgagactgaaactgcaccccttcgaatgtacaaccctacaaccaccctcaatcgagagcaagagcaagaaccttacaaaaaccccaatttacctttggctgccatcattggtggggctgtggccctggttaccattgcccttcttgctttagtgtgttggtatgttcataggaatggatcgctcttctcaaggaactgtgcatatagcaaagggaggagaagaaaggatgactatgcagaagctggcactaagaaggacaactctatcctggaaatcagggaaacttcttttcagatgttaccaataagcaatgaacccatctcgaaggaggagtttgtaatacacaccatatttcctcctaatggaatgaatctgtacaaaaacaatcacagtgaaagcagtagtaaccgaagctacagagacagtggtattccagactcagatcactcacactcatgatgctgaaggactcacagcagacttgtgttttgggttttttaaacctaagggaggtgatggtaggaaccctgttctactgcaaaacactgg

SEQ ID NO: 13435 - protein, 649 aa, Homo sapiens [sequence omitted]

SEQ ID NO: 13436 - DNA, 2274 bp, Homo sapiens
  CDS (464)..(826)
agggcaatacagtttttgtaaaattttacaaaaattggactccccccattgaaacactgtactttgaaagaaacttcaaattcagcatattttttaaaaatctggatgatgactcgttttctttctttcaaaccttttaatttcgacaacatttagcttaaggcaaattttatctttgttatagctatttcagaacagcttttaaaatgcaatttaaaaaatggcatttagcaagcaattgccttttcaaccttaaccatagagcctcttccatggattccattatattttattaacataagttaaaataggagtgttctgggtttcacaaggattaaagttcctatctaatgtgcatgtaactaaacgcacgtttacgtacataatagctattggtcacagtttgtatgatggtctttcagccagaaaacagggctgcagttcttacagtagtccttgaataatgacgttacattcaacgtcttttcattattgggttatgagaaaaaaatttgattccaggtgggtgcccctgtctgtgtggaatttgcacattctcctcaagtctgtttgggttttctctggatactacagttttctcccacatcccaaacacacgcatcgcatgttaggtttatcggcttgtttaaatggtcctacttttgagcaagtgcgctgtgtgtgtgtgtgtgtgtgtgtgtgtgtgtgtgtgtgtgtgtgtgttagtgcaccctgcgatgggatggcatcctggccagggttggttcctcctttgtgccctgagcttctgggatgggctctggcaacccataagcctgaactggaataagcaagtaaataattattttgctttgtttatttttcttaaatgtatgtatagctcacatgcttacatgtacttcattgtttgatattagaagtgtttttgcctttatttagaagttcggtgatatttctgtaactagaaataagccataagaacttaactcttgtttattatatcaattagcctatggtaaaattgattttattatactacatcatttctcttaaagtcacagtttccaagaacctatcaaggatgttaggtaaggacttactgtatactagttcaaataccactgggctggtattaagactaccccctcactcagcagtgtggggctactcaggtgcagctgtcagcaagccttgctgattggttccttcaattggctgcttcagattccatgcaattgacaagtttgtcttcagagaggaaggccttttaactgaaaactgcaatcaaaattgttccttacattgcacaaaaacagcattttaagagtgcaatagtcattcaaattgaggactacatcctgtaaccttttccagctggactgaattaaatatgtaacatccccaggagtaatttttgagaacagcactcggctttaccttgactactgaatcattaaaacacatgtggaaacattccacattccttccatctgaccctttggcgataaatggccacctcctggcaatttatattgaagtctatttctaaaaaaataatgtacgcccacttggtcagcccttaggcattttgctgtgtgcttgaaaacattgtcatgtgttcctggatttatagaatatccacattctcctttgagtctgctgataccaatttcttattctttcatctgcataatagcttaatgttaataacttgaaaagttcagttctgtggatttaaagagggcaatataagttgattgccctttaattattgaacttttaaatattcgtcttttgtctgtttcctaaatgagcagagaatcaaaatggcatagttttcaatagtcctggcttagaggaaaactaattgcagacattcctttctttctagaaaccttctttattacttagagtgtagaattccatatttaatatgtatttataaacatatactcctcaaaatgaacaaagcagtcatgtaaatactggacttggatcaataaaatgctatgaatgtcgtatatatggatttcagcctagtttttgataaagtctctgatgatatttctgttgtaagaaggtgaaatatggcctatcagtaaggacagcaaaatgcactggacctcttggtggtggtgaacagcctcctattccttgtctaggttattgtcaggttgattctgtaataatctctggtctcctgctctcccaccgactccttatttttagactcttattgtcttatttcaaacaatttcttacttaaagtattac

SEQ ID NO: 13437 - protein, 121 aa, Homo sapiens
MTLHSTSFHYWVMRKKFDSRWVPLSVWNLHILLKSVWVFSGYYSFLPHPKHTHRMLGLSACLNGPTFEQVRCVCVCVCVCVCVCVCVSAPCDGMASWPGLVPPLCPELLGWALATHKPELE

SEQ ID NO: 13438 - DNA, 1480 bp, Homo sapiens
ggaacagcaagtggcacatagtaggcacaccttttattcctctctcatcctgttctctactcattaagctgtccactctcttttttgaccttagcacattcctaatgctctaaccttctcagcctctttttttaaagtgtcagagccctataaaatattgttaataaataattttaacataaaaagaggtacagatttacagatgtacatgcagtataaaatgataacctcaagcatacctttctccaaagaaaaatgttacaaaactaaacacagttggctgagcttgagttgcattactgcatacttaggacgtgccagcacataacaaacgtttaaggaaagtgattacaagaagaaaagttaatattttagacaagttgattcagtttttcttgggttgtatgatgttagaagttgactactgtctcaaattggagcctgtaggccactggtgttttataggcacttgattggagaactaatgctttaaccacaccagaataattgcattctgcaaattaaatgcaatgccatatgctgccaatcccccctgcgtgtcccccggcattatcttctttctcgaccaccactgatgagcatctaattgcccttcaaggccttattcagatggcccttattgtagctgtttctgatctttttagactcatttggcccctcacttaagattccatggcatctgatacatacctctaatataacacactgttatggttacccttgttcgtctgtcttccccaccactctgcaagtgtctccatgcttgacgttttgtgcatgtctgtgttgctcacattgtacacattgcattgtattcaggagacatttaaaagcagccttttgaatttaagttaaggtacttcaattggaagtacctctatgtcctgtggagttaattcaaagtatttctatatcttgtggagttaactcacccaaggacacttaatggtgatgttataaagaggaataaactctaagacctaattcctttaacactgaagcttcaaggcagagtgcaacttttaattctgcttcttggaacaagaggagagagcagtgggtttgtttgctttttccaactcagaaataacactaggtaaggaagggatttatagaggcatgatgtggacctcgaatgaatggcttagtgaactgacccaggaagttgatgtagacttacattttgttcattaaaatcaagcagttgccagcactttgggaggccaaggtgggtgggtcacgaggtcaggagtttgagaccaacctggccaagatggtgaaaccctttctctactaaaaatacaaaaattagccaggtgcggtggcgggcacctgtaatcccagctacttgggaggctgaggcaggagaatcacttgaacccgggaggcggaagttgcagtgagctaagatcatgaccctgcactccagcctgggcgacaaagcaagactccgtcaaag

SEQ ID NO: 13439 - DNA, 1702 bp, Homo sapiens
atgcatggtaaatttgaatttccccattgttctctagagctaggtcaaaaaaacaactgtttcttttcttattccactattaataaattgaaagcttgctgtacaaaggcaacagcaacttaaaaaagaaaatctggacaatagatgtggactccaaggggccactgccatcccttcctgtgtgctctttttgacaagtaaatcactccagttagctgatgtcctgaaatgacatttgtacctgaggcaattcttattagagcttactcaggacttttcaaacatcaggacacacatagcaatttggatgttgtaaaactacgtgttacatttggagaggtcttgttgagaaggcaaaattttctaaatattttgatatcaatttgggtaaagaaaggaatacttttgttagaatgagaattaaagagaaaacaaaagaatcttggcaaaattttccctctgaaattacaaactttaggaacttttccagatgtatcgaatttaatttgacattgatgtcactcttcataccaagtgaatctattctcatgaactttgaacccatgttaattttggaccctataactaatttcctttctgtatcccatggtggtcaaagcagtaaaggagtttagagatacttagcaaatgccattcatatagtattgttagccaaactattattccttccttagaagttgatgtatcagaaaatttataagttatttgtatttatatataagtacatcagaacttgcccacatgataactcatgtttgctttaataaggaaaatatgttatttgaggttaattatatgatagtgaggaacattttacaattatttacagtgtttgacattaattgctgtcctatgatacagtagtaatgttaacagagagtttaatatgtttagcattatctttatggaatttatattcaccaatttcaggaaaaccaaccatagaactttataataggacagttataacctgactgaaccaaatccatcagcataatgactgtgtgttctgagaaatgcaaacaactttatgaaagtgtggtcatcttgacccccaaagagccacagtagctgtcaattattgagatttttaaatggtaaatattgcaaaagttaaacaagggtaccacaatatcatttataattgatgtcaatattagtagtccactttatgcttaaaataaaatcataaaaaatcaagttttaaggttatattttttaaaataatgaattttctatctctaggcaacatgtctttattattcaagctgaatgtttaagagagattttggtcttaaaggcttcacatcatgaaagtgtacatgcatatgcaagtgtgaattacgtggtatggatgtttgcttgtttattaactaaagatgtacagcaaactgcccgtttagagtcctgttaatattgatgtcctaacactgggtctgcttatgctagttcagtatttggtctaggcttcattttgatatgaccgaattgcaatctatatttttaaaaagaaaaatcaaaatacattagggtttacttggttgtggcaaacaaacaaaaaatgctttcagtgttgaaatatctctattttccaaagatgataaactttcatcgttcttagcctacattgtcatttatatcaccaaatgagtttatagattaatgcaataaactttctaat

SEQ ID NO: 13440 - DNA, 1937 bp, Homo sapiens
gataactgtattatatttttcatctagctataaaactttaatcttactcttaatatcctggatttaattcaaactcctgttgggttcttcacaaatgagaacttgttcaaaggatttattgaactggtattgatttcactgaaaattttccacaccaccaccattgtttttttgaattcttggtgttgtgcttcccaccttctgtccttttcgtttgtttagagaagatgaatttttaaaaagcagataaattgctaatgagcaataatgaccttatctttaccaaaacactgaaaattaagagaggttcagtgttgaagaagcacaatatgctgcggtgtctttttctagaagtgaatggaaatcttgctcagttggcatttcaagcaggaaatgaaatgcttgctttaatggcaaagcagcgttaacatttttcctgtcgtgtagcagagagtacaagaatcatttcagcaaagcagtgactcaccatgagacgttatctccatggagctgcgttttgacttttcccactctcttactcatagaaggaggacaaaggaacgaaatgaaatcatgctcacaatgaactgttcattacatcaactgatctctctctctctctcttcctctctttctctttctcccataccccaaggcaaaatttttttaaagaaatgactttaaaaactatcatttctgtattttaattacatctcttagaaataaaattatgtttgcaccatagctttctaagaaaaaaaaatgtgtttttaactgagtcttagttgcttagtgcttttatttgtgttatttttagactgtattttaaccacaactacaaggatcatgtttcattgcacttacttatttgccagtgtctgcctgtctttgctaaatacattactatctccaaattgcctaaaatctgctatgattctacagtaaatagctcagggtatttctatttatcactactaaaagggcaccatagtatgttttggtactttaggcagtaaacactgcttggtttatcattttgttattaaattagaacaagaacatcaaatggatttgctgcactagttattctttgtactgttgagcaacttggtgtgcttatatgttgtgttggttgaagaactcatccgttttattgtcttgtaatatgaagttagagtgcctttttatatttgtatattctgaaaatgttctgtggaatgttttgtattttttcatttgagtgttatcagagcaatatgataccagtgagttttcatttcaacttttctttgaatgtataaagtgtcttttttcctatttccccttgtacttgcattgaaatgaatatgaaaatgcttaagttttctataggaattgtttgattttgcagtgctaaaatgctttcgtcttacgaaactataaaccataggtcagtattataggggaaaagcattttaagatagtgacaatctgagtgttgtataaaatgtaattctatgcgtttcttatgtgatctaaaaattcaatgcaaatatcttttatttggtagttttgtctacatattttatgctctagcatgtgcaatatatctttgtaaagcacgatgatacaaatctggtgccagtgttatattttgcataacatatttgtaacagcataaaatattgtttgatgatttcagtgggattttgtctataatgttttcttatgtaaattggagttgaatgactctggtaaatgtcatgactgtaaaaatggggaaaatgacttttagttcagtgaatgactttgaaacaatctgaatcttctcaagcacagtttaatacttttgcaactactgaatgctctaataacgtaatgaagtacttaactgtaatatactatggaaatgcattcagatggttatttttacaaataaaaacggtacaaatattgtt

SEQ ID NO: 13441 - DNA, 1741 bp, Homo sapiens
taaaactcccgtctctgccaaaaatacaaaaattagccgggtgtggtaacatgctcctgtagtcccagctactagggaggctgagatgggagaatcgcttgaacccgggaggcggaggttgcagtgcgccgagaccacatcattgaactccagcctgggtgacagagtgagactctgtctcaaaaaaaaaaaaaaagttgtggtcataaaacttggttcagatgccgtcagcggcatgccttgcctagggtcttgccctccttgtggcctctgcacaccctgcctagtctttccttccctcctgacctttctgaatctgattcatccttttgccccaagcagaatcccaccttctccaggaaggtgttagcctttgtaggacccactctgggacactggtacctgctgcctgtagccgtggcctttccccttccagagggcagggcggtctcagcaccctcttggtccacagctgatcttttttagctgctgaagggtctggggctgtgccctggggaagccatgacgctcccctgcgtagggtcactgggtggctcctgcagccagacttggacaccctccctttgcagatttctgtctcctccccaggaaccagctgccttccttctggggcgaattcattcttatcccacagccccagcataatgggatctggctcagggaggcctttcctgatctgccctaggtttgccttccctgtgagcagcccttactgtcctctgccttccccgttgagctgcagggtgaccatggtcaagcaggagcctcagtgggaaggtgctgaggaaggttcatgtgagaagtggctgtgggagccctcaagagatggaagttaggccaggcgcggtggctcacgcctgtaatcccaacacttcaggaggcagaggtgggcggatcacttgaggtcaggagtttgagaccagcctggccaacatggcgaaaccccgtctctgctaaaaatacaaaaattagctgggcttgtggcaggcgcctgtaatcccagctactcgggaggctgaggcaggagaatcacttgaacccaggaggcagaggttatagtgagccgtgatcgcgccattgtactctagcctgggcaacaagagcgaaactctgtctcaaaaaaaaaaaagaagtgagaagtctgtggctggcctactgagtgtccgcacatacaccccttaccccacctgactggtcttcacaatcaatgctccccaacagccagcggtcctgggagtccaacctcccagaaggatcacccactcccaccactctcaaggtcagagcctggcctttgggggaaagggcagtgctgcctccagggcctctgcacccagggacagtgtctgtcccacccctggagtgccaacagagttgggagactcagcactgacttcaccccaaaatccaagtaagctgggtattgcttaaaatcaggggccaggcgtggtggctcacacctgtaatcccagcactttgggaggccgaggcgggcggattatgaggtcaggagttcgagaccagactggccaacatggtgaaaccccgtttctactaaagatacaaaaaattagtcaggcgtggtggcacatgcctgtaatcccagctacttgggaggctgaggcaggagaatcgcttgaacccgggagatggagattgcagtgagctgagattgtgccattgcactccagcctgggcaataagagcaaaactccgtctc

SEQ ID NO: 13442 - DNA, 1603 bp, Homo sapiens
gaaccaggagtttggcgtgaccatggtgagagaagacggtccaagaagggacgttatcaggccactttttgggtggagaaggaggtagtcagaccgtggccaaatttccttcacattatcctagcatattttcattctggtcttagctcttaaacttctccaagcggtgactgttatgctttacagagtggggaagagggtctgggttatttgaggcaagaagggaaggcaatagacaagagaaaagaagagactttaaaagatgccgtgtgtttccaacttttttaattctaaaatttctgtttcaaggggaagcaaaagaaaacaaggaagtatgcgaccatgaagcgaatgcttagtctcagagatcagaggctgtgagtgtctggaatcaactgcccagggatattctaataagagtctagagaggataagtagtaaaaatgtttgttgttattattttgttttttgcttattatcgtgtcttagatttatatagcatgagatagccagtgtttaacagtaatttagctgctgagcgatcacactgggaaaggcgttgggaattaaacatttcttaagtgttcactttttctaccgttatatgctttgtctgccatatcgcatttaaacctcatgtcagttcggtgaagtccgtatagttctctttatgtttttaccattacactactacattcccctggggtggggcgaggggagtgtttcttgttgaaagatggcaaggttagagaccttgtttgtctggcgtttccagtgcctggtactcaaatatttttgtcagagaaaatgggaaaactccaagatatctccattttataagtcttactaatataagaatccaaatcactgtggaagaagaaagtgaagtgaaattccctagtatgaagaggatcaaagcggtgtccctgcttaagtgtagaataagcatagctattaaataaagactgatcttcactgagtttaagagtctcagaaagccgggcgcagtggctcacgcctgtaatcccagcactttgggaggctgaggcgggtggatcacctgaggtgaggagttcaaaaccagcctggccaacacggtgaaaccctgtctccactaaaaacacaaaaaagagtctcagaataagagaatagtcgttaaaaccttcagaattattattctcagcctttagtgtggatgtattgtgtaatttttaggaatgacactccattaataataatttctttctagttaagggttaagttctgtatatgcgtttttacattttagccctttataagaagcatatggggtaatacttttcccccaaaagttaaagcatctgaatcttcagaagataactgtcacccttttacccattgcttggaagtggattgtgatccttgatgtgagagattctgactaaaaaataaatatagtataatcagcttttatttactcattaacaattcttatgcattattggcattactggttaattctgatacttccaggtactgtgctttgcactagagttatttgctcagaaagagtatgctgatattaacatgaggatatcacaaagtaggatttcttcagtagacc

SEQ ID NO: 13443 - DNA, 1588 bp, Homo sapiens
ttgccagctatccacctcagagtggatatgctaacagggatgtactaaaaattgcaaacattgaaggcttctctaatcccagatacacaacaaaataccatccaagaccataccacacagagacttccaaggccatccttggaaaaatggagaagtagaaggcccccattattttattttatttttatttttttgagatggagtctcgctctttcacccaggctggagtgcagtggcgcgaacttggctcactgcaagctctgcctcctgggttcaagccattctcctgcctcagcctcctgagtagctgggactacaggtgcccatcaccaggcccggctaatttttttgtatttttagtaaagacagggtttcaccatgttagccaggatggtctcgatctcccgacctcataatccgcccgcctcagcctcccaaagtgctgcgattacaggcgtgagccaccgcgccttaaggcccccattcttaactgttaactcctgaattggggatttctgtcaatctagcagaaactccaaaaggattctctgtactagaaccttgattgtctgatcacccctgtttcttatttttcttatttttaggcattaattccaaaaacatccatcagacagacatttaggaagtgttctttctatacaacagagacttggacaggtgaatcagaccacagtccttgtttcattaagttttcaattttggagggggaaggaaaggagaatgagacagccaaaaacttgtgctaactggtaactgaagtgatgggtgaggacaggagacagagccattaattctgtctggactagtcagatggggccttccagaggaggcaaccctgagttgaatttctcccagtaatctttttttttctttttcttttttttctttttcttttttttttttttttttgcttcctcctcctcttcctctctctcccagcagattttttttttttaatttaaatttttgagaacagggtcccactatattgctcaggcaggtcttgaactcctgggctcaagccatcctcctgcctctgcctcccaaagagctgggattacaggcgtgagccaccgcgcccgacctctcctagtaaccctaaccctcacaaataaccaccattttcttctagaagatgcctgggaatatacatgtgtgcgtgtgcaagagttcttgacagcatatagttaggaaaggaattgctgagtagggtgtgctccccttcaattttatcatatattgtctggttttcaaagtggcgtaatgcattgccctcccatcagggatgtgtgagacttccatttgttctactttttgcacaacacttgattaaacttggttggacttttaaattgtttccagtctggtgggagtgtaatggtagtttttttgtgtattttcaaaaaaaccttttattatgagctattacctacatatggaaaaatgcataaaacaaggccgggagcagtggctcacgcctgtaatgccagctcttagggaggctgaggtgggaggattgcttgaacccaggagtttgaaatcagctgggcgagacccttcctctaac

SEQ ID NO: 13444 - DNA, 1508 bp, Homo sapiens
tctaaaattcctataattttttgctgcatattatcctcatccccaaaataacatccattttaaagtgtatagttgaggggaaggatgctgtttttggtataagttgtcaaatatggaacatttgacctggagagggctaaaatcaatatttaatcctcagagcttcacctgtcaaaactatttaagtctgcagaaaatcaagattgaaatgaaaactaccaaccagctgaacatccaaaacgtcaaattccttaacatgatgtaaaaaatgtaagctaaaaggaattagtccattttgatagcagcaatagagagccctgtgtattcgtattcgactttcatggaaaggttcttctgtggcaagaccacctgtggaactagtacctaaacacacagatttgttttattttagagcttcacaatttgagatctcaaaatacaaaacctaataaggctgaaacacagggtctatgaaggctaagaacccacattaattcaaaaagttgacacagctaaacatcttacaagcatgaggtgagaactgcagaaaccaaagctgtgctaacatctcacctctactgctttgatgtgatctagatgcacagttagcttcagtgtggcccgttatctaatagaaccatctttcaaggcttttcattagaaatgacaaaaagccagttgctctggctgtgtggcttcagaggcacatttccagttaatcagtacaaccaaagtcaacctaatagttgactggtatttaatttattttaatttacttttattatagatctaggggggtacacacgtaggtttgatagatggatatattgagtaatgctggggtttaggcttctagtgaacccatcacccaaacagcaaacatagtacctagttcaaagactattatcttacttaggtagacgacacacgtttaaaatatatacctttaaattaaaaaaaaaaaaggatagtgataacaaagctgaaaattaaagacattttagcctataacttaaatactgatcatatcatgtttgttgaatagagctcatgtctggctggctgaaatttattcttacttttaagtattctgaactatgtttcattttttcctttctatgtcactgttatcagatgcatgaaaaacattttaaaagcctttttctttcattttttcttttaattgagaaagaatccagcaatgcaatttaagatattatgaattgcatgacattaatcatatttgtcttctgttgcaatgcagccagtattttcaagaagtacaaaagaaggtaaagcgctttagcggtacaattaaaaattacagatttctagatataattcctcactttgtgagtatatatttcactagatcaaattcaagtcactagacttcagagttcaacacctggacatgagaagatattatattatgtaccataaatatttcctgtatctgactgcctgaacatattaccacatcctgtaccttagtatcctacagagac

SEQ ID NO: 13445 - DNA, 1808 bp, Homo sapiens
  CDS (277)..(1179)
ataaaaagaatggctttgcactgagcagctcagtctactggtctcatcagtgaaaggcttgtgaaaatttctggaaagagcattggctggcttgttcatctctctgtttggtcagttgctgtgtttctgccggatcagatgagcagattggttagtgaaggtcagtgtgagaagaagattgtttctgagcttgagaagcttctggaggattgaagagtatttgaagtctgtgtcaaacatccacatcataagtggaattttggagatattcaaagaatgctgtcagaagggtatctcagtggacttgagtactggaatgacatccactggagttgtgcctcttataatgagcaggtggctggggaaaaggaagaggagacaaattctgttgctaccctttcctattcctctgtggatgaaacacaagtcagaagtctctacgtgagctgcaaatcatctggcaagtttatctcttcagtgcattcaagagagagccaacatagcagaagtcagagagtcacagtgctgcagacaaaccccaatcctgtgtttgaaagcccaaacttggctgcagttgaaatatgtagagatgccagcagagagacctacttggttccatcttcttgcaaaagtatttgcaagaactataatgacttacagattgcagggggccaggtgatggccattaattcagtgacaacagattttccctctgagagcagttttgaatatggccctttgctgaagtcatctgagattcctttacccatggaggattccatttctactcagcccagtgactttccccaaaaacctatccagcggtactcatcctattggagaataacaagcatcaaagagaaaagcagcttgcaaatgcagaatcctatttctaatgcagtgctgaatgagtacctggagcagaaggttgtggagttatataaacagtacattatggacaccgtgtttcatgacagttctcctacccagattctggcgtctgaactcatcatgacaagtgtagaccaaatcagtcttcaagtgtctagagagaagaatctggagacctcaaaagccagagatatagtctttagccgcctattgcaattgatgtcaactgaaattactgaaattagcactcctagtctccatatttctcagtatagcaatgtaaatccatagagaggatgcttccattactgtctcgcatttacttaaacatgaagcaacactttatccatttattctgagaatgtgcaggaggggttagtgaaggggaattaagggctagagaagtaaagatcagctggaagtcatgtgtgaatcatggagaaatctcataatattacacttgatgaaggaatatggtaagaggagccataaggaatgatttcaaagagaggtgtgtacagcaaggaagcaaaaataaaaatgatcaaaaaagaaacggttaattcatttgaagaaacataggaattaaaaaagaagacagtcaaatgagatgaaacaaaaaggccaaaaggtagccgggtgtagtggctcacgcctgtaatcccagcatttgggaggctgatgtgggtggattacctgacgtcaggaattcgagaccggcctggccaatatggtgaaaccccatctctactaaaaatacaaaaaattagctggacatggtggtgggtacctgtaatcccagctactagggaggctgaggcaggagaatctcttgaacctgagaggcagaggttgcagtgagccgaggtcgctccattgcactccagcctgggcaacaagagtgagactcccgtctc

SEQ ID NO: 13446 - protein, 301 aa, Homo sapiens
MLSEGYLSGLEYWNDIHWSCASYNEQVAGEKEEETNSVATLSYSSVDETQVRSLYVSCKSSGKFISSVHSRESQHSRSQRVTVLQTNPNPVFESPNLAAVEICRDASRETYLVPSSCKSICKNYNDLQIAGGQVMAINSVTTDFPSESSFEYGPLLKSSEIPLPMEDSISTQPSDFPQKPIQRYSSYWRITSIKEKSSLQMQNPISNAVLNEYLEQKVVELYKQYIMDTVFHDSSPTQILASELIMTSVDQISLQVSREKNLETSKARDIVFSRLLQLMSTEITEISTPSLHISQYSNVNP

SEQ ID NO: 13447 - DNA, 1590 bp, Homo sapiens
ttttttttttttaacttgaattgatagttggtttataatcctggagttgtatatgttagggtttgctattgagaagtataggagtgtattaactctgataaatgaagtgggctaattagtatttcagtttaattttctgcaattgcatttaagtttgtgatcagttcttttctcctcactgtataactttttcctgaagatttgtataattattagtggtaaaaactccatcttagttgcttatgattttaatgtcaatttgaggaagatatcaccatatagaaaatacttagaagtagcttattttaaaaatattcatttgcttttcttccaaacacgtggtcacttagcaagcagtgattcaattattcatagtcctcagtatttatgtaatgccaaagaagtggaagaaggggaagtgaagtgagaaaggaaattaggcagacaagtgaatcagagggcaagagaaatgagtaatgcaaaaggggaaggaaatgatggtcagagcacacatgccttgcagcatgagcaaagaaaatgtgctaaacaaaactacagtcagaatcatagaaaggataaggttttagagaggttttgttgttttttaaacattcatgtgagctaaatataatgcaggtattgaaatgattactgcagatatgccagatgaccttgatatctattttcatgttaatcttctgttatttgttgttgttgaattgttacccccacgttttacctgtgtaagtgaattgaaatatttcaaggccagatacagtgtcttacgcatgtaatttcagcagtttggaaggatgatcacacgaacggatggatcacttgagcccaagagttccagacaagcctgggcaacatagtgagaccccatctctctaaaaataaaaaaaaaattagccgagcatgctgatgtacacctgtggtcccaactactttggagactgaggtcagaggatcccaggaggtcaaggctgcagtaagccctgatcacgccactgcactccagcctgggcaacagagtgagaccttgcctcaataaaaacaagacaaacaaaaaaccagacatttcaataatacatgcatggtgctgtgttacaagttgtaacatgaataaaaatgtttaggatatcttaaatataaaaaatcaagaaatatcttcttttggggggaaggggtttttgtaatgagtcaattaaaatgttggtgctaaatcttcccttgctatattgaagtttgctgatttcaatatagattttcagtgtttcataatgccttttaaaaaagataattgaggtggccaggcgcagtggctcacgcctgtaatcccaacactttgggagaccaaggtgggtggatcacgaggtcaggaaatagagaccatcctggctaacatggtgaaacccaactctactaaaaatacaaaaaattagccgggcgtggtggtgggcacctgtagtcccagctacttgggaggctgaggcaggagaatggtgtgaacccaggaggcagagcttgcagtgagctgagactgcgccactgcactctggcctgggcgacagagcaagactccatctc

SEQ ID NO: 13448 - DNA, 2296 bp, Homo sapiens
taacaaatcatttcgtattaggttccattaaaatgtcattcctttgaaaaggcaagggatttccactttcagaatttgaaaatgaaagtagcatgtttatctaaaggcagaaaatagttcggacttggtattatgaaaataagtaatggtttctggagaggatttgtttagatttgcacagatggcgatggcaccttttacttaaattaacattaatcaacagtgctaaggaaaatttacacaaaattacaagataaaacatggaaatgtgtgcctttcagtatacaaactcttgcttggtggccatttgggtaatcagaccatttgaatgcctgagagcatgtttaatttctgtggagtgccacatatggctaaaacaactctttaatgtgcaattaatttctagagtaaaatgtctgttatgtgagggggatctttatgttgggcttttctattttttaaatgttcacatttctttctgttaattaaatgccatcataatgtcacatttacactgttgcctcttttaaaagcaaagccactttcttgttctaagattacatcaagacttgagcagtgtgtagtaattaaaatgtgtgcttaatgagcataatagattctggttttaggaaataacatatagcttttatatgaatattttcttttgctataatgaaagtcacagattttttttttcctggcttttatggaggaatgaaaagagttgtctccctctaagagtatactatttttgattctcatagcaataatgtcaccattcttatcagagggtaaataccccttgtataggaaaacagacataatttcctcttgggagttctctttatgacttagcattttcttctacttgagaaaattcctgtttttccgattatttcatcttgaactttcttttttttaagcttttgtgcaatgtaatagtttgttgatccatctttgtacattttcattttatttcatgtctttctctcacctacctgtcagaatcagctatagcagattttgaattctttagttaaaaaatagttgctttacttgtttcctcatgagtttgttaaatagctttgcattttagtcctctattatgctatgaaaattattacgaagtttatattgttccctttttaagcctgccttactcttgtcttttgtcattgtctatggtttaatgaagaacacaccaaactaacatttttgtttattttgaggaacaaaaaaacttttctcttttaagggaagttactacacattgagttagtaactactctttcagtcaaggttccttaatcagtccagtctacatcaggactatgacttggggggcggggctaatcctttttgctgttctgagctactattgtcaactgctgttgtacatactgttatgtgtaatggcgtaaatatatttattatgtttgtaaaattcattgcagatcaaggttgctcttctgtgatatatgggatattatgttttaaagaccatcttggaatacaattagagaacttagtattttgatgtactaagacctattttaagtttaatattctactttgcaaaaactttaattaaagatgttatttaaaaaaaaatgttgcttgctttgcttactagtatatggcattgttatagataattgaataaaatacaatttagaaaggaaaatgctttacattgttaatgagaattccatttaacaacaacaaaaagatgctaaattctgtaccttaaagataagtagattgagatgtcaatttgaattagtaaactgtgttacaaatgattaatactagcttttaaaaagttgtattttccaggcacacaggaatttaggttgggcgaattcacactaacaaattataactaaaaattggtataattaacattgtttttcaaaataaagattactccttgtgaaatattaataattaacatattgtattaaataagtatttctactccaaagtatagattacttaggataaaaacattgttatttctctgtttagtcaaaccacttcctcttagttcagaggttataaataattgcatattaggagaattggattactgaggtttgtattgcgtattgaatatattttgtgttattttagaagataataattagcaggtattttaattttatagttaattcagctgaatcattaagaagctcgcctttttgtatttttttatcctgttaacagactatctagaaaacatgcaaattttaactattaacataatcataataaagatatcttatttattgccagc

SEQ ID NO: 13449 - DNA, 2068 bp, Homo sapiens
  CDS (90)..(1919)
ctcccaagatggcggagacagagtgaagaaactgtgttccccccttgggttgctatcgatcaagggtaaaattccattctgatatcaaaatgcagtattcgcaccattgtgagcaccttttagagagactgaacaaacagcgggaagcaggttttctctgtgactgtaccatagtgattggggaattccagtttaaagctcataggaatgtgctggcctcctttagtgagtattttggtgcgatctacagaagcacttctgagaacaatgtctttcttgatcagagtcaggtgaaggctgatggatttcagaaactgttggagtttatatacacaggaactttaaatcttgacagttggaatgttaaagaaattcatcaggctgctgactatctcaaagtggaagaggtggtcactaaatgcaaaataaagatggaagattttgcttttattgctaatccttcttctacagagatatctagtattactggaaacattgaattgaatcaacagacttgtcttcttactctgcgagattataataatcgagagaaatcagaagtatctacagatttgattcaggcaaatcctaaacaaggcgcgttagcgaaaaagtcatctcaaacgaaaaagaagaagaaggctttcaactccccgaaaacagggcagaataaaacagtgcaatatcccagtgacatcttagagaatgcatctgttgaattattcctagatgcaaataaactgcccacacctgtagtagaacaagttgcacaaataaatgataattcagaactcgagttgacatcagttgtggaaaatacttttccagcacaagatattgtgcacactgttacagtgaaacggaaacgtggaaaatcacagccaaactgtgctctgaaagaacactctatgtctaatatagccagcgtcaagagtccttatgaggcggagaactccggggaagagctggatcagaggtattccaaggccaagccaatgtgtaacacatgtgggaaagtgttttcagaagccagcagtttgagaaggcacatgagaatacataaaggagtcaaaccttacgtctgccacttatgtggaaaggcatttacccaatgtaaccagctgaaaacgcatgtaagaactcatacaggtgagaagccatacaaatgtgaattgtgtgataaaggatttgctcagaaatgtcagctagtcttccatagtcgcatgcatcatggtgaagaaaaaccctataaatgtgatgtatgcaacttacagtttgcaacttctagcaatctcaagattcatgcaaggaagcatagtggagagaagccatatgtctgtgataggtgtggacagagatttgctcaagccagcacactgacctatcatgtccgtaggcatactggagaaaagccttatgtatgtgatacctgtgggaaggcatttgctgtctctagttctcttatcactcattctcgaaaacatacaggtgaaaaaccatacatatgtggtatttgtgggaaaagttttatttcctcaggagagctcaacaaacactttcggtcccatacaggagaaagaccatttatctgcgaattatgtggaaattcttacacagatattaaaaatttaaagaagcacaaaacaaaagtccattctggtgcagataaaactctagactccagtgcagaggatcatactttgagtgaacaggattccatacaaaaaagtcctttatcagaaactatggatgtgaagccttctgatatgactttaccattagctcttccacttgggactgaggaccatcacatgcttctgcctgtcacggatactcagtctcctacatcagatacattgttgaggtcaactgtgaatgggtattcagaaccacagttgatttttttacaacaattatactgactttgtaaggaatatggaattgctaagatatcattggtagcaaacatctctggtaaggtgcatatattcatattaaattcccattcatttgagttgtgaccattatttttcattcactgaagtaaaagcacctgatgctgcgtcac

SEQ ID NO: 13450 - protein, 610 aa, Homo sapiens
MQYSHHCEHLLERLNKQREAGFLCDCTIVIGEFQFKAHRNVLASFSEYFGAIYRSTSENNVFLDQSQVKADGFQKLLEFIYTGTLNLDSWNVKEIHQAADYLKVEEVVTKCKIKMEDFAFIANPSSTEISSITGNIELNQQTCLLTLRDYNNREKSEVSTDLIQANPKQGALAKKSSQTKKKKKAFNSPKTGQNKTVQYPSDILENASVELFLDANKLPTPVVEQVAQINDNSELELTSVVENTFPAQDIVHTVTVKRKRGKSQPNCALKEHSMSNIASVKSPYEAENSGEELDQRYSKAKPMCNTCGKVFSEASSLRRHMRIHKGVKPYVCHLCGKAFTQCNQLKTHVRTHTGEKPYKCELCDKGFAQKCQLVFHSRMHHGEEKPYKCDVCNLQFATSSNLKIHARKHSGEKPYVCDRCGQRFAQASTLTYHVRRHTGEKPYVCDTCGKAFAVSSSLITHSRKHTGEKPYICGICGKSFISSGELNKHFRSHTGERPFICELCGNSYTDIKNLKKHKTKVHSGADKTLDSSAEDHTLSEQDSIQKSPLSETMDVKPSDMTLPLALPLGTEDHHMLLPVTDTQSPTSDTLLRSTVNGYSEPQLIFLQQLY

SEQ ID NO: 13451 - DNA, 1548 bp, Homo sapiens
  CDS (26)..(469)
ttcttggaaaggcattaactttgtgatggtcaacagcgtggcgctgaacggggatggctgtggcatctgctctgaaacagaagcagagctcattgaagtttctcacagactgaactgctcccgagaggcacgtggctccagccggtgtggacctgggcctctgctgcccacgtctgcccctgtcctcctgcagcattatcctctgtatcggagaagtgatgctaactgttctggggaagacgctgctcctccagaggaaagggacatcccatttaaggagaactatgacgtgctttcacgggaggcatcacaaaagctgctgtggtggctccagccgcgcctggttctcagtggccacacgcacagcgcctgcgaggtgcaccacgggggccgagtccccgagctcagcgtcccatctttcagttggaggaacagaaacaaccccagtttcatcatgggaacagatgcttagttgagcatcaaggggcaggaagacacctttccctccttgttcctcgctgaccgatgaccctggaactccacggtgcctctctgaatctctgttatggatcccccactatatttgatgggaacccagtgagccaggggccagttttgacagggtagcatcacgcccacagactacaccctctccaagtgctacctcccacgtgaggatgtggttttgatcatctactgtggagtggtgggcttccttgtggtcctcacactcactcactttgggcttctagcctcaccttttctttctggtttgaacttgctcggaaagcgtaagacaagatgaagagcaggcgccattataaatatcaaagcccaagaaatggaactttgggcagagatcatgttagaatcaagtggatgatgagaccaattacaggccgtctctctgcacagcacagaaattctcaatcactgaaatgagtaactgcaaaataaatagttgattgtactgttctcatgctataaaagtggacaggtactctacaacaaatctgttttctcatttttatcaaatatatgtatcatcaaaggttgcatctgtacagtatgtaaatgctattaatgtcgtcactcacatgcacgacagtccttgttcccccaggaagggcctggtggccccagcacacacttgggattatgtgtatacataaataaatattgggctgtttccctcttcctgtgaagtggttctcaaattcctatgtactgtaaagctgtacccttaaaagtacagatgtggccgggcacagtggctcacacctgtaatcccagcactttgggaggctgaggcgggtggatcacttgaggtcaggagttcaagaccagcctggccaacatggtgaaacctcgtctccgctagaaatacaaaaattagccaagcatggtagcaagtgcctataataccagctgaggctgaggcaggagaatcccttgagcccgggaggcggaggttgcagtgagccaagatcatgccactgcactctagcctgggcaacagagtgagactccgtctcaaaaaatatattt

SEQ ID NO: 13452 - protein, 148 aa, Homo sapiens
MVNSVALNGDGCGICSETEAELIEVSHRLNCSREARGSSRCGPGPLLPTSAPVLLQHYPLYRRSDANCSGEDAAPPEERDIPFKENYDVLSREASQKLLWWLQPRLVLSGHTHSACEVHHGGRVPELSVPSFSWRNRNNPSFIMGTDA

SEQ ID NO: 13453 - DNA, 2310 bp, Homo sapiens
tccgtaatggctatactagtttacattctcatcaatggtatgcaggggtttccttttctccatattcttgccaacatttgttatctatcttttttaatatagtagccattctaacaggtgtgacatggtatttcattgtgattttaatttgcatttccctgatgataagtgatattgagcattttctcatatactgagccatttttatgtgttcttttgagaaatatctattcaggtcctttgcccatttttaaatcagattatttgttttcttgctgttggattgtttaagttccttatatattttcagtattaaccttttatgagatgtatggcttgcagatatgttctcccactctgtagattgtctcttcactctgttgattgtttccttagccatgcagaagcctttttgtttgatgtaatcttactttttttgcttttgttgcctatgctttggggcacataacctgattttttcaactgtcacactgattgtacctaacattgaaatgttagaaatgtatttcagattatattctatatatatcaagcataccacttgtgaaatctgttctgatttttttcctgaatctacctggagtgtacttaatgaatgactctacttagacttcccccagagaaatgattacataataatactttgtataggacatcttataaaaagcttaaagtattttgtatatagactcattaatcattgaagtatacttagggaaatctaggtgggctgccatagtcactttatactggtgtacaaatagttaattttggtagaacagattttgttcttaatttcttctgtcagctttttgtcattagattttagagtctcatgtgctatgattactgataagaacatatatttcatcctcacatcttaaaaagaaatgagtcatgactctaaaatttttgaggtagcatttactagtttaccatgtatatgttgaaacgtttaactgttgtaagtagagataaaatagaaggtaactcttgaaagctatgccagttcccttttatctctctgtcaagaaatctattttttcactttcaaaactcagtacaggaggttagcagcagtgatggcatagttttttaatatctccaaatgcccacataaaaacagatagagtaatagatagcaaagctaaaaacctatgtactagttctggagattggagttacacaacaatgtgaatatacttaacactactaaacagttaaaacatggttaagatggtaaattttatgttatgtgtgttttaccacaatttaaaaatcagaacctgtgaacaaaatttaacacaaaactaagggaaagaatatcctcacaaactccaaaacacaaacgggcaaagacaaactaccattagccacaagacctgcatgatattagtatcttcaggagaaatcagaaagaagcaattggatgtctgacagatctaagaacaaaagaacctcaaactagctaacacgtagtaaatagaaagcacaaggggaaaatttatcagcaactgaaactagaaacagttttgtccactgccatagagtgtaagtgcaagaccctcaataagatctaaagggcttagaagagggtttctcaacctcaacactactggcgttttgggtcagacaattctttgttgtgggggactgtcctgtgccttgtaggatgtttaacagcatccatagcctctaccaactaagtgccggaagcatgtgcctggttgtgacaaccaaaaacagtctctaaacattgccagatgttacttaggggatgagaaaggggggatgaaggggaataaaataacacctggttgggaaccagctgagttagagccatctagtccctgggaactctcaaaactgaccagccaggataatcttccaggtcaggaccctacactgaggagaatcaaaattaagcaggacgagggcaacagatgcccttgttttccttgaaaagagaaagccaagacaaaagtaaggcagtgaataaagtcaataaatctctggactaggcgctgtggctcacacccataatcccaacactttgggaggcctaggtgggaggattgcttgagtccaggatttcaaaccagcctgggcaacatagcgagacgttgtctctccaaaaaataaaaaaattagccaggcttggtggcatacacctgtggtcccagttactcaggaggctgaggtgagaggattgctgggaggtcaaggctgcagtgagccatgattgctccactgcactctagccagggtaatagagtgagaccctgtctc

SEQ ID NO: 13454 - DNA, 2308 bp, Homo sapiens
ttctgagaagcttatgtagctgataaagcagtgaaaaaaactcagcctttagatctacatttgtgtgagtccagttgcgtgaaatactgtgatcaaaacaaaaattgcatatttattgcattcaaagggacattttgtagtctaacctgattttcgaaattgattattgataatttaagatatttttcatagttatatgagttacctttagtaatgatagacaataaataaagaactaagaagttgtcatgaaagtcatagccagagcaggtagataagagaaagaaataaagggcatccaaactagaatggagaagtcaaattgttctctatgcagatgacatgatgttatatatataaaaacaaaactaaagactctaccaaaaaactcatagaactgataaattttgaaaagttagaagatacaaaattagtatacaaaaatcagtagcatttctatgcatgaacagtgaactagctgaaaaagaaatcaaggtaaccccatttataatagctgtgaaaaaaatctaggaataaattaaccaagaaggtaaaatatttctatacaaggaaaactacaaaacactgatgaaagaaattgaaggagatacaaacaaattgaaagacactccgtactcatggattagaggaattaatatattttaaatgaccatgctacccaaagtgatctccagattcaatacaacttctatcaaaataactgacattcttcacagaaattgccaccaaaaaaaattcttaaaatttatatggaaccacaagaccccaaatagccaaagcaatactgagcaaaaagaacaaagctggagttatcacactaccagatctcaaaatataaatcaaaaatgtagtaaccaaaacagcctgatactggcataaaaatagatacagagcaatggaacagaacagagaaccagaaattaatccacgtatctacagccaactgattttttacaaaggtggcaagaatactcattggagggacaaaaaaaaaagggacagtctcttcaataaatggtgctgagaaaactgggtatccatatgcagaagaatgaaactagatccgcacctcccaccctgtacaaaaaccaactcaaaatggatgaaagacctaaatgtaagacctaaaacaataaaactaccataagagaaaacaagaagcacttcaggacattggtctgggaaaagattttatgactgagacctaaaagcacaggcaacaaaaacatgggatcatatcaaattaaaaagcttctgtgcagcagaggaaaccatcaacagtgaaaagacagcttacagaatgggagaaaatatttgtaaactactcatgcaacagaggattaatattcagaatatagaagatattcaaacatcttaatagcaaaacaaatctagattaaaaatgggcaaatcatctgaacagacatttctcaaaagaagacgtacaaatggccaataaatgtatgaaaaaattctaaacactaagcatcagggtaatgcacatcaaaaccacaatgagtaagttggaagttcagggaagagattttatctcatttacatatgattaaaagtcagacattggcacccccatgtttattgtagcactattcattagccaagacatggaatcaacccagaatcaacaggtgcatcaacaggtgaatggctaaacaagatgtggtattatacacaatgggatactattcagccataaaaaaagaatgtcctttcatttgcagcaacatggaaggaactggaggactttatagtaggtgaaataagccagcaatggaaaattaaacaatgcatgttctcactcatgtggaagttttaaaaagttaatcttatagaagtaaaaattaggacagcgcatactagaggctgagaagatagggggaaggaagggatagggagagatttgtgggaggatgcaaaataacataggaataagccctagtgttgtgtaccactatagcatgactatagttaatatatactttaaaatagaagaatattgaatgttcccaacacaaagaaattataggtgtttgagatgatggatatgcttgttaccctgagctgataactgtacattctttgtatcaaagtattctaccccacgaatatgtagaattattattcgtgaatttgaagaattaagttttttaaaaagtgtacgggctgggcacagtggctcacacctgtagtcccagcactgaggcaggacgatcccttgaggcctgcagtttgagatcagcctggcaacaaaatgaggacctgtctctac

SEQ ID NO: 13455 - DNA, 1364 bp, Homo sapiens
  CDS (590)..(1345)
atgtacgcctttgtgcggttcctggaggacaacgtctgctacgcgctgcccgtgtcgtgcgtgcgcgacttcagcccccgctcgcggctggattttgacaaccagaaggtgtacgccgtgtaccggggcccggaggaattgggcgccgggcccgagagccccccgcgcgccccccgcgactggggcgcgctgttgctccacaaggcccagatcctggcgctggcagaagacaaatctgaccttgaaaacagtgtgatgcagaagaaaataaaaatccccaagctttctcttaatcatgtagaagaagatggagaggttaaagattatggggaagaagatttacagcttagacacatcaaggattgtctggggaaatattgatctgcagtccaagaaaatcccagctgcccttgcctgaactgattctcgttgtcctacacagagacctgaggggcggaagccgagcgaagtggcgcacaagagcatcgaggcagtggtggctcggctagagaagcagaacggcctgagcctgggccatagcacgtgtccggaagaggtcttcgtggaggcctcgccaggcacagaggacatggacagtctagaagatgctgtggtgccccgggctctgtatgaggagctgctgcgcaactaccagcagcaacaggaagagatgcgccacctccagcaggagctggagcggactcggaggcagctggtacaacaggccaagaagctcaaggagtacggggcacttgtgtctgaaatgaaggagctccgtgaccttaaccggaggctccaggacgtgctgctcctgaggcttggcagcggtcccgccattgatctggaaaaagtaaagtcagaatgtctcgagcccgagccggagttacggagcactttcagtgaggaagcaaatacgtcgtcctattaccccgctcctgcgcctgtcatggacaagtatatcctagacaatggcaaggtccatctgggaagcgggatttgggttgatgaggagaaatggcaccagctacaagtaacccaaggagattccaagtacacgaagaacttggcagttatgatttggggaacagatgttctgaaaaacagaagcgtcacaggcgtcgccacaaaaaaaaagaaagatgcagtccctaaaccacccctctcgcctcgcaaactaagcatcgtcagagagtgtttgtatgacagaatagcacaagaaactgtggatgaaactgaaattgcacagagactctccaaagtcaacaagtacatctgtgaaaaaatcatggatatcaataaatcctgtaaaaatgaagaacgaagggaagcaaaatacaatttgcaataaactttggatttttcat

SEQ ID NO: 13456 - protein, 252 aa, Homo sapiens
MDSLEDAVVPRALYEELLRNYQQQQEEMRHLQQELERTRRQLVQQAKKLKEYGALVSEMKELRDLNRRLQDVLLLRLGSGPAIDLEKVKSECLEPEPELRSTFSEEANTSSYYPAPAPVMDKYILDNGKVHLGSGIWVDEEKWHQLQVTQGDSKYTKNLAVMIWGTDVLKNRSVTGVATKKKKDAVPKPPLSPRKLSIVRECLYDRIAQETVDETEIAQRLSKVNKYICEKIMDINKSCKNEERREAKYNLQ

SEQ ID NO: 13457 - DNA, 1555 bp, Homo sapiens
atttcaagcactgactgctaagattggcatgtctccagccacgtacatttgcaaaaagtcagatttgcaatgtaatatgtcatggagctcatgcttgttgaagagaatctttgataggctggacacattcattttagtaggaggcagaggtggcctaacagcaaactctaggttcaggatctaattttcatagccttcaaggatgaatgcaatataaactgtgtagtagattgtgatgctcattccaactagggaggcaagcatttgtacctgctatctacaaggcaccaaataatgcatgtgtcaccattgctataaattgtcctcttccaggacctaactatttgggtaaagaacctacagttcccatcaccacctatgtatgtatgtacaaacataaattagtccaaattctaattttctcttatttttctttgtggaaaaacagataagaaagctcagtaaaggaagatataagcaattaatgttacagttcttcaatataataatttgaattaaatgtactaagaagcaaaaactattagtgttgagactatcatgatgaagcttttggtttttttaatatattttcatttttatgcataaaatcttaatacatagaattccatgatgtcatcaggcattaacaatcacttaccttagaaaccaactctttttatctaggcttaacagggtttgtattaatgtattggcctagcactgggccctgctagatgctcaataaatatttgcctaatcactattagacattttaaaatatcttttggctgggaacagtggctcacacctgtaattccagctctttgaaaggccaaagcaggaagatcccttgagcccaggagtttgagaccagcctgggcaacatagggagaacctgtccctacaaaaaatggaaatttagccaggcacagtggtatgcacttatggtccctgctacttggaggatgactcaggaggattgcttgagcctcctaggatgtcaaggctgcagggagctgtgatcacaccactgcattccagcctgggtgacagagcaaaacccagtctataaaaagaaaaaacatatttcagtttatttttatttctgtgttaattgtttagaaccaagaaaatatgagtaccttaaattctgtaagtaaagaggaaaatgtctttaacattgtaggaaattaggaattaagtaactgcccttcatactggtaatcttgatatgttgagggaagtgacttgttataagatagaggccaggtatggtggctcatgcctgtaatcccagcactttgggaggccgaggcgggcggatcacgaggtcaggagttcgagaccagcctgaccaacatggtgaaaccccatctctactaaaaatacaaaaattagccaggcgtggtggctcatgcctgtaatcctagctactcaggaggctgaggcaggagaactgcttgaacctgggaggcagaggttgcagtgagccgagatggagccactgcactccagcctaggcaacagagtgagactctgtctcaaaaaaaaaaag

SEQ ID NO: 13458 - DNA, 1487 bp, Homo sapiens
  CDS (1027)..(1341)
aaatctgtgcaggatactgattgcctgcttctgaactgtgggtatggttggctgtggataatgtagaacatgtaagaaatgatggtctgctgcatgtaccaggccacatctaagagtcttattgttgagcacagccacgtttacactgaatataaactttattcaccattccaggccttgaccttatattcaggaatggcagcctggcatggtgaatagaacttattagggtgcatcgtagatttgctcagtaggggctcaggaattgacacaaatgctgacggagttggaacaagtaaattatatgtctggaagataaatatttaaataattagattaagggtggaaatgataaaagtgtactttgttataaagattggagatcccagtaagagtaatatgctctatgaaaaattgtaagttcttatattacattattagtttatgagtacttgttactgttttcacatttttgcttatactcatacggtactcctactttgctatactcacactggtttatctcccaagcctcaggtagatcatgcttccctgactcccccagacaggtttttcctgtaccctcaaaacatttatcagtgttctcattttatatttatgtgtaattttacattatgttcacctttctcataaattttgccagatcaggaaccgtgtctttggccactgttacatccccagaacgttgactagtgttttatgagtagaagatgctttgtgaacatttgtttggttaattaggtaccagtttggtagccaatatatgatactaaaggtttatattgtgaacgtggaactgtattgaaacgttaatgttattgctgccatccccagggcaatagtctgaccttgattgaccttcccggccatgagagtttgaggcttcagttcttagagcggtttaagtcttcagccagggctattgtgtttgttgtggatagtgcagcattccagcgagaggtgaaagatgtggctgagtttctgtatcaagtcctcattgacagtatgggtctgaagaatacaccatcattcttaatagcctgcaataagcaagatattgcaatggcaaaatcagcaaagttaattcaacagcagctggagaaagaactcaacaccttacgagttacccgttctgctgcccccagcacactggacagttccagcactgcccctgctcagctggggaagaaaggcaaagagtttgaattctcacagttgcccctcaaagtggagttcctggagtgcagtgccaagggtggaagaggggacgtgggctctgctgacatccaggacttggagaaatggctggctaaaattgcctgagaggcagctctaaagcacaagacctggatgtgtgacacacagttttggaaaaaggtctgtggtagtctggagttgatgaggaaggggtacaagatgtggttagaaacatttctttgttctggaaacaaagtactgttgaaacc

SEQ ID NO: 13459 - protein, 105 aa, Homo sapiens
MGLKNTPSFLIACNKQDIAMAKSAKLIQQQLEKELNTLRVTRSAAPSTLDSSSTAPAQLGKKGKEFEFSQLPLKVEFLECSAKGGRGDVGSADIQDLEKWLAKIA

SEQ ID NO: 13460 - DNA, 1206 bp, Homo sapiens
  CDS (32)..(1084)
cagcaaagaaaataaaaagaaagacaaagatatgcttgaagataagtttaaaagcaataatttagagagagagcaggagcagcttgaccgcatcgtgaaggaatctggaggaaagctgaccaggcggcttgtgaacagtcagtgcgaatttgaaagaagaaaaccagatggaacaacgacgttgggacttctccatcctgtggatcccattgtaggagagccaggctactgccctgtgagactgggaatgacaactggaagacttcagtctggagtgaatactttgcaggggttcaaagaggataaaaggaacaaagtcactccagtgttatatttgaattatgggccctacagttcttatgcaccgcattatgactccacatttgcaaatatcagcaaggatgattctgatttaatctattcaacctatggggaagactctgatcttccaagtgatttcagcatccatgagtttttggccacgtgccaagattatccgtatgtcatggcagatagtttactggatgttttaacaaaaggagggcattccaggaccctacaagagatggagatgtcattgcctggagatgaaggccatactaggacacttgacacagcaaaagaaatggagattacagaagtagagccaccagggcgtttggactccagtactcaagacaggctcatagcgctgaaagcagtaacaaattttggcgttccagttgaagtttttgactctgaagaagctgaaatattccagaagaaacttgatgagaccaccagattgctcagggaactccaggaagcccagaatgaacgtttgagcaccagaccccctccgaacatgatctgtctcttgggtccctcatacagagaaatgcatcttgctgaacaagtgaccaataatcttaaagaacttgcacagcaagtaactccaggtgatatcgtaagcacgtatggagttcgaaaagcaatggggatttccattccttcccccgtcatggaaaacaactttgtggatttgacagaagacactgaagaacctaaaaagacggatgttgctgagtgtggacctggtggaagttgaggctgcctggtatttgattatatattatgtacatactttttcattcttaacttagaaatgcttttcagaagatattaaatatttgtaaattgtgtttttaattaaactttggaacagcg

SEQ ID NO: 13461 - protein, 351 aa, Homo sapiens [sequence omitted]

SEQ ID NO: 13462 - DNA, 1736 bp, Homo sapiens
ttgagaaatgtccagatgatttggaaattaggttatgtttttgatacagggcaggttcctggcttcactcaggaaggaattcaagagcgagccagttgtagaggaaaacagctttattgaggtggtgacaatagttacatctctgtgactgctcccgcagagcgggactactccatataggcagtgtgctgagagcagcagctcaggaacagtctgcagtcatatttatacctgctcttaatgacatgctaattaaaagatgggtgattcacaatttgccagaaaatgtactggtgttgcttccaggtgttgccatggcaatggtaaactgtcttggtgcaagtgggtgtgtcttatggagaggtgctttccatgcctcttccctgtttcggtcagtcttcagtctggtccagagtccagtcctgtctgcctcctacctgattttcacctttgagaaatctgttgttttcaatggtgagagcaggaaacacaacgttaagggctgagtaaacagcaggtattgtcagggacggacgcagtaaaaagaaatggactaaagggataagaaggtcattagaaggtggttttacaatggggagagattgaaaacagaagaaaccagcggagaggtcacataacaacattggaagcaaggagagtggaatttagaattcaggacgtggagagtgttatcagcaatatggcagaataggagttccttggtttcacacaccccaccccccaaaatgtaactagcaatgatccgcaggcaaaaaatactatcctgaatatcccagaactctggagtgaggctgagatacttccttggactgcacaataaccaagaaaaaccacaatcgaacagtaagagaaacagttctttgaccatgtcatccttctaatatgctagccagagcaattaggtaagagaaaaaagtaaaatgcatcctaataggaaaagaagaaggaaaattgtctctatttgctgatgacatgatcttatatatagaaaaccctaaagactccatgaaaaattgttaggactgataaatgaattcagtaaaattacaggacacaaaatcagcacccaaaaatcagcatcatttctatagactaacagcaaactatctgaaaaagaaattaagaaaataatcccatttacaatagcaaaaaaaattaaatacataagtataaatttaaccaagaagataaaatacttgttttctgaaagctataaaacactgatgaaataaagtgaagaaaacacaaataaatggaaagatatcccgtgtttatagattggaagaataaatgttggacaggtgttcatactacccaaagcaatctacagcttaaatccatatggaatcataaaagataccaaatagccaaaacagtcttgagcagaatgaagaagtctggaagcatcatgccccctgatttaaaaacattatgaagcaattataatcaaactgcacgatactagcataaaagcagacacatcaatcaataggagaggatagaaaacgaagaaataaacccacacctttatagtcaccttatttatgacaaaggtgaggaacacaaaatagggaaaggacaatctcttcaataaatggtgttgagaataccagatatccacacgcagaagaatgaaaattgacgcttatcttatgccatgtcaaaaaaatcagctaaaaacagattaagaacttaaatataaaacctgaaactgt

SEQ ID NO: 13463 - DNA, 1990 bp, Homo sapiens
  CDS (115)..(525)
agcactgtccctcggagtccgagacttccacctgggtcgtgtccaaggccccggcgactccccggactcggggtgccgggccaacctccccgccgaggcccacccgccgtcgctatggcgtgcagtttgcagaagctgtttgctgtggaagaggagtttgaagatgaggatttcttgtctgctgtggaggatgcagagaaccggtttactggctcactgcctgtgaatgctgggcgcctgagacctgtctcttctaggccacaggagactgtgcaggcacagtcctccaggctgctgctgttacaccccactgctccctcagaggctttgggcctgccagacttggacctctgcctccctgcctccagcacgcccagtgctgacagccgtccatcatgcataggagcagctcccctaaggcctgtctctacttccaactgccttaacagttcccactcagcaactccactgggaagtctgtccgcaacgctccactgttcaagcacttcagcctctccaagctgctagagggaccattcagagcagccctcaaaatcgtttcccttgtcagccattccagtctccaagttcctggttaagtggcaaagctcatttacccagacctcgaactcccaactcaagctgttctactccctcaaggactagctctggattatttcctcggatacccttacaacagcagcaagttggtggctttgaggggcctgaacaagacgaatttgataaagtcctggcaagcatggagttggaggagcctggcatggagctggaatgtggagtcagcagtgaggccataccaatcctgcctgcccagcagcgggagggttcagtattggctaaaaaagcccgggtagttgatctgagtggatcttgccagaaggggcctgtgcctgccatccacaaagcgggtatcatgtccgcccaggatgagtctctagatcctgtcatccaatgtaggactccacgaccccccttgagacctggtgctgtgggtcaccttcctgttccaaccacctggtgcagctagtcactgctgccagccggacaccccagcagcccacccatccctccacccgagccaaaactcgccgtttccctggcccagctgggatcctgcctcaccaggcagccctgaagcagcttcctaggaacaaggtccccaacatggcggtgatgatcaagtccctgactcggagcacaatggacgccagtgtggttttcaaggaccccacggattggagtgttttctccttcacttcgaaatcactacctcaacgtgacacccaacaacctggtccatatttacagcccggattctggggatgggagcttcctcaagccatctcagcccttccccaaggattcagggagcttccagcatgatgtggctgcaaagcccgaggaaggcttcagaacagcacagaacctagaggcagaggcgtcccctgaggaagaactcccagaagcagatgacctggatggactcctgagtgagcttcctgaagacttcttctgtgggaccagtagttgagactgccccaacgcaggacaacccaccatgagcaggcagctctgggcacgtgtctggtcacatccaagggggagaagaaggccttcctttgccgttggcaccagaatccggccggagactggctctccagccaacaagaaaggcctgtcacccttgccttgggtgtccctctcctgcctcagcttaattttagaggatattgggcctggttttcttgtcccttcataccctagtccctggacagctgaggagatgaaaggagccacaccacaacaatggcggcctgcccctccacacaggggagaagcacgctcaggcttcctctgctttgtctcttcagacctgtggttgctctgctcatccatgcccaaggttcccaggtgcaggacagaggtgtggcctattgtaccttgttctgaaataaagcatctcctgctt

SEQ ID NO: 13464 - protein, 137 aa, Homo sapiens
MACSLQKLFAVEEEFEDEDFLSAVEDAENRFTGSLPVNAGRLRPVSSRPQETVQAQSSRLLLLHPTAPSEALGLPDLDLCLPASSTPSADSRPSCIGAAPLRPVSTSNCLNSSHSATPLGSLSATLHCSSTSASPSC

SEQ ID NO: 13465 - DNA, 1993 bp, Homo sapiens
  CDS (13)..(981)
ccagattacctgatgcagctgatgaacgacaagaagctcatgagcagcctgcccaacttctgcgggatcttcaaccacctcgagcggctgctggacgaagaaattagcagagtacggaaagacatgtacaatgacacattaaatggcagtacagagaaaaggagtgcagaattgcctgatgctgtgggacctattgttcagttacaagagaaactttatgtgcctgtaaaagaatacccagattttaattttgttgggagaatccttggacctagaggacttacagccaaacaacttgaagcagaaaccggatgtaaaatcatggtccgaggcaaaggctcaatgagggataaaaaaaaggaggagcaaaatagaggcaagcccaattgggagcatctaaatgaagatttacatgtactaatcactgtggaagatgctcagaacagagcagaaatcaaattgaagagagcagttgaagaagtgaagaaattattggtacctgcagcagaaggagaagacagcctgaagaagatgcagctgatggagcttgcgattctgaatggcacctacagagatgccaacattaaatcaccagcccttgccttttctcttgcagcaacagcccaggctgctccaaggatcattactgggcctgcgccggttctcccaccagctgccctgcgtactcctacgccagctggccctaccataatgcctttgatcagacaaatacagaccgctgtcatgccaaacggaactcctcacccaactgctgcaatagttcctccagggcccgaagctggtttaatctatacaccctatgagtacccctacacattggcaccagctacatcaatccttgagtatcctattgaacctagtggtgtattaggtgcggtggctactaaagttcgaaggcacgatatgcgtgtccatccttaccaaaggattgtgaccgcagaccgagccgccaccggcaactaacctatgaccttctgacctctgaactcttcacccaatgatgacctgaccatgcctgcctgctgatcagttaactggtaatcgcctttgcttgcctgtcgtcagtgcagcgagctgaggcacttgtccgttcgtcttaccatctaaccaaacaaaagacaaagaaattgttgtcctccaactcagctttttttttttttttttcctgtttgggtgaaagtggttctagaaactgcactgaatagtagtaaagcaataaggcccaattcatcccacagcactgatcatcttttaatatcccaccctaagcgaacggtaagaaggcctctcttaagaaggggagacagatggtccttaactactcaatgacagaggcagttactgtgagagacttctaggaatctttttcttctcatagcgaagtcaaagctctctctgaatgtactgtgtgatgatgcatcatgcatgaaccttcggtcagggatatcattggtgaagtgatttcaaaaagtattcaaaatttgatatgctgtttagtcactacagtgccctcaaagggcagaagttgcagccttttttatattgcctgccaaaatttgaagtattagaagaaagtgtgccatgagagaaaaacttaaggagttttgaaaagtaatgcaaataacaaaactgcaacactatttttaaaaagataaatatctgagttaaaattactgaatctttattttacacctaaaaaaatatgagaacaaggtacatgcattatgtgtcacattactgggcaaactgttcaagtatttttttttaaacctccctgtatagaaaaaaatcattaaggatgtaaaagccatgcttgcctatttgctgtatacatgtaatgaaattgtagataaagtgtagtgcattgaaacaaatgaacaaaaagtagatacttttactatacaagggtgctggtgcagaaaaaaatatatatatttttggaaatgtagcattttatactttcaagtgttat

SEQ ID NO: 13466 - protein, 323 aa, Homo sapiens
MQLMNDKKLMSSLPNFCGIFNHLERLLDEEISRVRKDMYNDTLNGSTEKRSAELPDAVGPIVQLQEKLYVPVKEYPDFNFVGRILGPRGLTAKQLEAETGCKIMVRGKGSMRDKKKEEQNRGKPNWEHLNEDLHVLITVEDAQNRAEIKLKRAVEEVKKLLVPAAEGEDSLKKMQLMELAILNGTYRDANIKSPALAFSLAATAQAAPRIITGPAPVLPPAALRTPTPAGPTIMPLIRQIQTAVMPNGTPHPTAAIVPPGPEAGLIYTPYEYPYTLAPATSILEYPIEPSGVLGAVATKVRRHDMRVHPYQRIVTADRAATGN

SEQ ID NO: 13467 - DNA, 1811 bp, Homo sapiens
  CDS (208)..(651)
gcatttcgggtctgcgaggtggggtaggcgggcaaggcgggcgccgaggtttgcaaaggctcgcagcggccagaaacccggctccgagcggcggcggcccggcttccgctgcccgtgagctaaggacggtccgctccctctagccagctccgaatcctgatccaggcgggggccaggggcccctcgcctcccctctgaggaccgaagatgagcttcctcttcagcagccgctcttctaaaacattcaaaccaaagaagaatatccctgaaggatctcatcagtatgaactcttaaaacatgcagaagcaactctaggaagtgggaatctgagacaagctgttatgttgcctgagggagaggatctcaatgaatggattgctgtgaacactgtggatttctttaaccagatcaacatgttatatggaactattacagaattctgcactgaagcaagctgtccagtcatgtctgcaggtccgagatatgaatatcactgggcagatggtactaatattaaaaagccaatcaaatgttctgcaccaaaatacattgactatttgatgacttgggttcaagatcagcttgatgatgaaactctttttccttctaagattggtgagttaacattgtcgaagtattctttctttttttaaaattttattttattaatataaatagagttgggggggtttgctgtgttgtccaggttggtctcaaactcctggcctcaagtgatcctcctgccttggcctcccacagtgctgggattacaggtttgagccaccgtatccagcctgtttctctttttgaatgataaatctgctctttttaacattgttatacttgtagagactgccaaattctcctccaaaaagtttgtaccaacatgtactccccccagccctgtttgtgtttgccagtgtttcttcaccaacactggttattactcattttttaatattttctaatttggttaaatttctgttttaatatgcatttaaaaaatgttgatgagattgagcattttagcctttttgtttgttttattgatcattgtgtgttttctgtttatatctttcatctatttctgtgtaaaggatattagcgctttgtcgtatgtgttgtatatctttttccccgggttaccttttgtctcattttgttcatggagtatttttgctgtacacaaccttactattttgtcctattatatcttttatgacttgattttaatataacaattagaaagcttttccctgcttcaagattataaaaatatttattcatgttttcttttttatttttttattttttgagacagagtctcactctgttgcccaggctggagtgcagcggcacaatcttggctcactgcaatctccacctcccaggttcaagcagttctcatgcctcagtccctgggtagctgggactacaggcacatgccaccatgcccagctaatttttgtatttttagtagagatggggtttcaccatgttggccaggctggtcttgaacgcctgacctaaagtgatctacctgccttggcatcccaaagtgttgggattacaggcatgagccaccacgcctggctgggaagttttttttccctgaatgctacattaatttttttccaaatggaaatactagtcagtttgtcccattaccatttattaaacacatttgccttttctcccctgattatcttatgtgcacaacaaattgccatatatttttgcatgttttagtctctttatctgttcctatagaaattccacacgttggtgactgtggctctgcatctgttag

SEQ ID NO: 13468 - protein, 148 aa, Homo sapiens
MSFLFSSRSSKTFKPKKNIPEGSHQYELLKHAEATLGSGNLRQAVMLPEGEDLNEWIAVNTVDFFNQINMLYGTITEFCTEASCPVMSAGPRYEYHWADGTNIKKPIKCSAPKYIDYLMTWVQDQLDDETLFPSKIGELTLSKYSFFF

SEQ ID NO: 13469 - DNA, 1925 bp, Homo sapiens
gaatcttcatgctgggacatttttaacttggatatcttgctattcaagttgtatcggatttgtatcaaatttagcatgcttgcaacctaagcacactccattctatagtcagttccactcttgactttaatatttatggtacggttagtctccacatcttccaagttcaagcttcataaccaaagatcatcttcaccttccttctcactctgcattccattggtcagcttctgttaaaatggccttcctaaggcaggcctctgaacgatcatttatttttaggaaaacttataaaaagtcactgagatttaaaaacacccacacatatatttgcaatcatatttgtgtgcttggttaaacatgtcaacatttaacagatttgagccttctaaatttaatccagcatgaatgtcgtttttactaaaatatttgctattttactcacttagctggttccttacacaagtccagttaaatttcacatgtgaaaaaaatgactgaaaacactgaatggaatgtgatactccttgtgtagtagaaatgagttgactttcatatttaagagctgatcctatgaatgagtagacaataagctgaatagctgttacgatctgagttttaaaaatggaaaatgtttcatgttttagagaatgtaaacttccacaagggcagagattgttaatacgttgtccccccagtgacttaaaacagtactggcacatagtaagcactcaataaatagttgttgaatgagtgaatgtaggaaccatactggaatcaatattgaagctacatagaaagcaccacactgtggagttcaaacaatgtctttaagttgttctcttgaaaactatttaatttgtctgttactgccacttcttccatgcccagaggaacagccaaagttactcaagtctggaacacatgatttaaaaaataattctgggataggcttttggcttttggaaagtagcgcaaataaaactttttaaaatactgtattctgacttccggtcttgacaagagagtgtagatttatttctccctgctcctccctgaaaagtgtaattataaactctgggtaagtataattataaaataatgcaagaggaatcagaaggagaattctgaaaggtgggaccaggaagacacactgcggagggaccccaagactagaggaacaacatggttccaagacatctgacccctcacccaacagaggaaggttacccaggcttgatgtttcccgacctacaaccacacaatagaagacagcccagagaggctcgttcctacagaagagggaactgaagtctggtcggtaataccagatgagtctggctctaccagcacgggggtatatcaggaatcccactgacaaacatccagacctgagacttgtcttttgtgctgagagatgagcatccaggggcctctggcaaaaagcatctaacccaggaagattttttattaccctgagcctgagactcccttctcccagagataccatgggacctggcttgggagaaaatccttctttccctaaagtagcatcatgaaggaccattcgggaaccccagcagcaccagataaaccaagcagaccaaaataacactgcaaaggctttaaaaactaaattaccactggactcatagcccacaaaaactaagccagggcttgcatgctaaacacaaatggagtgactgcctactaaaaataaaagattaaaataatagacaaaaggttcaggatacgatgtaaaatagcctgtcataccaagaaccagaaaaatcacaacttgaataagaaatgacagtcaacagatgacaacactgagacaaatcagatgttggaattacttgacaaggattttaagcaactctcataaaaatgcttcaacaggtaattacaagttgtcttgccac

SEQ ID NO: 13470 - DNA, 1588 bp, Homo sapiens
  CDS (65)..(1165)
agaagtaatacccaacaagaaactgacatggcgatcaagacaacaggatcgagaaaactgtgctatgaaaggcaagcataaagatgaatgccacaactttatcaaagtatttgttccaagaaacgatgagatggtttttgtttgtggtaccaatgcattcaatcccatgtgtagatactacaggttgagtaccttagaatatgatggggaagaaattagtggcctggcaagatgcccatttgatgccagacaaaccaatgttgccctctttgctgatgggaagctgtattctgccacagtggctgacttcttggccagcgatgccgttatttatcgaagcatgggtgatggatctgcccttcgcacaataaaatatgattccaaatggataaaagagccacactttcttcatgccatagaatatggaaactatgtctatttcttctttcgagaaatcgctgtcgaacataataatttaggcaaggctgtgtattcccgcgtggcccgcatatgtaaaaacgacatgggtggttcccagcgggtcctggagaaacactggacttcatttctaaaggctcggctgaactgttctgtccctggagattcgtttttctactttgatgttctgcagtctattacagacataatacaaatcaatggcatccccactgtggtcggggtgtttaccacgcagctcaatagcatccctggttctgctgtctgtgcatttagcatggatgacattgaaaaagtattcaaaggacggtttaaggaacagaaaactccagattctgtttggacagcagttcccgaagacaaagtgccaaagccaaggcctggctgttgtgcaaaacacggccttgccgaagcttataaaacctccatcgatttcccggatgaaactctgtcattcatcaaatctcatcccctgatggactctgccgttccacccattgccgatgagccctggttcacaaagactcgggtcaggtacagactgacggccatctcagtggaccattcagccggaccctaccagaactacacagtcatctttgttggctctgaagctggcatggtacttaaagttctggcaaagaccagtcctttctctttgaacgacagcgtattactggaagagattgaagcctacaaccatgcaaagtaggtatatgttacgagaacgcccttcagcactgctcaaaaattttcggcatgtatttcatctagtcatgtccttttggtcctctaaattagcagtggtttggcataatagtgttttgtgttttttttctcattgaaataaatcttgggtttgtttttttcccgagcctgctagggcgaggggggtgaatggttgatgagtttaaaaataatgcagcccttgtttttcacctgtagaatatgagaacattttaacagcacctctcttatcttgcagatatattccaagatgctacatgcagcagacagctgtgagcttgcatacacacacacacaaatatacatgcacatacatacacagaatgcagtactagttaagtatttccttcctatctttaataagtaagagaatatttagaccatt

SEQ ID NO: 13471 - protein, 367 aa, Homo sapiens
MKGKHKDECHNFIKVFVPRNDEMVFVCGTNAFNPMCRYYRLSTLEYDGEEISGLARCPFDARQTNVALFADGKLYSATVADFLASDAVIYRSMGDGSALRTIKYDSKWIKEPHFLHAIEYGNYVYFFFREIAVEHNNLGKAVYSRVARICKNDMGGSQRVLEKHWTSFLKARLNCSVPGDSFFYFDVLQSITDIIQINGIPTVVGVFTTQLNSIPGSAVCAFSMDDIEKVFKGRFKEQKTPDSVWTAVPEDKVPKPRPGCCAKHGLAEAYKTSIDFPDETLSFIKSHPLMDSAVPPIADEPWFTKTRVRYRLTAISVDHSAGPYQNYTVIFVGSEAGMVLKVLAKTSPFSLNDSVLLEEIEAYNHAK

SEQ ID NO: 13472 - DNA, 1816 bp, Homo sapiens
aaaaaatggttgcctaatttttcttagcctaagtcttgattaaaaatgggatggaagatgagtaagtggattttgaatccaatattctgaacacacatcacaagtgcagagaagagaaagaaatcctcccaaagaagttaaaaggagaaaacacaaaaaacttacctcatacatttttctagaacttctcttacaaacttcggtttgggactttcaggatcttgactaagacaatctgacctaaggaggaaatgtagttttatcaatgcttacatataatctgcacttacacccatttgtactataattatctgttaacttataacaacttacaagttttgttaagttataattgcacttgtaactatttgtacttaactacaaatagtttccaagaaattaaatatttcagacacttttatattacagttttaaacattagtagttttttgactacagaaaaagataaaacaaaccatcacttaccaatcttcccagctccaacggaactggaagttacttagatgatgagaaaaccaattaataaacctacgtagagaagggggaggtaggcagagaaaaaggaagaataactgggatttagaacagaaacttatataagccttcaaacagataaaacccgactttacagagttaatgaaaagcatattcccctacatgcagttgtatcttctgccaactctctttatcctttttaggtcaatgacagatataattctagtacctgttttgtgcgggcacctaacatgtttattatttaattctcacaacttccaaggtacatattattttctccatataaaagatgatgaaactgaagcaagaaaaaaaaaaattttatgaaattgtaggccaggtgcggtggctcatgcctgtaatcccagctactcgggatggagactaaggcaggaggattgcttgagcccataagttcaaggttacaatgagctatgctcatcccactgcactccagcctgggtgacagagcaagaccctgtctcaaataaaaaaaagaaattgcagataaaacattttataaatggcagagccaaagtatagtctttgatacttgactagagaatgaaattaaagaaaatcatagcatggacatcaaaaaacgtaatgttacattaagtatgagtctggttattatacaaaggttattttgggaggcaagaaaaaaactaaacatggaaattcttaaaaatgtctttctcaaattcctttatgaagtacaggaagtaaaagctgctaactcagctcagcagtaaagcgattactgtacctgtctacacaggtagtgttcattgtgtccaaacgcatgtatagcatttcagttgcctgtgcaagctgtgaatttaggataaggaaaactattctccacttttatcccaaataagttgtaatagacaagaatagaaataaaacatttcaagtctttataatgattaataatgctgaacatcttttcacacaatcaatcttgtttttgttttttcttacagctttgaaatatcagtgatgtataatgaatctgacctgcatacactcgtgaaatcaagataatattttcatcacctcccaaatttccccatgcccctccatacgcacaggcatacattgtttcattgtgcttagcagaaattgcttcttttttttttttttaactgaaggtttgtggcaaccctgcaacaagcaagtctactggcaccatttttccaatggcatctgcttgcttcttgtctctgtgtcacatactggtaatttttacaataaaacaagcttttccattatt

SEQ ID NO: 13473 - DNA, 2454 bp, Homo sapiens
ttctgttatgtaaggcaatttagcatcctgctccctaggaaatttcttttggagaaaacaggccatgcaaatgaaaaagtctaattgggtgattggctgcatttggtaacatgtgcttggagggcagggagattggctagttgtaaataaacatgctttctctgggcggttgacccttctgcgtggactgactctgaggtttgtccccgacagggagcaggtggggtgaatttcttgatttctccttagacaccagttactatgaaatcactgattcttttcagctggagaaggatatgctaggggttcttggaggacataccagggtgcaggatgttgggatgaagtttaataagggtggtcttggcagggtttcctggaattttctgtctgggggtgcatttttccttttttctgcccccatagcagctttctgctcattgccaaatagcccccttgtcagtgacgggagaaatttggtcttacaggccaaccttggtctctttgcacagcaaacccccacgcattacacaccactaggtacccatagaccctaactgggtggcgatactggtccgcagaagttttgcatcttgattgttaagcttttgagaacccaaggagggttagaaaggaatgaaaataaacctagacagccaccggcagctctcaaggctgtgggccacagagcagcctgaaaaaaatgtttgctgatcgatttaaaaagcaatcctaaaacagaaggaactgccgtgttgtcttttctaccaaatattgtttggaaatgtatgacaaaggtgcatttgattactttttcctgtagaaggtgttagcaggtagagctggtgactttagcataaaagtagagaaagggaaccaagtaaaaggagattgtgccagatttttcaggaaagccggtaacattgcctttgctgctggatgggtgtgtgtctctgtgtgtgtaagcgtgtgtgcaaaagcttgttctcctttgccttggagaaggtggcctgttggtgtgtcatgcacacaaagggagaggaaagccgtggaaaatagtgattgtcctttgctggcttcaaccaaggtgacctggaggacacgttccccttcatggcatcccagataacgtcctggagcacataaccttctctggaacattcagatcccactgcaggagcctaggactgtggcatgctcctgcctctgggcctttccatctctggaaccgcctgaccctgctgcaggctctgagagtgtggtgtcaagtcaagggttgacaacatcaacttcagggccgggaaaatccgcgtttccaccgggctcatgggtggatgacataagcactgcaggctgtttcttcacatgtaaaggaggtagcagaatttgccttgtggtgggtcatgccctcagtgcagtgtctggcaccctgcatattctcaaaaaaggctggtggcagctgtgaaggtgctgaggagggagtttgaggaagctttgcctctcctgtcttcccatgtcacccctttgttagggaggagccacatcagctacaggccagggccctagagagctgtagcccctcacagtggcacttgccacgaggctcagcatccccacttcccacatctaccctgtcgtctttcccactcaaaaactggacatcatgaactcttatctgcagactttgaacatccttattagaaagggcggcaaaagtgtagagagatatttccctgagaagcttctcaacaacatgaatgaaaaaatagacgagctctcttggtttgcaaatgctcttaaagttgagggcaaaaatgtgaaaaagaagagtctttttttcctcctcacccacggtgaggtcagaggtggagttgctttaatagtaaacaccaaacacaggctttagggctggaaaaagaactgctgctgcttcttagtgacatcacccttcccagaagcttgaactgagttaattttagttcagttcagtttctaccagcccttttaaaaaacattttaataactatttattaagctttctgtaagcatctggctttatgccagaggctgtggacttgaagatacataaaatagtcaaattcattcctatcagatggattatattctagtacaacgaaggcaagatttaaaccaaaagaatggccactgccaagcgttttggctcacatctatagtcccagcattttgggaagcagagacaggagggttgcttgaggcaggagttcaagaccagcctggataacataacgagaccccatctctacaagaaatctttttttaaaaaatagctgggcatggtgatgcacacctgtagtcccagctactcaggaggctgaggtgggaggatcacttgagcccaggagctcgaggttgcagtgagatatgatgacaccactgcaccccagcctgggtgatagcacaagaccctacctc

SEQ ID NO: 13474 - DNA, 2263 bp, Homo sapiens
  CDS (4)..(897)
agaatgtggggcgcctgtaaagttaaggttcacgattccttggccaccatttccatcactctgagacggtacctgagattgggggcgaccatggcaaaaagcaagttcgagtacgtgagggacttcgaggctgacgacacctgcctggcacactgctgggtggtagtgcggctggacggccggaatttccatcggtttgctgagaagcacaactttgcaaaacccaatgacagccgtgctctccagctgatgaccaaatgtgcgcagactgtgatggaagaactagaggatattgtgatcgcgtatggacagagtgatgagtacagctttgtgttcaagcggaaaaccaattggtttaaaagaagagccagtaagttcatgactcacgtggcctcccagtttgcctccagctatgtgttttattggcgggattactttgaggaccagccccttctgtatcccccaggctttgacggaagagtcgtggtgtatcccagcaaccagactttaaaggactacctcagctggcgacaagcagattgtcacatcaataatctttataatacagttttctgggcacttatacaacaatctggactaacaccagtacaagcccaagggagattacagggaactcttgcagcagacaagaatgagattttgttttctgaattcaacatcaactataataatgagccgccgatgtataggaaagggactgtgttgatatggcagaaggtggatgaagtgatgacaaaagaaattaagctgccaacagaaatggaaggaaaaaagatggcagtgacccggaccaggacaaagccagtgcccttgcactgcgatatcatcggggatgctttctggaaggaacatccagagattctagatgaagacagctgacccttttgcgcttcagttctggtgtgcttaaccatgcaagccctcccacctcccagggctccttgccttaggtggctgtagcatccctaccacccaggacactggtgtgaatgacacaacaaaaaagttgggaggggaacagggaaggaagggatggatgggggtggtgtatcttactctgtttaagcagaacaccttgtttgcggtgttggaacatggttcctttggcagaagtgctttttttttaatcgcagtactatttttataaagcaagaactattccatgccttggagaatgaatcatttttagattgtgacataaatcttgtaaaaacctgtcagttattttcatctatgagagaagaggagcccaaactctcgcccacctgttcttaaccagaaaacccactgactttggaaatctcacctctgccacccatctacttgcattcgtctttggcagacctcaagataaatatgggttaatgcctgcatgatgcctctgaattcaggaattgcagggaaaactcggggctttgtgccagtctctaagttggcaactttggctgaacaaatgagtagtggcttcagtgtccttgcgtacacattctgtggattgatttaatggagttgtcagcatgatcatcatcttctagccaggggcatagttgccaaggccatttacctctttctaagaagaaacatttaccccatgtactcaagacatttcagttttaaaagtcactttcctattagacttcttgaaaaagattctcacatagcctctatgtaatcagacaaatgacatttgatttcaagagcagaggggtaaacatcctctgctaatcgacaggtagcaggtgtcagaggaggcataatattaatagcgccaccttctgttgggtcagtggagatgggtgaggagcagcacagagcagcagggatcatcacatgcagccaaacttggcctctgaagggggaaggtagtgggaataggtggtgagagaactcacatttttctcttgtcctggttttatatttcggagggaaaggattatttggccccattaagaattaagaggctgggtgcggtggctcacgtctgtaatcccagcaccttgggaggcccaggcaggcagatcacctgaggtcgggagttcgagaccagcgtgaccaacgtggagaaacccccgtctctactaaaaatacaaaaaattagctgggcatggtggtgcatgcctgtgattccagctacttgggaggttgaggcaggagaatcatttgaactcaggaggcggaagttgcggtgagccaagattgtgccattgcactccagcctgggcaacgagcgaaactacatctc

SEQ ID NO: 13475 - protein, 298 aa, Homo sapiens
MWGACKVKVHDSLATISITLRRYLRLGATMAKSKFEYVRDFEADDTCLAHCWVVVRLDGRNFHRFAEKHNFAKPNDSRALQLMTKCAQTVMEELEDIVIAYGQSDEYSFVFKRKTNWFKRRASKFMTHVASQFASSYVFYWRDYFEDQPLLYPPGFDGRVVVYPSNQTLKDYLSWRQADCHINNLYNTVFWALIQQSGLTPVQAQGRLQGTLAADKNEILFSEFNINYNNEPPMYRKGTVLIWQKVDEVMTKEIKLPTEMEGKKMAVTRTRTKPVPLHCDIIGDAFWKEHPEILDEDS

SEQ ID NO: 13476 - DNA, 1800 bp, Homo sapiens
tgtagattccttccaaatgataggtataaaaatgcaatgaaaatgataattggagattttcaaaataaatgtaaaattaataaatagtggtgaacattttctgcctcagctcattggcataatacattccccaacatacataataattataaaataatatagtaactgttaagttatttcaactgtccaagttttctggtataggaactttgtgtaaaatattactcagatatgggaggcttaggctgggatttttcagtttgtcatacagagcatttttaatgatttgaatgtagctgaatttggcttacagtcacaagaaaacaagatgttctaaaatataaaattatacccttggaaccaagaactgtttccctgtactctggcagttagctaatgccatcacatttgaaccttgcatttaccttttatagccagtgaatctctgtctgctgtatcttaaagaacagttctgatttccctaatggaggaagaattagcttggatactctcacagtcactatcccttacagacaactgctgagttctagaaggatttctattctaccaacacagtgtcttagggagacggactagaggacaggatgattagtttagaaattatgcttctggctaggttttaagtttcttgatagcaggtattacgccgtgctgcaaggttatggttctccagatggacaccattacatttttttttttttcatatttttctggtgtcctctggagttatgcaatgtatataacctgtgtagctgtgttttacatttcattatcccttatgatatctagcatagtgagaaggacctagtaggtgcctgctgcttactagttgaaaaagttagtatctgtccactcagtcaccacctttttcattttcttggaccagctaggcacagagagattgtaaggaaagcaaacaatttttaatatgaaaagctaagcattgttatttcttagaggaaggctatagtttctcctgaatgagcatcagaagtttggaggaatttaaaaagacttcttttacttcctctaccatccttctccagtcttttgtggccatgaacacttctaaccaaggcaaggtgagcagtaacccagcagaagaaaaagtcaactgttgtggctttaatggacaacaggagttgggaaactttctgaataggcagccagtggggagaaggaaaagtggtggtctccagtgactagtgagagaaaaaaggagactgtgaagtgattaagaagaaattgcaaactagtgagaagaactcaatcagcaattgtgatgaggttaactcacagacctgttggaatatggtatagaagtggcagattaagtgactgaaataacatttctgaaaaaaaattactgaaccatcagaaattcataaaatctctaatttttacataagaattattttcaagcttaccagtaaacttggttgtcatatattataccaagaactgctgctgcactaattgtgtacgctgcacagtctctgaataggggccaacatgatagtgttgagacctgtaatatggtaagttattatttccattacattgtaacttcttcaagtacaatccttagtataatactaaaattgtttatatatttgtagttaaatattgttatcttttgcatattgcttagagaaaaaaatgtaaaattgtgttctaacttacacagactttcataaatctgaccaagagctatttgtggattaacattaaattgaatacatgttgtttttctactgattaataaatttgattgcacat

SEQ ID NO: 13477 - DNA, 1702 bp, Homo sapiens
taagtcaatctccagttccttttgcctcctggagttcagcaggtgaggctgaaagttccaagcctcaaaaaatgtggttggggccaggtgcggtggctcactcctgtaatcctagcagtttggaaggctgaggcacatggaccacttgaggtcaagagtttgagaccagcctgaccaacatggtgaaaccccatttctactaaaaataacaacagttagctaggcgttgtggcacatccctgtaattccggctactcgggaggccgaggcgggagaattgcttgaacccgggaggtggaggttgtagtgagctgagattgtgccattgcactccagcctgggctacaagagccaaactccgttttaaaaaaaaaatgtggttgctttctctggcagctagccctcctcctgaagcagtctcggagcttgcagccaccctgttagctcaacagcatcccacatgcattcttaccatgctgcagatctgaaagaccttagaggcccttgtgtcaggaacctgggactaagactaaatatcaaaacagaaaatgctcctattacctctgtcacgaagggctttataagagctttggaagctttatgccaggaaccaggggcagagaccaaatgtatatttcttttcttatatcggagacagagtctcactctgccactgaggctggagtgcagtgatgtgatcatagctcactgcagccttgacctcctaggctaaagcaatcctcccaccttagcctctccagtagctggaactacaggcatgcatcaccatgtccagctgattttaattttgtaaaggcaggatcttccttttttccccaggctgatctctaactcttggcctcaagcaatccttcctctttggcctcccaaaatgttgggattacagatgggagcccccatacccaccaatcacaaggatctttataagagaatgaggtaggagagtcagaattagagaaagtgatgtggtaatggaagaagaggtcagagagggagatttgaagatgctgcacttctggccttgaatatggagtcacgaggtaagtcaaggaatgggggtggcttctagaagctggaaaaggcaaaggagcacattctttctagagcctcccccagaaggaatgcagcctctctgacaccttgactttaaccttaatagacctagttgggcttctggcccccagaactgtaagatggtagatttgtggtgtttgatgccactaaatgtagggtactttgttgtagcaacaacaaaaaatgaacatgaagctgggacctcatgttacggttgctcacgcctgtaatcccagaactttgggaggctgaggtgggaggatcgcttgagcccaggagcttaagaccagcctggacaacataatgagacctcatgtctaaaaaaaaatttttttaaaggccaggcgcagtggctcacgcctgtgatcccagcactttgggaggccgaggagggtggatcacgaggtcagaggttcaagaccagcctggccaagatggtgaaaccccatctctactaaaaatacaaacattggccgggtgtggtggtgggtgcctgtggtcccagctacttgggaggcagagaatcacttgaacccagaaggcagacattgcagtgagccgagatcgcacccttgcacttcagcctgggcgaccgagactccatctc

SEQ ID NO: 13478 - DNA, 1916 bp, Homo sapiens
tacatggagaaaggctcaatagaaatgcaaacgtgtgtgctagaataaagaagttattggtggttttacttttgattatcccgtaaatttttttaattttaaattattctttttaaaaatgtcttctactaatctttaaacattattaagtagtgagaaatattatttctactgatttataaatatatccattcttcacattcacagtgggatttgtaaaagcaatccttggatttacaacctttttttttttttttttagcaaacaaagctctcaagttggtgatcctcaggtaacatctaacctacagatattgcaccagttatttattgctacaaaaatgctgcctaagaagccacccaaagggcagtgggttacaacaataactataccttttttcttaggagtctctgcattagttggacagctcttctggaattatcttctaagtcaactgtgggttgggtaggtggctctgctgatttttcgctggacttccacatttgggaccagttggctgtcatcagctctagaaagggtgtggctgttttacattggctgttttcctcacattcctcaagcaggtaagcttaatcatgttctcatattgaagcagaaactgtttactcatttatctatttacttactgggtctcctgggcactaggtactgtaataaagaactggagaaatacagtcagatgggaagtagcccctgctgtcaaggagcttgccatctaatgggggagacaggcaagtaaaccaaagactacacagtgcagtatggtaagtgccatgattttgatgtgacagggcacagtggacgaccttccaaatcaaagcaagtaactaggggttgacaatggtaagtatcatagttgaagtatccttgaacaaggtttcaggaagaagaagaagggaatttcatgcagggaaacagccaaagctcagtgagtcaaaatatcacagcattcttggtaagcccaattgttttttctgttttgctattttggtggagagaaaggaacacataaaggaataacatgagagaaggctatttggggaagtgtagtagttaaggttctggctcaaacaacaactgcagctcataaagttgactttagtggaaggatactggggtatctcatggaatcttgggaactgttgaataaccagggaaactctgggaaactcactggtaggaatccataaactgtcctcctggtgggctgtaaacaactcaccctctatgcatctcacatcaaaattccagtttcttgggaaaacaagtctgtttgcccaatttgggtcatatttccacctccatgttactcaggcatgattcatctgcaagttatgtgtatagatattttgctactgttccacccttacgctgtgctggggagggaggtgtcactgtgagctgtgtcggtgccttaagagatatctgttgtgtcttattacttggttgcttttccccacatgtacaatgacaaaaatgccttcaacctatttgatccagccgttccagtacaactcctatacttgccatctttccaagcccaaaggtacatccagctgatggaaggagcatcttggtgttaatattcttttagtcatggtctctgaaagtaaaatgtctattcttctaattctggcacaatcttatctagctatagttcctcatggtcctgcactccatggactaaattgtaagtataattactaccaatgtactctataaataacttttggggccagggtggcaatagttgctagagaaaaaaaaaaaaaaaaaggaaggagaagaaaacagtgatagttcttattttaaaaggaaaaaaagaggcaggaggctctcttgaggccaggagtttaagaccagcctaggcagcatttcaagaccctgtctctact

SEQ ID NO: 13479 - DNA, 1963 bp, Homo sapiens
aataaaaaccttcaataaattaggtatagaaggaacatatctcaaaataataaaggccgtatgtgacaaactcacatctaaatcatcctgaatgggggaaagctgaaagctttttctctaagaactggaagaagacaaggatgcctgctttgaccactcctgctcagatagtgctggaagtagttctagccagagcagtcaggcaagagaatgcaataaagggcatccaaactggaaaagaggaagttaaattgttcctcttttcagatgacatgatcttctatatagaaaaacctaaagacgtcaccaaaaaacacatttagaactgatgaataaattcattaaagtgacaggatacaaaatcaacatacaaaaatcagtagtgtttctatacaccagtaacaaactagctttaaaaaatcaagaaaaagccgggtgtgatgcttcatgcctgtaatcccagcactttaggaggatgaggtgggtgcattgcttgagcttaggagttttgagaccagcctgggcaacatggtgaaaccctatctctgcaaaaaaaaaaaaaaaaaaaaaaaaaaaattaaccaggtgtggtagcacatgcctgtagtccccagctagtagggaggctgaggtgaaaagatcgcttgagcataggaggctgcagtgagctgtgattacgctactgcactccagcctgggtgacagagaaagaccctgtctcagaaaaaaaaagaaaaattgagaaagcaatcccttttacgatagctaccccccaaaaaactaaaaaacccaggaataaatctaaccaaggaggtgaaagagctctgcaatgaaaacttataaaacagtgataaaagaaattgaaggggacaattaaaaatggaaagacatcacatgctcatgattggaagaattaatgcagttaaaatgatcatactaccaagagcaatctacagattcgatgcaatctctttcaaaatactaatgacattcctcatagaaacagaaaaaagcaatcctaaaattcatatggaaacacaaaagacttcaaatagccaaagtaatactaagccaaaagaaaaaagctggagtcattacactacttgacttcaaaatatactacaaagctatagtaaccagaacagctttgtattggtgtaaaaacaaatgcatagaccagtggaacagaacatagaacccagaaataaatccacatatttatagccaactgatttttgataagggtgcaaagaacatacattggggaaaggatccttctttaatttgctgagaaagctgggtatctctcaactcaagatgaattaaagacttaaacataatacccgaaactataaaactactagaagagagcataagggaaacacttcaggacattagtctgggcaaaaattgtatgtgtagcacatcaaaagcacaggcaacaaaaaaatagacaaagcagacgatatcaaactaaaaagcttctgcacagcaaaagaaacaatcagagcaaagagacaacctgttgaatgcagaaactatctgcaaactattcatcttacaagggacttgtatatccggaatatacaaggaactcaattcagcagcaaaataataatgataatgtgattttaaaatgggcaaaggatctgaacagacatttctcaaaagaagaagtagaggccgggtgtggtggttcatgcctgtaatcccagcacgttgggaggccgaggtgggtagattgcctgaggtcagggcttcgagaccagcctggccaacatggtgaaaccccatctctactaaaaatacaaaattagctgggtgtggtagcatacacctgtaatcccagctactcgggaggctgaggcaggagaatcacccgaacctgggaggcggaggttgcagtgagccgagaacacaccattgcactccagcctgggcaacaagagtgaaactctgtctc

SEQ ID NO: 13480 - DNA, 1512 bp, Homo sapiens
  CDS (562)..(1182)
tgaataaattttgcttctaagagaagttactattcctaattatatggggagtaaagtctctttgaagaggaatctctactttactttttacacttgtgctttgataattttttacttggaaacctcatcttttggcgttttttttttttgagctatttctctagtgttgctatttgatttaatttctgaccttcatttttgtttcccaaccttttttttttgtttgatatgaggggttccgtgactgaggttctgagctgctgttgatgtgctatacctccttcaattctcagctatcaaaggggaaaacaactgcagaggatgggaaatgctatactgccatgcctggaaacacccacaggaaaattaccagttttgagcttgctcaactgcaagaaaaactgaaggagacagaagcagccatggaaaaattaatcaacagagtgggacctaatggtgagaggataagggcttctgatttcccatgacttaggaaacagaattaagactgtttcattcattgaagatcagaatgccctgcgtacagtctggaaaagtaacatgtgccgcctgaagagacaagagtttgtgataagcagagcacagactgtgacttctgaccaagagaaacggttgctacatcagctccgagaaatcaccagggtcatgaaagaaggaaaattcattgacagattttctccagagaaagaagctgaggaggccccttacatggaggactgggaaggttaccctgaagagacttacccaatttatgacctttcagactgtatcaagcgtaggcaagaaacaatcttggtggattaccctgacccaaaagaactttctgctgaagaaatagctgaaagaatgggaatgatagaagaggaagaatcagatcatttgggttgggaaagtctgcccactgaccccagagcccaggaagataattctgttacctcgtgtgatccaaagccagaaacatgttcctgctgttttcatgaagacgaggatcctgctgtcttggcagagaatgctggattcagtgcagatagctaccctgagcaagaggaaaccaccaaagaagagtggtcccaagactttaaagatgaagggttgggcatcagcaccgataaagcatatacaggcagcatgctgaggaagcgtaacccccagggtttagagtgaaaacagccagtctgaagtatccattactcaagtcccaaggtgacctctctctcctcagatttccttcttggccctgtgccctgcactttcttcactgtgttcaagtgtcatagctatcaggccactatcatggatatcatgtatccttcctggtgctcacacacctgtcaccttgtaaaacacggacattagtgtgaacacaggacagcttcgctctttctcttcctgccctagctcttggttggtttatatataaggaatatatttgtgtatttatatatcagacatttggatgtacctttcagttatttaggatttagaaaattc

SEQ ID NO: 13481 - protein, 207 aa, Homo sapiens
MCRLKRQEFVISRAQTVTSDQEKRLLHQLREITRVMKEGKFIDRFSPEKEAEEAPYMEDWEGYPEETYPIYDLSDCIKRRQETILVDYPDPKELSAEEIAERMGMIEEEESDHLGWESLPTDPRAQEDNSVTSCDPKPETCSCCFHEDEDPAVLAENAGFSADSYPEQEETTKEEWSQDFKDEGLGISTDKAYTGSMLRKRNPQGLE

SEQ ID NO: 13482 - DNA, 1530 bp, Homo sapiens
gtgttttcaaataggagtaaaggcccttgcaatttttaattaacaagcaaggcccaagggaacacatgtcctcaaaagtttttctgatccctcgccttgcacacctggcatgcatcaggcacatctgtcctacagctggcagagacagatgcctcggttctttgtcattcagattgcatttgacctcttctcatctatttatttctttatacatccagacttcatcacatgaagcctattggggttaagtttgtaagtgtttaattgtgcaaattgccaccctgtgtacctcctccatgtctgtctgcgtgttttccaccaaagaatgcaaagcagacttccaggtgtttaaattctgttcactcaacaatgccagatgaatggaagagggaacacactgagatgacttagactctggtccaccaaccagacccttggaaaggaatactaaaatcattacaaggtatggattttaaatggatgaaacttcaaattatcttatttggatagaagtctatattctagcctcatttgcatgaagtcagatagccagaagaaattccattgctggttttcacgaaattcacttgtcttttgctaataaacacatggccctttcccagattattctctagccaagccccacctttgttacgttgaaatccctcatttattttcttctcaaaatgcccattatccaaatgcagaacctctgcatctccaagccagttatgctgaatttgtcaaacttagacacccttgacaactgcactcctactgtaggctcctgtgcatactgtcgtcttctgtgggggatggagaggttagtgtgatgaggtggtgtctgcccaggaggtttctttcaaacatcatggcctcccatccaatcaacatcatcaaattacatgtgtaatcaaggctctgtgccatgggggaaatgaatcatttagctaggccaggatctagtgaaagccacagagtttaaaaccatgaaagaagttgaaggcagcattcctcagctctgtgacttgtgaccctatttgaagtttcaggatttgggtgtcacaaaggattgtccctaatccttggccctggggtcttccgagtgagctggtttaatactctgagaatgagcagggagatccagagaatgaatccctgaccgcatcacctaaactgtcttccaaacatgagacaaagctgactgttcacactgattgcccagcacataccgtcttgccagtttcttcttttctcccagtctcctgttcatccattctgttctcccttggggtgggaatctatgatggaggttactggggaaacagctcagcagatttttggagaccaaaccaaaggtctcactaggaaatttatctgttttaaaacattgcttccttcctggctctgctaaattgaatgctcattgtttgttgttgttgttttttaattctaatgttcaaatcactgcgtgctgtatgaatctagaaagccttaatttactaccaagaaataaagcaatatgttcgt

SEQ ID NO: 13483 - DNA, 2116 bp, Homo sapiens
tattagaaccattctgccttgctaatgctgcctaccttgggggccaagaaatgatggaggtggtgaagagagatgacgaaaccataaaggagcatttatgtaagcttacattttattatggtactatagatccttggtgtccaaaagagtactatgaagacattaagaaggattttccagaaggagacattcgactctgtgagaaaaacatacctcatgctttcatcacccattttaaccaggaaatggcagacatgattgctgactccctaaaggatgacttgtccaaaatgtaaattggcctgaggaacaagcccccactgccagtacatggaggcagtcagtgtactagacttagtaggtaaatgtttaattttgaagactgatattagaaatgaagaaagtgagaacctttgtcttacaaaccaactctccgctcgccatgttataggctgaagtaaacacagttgatgaatcattccataggtttaaccatacattttccaagactcagggaacacagtgatctacacagagtcttgtgtttgcacaagatgcccagtggcaccatatggtttattttggtaggcaggatctttgcagatgaaaaaaaaatctacatgtacttgattttaattgagttacattgtagaataggctcctctggaggaaattatgaaatacctactagaaaatgtaaaataaatcagtgaatgttaagagtatagttagatatgtgaagtgtatgagattatgacaaggatacactcatgttccaggagcaggaagtgaacctgggtctcctgtaagacagaagatgaagatgagcccaggctaacttagcacagatcttggctgagatcatcaatgtgacgtctaatgtacctgcactagacagagaataaagttcaccagacattactctggtcagctaaccagataaagaattgttgaaggaccccaactgtgcctcctgccacaggacaaccagcaagttctatgctgagccttagcctcccaggttataagctccctgcaggctcctcctctccagagccaggatggagaggcactgggctgtcccaaagcaggcttggatgtgccaacgtacagttgctccttctgtaattcttgcactaaaactccattaaagaccatcaatgagccaaatagtgtgctagccattgaggatggagttcttagctacttaatgattcttttcttctggaaatcttctagtgaataatttttaaaagcttcttttaaactgctcagtaaaacattgccatacattaactctccatttctgcattaacttcatttgctggaaagaaattattttgttaatgaaccaaacccagccattaagttatgtgaattcaccttctctagacacattgaggtatggcagagaagacacatattccctggcctagagtgggctgacaatattgctgcctcccctaaattgactcaatcttgagaaccacatactgcagtgacagttgatcatggatcagaaatattcctttttctcctagaggaaatccctcatggcattatcattccctaaggacaatgagatgtccctccgctcaaatcctaaagccccctgatgaaagatttggctctgatttgctgccaacttattgggattagactaaaatggacaaacagtggaagaaatccattttccagaaggagctctgcctgtatgtcccagtcaaccacatggatggtcgttgtgaaagttttaacttcctgcagagttaccgagtgctcagcgattgagctttgaccacacccgtgtttgttcctagtctgttcccagccataagcatctccacaagccctctgtggcttgtgtggcctgatgtccatggccaccaagggcctctcaccatacgcttctccactcaacctttggagagacacggaccaccaaaggcttgatttttcttcatcctacattatattcaaaacaaacaggctgggtgccgtagctcacacctgtgatcccagcactttgggaggatgagctgggaagatcgtttgaggctaggagtttgagaccagcccgtgcaaaaaacgagacctcgtgtctaaaataattttt

SEQ ID NO: 13484 - DNA, 1951 bp, Homo sapiens
agcagatgacagtaatccaggcagaaggttagtgtcagagaagtctgtcagtgggtcatagggctccacgtgctagcctgggtttccgtgccagaattttgttcttgggaggcaggtagggaaaagcaagtcaacatctccagttccagatgagctagggcacttgaccaaatacaggtacagaagttagtccttgaggtagagcttacctgttggagaacatggcagaaatcattgtaccaaaattggagcacaggtcagaggctaaagcatggcttactgctgtggctcatggtgaacttgagcttctcatggcccctcctatctcctgaggatggctgagctcacagatggggactgttatgtaatcagaggtcaagtggtttagctggggtggcagagagccaggtgaagactgaaagtgttcaaataaggaagagaacagaattgctttatgtctgccttcatgaagacaaaccctaatagccaaaggactgaaagtttgcccaaagagacctcaatttttgaaaggaaaatgcatcttctccttatgttagaatgaccacgtctaaataaaataaactcttttgccttttgttgttacttgtcttggtatctaccattgtttgacactaaaaaaaataaagcagtgactaattattggctaatttaatctgtcatgatggcatttgtaattcaggtacatccttcattaaagcaagtataggcattattatttttaaaactttttttttctatttggatttcttctattttgtttgattatttattttgttgttactggtggtggtggtgttttacagtgagacatactggttagctcagctaaggtgtttgagtaagacttcataaacataaagtactttgtgtgggtttgttttgtgtgttccatcttacgtcatttgtggcactgaaaatgagattgcaattcccagagtactgggatagttcattcagaggttagcccacctaagtttatagcagttgtctgtaatagaattgtaactaatttccactgttgtttttggagaaaactgtagactataattatgtgttagcactttttaaacagctccctgcattgtcatatcattttaaatgggctctgttttaaaatgacctttcatgttttgattgcaaaaatatagcttacacaggtctgtagttagcaaaatacaaggatccagtaaatgatagagcattgacacaactctagaagcatgtgttaaacatcactggcactgccctaggtttaaaggggaagaaatagggaagtagaaattcactgttcttcaacactccttctgttggataggcaagattagtacatagaacagttatggagccatgtgaaaaaaaatagtagttatacaaatgtaaaatgctacacatgaagtatattgcattacctttttgtggcctatggaaagaagtctcagagcacagtaagattcaagtaccatctcccagaattggggtcagcaacaccattttatattttggcaaatgctacccactgtctcccaaacggcagatatctgcatatagttagtcatgtggacacacccttcctctgctacattgcattgccatattagtagtagaattttagtgttgatttaaaagacagtctgccttaaagcagattgcatagtttgcacactgtgaattgtaattaaagtgtaaggggggcttattatgtcaacaactggcatgagaacccccgagcagcaggtgaccctgaccatgtgacgtttgtgacagctaggatccccttttcactggcttagcgatctgaaagtccaaattgaaagaagcccagaggctgtatatttcattagatcccaggggaagtacaggatacagcttccttctgttttcctgggaggtcgccagaaagtttgtagagctctgtttctgtcagagactc

SEQ ID NO: 13485 - DNA, 1511 bp, Homo sapiens
cttgccagttacatataattggtgacttttaagttatttgtcacctggaacagacataacttctttagcataaaattcagatacaactgtcattgaatttatgtttccataaaattggtggtagaatttttagcattaggtaggagaagaggacagggaaagacagctgtgtctcaggcactgtactgttttacctattttgttaaatcctcacagcaaccctgtaggtaggtgttaactgaagcagagaggttagataacttgctcagtgttacacactgatgataaatgacagagcaagaattcaaactgtaatgtttcggttcttgttatcttttattcatcgcctttattgtttcttttctttctttctttctttctttttttttttttcttttgagatggagtcttgctcttgtcgcccaggctggagtgcaatggcatgatctctgctcactgtaacctccgactcctgggttcaagctattctcctgcctcagcctcccaagttgctgggattacaggcgtctgccagcacgcctggctaatttttgtatttttagtagagacagggtttcgccatgttggccaggctggtctcaaactcctgacctcgtgatctgcctgcctcggcctcccaaagtgctgagattacaggtgtgagccaccgtgcctggccctccttgctttattttatgattccattcagtcattagtcttgtcggtttttaaaaaaaggttttattgagatatgattcacatactatacagttcactcattaaaagtatacaattcagcttttagtatattcagagttgtgcaaccatcaccacaatatcagaattttttttttttttgagacggagtctcgctgtgtcaccagggtggagtgcagtggcaaaatcttggctgactgcaacctctgcctcccaggtttaagtgattctcctgcctcagcctccgcagtagctgggactacagaagcttgccaccatgcccggctaattttttgtatttttagtagagacggggtttcaccatgttggccaggatggtcttgatctcttgacctcgcgagccaccgcacccagccatattggaacactttaatcacctcccaaagcaatgccatactcattagttgtcgcccctaacctcccctctccgtgtcctaggaaacctccttttcttccaaaaattttagcacgtattttcatatgttagtgtgtagatcaattcaaataatagatacaacaaatactgtaatatgttgtgtaccttgtaattattccagctgtattgcagaaatattttataaatttaatagggctgggcagttttttttggaaatgcttgatcatttgcaagtactacatgctcttgaataatatattttcatttttagaaacatttagaatatttagtgtacaacccctgtctcccagtaattctgctgcccaaggaaatcagttactttattttttcttttcatttcttagctatagtcttt

SEQ ID NO: 13486 - DNA, 1926 bp, Homo sapiens
  CDS (1186)..(1548)
gagtgtttctggtggaatgctggattgttaatcgtgttagatggaattatgaccttgttgttgtctttatgtggcagttaagtatggtttaaagagatgtttatgggtgccaagttgacaagggtagacttgtgatggttaattttatatgtcaacttgaataggccacagggtgccagatatctgtttaaacattattctgaagtgtcttgagtgtgtttacagacgagatttgcatttgaactgggggactcagtaaaggagatagccatccccaaggtgggtggacatcatccagtttgttgagggcgtaaataaaataaaaggcagaggaaggaagaattcacccccctttttttttcctgcctcattgtttgagctgtgacatctcatcttctgtcctcagatggatttacatcactggcttccctggttctcaagcctttggattcagactgaattataccacaggccttcctgggtctccagcttatagatgacagatcatgggacctcttagcctccataatcatgtaagccactttcttgtagtactggtaaaagatatattagaccaatctataaaacagatagctatgaaagagaaaggtgacaggcacaagcctaggcaaatagagaagggttcctggagagcctctgacttgcctaggtcattgtgcacacgtggcttgcctgaatgaacatgcccactgtgaaagattccatttctcaacacatgtgcagtaagggaaataaatcaatgtggctcagactaagcgcccacacatggggtggagccacgaggagtttgctccttatgcaggggagaagccgtgcctcttcagctcgtgtgtggtggcctggcattcaatttgtgaggtgtaaaacctgcatgaaggacccctctttttgtggagagctttccttttgcctaataaattctgccctcctcgcctttcagtgtgtacgcgtgcctaattttttctggtcatgtgataacccaaatttaactgaactaaggagcaaaaaatcctgcatcggctacattaatagctgattgtactagattgagtagtgtccccccaacaaaattcgtgtcccactgaaacctgtgaatatgctcctatttggaattagggactttgcagatgtaatcaagttaagacaaggttgtacttgattaggatgggccctaaatccaatatctcttgtgtccttgtaagaacaggaaaatctgaacacagaaacagagacatagggccatatgaagacagaggcagaggttggagtgatgagtcaatgagtaaaggaatgccaggggttgctagcaactgccagaggctggaagaggcaggcaaggattcttccttcaaggcttcagagggagcatggtccagcccacacctttatttcagacacctagcctcaagaactgtgagagaatgcattggttttacaacaaacagttgtaaaactgtgagaggatgtgtttgttttacaacaaacagttacccagttggtggcactgttacagtagctctcagaaattaatacgctgagtacaaagtcaaaagctaattaggaatagacatggacactgatatggtttggatttgtgtccccactcaaatctcatgttgaattttaatcccctagtattggaggaggtgcatggtgagaggtgattggatcatgggggcagacttgctccttgctgttgtcgtgatagtgagttcttagcgagatctggttgtttaaaagtgtgtagcactccctcttcgctctcttcctcctgctccaaccatgtggacgtgcctccttcctcttcaccttgtgccctgattttaagcttcctgaggcctccccagccatgcttcctgtacggcctgtggaaccgtgagccaattaaacttcttttctttaccc

SEQ ID NO: 13487 - protein, 121 aa, Homo sapiens [sequence omitted]

SEQ ID NO: 13488 - DNA, 1970 bp, Homo sapiens
actgattttcttagataatataattaaacagaagcgtgtaacagattaaacattatgagagagaaaaactttattgatcaaacatttggcttccaagaaaagtacctgacctagctcaatattaggtaacattatgaagtatttcctgggcatgataatgacattgtggttatatgataggtgaattatttagggtcgaagtgtcaaatcagtgtctttgtggagggataaagctttgtggagggataggggaaaatgttcgacaattgttgaatctaaatagaaggaattcacatgtttattttaacattctatcaactttttggtatactcttaacaaaaagaaaaaaaacaatgcctgacttagatgtttatatgggtgactcaagctatcaagtaatggataactcctgtgccatataaacagttccaatacactaacaaaaacttcctaatttacttgaggacattaacaaaaacctcagaagacatacctgaaattatgaatcttttgcatcagtgtgatgtctccacttttatttctgattttatttatttgagtcttctagttttttcttagtctagctaaatgtttgttaacattgtttttaccttttcaaaaactaacaatttagttgatttcttcctgtttttctattttttatttctgctctaatttttattctttccttttttctgctaactttgggcttagttttgttcttttttttctagttccttgagatgtaaagttgagttgcttatttgagatctttcttcctttaaaaataggcaattatcattagaaacttccctcttagtcctgattttgcttcatcctgtaagtgttcatttgttgtgtttttgtcttttttaaaattttccttgatttcatctttgatccactggttgttttaagagtgtgttgttaattcccacataattgtgattttcccagttttccttctgttactgatttctaattttagtctattgtgcttgggaaaaaaaggttggtatcatttcagtcttcttaaatttgttcagacttgttttatgacttaatatgtgatctatcctggagaatgttctatgtgcagttgagaagactgtgtattctgcaactgttaggtggaatattcagtatatgtgtgttctgttcattattgaaaatggggtactgacatcttctactgtattgctaattgctatttttcccttcagttctgtcagtgtttgctttatgtatttaggtactctaatgttgggtgtatatatgtttatacttgtgatatcttcctaatgaattgactcttttatcatatgaccttctttgtctcttgggatggttttttatttaaagtctatatcgtctgatagtgtggccacacctgtgctcttttggttgctatctgcatggaatatattttcctattccttcacttttagcctgtgtgtccttaaatctaaagtgagtctcttctagatagtatatagttagatcttatttttaaaattaattcagccactatatgttttttgattagggagtttactccatttacattaaagtaattattgatagggaaagacttactagttccattttgttaattggtttctttcttgtagttgttttgtcccttttgtcctctcttgctgtcttcctttgtgatttgttgattttgctttgatccttccttttttttttttctttcgtgtatcttctataggtattttctttgtggttaccaaagtcttaacagaaaacaacttatagctacagcgaaagcaatttaaaaaaatagacaaacaggactgcatctaattaaaaagcttttgcacagcaaagaaaacagttaagagactgaactggtaatctatggaataggagaaaatatttgcaaaccatgtatctaatgaggggttaatatccaaagtatataaggaacacctgcaactcaacagcc

SEQ ID NO: 13489 - DNA, 1723 bp, Homo sapiens
  CDS (16)..(1212)
gggaagtggtgtgccatgcacgtgcgtgtggcttacatgatcctgagacaccaggagaaaatgaagggtgactcccacaagcttgactttcggaatgacctcctgccctgccttccggggccctatggggccctgccccctgggcaggagctctcccacccggcctccctcttcactgcgactggtgccgtccacgctgcagccaaccctttcacggcagctcccggggcccacggacccttcctgagccccagcacccacattgatccctttgggcgtcccacaagcttcgcctctttggctgccctctccaacggggcctttggaggcctgggcagccccacattcaactccggcgccgtctttgcccagaaagaaagcccaggggccccaccagccttcgcctccccaccggacccatggggccgcctgcaccgcagtcctctgacctttcctgcctgggtccggccccctgaggccgcccggactccaggctcagacaaggagcggcctgcggagcggagggagccctccatcaccaaggaggagaaggacagggacctccccttctcacggccccagctccgagtttctcctgctactcccaaggcccgggctggtgaggaggggcctcggccaaccaaggaatctgtgcgggtaaaggaagagcggaaggaggaggctgccgccgccgctgccgctgctgctgccgccgccgctgccgccgccgcagcagccactgggccccagggccttcacctgctgtttgagaggccccggccgcccccgtttctgggccctagcccaccagatcgctgtgctggcttcctggagccaacctggttggcagcacccccacgcctggcaaggccaccccgcttctatgaggcgggtgaggagctaactggacccggggccgtggccgctgcccgcctctacggtctggaacctgctcaccccttgctctacagccgcttggctcctccaccaccacctgctgcggccccgggaacccctcaccttctcagcaagaccttttgtacatttttacaggggtgcccctcccaacagttcccttcctggttaattaaaccctcagactggtgctgtgttcctagcctctggcctctctgtggggaaaggggactgcagggggaagagccgggaagggacagtcaggcttctccctgggaaggtggggccagcaggagatgaccaacagggggcaggacctggggacctgggctggagggaagggcagaagcttcctacttggctgacagccccggttcccccaacatgttcccgttcactctgcccccacccccaaaggctcagcctctaaatctcagactccaccacctcttaatggctcagtccccttcaccccatttccaagtgcccccaggactcctgggccctgcttccctgaaccctgttctccaaaaccctgccccaggctaagggtggccagagaaggtcaccatgtaccacacaccaaagaagggggtcggcccaggggtgggcgacacaggcagcttcttcggcagcctcacggcagcaaccccagccttcccaaagcagcaggcgcctccaggctggggcccaacctagaaggcaggggtcaatctaacaaaaccctaacgttgacttttttccctggtggggcttcttctgtaacatgacttgcgaatatttatataaaaacgagtgttacaatgag

SEQ ID NO: 13490 - protein, 399 aa, Homo sapiens
MHVRVAYMILRHQEKMKGDSHKLDFRNDLLPCLPGPYGALPPGQELSHPASLFTATGAVHAAANPFTAAPGAHGPFLSPSTHIDPFGRPTSFASLAALSNGAFGGLGSPTFNSGAVFAQKESPGAPPAFASPPDPWGRLHRSPLTFPAWVRPPEAARTPGSDKERPAERREPSITKEEKDRDLPFSRPQLRVSPATPKARAGEEGPRPTKESVRVKEERKEEAAAAAAAAAAAAAAAAAAATGPQGLHLLFERPRPPPFLGPSPPDRCAGFLEPTWLAAPPRLARPPRFYEAGEELTGPGAVAAARLYGLEPAHPLLYSRLAPPPPPAAAPGTPHLLSKTFCTFLQGCPSQQFPSWLIKPSDWCCVPSLWPLCGERGLQGEEPGRDSQASPWEGGASRR

SEQ ID NO: 13491 - DNA, 1964 bp, Homo sapiens
cccttccatgaagaaaaagaaggtggaggacgtgcccagccgcgtggtcagcgtgccgaacctcgcctcctatgcaaagaactttctgagtggcgatctgagttccaggattaatgcccctccaataactacatcacccagcttggacccaagccccagctgtggccggacctacaaacccaaccagtctacagatgcaaaaactgccacaaggaccccagatggtgaaacggcccaagccaaagaagcccagcagaaacagggctctccgcaccaggaatggttcaccaagtacttttctttctaagctaacctttgggatacatcacagaggatacttgaaaaacatttattttaaatcatccgattgaaggaatgaactaacaccaaccaaccaaataatatgcttatgatttatatatgatagctaaaacaaattttggcgttaacacttcatactgttctgccaggcacagcagctcacgcctgtaatcccatcactttgggaggctgaggcagatggactgcttgagtccaggaatttgagaccagcctggccaatatggcgaaaccccatctctacaaaatatacaaaaattagccaggcatggtggcgtgtgcctgtggtcccaggtacttgggggactgaggcgggaggatcacttgaacctaggaggcagaggttgcagtgagccaagttcgaactcctgcattccaaccagcctgggtgacagagggagaccctgtctccaaaaaaaaaaaaaaattgacattaaaccagtgttattaaaagtcatctataggaaaatgttattagcgttactaatgacccataccttgtatttctagtgtccataacatcatactccattttgtggaacatcagactttgtgatttccatgatctatttcaaaagtggttgtacttgtccttaggatgctagtcaactccactggaaagctgtttctatgtaaaatgatgcaattccaaaatgcacatctaacctcaataggaagacaaataacagttaaacaggaaagccaactaaaaacaaaccaaacctaccagaaatggatggtagcatgcttggactgaatactttcacttccttggtctaagacaagcagcagattatagatgggataacacccacctctaaaagggctttgcaaggattaagcaagataacataaattaacatgaattggaattaagtaccacaaggtttttctgtaaataaccaatcctagcccagttataggtctcagtgtaatgaccatagtgccaacatgatcacttgtgaaggtctctagattatctgttctttgaagtcaaagatcttctagactgggcacatggctcatgcctgtaatcccaacactctgggaggctgagatgggaggagagcttgaggccaggaatttgagaccagcctgggcaacagagcgagacctccatctctacaaaaaaataattagcccaaagaaaacccagctacttggaagtctgaggtaggacagcatgagcccaagagttcgagaccagcctgggcaagatagtgagatcccatctctacagattaaaaaaaaatatatatgtatcccctgaacctctggtctttgggtttgagccatttgcctcatggtgtgttgcttcttcactgcatgaattcccagtgggttaaaggaaccgcaatggctgttcacggtgctgaccttgctctcagtccacactgatttgtcttaccttctgacagagcaatgtgatttgacaagactcaataacaacttttagggggcaaaatattttttcagtctttggtgctggcccagaaggtggcccacaaaccaatgttaattctatgcattgtcaaatctttgctctttgaataaaactttgaataactgggcaataaaaaaaaaaaaaaaaaaaaaaaaaaaaaaaaaaaaaaaaaaaaaaaaag

SEQ ID NO: 13492 - DNA, 1793 bp, Homo sapiens
  CDS (380)..(1741)
cacttccggcctcgcgagggccgcaatcactgctccgcagttcccgcctgcattcctcgcgccgtcttcctggagtcccagctctccttcagcccgccccaacgctgacgctcagtcctcaggcgtcgagggtagctcctgtgaggggctcgcttggcgcacgcaaaacgctcagcgcgcaccacagggcgtccgccccaaccccgcccccggaggcctccagctcggccccgcccctgtcccttccccgtcgcggaggcagcctagcctcgcgccccgcccgttgcttctgccctccggccttcccgccgccgtcgccgggaccagccgctcggggccgggctgatacagccgcttcaccgtgcccctgcccgcgaccatggcctcctccgaggtggcgcggcacctgctctttcagtctcacatggcaacgaaaacaacttgtatgtcttcacaaggatcagatgatgaacagataaaaagagaaaacattcgttcgttgactatgtctggccatgttggttttgagagtttgcctgatcagctggtgaacagatccattcagcaaggtttctgctttaatattctctgtgtgggggaaactggaattggaaaatcaacactgattgacacattgtttaatactaattttgaagactatgaatcctcacatttttgcccaaatgttaaacttaaagctcagacatatgaactccaggaaagtaatgttcaattgaaattgaccattgtgaatacagtgggatttggtgaccaaataaataaagaagagagctaccaaccaatagttgactacatagatgctcagtttgaggcctatctccaagaagaactgaagattaagcgttctctctttacctaccatgattctcgcatccatgtgtgtctctacttcatttcaccgacaggccactctctgaagacacttgatctcttaaccatgaagaaccttgacagcaaggtaaacattataccagtgattgccaaagcagatacggtttctaaaactgaattacagaagtttaagatcaagctcatgagtgaattggtcagcaatggcgtccagatataccagttcccaacggatgatgacactattgctaaggtcaacgctgcaatgaatggacagttgccgtttgctgttgtgggaagtatggatgaggtaaaagtcggaaacaagatggtcaaagctcgccagtacccttggggtgttgtacaagtggaaaatgaaaaccactgtgactttgtaaagctgcgggaaatgctcatttgtacaaatatggaggacctgcgagagcagacccataccaggcactatgagctttacaggcgctgcaaactggaggaaatgggctttacagatgtgggcccagaaaacaagccagtcagtgttcaagagacctatgaagccaaaagacatgagttccatggtgaacgtcagaggaaggaagaagaaatgaaacagatgtttgtgcagcgagtaaaggagaaagaagccatattgaaagaagctgagagagagctacaggccaaatttgagcaccttaagagacttcaccaagaagagagaatgaagcttgaagaaaagagaagacttttggaagaagaaataattgctttctctaaaaagaaagctacctccgagatatttcacagccagtcctttctggcaacaggcagcaacctgaggaaggacaaggaccgtaagaactccaattttttgtaaaacagaagttccagagcacagaaggtcatcatcacaagcaaactttatt

SEQ ID NO: 13493 - protein, 454 aa, Homo sapiens
MASSEVARHLLFQSHMATKTTCMSSQGSDDEQIKRENIRSLTMSGHVGFESLPDQLVNRSIQQGFCFNILCVGETGIGKSTLIDTLFNTNFEDYESSHFCPNVKLKAQTYELQESNVQLKLTIVNTVGFGDQINKEESYQPIVDYIDAQFEAYLQEELKIKRSLFTYHDSRIHVCLYFISPTGHSLKTLDLLTMKNLDSKVNIIPVIAKADTVSKTELQKFKIKLMSELVSNGVQIYQFPTDDDTIAKVNAAMNGQLPFAVVGSMDEVKVGNKMVKARQYPWGVVQVENENHCDFVKLREMLICTNMEDLREQTHTRHYELYRRCKLEEMGFTDVGPENKPVSVQETYEAKRHEFHGERQRKEEEMKQMFVQRVKEKEAILKEAERELQAKFEHLKRLHQEERMKLEEKRRLLEEEIIAFSKKKATSEIFHSQSFLATGSNLRKDKDRKNSNFL

SEQ ID NO: 13494 - DNA, 1482 bp, Homo sapiens
agaaaaaagtccgggagagactagctcagatctgatctgtaccacctgggggttcccagcccatagctctgtaggccttcaaggaggaagaggaggggaagggggggaaggggctgaggctcggggactccagcctgaagtccaagcatgtgcggaagcctagaccctcccaccttaccacaaacttggctccaagtcccctctatgctgacgcatccttgccctcctcctcctccccactgccctccactagcccatcctccctcctccctcctcccctcgacacacatttatcactagtgacatctcagccccccctaccccaatccagggacacaggagggacacagtagggttagactgagggccactgatgtggcttcaccctcagtgcttgggcaattcccaagttacagcatctcagtccccagagaaggccatgctgccactgtagccgccaagggccccctggagtgcagggcacagaggaggaagggagaggatgtgagctgcaggaggcagctgaagccaagccttgggcaggctctcaggtattacatacctggtggggaggagggttctcccttccctaggctggatccctcacttgctcctagtgcctggaaccttaggtttagagagccactctactccttgaagtctcttgatgcaccttacctggggccctttccttatccctctctgcagcattcccagagatggtccactggagggtttcagcaccacagagaggctgatgattcacaaatctcatgcagttacacctcattccttctgacagcaatttgaaggggctgaaagggggctaatccctaaggaccagtggttggtagcctacgtaagactccctggtgggtaaatttcactcagaccatttgctgtgatctacgaatctcctatatgcctttctaaactcaactctgtgcttagactctggtacattccactgcagccataccagcctatgctgtccctctaacacgtgtacaacacacaagccatgccctgtttggaatgttcttccccaaaatatcactgccagtgaccttgcttcaggtctttattcaaaaactgacctcatccttaccctgatattccagaataccattctgctttattatttgtcttccacacttagcactattcaacataaagcactagaatataagctccacgagggtggaaacttttgctcttatttgctgctctattctgcagcacatcaaacagtgcctggcacacagcaggtgctcaataaatatttattaaatgaatatgttcaggatgctcagaggaagatcccaccaatcatcaaaccaggaaggaagggatctggtctccacttgtgtgtggctgagatgtgttctgagatggcccagtgtccgagttttattccctcacctactgagaacagggacctgccctttgacagctgaatcttgggaggcaacagtctgatgc

SEQ ID NO: 13495 - DNA, 1597 bp, Homo sapiens
  CDS (47)..(961)
agatccgctgatctagtgcttctcgaaaaaaaccttcaggcggcccatggcatgccttggactttattgtgggaagaccctattatttaaaaatggctcaactgaaatatatggagaatgtggggtatgcccaagaggacagagaacgaatgcacagaaatattgtcagccttgcacagaatctcctgaactttatgattggctctatcttggatttatggcaatgcttcctctggctttacattggttcttcattgaatggtactcggggaaaaagagttccagcgcacttttccaacacatcactgcattatttgaatgcagcatggcagctattatcaccttacttgtgagtgatccagttggtgttctttatattcgttcatgtcgagtattgatgctttctgactggtacacgatgctttacaacccaagtccagattacgttaccacagtacactgtactcatgaagccgtctacccactatataccattgtatttatctattacgcattctgcttggtattaatgatgctgctccgacctcttctggtgaagaagattgcatgtgggttagggaaatctgatcgatttaaaagtatttatgctgcactttacttcttcccaattttaaccgtgcttcaggcagttggtggaggccttttatattacgccttcccatacattatattagtgttatctttggttactctggctgtgtacatgtctgcttctgaaatagagaactgctatgatcttctggtcagaaagaaaagacttattgttctcttcagccactggttacttcatgcctatggaataatctccatttccagagtggataaacttgagcaagatttgccccttttggctttggtacctacaccagcccttttttacttgttcactgcaaaatttaccgaaccttcaaggatactctcagaaggagccaatggacactgagtgtagacatgtgaaatgccaaaaacctgagaagtgctcctaataaaaaagtaaatcaatcttaacagtgtatgagaactattctatcatatatgggaacaagattgtcagtatatcttaatgtttgggtttgtctttgttttgtttatggttagacttacagacttggaaaatgcaaaactctgtaatactctgttacacagggtaatattatctgctacactggaaggccgctaggaagcccttgcttctctcaacagttcagctgttctttagggcaaaatcatgtttctgtgtacctagcaatgtgttcccattttattaagaaaagctttaacacgtgtaatctgcagtccttaacagtggcgtaattgtacgtacctgttgtgtttcagtttgtttttcacctataatgaattgtaaaaacaaacatacttgtggggtctgatagcaaacatagaaatgatgtatattgttttttgttatctatttattttcatcaatacagtattttgatgtattgcaaaaatagataataatttatataacaggttttctgtttatagattggttcaagatttgtttggattattgttcctgtaaagaaaacaataataaaaagcttacctacat

SEQ ID NO: 13496 - protein, 305 aa, Homo sapiens [sequence omitted]

SEQ ID NO: 13497 - DNA, 1796 bp, Homo sapiens
gcgataatgtttctgatttagaaagctgaaatacaacttgtttttataattctgagggcattttatgattcataacaagtgcaaatgacattttctagttaatgttaagaaaaaaaaagcactgaaaattaattttgtcagcagtgttgagttttggaaatgcaaactaagtcaacttacttcctttccctagaagtgctgccactgttgtgacattgtgtttcattttgtaacccatctactacttaggccagatatgcattttctggatgcaatctgttggtttccaatggtttactacatggtgggctctattgacaagtaggtgacaaaatctttggcacactaactagtgtagtgtcctgtggtttgtcatgtgctgtgccttgttactgcatgatgagtgtaatttgccgtgtcagtattgcaaatatgatatattttgcatgtagagcttatgttctcgtgttatacatcttgtattaaactttctgagtagtaatctattgttgaattaaaacaaatcttgctgcatgtcaattttgtcagttttgctcagtttctaatgctgttttagttttgtgtcatctataacaacattattactattgacatagtggtagagaaaactaaagttgcaatattgtgatgcattgatagcgttacgataacttctggaaactttgaaataatttagaaatgctcattttaacttagatttataaattggagcaattcctttagagtttcccttggtcacatgtcagagtttataatttctaaaatatttgttaatgaaaaggtcatatgtgtttaatacattagtaattaaatacaaattcttatacatgtattatggtgacattaaaaatatatataaaaataaaagatcaaaacgctaatatacttgaaataatatatgttacttttccacttctaaaaaatgtcagccagagccttcaaaataaaatgctaaaatttaccaattgagagctttaacacttacattttatcctgtagatgttgaagaaaacacagttttacaactttgaaagtatttagtgctgtggatacattaaaggtcaaacagtctaaaatatgattagcctccattctatgttaatataatttacctcatcagttatgataatactaaccaagtaaataaactgtagttagatgtactaaaattactatttaaattctacacatgttttataaccaatcatcttttttgaaatcttttgaggtaatagtgttctgttaaaatttattagaaaaacagtatatctaaaagctaaagaataaacgtcccatataccttttctgatgcaaactatgaagtggattcttcctctgtacaagtatttatggtgagagaataaataattgaaaggatcaaattcctagggacagaaataaaacagaattggctacgaattgataattgttggtctggggacagttatgttcatctaacaattctcctcttttgcttgtatttgaaatctttctttaaaaatacctctttgaatgaattaaaacacattcatgaacacttctttacacttacgtacttcacattctagtccttgcaaaaaggggtcttagagagggatagaaagggaggctttgccaattatccctataacttgttttccatctagattgactttcttgtgctcccatctgctggccacactgtgtaaagcagccatgctgagggaaaaataaggcaatggccttgcagaaattatgatggagaggagttataagaataagttggcagcctactt

SEQ ID NO: 13498 - DNA, 1133 bp, Homo sapiens
  CDS (208)..(834)
gtctgcgtcagttggtcacgtggttgttcggagcgggcgagcggagttagcagggctttactgcagagcgcgccgggcactccagcgaccgtggggatcagcgtaggtgagctgtggccttttgcgaggtgctgcagccatagctacgtgcgttcgctacgaggattgagcgtctccacccatcttctgtgcttcaccatctacataatgaatcccagtatgaagcagaaacaagaagaaatcaaagagaatataaagactagttctgtcccaagaagaactctgaagatgattcagccttctgcatctggatctcttgttggaagagaaaatgagctgtccgcaggcttgtccaaaaggaaacatcggaatgaccacttaacatctacaacttccagccctggggttattgtcccagaatctagtgaaaataaaaatcttggaggagtcacccaggagtcatttgatcttatgattaaagaaaatccatcctctcagtattggaaggaagtggcagaaaaacggagaaaggcgctgtatgaagcacttaaggaaaatgagaaacttcataaagaaattgaacaaaaggacaatgaaattgcccgcctgaaaaaggagaataaagaactggcagaagtagcagaacatgtacagtatatggcagagctaatagagagactgaatggtgaacctctggataattttgaatcactggataatcaggaatttgattctgaagaagaaactgttgaggattctctagtggaagactcagaaattggcacgtgtgctgaaggaactgtatcttcctctacggatgcaaagccatgtatatgaaatgcattaatatttgactgttgagaattttactgccgaagtttacctccactagttctttgtagcagagtacataactacataatgccaactctggaatcaaatttccttgtttgaatcctgggaccctattgcattaaagtacaaatactatgtatttttaatctatgatggtttatgtgaataggattttctcagttgtcagccatgacttatgtttattactaaataaacttcaaactcctgttgaacattgtgtataacttagaataatgaaatataaggagtatgtgtag

SEQ ID NO: 13499 - protein, 209 aa, Homo sapiens [sequence omitted]

SEQ ID NO: 13500 - DNA, 2122 bp, Homo sapiens
tgaagttaatgagacaggcctcttacttccttgcaaaatatgctgtaggctttccagaatcccgtgtgctcttgcaagtctcatctactccttacaaatctgaatttgataggtttctgccatgcatgagaagctggtgcctatattcagtttttattgcccatatgccttattgtaggtacttgtattgagggaaaaaccttatatgtccaggtaggctacagagtcaaagaggcttgtccaaagtgttatttgtagtaggtgagtgacactgcatctgcgtgtttttcttttttattggcctttggtagtcagacttttatgatttgttgaattataaaatacatgtaaactgtaaacctgctttactcagtttgtttgacttcatttgcacttgctcataatgattgagtttggcccccacgtccaaaagacttgagttcaaattgtggttctgtcacattctctcaaccactgtatcaattaggactggaattggttggaatatagtggctttgacagtttcattttttgctcaggcaagtaagtccagaagtcattagggccccaagaagcttctgcccactatatgtagactttaagcttatggtccaaaattagtgccagagctcctgccatcacttctgcattccagatagctggatggtgaaagggcagaagaagagtgtgcttccctcctggaagacttgtaagacttactaattatatctcatttactagaatttgatcatgctgccattcctagctgcaagaaactgaggaatatagttttttaactaagaaacagacttgtctgcaactgcactcagccattcttcacatactgatttctctctgggtctacttctcctggggttattagcagggttgttattctcctctgctttgtgtagcttttcttttttgtatagtttcttgttattcatactagtagctttgtaaatttagattgctgtgattcttcatggttatgaagttatttaatagctttgctttttgtattccctcagttttattttgcactatgaactgcttcatcttttcagtatttttcaactcaaatttgggagaaaaagaatatgattaggttagcctggcccttcctgctaggccacaccatggttgttggtcagctactaaggctaaactgcctgctagttcaatcagctgtggcatcttgcttgtgggcctttgcatctaaaagggtggggaggcaaaacagactctatgatgtgaccatgctaagtccctgacaaatggaaattcctttggcagggagttagagataagtcttaaaatgaggatgttttgtatattcatatgaatgcattttaattagtatgtagattgtcagttaatagttatcaataattgatatcggactgagaagcaattatttgcaaagactaggaaggtgtctagggcatgcattagcagccctcagatgcttgcgcattatgggatgtttcttgctttcacttttatctggaatgccgttttcttctgtgctcctttgaacttggatacctctcaatcttttgagactcaaaattcaggagatgcttccaagtctttcctgacatgcctataagaatgactttgatgcctctactctgtttccctaaagcccattgtgcatacccctgattgtgctgaacacatttacattgcacttgtctggcacaggtatgtttaattaccgctttctcctgaactggaagatcactgatgctagggtttggtcttctttatgtttctatacttaacacttacctagaagtgcttgccacattaaggatgctctgggccaggtacagtggctcattcctgcaatcccagcactttggcaggccgaggtgggaggatcactggagcccaggagtttgagaccaacctggccaacatagtgagaactcatctctacaaaaaaataaacaaaattagctgggtatggtggcgtgcgcctgtagtcctagctatttgggaggctgaggtgggaggattgcttgaggcaatcctggacaggaggtccaggcagcagtgagccaagactgcgccactgcactccaacctgagtgacacagtaagaccctgtctcatt

SEQ ID NO: 13501 - DNA, 1340 bp, Homo sapiens
  CDS (206)..(982)
agatgctgcgcagcagtctccgattccccatcaccaattcggctggcgtctccgagaccgcggactcccgtagggtccccgtggccccgagttgtagtcgggacaccccggccgcgggtgatcgtcgggtctccacgcgcccgggtcgctgacgcggatccggcctcggcgccttctcagggcgccctgcaaggccgcaggcaggatgaacattctggcacccgtgcggagggatcgcgtcctggcggagctgccccagtgcctgaggaaggaggccgctttgcacgggcacaaagacttccacccccgcgtcacctgcgcctgccaggagcaccggacaggcaccgtgggatttaagatctccaaggtcattgtggtgggggacctgtcggtggggaagacttgcctcattaataggttctgcaaagacacctttgataagaattacaaggccaccattggagtggacttcgagatggaacgatttgaggtgctgggcattcccttcagtttgcagctttgggataccgctgggcaggagaggttcaaatgcattgcatcaacctactatagaggagctcaagccatcatcattgtcttcaacctgaatgatgtggcatctctggaacataccaagcagtggctggccgatgccctgaaggagaatgacccttccagtgtgcttctcttccttgtaggttccaagaaggatctgagtacccctgctcagtatgcgctgatggagaaagacgccctccaggtggcccaggagatgaaggctgagtactgggcagtctcatctctcactggtgagaatgtccgagaattcttcttccgtgtggcagcactgacctttgaggccaatgtgctggctgagctggagaaatcgggggctcgacgcattggggatgttgtccgcatcaacagtgatgacagcaacctctacctaactgccagcaagaagaagcccacatgttgcccatgagggctgaggagactgttcagagactgcccagccctagggcactgtgccaccctcattcctccagagcttgacccctggacatttgcactgactttatccagaccaaagagctgcctcttggtggcagtattcccacagaggggtagctgggatcatgctagtcacttcctgcccccaggcaccgtgccaaagactggatgccccctactcctcaggggactgtccagggcgcccagtggtagtgagggagagtgtctctgttcttttgctcagcctgctgggccctttgtgtttgaggatgcttaatgattccagcctctcactgtgccttatgcattaaaatttctttgttacg

SEQ ID NO: 13502 - protein, 259 aa, Homo sapiens
MNILAPVRRDRVLAELPQCLRKEAALHGHKDFHPRVTCACQEHRTGTVGFKISKVIVVGDLSVGKTCLINRFCKDTFDKNYKATIGVDFEMERFEVLGIPFSLQLWDTAGQERFKCIASTYYRGAQAIIIVFNLNDVASLEHTKQWLADALKENDPSSVLLFLVGSKKDLSTPAQYALMEKDALQVAQEMKAEYWAVSSLTGENVREFFFRVAALTFEANVLAELEKSGARRIGDVVRINSDDSNLYLTASKKKPTCCP

SEQ ID NO: 13503 - DNA, 1718 bp, Homo sapiens
  CDS (686)..(1630)
aacatggggctgtacgctgcggtggcaggcgtgctggccggcgtggagagccgccagggctctatcaaggggctggtgtactccagcaacttccagaacgtgaagcagctgtacgcgctggtgtgcgaaacgcagcgctactccgccgtgctggatgccgtgatctccagcgccggcctcctcagtgcgaagaagctgcagccgcacctggccaagggtgctagtgtatgagttgttgggaaagggctttcgagggggtgggggccaatggaaggctctgttgggacggcaccaggcgaggtgttgagttggctcggctcaaggttcttcggggtgtgagctggcatgaggacctgttggaagtgggatccaggcctggtccagcctcccagctgcctcgatttgtgcgtgtgaacactctcaagacctgctccgtttatgtagttatttcaagagacaaggtttctcctatcagggtcgggcttccaggctggatggagtgccctggcgcgatctcggctcaccgcaacctctgcctcctgggttcaagcgattctcctgcttcagccttctgagcagctgggattatgaaggggtggcctgcccctccacatctgtgggatatctcatcagcctcgatgacttacgagccctcaaggggaagcattttctcctggaccccttgatgccggagctgctggtgtttcccgcccagacagatctgcatgaacacccactgtaccgggccggacacctcattctgcaggacagggccagctgtctcccagccatgctgctggacccccgccgggctcccatgtcatggatgcctgtgccaccccaggcaataaagaccagtcacttggctgctcttctgaagaaccaagggaagatctttgcctttgacctggatgccaggcggctggcatccatggccacgctgctggcctgggctggcgtctcctgctgtgagctggctgaggaggacttcctggcggtctcccccttagatccgcgctatcgtgaggtccactatgtcctgctggatccttcctgcagtggctcgggtatgccgagcagacagctggaggagcccggggcagggacacctagcccggtgcgtctgcatgccctggcagggttccagcagcgagccctgtgccacgcgctcactttcccttccctgcagcggctcgtctactccatgtgctccctctgccaggaggagaatgaagacatggtacaagatgcgctgcagcagaacccggacgccttcaggctagctcccgccctgcctgcccggccccaccgaggcctgagcacgttcccgggtgccgagcactgcctccgggcttcccccaagaccacgcttagcggtggcttcttcgttgctgtaattgaacgggtcgagatgccgacctcagcctcacaggccaaagcatcagcaccagaacgcacacccagcccagccccaaagagaaagaagagagcaaaaagctgcagccggtgcctgcacaccgccttgcgcatagcagaggctccgggctcactccttcctggtgggaaaggaagatgcctgtcctctccgtggaggaccctgggccctcaccgcaggcagcagtttgcgttttgaaaggttattgggtcccttcctcgggctgtgttcttgctggtgagcaaaagtgttgcctgcagaaataaaatgcagaacgtactct

SEQ ID NO: 13504 - protein, 315 aa, Homo sapiens [sequence omitted]

SEQ ID NO: 13505 - DNA, 1380 bp, Homo sapiens
gttttttgtttttaattaaaaaaaatttttttagctgattgtgttgggttgaggttgctttctggggaagaaaaggtgtaggagttgagacatctggagatagcaggaatggctgagtttttcttttgtgtctcctttaagaaaacatcctactaaagccctgggaaaagagacaaatggtgaagaggagaatgaaaggttgcaggagggagctcctgttttagccctgccacctacctgggggccctctggctaccagtgtccttggaggggcttccttgctgcttctcccactaaggtagattttccccaccctgcttaaggctccacagggccaagggtcttcagctgtcagaacccgggttctgagtagcatagggcaagaaagcacagaagtatagattgggccctatgggactgtttgtgcttacagtggcagggggcaggactggtatccatgctgtggctggctggagacttggcactgctcccagacaactcccacccaagctctttagctgcctctatttcccttcagcatgagcatttggggaatgatggtgactggtgacacctctgccctgagaaccccgccacagaacctacttctttccctctcctgccctggcctccccactcaccacctttctgctgtgtccctaggagctctggagccttaggaccatggacgctctcaataggaaccaaataggccctggatgccagacccagaccatggtgcagaaaggacccttggacctgatcgagacaggcaaagggctgaaagtgcaaacggacaaaccccacctggtgagcctgggcagtgggcgactcagcacagccatcaccctcctgccgctggaggaaggtaagtgtgaacagggcatctcactcaccacccctctatccttataggcattcctgccctggaggcccacctcctgcatgtgttggggcccttctactgtctgctggtgctcgcctccccacaccaccagcttgcttcccttgtctctgcctccccagactgcctgccttccttggtagatgatctggttccacgactgggcttaaagatcagcttagaaacaaggaggagaggccaggtgtggtggctcacgcctgttatcccagcactttgggaggctgaggcaggcggatcacgaggtcaggagttctagaccagcctggccaatatggtgaaaccccatctccactacaaatacaaaaattagccaggcgtggtggcacgggcctgtagtcccagctactcaggaggctgaggcagaagaatcgcttgaacccaggagacagaggttgcagtgagccgagatcgtgccactgcactccagcctgggcaacagagcgagactctatctc

SEQ ID NO: 13506 - DNA, 2070 bp, Homo sapiens
gctggtcccagaagatggcggaggcgggggatttctgctgtgattgggttattatacccctgcattgacagacatctaggagaaccacataaatttaaaagagagtggtccagtgtaatgcggtgtgtagcagtctttgttggtataaatcatgccagtgctaaagtggatttcgataacaacatacagttgtctctcacactggctgcactatccattggactgtggtggacttttgatagatctagaagtggttttggccttggagtaggaattgccttcttggcaactgtggtcactcaactgctagtatataatggtgtttaccatacgaatgtaaagttatcgcagaaaaaatctcatcaggaatgaagaaggcaaaaaatatcttttgtacagaaaagcaagatgaaaaggatgtgaaatggtagatataccaacaaaacttcagactgtaaaattgccaggatgcagttttccccttgattggcgtgtgtgtatatatggataaatatatatatacacacacacatattactgcaatctgtgattgcttcatctgtaaatcagttgtaaacctttacatatttgacttaaataactgtaagatatatatgtactacattaaaaagtgttgattaatagatgaaatttttaaattaattttttaaaacatgccatacattgtatcacaatgttaatgtgccaagatattgttcctgtcatgcagagtataagaatgctttgaacaatttgtagacttagtgaaataaaataagaggaaagccaaaaacaaacaaacaaaaagcatatggggagctggtattttctctttagcttactgttgtgcctttttatttttctaatcacagcagtatgagttatgagtgccctaatttgtggttagtttctaatttaatgttgtttcatagagtttggagtgttttgatacagggtgaaaatgaacttctggtttcaaacctgcgttactggagacagcccaaagagtaattttctgttttgacaggttttactggaagtatatgtgatgagcagaagaggttatcagcattaaattgttttggttctaaatttggaacagtatatataattaaaagtaaggaacattagaggatttaattagaataaatacatgttttggaaatacagtgacctcttgcagtgtcacaaaagtgcaaagtgatattagctgtcatctgcaatacagaatctcattgcttttgcacatggagcatataggaaactccaaacagatcacaatgaggtttctaaatctgttgggttctgtcttctattgggttctgtgaagcaaaccactgtagctttagctgggttcagtcatatgactcgttggtggaatgcctaggtttttcatcttacatgcagtcttgggggtggatgaatacataatttcttatgtattcgtgtatccattagtgaatagttcaagtctgtttaagagtgtattgagatggcattctctgcatgttaaagatcttaatggcaaccagcacctcttaagtatggtttaaacatattcttagctaattttttccattagtttttgaaattggtggcagttgtctgatccacaagggcaagatcttctgagtactctggggtgtgagtatgtgtgcacacgtgtgtgttggagtgagtgagagaatgtgtctgtgcatgtggccatgctttcctagaatgtcaagtagatatttttacactttgagttttaaagcaattactatcagactgagatcttgtatgccaaactttaatctgcttttatgttttcaggctgaaggtgtgaaaatcctaagaggatttcatattgaatatgtgtacacaatcttaactatcgtggtggaaaacatactactataatttattattatatcttccagataatgttattcatttagaacaaataaggtatattttttagaatcaactttgtaagcactataaaacctttaataagttataaggtctatgatgtgtttactttaaaaattgctgttaaaagcaacacgtattaaatatgtaattatc

SEQ ID NO: 13507 - DNA, 1955 bp, Homo sapiens
cataactccaccttttctacaattcagtggaaccaatttaatcaaagtgccctacttagggagaacattgctagaaatgacagggattgggaaaccatatggtgcttggcagaggacccgaaaccaatgtagaaactgaggagcttgggcaaagtgtgtcatttatcgttctggggctagggctgagtcaggtccaagaactgaccccctctcagagctgggacttcatcaaggctttggctctggtttgaacgtggtacttgcaggctcttgtcgtagcaccgggagactcctctcccagcaactcaggactcctaggaccagtgaggcctgtgctatcataatgaattatgagtggatccatctgacctataacaaataccacccataaacaacactgcggtgctaagcaaaaatgcctgaagaccatagacagagagaatgggatttttaaagaaacatttataaatagaaatcaaaacatgtgaagctcagaatgaatttgggaaacatgatgggaactgggattcactgagcacgtgctgcactaggtcaagggcagagtgtcagggtgtggcccaacatcaggcgcatgggctctccaggccactctgcactgaagcaaattgcgccattctgtatggtgcttgttcatacacactgcccacagggctctaataatttagaggcactggactgagctcctgagggcaggagcattcatctctgtggccacatgtttggtccagtgtctgacaaataacattcaacttgtaggaacaagtgagagcagagcatcctttctcaggaacaaggcccatcccctggtgagctgctccactggagtcccaggtccctaacctgtggcctaggtagaccttaggatttgcctcactgatgccaatgagttgctgctgcttgcttttgaaacaaagtgttggcatgttccagctgctgcgattcaattgcctttcagacagtgtggtgcccaacaaagcatccgtctcaacaccccgcggcctccccagctgccactagtagcaatccattacccacaggcagctcaacaactcaatgtgacttgggctccacgcctctacacaaaagatgcttccctgccctgttctcctccttcctgttgtgaaagcagcctcccttgcccttacccagctgtggctctctcagcggcttcctctagccccaaaggcctgctcagaataaggacctgcacacaagttgtgtggccctgggcaaaacctggagctgcttgatgttctgagcctgctttcaaatctgcaaaatagtgctctctgccttactccctcgcaggctcgtgtgaaggtcaaaagagaactcctgggaaagagcttagtcagctgaaaggctctaaacaaatgatagttattacatcgtcctctgtctccccatgcaagagaccagaacaaaacaatatacaaaagagagagaaaatcccacacctcttggtaactggaaaggctgaggccatgggtgagagcacctcccatttccctgggaaaggagaataagtaaaacttgaattccttcaattagagactcatctaagaatcctttctatcttcccactctgttttgaagtaggacagggggcccagcatcacagacgacaaggttcttaccttgtagttctggtctcatttgtttctgtatttatcaagcctggtacataaacacagtaggtaggtggatggatgaatttgctgtccggtcaagacttcagctagcacattcctaattgacctgcctttacatatatggtttctaaaacactttcacactgggatgatgacagagttctggagatggatggtggtgatggttgcacacactattgggaatatacttaatgacgttgaattgtacatttttaaatggttaaaattgtaaattttatggtatgtatattttaccacaat

SEQ ID NO: 13508 - DNA, 1940 bp, Homo sapiens
  CDS (51)..(1835)
gacaaacacttaaccagctgaagaatcaggtccactcagctgttgaagaaatggatggattagatgatgttgaaaacagcatgttgtactataatcaagcagtcattctttatcatctgcggcagtatacagaagccatatcagttggtgaaaaactttatcagttcatagagccttttgaagaaaaatttgcccaagcagtgtgttttttgcttgtagacctgtatatattaacctaccaagctgagaaagctttgcatcttcttgctgtcctagaaaaaatgatttcacagggtaacaataacaaaaatggaaagaatgagactggtaataacaacaacaaagatggatctaatcataaagctgaaagtggagctctaatagaagctgcaaaatcaaagatacatcagtacaaagtacgagcttatatccaaatgaagtctctgaaagcatgtaaaagggaaatcaagtcagtcatgaatacagctggaaattccgcaccctctctctttcttaaaagcaattttgagtacttaagaggtaattatcgaaaagccatgaagctattaaatagttcaaacattgctgagcatccaggattcatgaaaacaggtgaatgcttgagatgcatgttctggaataaccttggttgcatccattttgccatgagcaagcacaatttgggaatattctactttaaaaaggctctgcaagagaatgacaatgtctgtgcacagctcagtgcaggtagcactgatccaggtaaaaaattttcaggaagacccatgtgtacgttactaaccaataagagatatgagttgctgtataactgtggaattcagcttcttcacattggaaggcctcttgctgccttcgaatgtctgattgaagctgttcaggtttatcatgcaaatcctcgcctctggctacggctggctgaatgctgcattgctgccaataaggggacttctgaacaagaaactaaaggccttcccagcaaaaaaggaattgtacagtctattgttggtcaaggctatcatcgtaaaatagttttggcatcacagtctatacagaatactgtttataatgatgggcagtcttcggccattcctgtagccagtatggagtttgcagccatatgtctcagaaatgccttgttgctgctacctgaagaacagcaagatccaaagcaggaaaatggggctaaaaatagtaatcaattaggtgggaacacagagagcagcgaaagcagtgaaacttgcaggtgctccatacttgcttgcagtgcctacgtggctctggctttgggtgataacctcatggctttgaatcatgcagaagccctcatctctctcgacagaatatctgatgccattactcacttgaacccggagaatgtcactgatgtctccttagggatctcttcaaatgagcaggaccaaggatcagacaaaggtgaaaatgaagcaatggaatcctctggtaagcgggcccctcagtgctaccccagttccgtcaactctgccaggactgtgatgctgttcaaccttggcagcgcttactgcctgaggagcgaatatgacaaagcccgaaagtgtctccaccaggcggcttcaatgatccatcctaaagaggtgccccctgaggccatcttgctggcagtctaccttgaactgcagaatggtaatactcagctggccttacagatcatcaaaaggaatcagctgctccctgcagtgaaaacacactctgaagtgagaaagaagccagtgtttcagcctgtccacccgatccagcccatccaaatgccggctttcaccactgtgcagagaaagtgatacttcacttttggaaaactgttacctgagacccaggggagaatttactggccattttagttgtatcacagcagaatgaataaaagatggtgaaggctgttt

SEQ ID NO: 13509 - protein, 595 aa, Homo sapiens [sequence omitted]

SEQ ID NO: 13510 - DNA, 2379 bp, Homo sapiens
  CDS (10)..(2379)
cgagcgaagatggcctcggtgccggtgtattgcctctgccggctgccttacgatgtgacccgcttcatgatcgagtgtgacatgtgccaggactggtttcatggcagttgtgttggtgttgaagaggagaaggctgctgacattgacctctaccactgccccaactgtgaagtcttgcatgggccctccattatgaaaaaacgccgtggatcttcaaaggggcatgatacacacaaggggaaaccagtgaagaccgggagccctacgttcgtcagagagctccggagtaggacttttgacagctcagatgaagtgattctgaagcccactggaaatcaactgaccgtggaattcctggaagaaaatagcttcagtgtgcccatcctggtcctgaagaaggatgggttgggcatgacgctgccctcgccatcattcactgtgagggatgttgaacactatgttggttctgacaaagagattgatgtgattgatgtgacccgccaggctgactgcaagatgaagcttggtgattttgtgaaatactattacagcgggaagagggagaaagtcctcaatgtcattagtttggaattccctgataccagactttctaaccttgtggagacaccgaagattgttcgaaagctgtcatgggtcgaaaacttgtggccagaggaatgtgtctttgagagacccaatgtacagaagtactgcctcatgagtgtgcgagatagctatacagactttcacattgactttggtggcacctctgtctggtaccatgtactcaagggtgaaaagatcttctacctgatccgcccaacaaatgccaatctgactctctttgagtgctggagcagttcctctaatcagaatgagatgttctttggggaccaggtggacaagtgctacaagtgttccgtgaagcaaggacagacacttttcattcccacagggtggatccatgctgtgctgacgcctgtggactgccttgcctttggagggaacttcttacacagccttaacatcgagatgcagctcaaagcctatgagattgagaagcggctgagcacagcagacctcttcagattccccaactttgagaccatctgttggtatgtgggaaagcacatcctggacatctttcgcggtttgcgagagaacaggagacaccctgcctcctacctggtccatggtggcaaagccttgaacttggcctttagagcctggacaaggaaagaagctctgccagaccatgaggatgagatcccggagacagtgcgaaccgtacagctcattaaagatctggccagggagatccgcctggtggaattcaacatcactggtgcctgcttgaatgactcagatgacgactcaccagacttggaccttgatggaaatgagagcccattggccctattgatgtctaacggcagtacgaaaagggtgaagagtttatccaaatctcggcgaaccaagatagcaaagaaggtagacaaggctaggctgatggcagaacaggtgatggaagacgaatttgacttggattcagatgatgagctgcagattgacgagagattgggaaaggagaaggcgaccctgataataagaccaaaatttccccggaaattgccccgtgcgaagccttgctctgaccccaaccgagttcgtgaaccaggagaagttgagtttgacattgaggaggactatacaacagatgaggacatggtggaaggggttgaaggcaagcttgggaatggtagtggcgctggtggcattcttgatctgctcaaggccagcaggcaggtggggggacctgactatgctgccctcaccgaggccccagcttctcccagcactcaggaggccatccagggcatgctgtgcatggccaacctgcagtcctcatcgtcctcaccggctacctctagcctgcaggcctggtggactgggggacaggatcgaagcagtgggagctccagcagtgggctgggcacagtgtctaacagtcctgcttcccagcgcaccccagggaagcggcccatcaagcggccagcatactggagaaccgagagcgaggaggaggaggagaacgccagtctggatgaacaggacagcttgggagcgtgcttcaaggatgcagagtatatctatccttcactggagtctgatgatgatgaccctgctttgaaatctcgacccaagaaaaagaagaattcagatgatgctccatggagtcctaaagcccgcgtgaccccaactctgccgaagcaggaccgtcctgtgcgtgaggggacccgggtagcctctattgaaacaggtttggctgcagcagctgcaaagctggcccagcaggagctacagaaggcccaaaagaag

SEQ ID NO: 13511 - protein, 790 aa, Homo sapiens
MASVPVYCLCRLPYDVTRFMIECDMCQDWFHGSCVGVEEEKAADIDLYHCPNCEVLHGPSIMKKRRGSSKGHDTHKGKPVKTGSPTFVRELRSRTFDSSDEVILKPTGNQLTVEFLEENSFSVPILVLKKDGLGMTLPSPSFTVRDVEHYVGSDKEIDVIDVTRQADCKMKLGDFVKYYYSGKREKVLNVISLEFPDTRLSNLVETPKIVRKLSWVENLWPEECVFERPNVQKYCLMSVRDSYTDFHIDFGGTSVWYHVLKGEKIFYLIRPTNANLTLFECWSSSSNQNEMFFGDQVDKCYKCSVKQGQTLFIPTGWIHAVLTPVDCLAFGGNFLHSLNIEMQLKAYEIEKRLSTADLFRFPNFETICWYVGKHILDIFRGLRENRRHPASYLVHGGKALNLAFRAWTRKEALPDHEDEIPETVRTVQLIKDLAREIRLVEFNITGACLNDSDDDSPDLDLDGNESPLALLMSNGSTKRVKSLSKSRRTKIAKKVDKARLMAEQVMEDEFDLDSDDELQIDERLGKEKATLIIRPKFPRKLPRAKPCSDPNRVREPGEVEFDIEEDYTTDEDMVEGVEGKLGNGSGAGGILDLLKASRQVGGPDYAALTEAPASPSTQEAIQGMLCMANLQSSSSSPATSSLQAWWTGGQDRSSGSSSSGLGTVSNSPASQRTPGKRPIKRPAYWRTESEEEEENASLDEQDSLGACFKDAEYIYPSLESDDDDPALKSRPKKKKNSDDAPWSPKARVTPTLPKQDRPVREGTRVASIETGLAAAAAKLAQQELQKAQKK

SEQ ID NO: 13512 - DNA, 2016 bp, Homo sapiens
  CDS (799)..(1743)
agcagacgctgccctttaaggagggccatatcctacaggactttgaaggaagagtgatcgttgccacaagtaaaggagtttacatcttggttccattacctttggaaaaacaaatacaggatcttctagcaagccgcagagtagaagaggctttggttttagcaaaaggagcccggaggaacattccaaaggaaaaatttcaggtaatgtacagaaggattctgcagcaggcgggatttatacagtttgcacaacttcagttcctggaagctaaagagctcttcagaagcggccagcttgatgtccgggagctgatctctctctaccccttcctgttgcccacctcctcctccttcacccggtcccaccctcctcttcatgagtacgcagacctgaaccagctgacccagggggaccaggagaagatggccaagtgcaaacgcttcctcatgagctacctgaacgaggtccgcagcacagaggtagcaaatggctacaaggaggacatcgacacagccttgctcaaactgtatgcagaggctgaccacgacagcctgctggacctcctggtcactgagaacttctgtcttctgacggacagtgctgcctggctagagaagcacaaaaagtattttgcacttggactgctctatcattataataaccaagatgctgctgcagttcagttgtgggtgaacattgtgaatggcgatgtccaggactccacacgctcagacctgtatgaatacatcgtggattttcttacctactgcttagacgaggaactagtgtgggcctatgctgattgggtcctgcagaaaagtgaagaggtcgtttcaggttttcaccaagagacctttggatgaacagcagaagaacagttttaatccagacgacattatcaattgccttaaaaaataccctaaagcccttgtgaagtatctggaacatcttgtgatagacaagagactgcagaaagaagagtatcacacccacttagctgtgctgtacctggaagaggtgctgctgcagagggcctccgccagtggcaagggtgcagaggccaccgagacgcaggccaagctgcggcggctgctccagaaatctgatttataccgagtccactttcttctcgagaggctgcagggagctggcctgcccatggagagcgccatcctgcacgggaagctgggcgagcatgagaaggcgctgcatatcctggtgcacgagctgcaggactttgcagcggccgaggactactgcctgtggtgctccgagggccgagacccaccccaccgccagcaactctttcacacgctgctggccatctacctgcatgctggccccactgcccacgagctggccgtggctgccgtggacctgctgaaccgccacgccaccgaatttgatgcagcccaggtgctgcagatgctgcctgacacctggtcagtgcagctcctctgcccattcctgatgggggccatgagggacagcatccatgccaggaggaccatgcaggtggctctcggcctggccaggtccgaaaacttaatctacacctacgataagatgaagttgaaaggaagctcaatccaactctcagacaaaaagctttgtcagatatgccaaaatcccttttgtgagcctgtgtttgttagatacccaaatggtggtcttgtgcacacccactgtgccgccagcagacacacaaaccccagctcatccagtcctggcactcggacttgaaaagcttggcccaagggtgcgaggggaactccgagttctttctgagcctgctggacatgaagagcagatgaccaccatgctctgtgtcagccaggacgaagggagacatctgggtgccagggagccttccgtccatacgcaacaaggactcctcgctgctgaccaggctctatgaatgtacatggaaaacccctaaaaatccccaaaacagaaacatacaagagttcacctgtccaggtacatagtaatccaagacagaggtctactttg

SEQ ID NO: 13513 - protein, 315 aa, Homo sapiens [sequence omitted]

SEQ ID NO: 13514 - DNA, 1517 bp, Homo sapiens
tgtctgcagaagtgtggcacattttgcctagaatgacagaaggctgctatcaaagagcatgagagaaagagaaagagatcatctaacattctaagaagtgattattacatttgagttttaaaaatgttactattcgaagcagtgtttttatcataattttctattttatcaaatcagacttgagttttttttctgattctgttatttaaccatacacaattttccctgtgtaattaagtaatggaacacttggaggcatatgaagtcccgctaagtagggagcatttgagtcagaaaagtgggtactctcttcctttatgtgatgtccatctgccattgtatttggtaaggaatagtgaggtgttaccatactgtgtacagatttccctcacttttccacctctcactttcctaaacttgggaactaaacattggattaatacagtgtctttgctgttcagattcacttgccagattttatcaaatgtagacttaaataggttttattgtgatagatatttacttgctccctaaaactgctctcttaaccagccttacaataaagtcaaaagtcaaagtggtaggcttcaagatgaaacataagatctgttgactccttcctctatttagtatatattttcataatattcagccttttcttgccccagatatcatatctattttacctacccaatatttaagtagtttccatgttgtgattaagaaaacaaaattaccataattacctagattattgctaattgtgacatatgtaaagtctattaatgtaataaatctcctttcttaagtcaaaaaataattttgtgtaattccaaacaggaaactgaaaaggcataggtattctcagcagtctctaaagtcccaaaatctaatggcaattttaccagagcagatctttagaagtattgctataaatttggatatcccattctaattttaagccaaatgctttttgagaaataagccagctgtttggaaatgcttgtattataatcggtttgataagcagttatgtcttatgcagatgaattaggggctacctgtttttatgcactggtctttggggtgcttttgaacagtagtgtctgatgttttaattgtcaaagcaaaaagaaatgagagggagggcaacttttcttcctcttctgaagtccaggaaactggttattttctcatgcatattattttaaaatatattccagccaggtgcagtggctcacgcctgtaatcccagcgctttgggaggccaaggcgggtggatcacaaggtcaggagttcaggaccagcctgaccaatatgatggaaccccatctctactaaaaatacaagaattagccgggcgtggtggtgtgcgcctgtagtcccagctgctcgggaggctgagtcaggagaattgcttgagcctgggaggcagaggttgcagtgagccaagatcgcgctcttggctgcgatccagactgcactccagcctgggtgacagagcaagactctgtctc

SEQ ID NO: 13515 - DNA, 1632 bp, Homo sapiens
  CDS (88)..(1455)
gagtgaccacaggtgtccccgtcgtgctcacctgcaccggctgcgaggagcagggagctcctcaaagagctcaggaacggacaggacatggacacagtggtctttgaagacgtggttgtggatttcacgctggaggagtgggccttgctgaatcctgctcagagaaaactctacagagatgtcatgctggagaccttcaagcacctggcctcagtagataatgaggctcagcttaaagccagtgggtctatttctcagcaggatacttctggagaaaaattatccctcaaacagaaaatagaaaagttcacaagaaagaatatatgggcctcccttttaggaaaaaattgggaagaacatagcgttaaagacaagcacaacaccaaggagagacatttgagcagaaatccaagggtggagagaccgtgtaaaagcagtaaaggtaataaacgtggaagaaccttcagaaagactcgaaattgtaatcgtcatctgcgcaagaattgttgtactagtgtaagacggtacgaatgcagtcagtgtggaaaactcttcacccattcctcatccctgataaggcacaaaagagctcactctggacaaaaattatataaatgtaaggaatgtgggaaagccttcagtcgcccttcctacctacagacgcatgagaaaactcacagtggagagaaaccctatgcctgtcaatcttgcgggaagacatttcttcgttcccactctctcactgaacatgtaaggactcacactggagagaaaccctacgaatgtgggcagtgtgggaaaggcttcagttgtcccaaatcctttcgcgcacatgtgatgatgcacgccggagggagaccgtatgagtgcaagcactgtgggaaagccttcaggtgtcagaaatcctttcgagtccatatgatcatgcacgccggagggagaccgtatgagtgcaagcagtgtgggaaagcctactgctgggcaacatcctttcaacgacacgtgagaattcacaacggggagaaaccctataagtgtggaaaatgcgggaaagcattcggttggccctcatccttacacaaacacgcgagaacgcatgctaaaaagaaacctgtgagtgggggcagcgtgggaaagtcttccgcgaggcctcgcccctccacagatgtcaaatcacaaactagagagaaagtctataaatgtgaaacgtgtgggaaaacgtatggttggtcctcatctttacacaaacatgagagaaagcacactggggagaaacctgtaaatgcagccagtgtgggaaaaccttcaggcgggctttgctcttccaaaaatgtaagaacgcagattggacagaagcccagtaaatgcgaaaaatgtgggaaagctttcagttgtcccaaagcctttcaaggtcatgtgagaagtcacacaggaaagaaatcctgtacatctaagtaatgggggaaaacctgtgcaaattaattcacatacatggttcagaaaattcacagcaggagggccgggcgcggtggctcacgcctgtaatcccagcactttgggaggccgaggcaggcggatcacgaggtcaggagatcaagaccatcctggctatggtgaaaccccgtctctact

SEQ ID NO: 13516 - protein, 456 aa, Homo sapiens
MDTVVFEDVVVDFTLEEWALLNPAQRKLYRDVMLETFKHLASVDNEAQLKASGSISQQDTSGEKLSLKQKIEKFTRKNIWASLLGKNWEEHSVKDKHNTKERHLSRNPRVERPCKSSKGNKRGRTFRKTRNCNRHLRKNCCTSVRRYECSQCGKLFTHSSSLIRHKRAHSGQKLYKCKECGKAFSRPSYLQTHEKTHSGEKPYACQSCGKTFLRSHSLTEHVRTHTGEKPYECGQCGKGFSCPKSFRAHVMMHAGGRPYECKHCGKAFRCQKSFRVHMIMHAGGRPYECKQCGKAYCWATSFQRHVRIHNGEKPYKCGKCGKAFGWPSSLHKHARTHAKKKPVSGGSVGKSSARPRPSTDVKSQTREKVYKCETCGKTYGWSSSLHKHERKHTGEKPVNAASVGKPSGGLCSSKNVRTQIGQKPSKCEKCGKAFSCPKAFQGHVRSHTGKKSCTSK

SEQ ID NO: 13517 - DNA, 2093 bp, Homo sapiens
gaaaagttatttgcaaaagataacatggatttgctgcaaaccgccaggggtctgcactgtgattctcctttcagggctggttgaaggctccatacagtatctctatctgccttggacacttcaggcatatgtgccatatatgacagaacatcttgcacaacagtctgaatttgctgcaacccttctcttgctctgggccccactcaaaaccggcagacttacaaattccttcgtaaatgggccagggcagcatggtaaaatgtgctgtatattacctcctaaaacacccgtcaagtatttttttttaactctttcctagcataggagtacatgatgcagcaatttgttttcatttgaaggagataaccaacatgcctcaggccactgaactcctagaaatgtcacatgctcaacatattatccatataatggactagttctgcattttatgggatgttgtgattatcaagacccctgaagccttgcttatgacagaacaggagagttgccatagacctgagctcaaatcgtgaagatgtactgctgtccctgccatgtgaaagcaaacaccttccaaaagtgcctgtaaccaatacagcaggaaaaaaagtatattttacataaatagctgcatcccacatgtcaaaagccattttgatttactctagtaagaataacatatttgaaacagcagcagcaatcaattaaatattgataataagcaatggagagataacaggaaatcacgtagaatatatcattgtttgccaaatattctggctcctttcctactgaggaatcatacttccttaactgcagtcttgtccacgtgacttgcaaatgaaatgtgaacaaaagtgacatgcgtcacctttagacagaagatctaagagctgatgtgtgctttgttatgatgtattttccctctgccataagactaagcaatgttccaaacagaggctgatccacagcctccatctggagtgaagataaaatggaaaagagcttcagtcaagctgcagtggacacatagcaagaataagaagttaacttttgttggccaggcgtggtggctcacgcctgcagtcccagcgctttgggaggccaaggcgggaggatcacttgaggtcaggagttcgagacccgcctggccaacatggtaaaacactgtctctactaaagatacaaaaattagccaggtgtggtggggggcacctgtagtcccagctattcaggaggccaaggctggagaatcgcttttacttgggagtcggaggttgcagtgagccgagatcatgccactgcaccccagcctgggcaacagagcgacacttttgttgtctgccactgggatttttgatgacactaccaaagcctaaaatagcctgacccaacatatacagtctcagagattagcaacagttgagagtcagtgttcagcgatcctgaaacagtcccaagtattttcctctcccatgacaatggccatgggtctcttagggcttgaagaatgatttttagtatatattgcagcaatgtcagtgggctccaggtctgcaaaattgttcagctcccagaactgggggaagggccatgactattatggtgatccaaattagaattctacttacctgataatttctaattatgtagatcaacatatattttagtaggctattttattcctagagatactaccaaagaccctcacaagtcaaaaacattcattttaccactgtggccctgctgcccatgaaagtaactgtgcccactgtgtctctggtgttaaacactgtcacttggtctctgaaataaggaaggcaatttaaagagtagcatttcttattgtcacccccagcactttgggaggctgaggcgggtggatcacgaggtcagaagatcgagaccatcctggctaacacggtgaaaccccgtctctactaaaaatacaaaaaattagctgggcgcctgtagtcccagctactagggaggctgaggcaggagaatggcgtgaatccgggaggcggaggttgcagtgagctgagatcaggccactgcattccagcctgggcaacagagcaagactccatctc

SEQ ID NO: 13518 - DNA, 2913 bp, Homo sapiens
actgggtaccgaggactgggtgtgtttaaggcagacagccaggtgaggatcccagctactggggcctgctgtcatctcctgggagtacccgggggtcaggagcctaggggactcttgcacttcacatccagccatgctaattacactttttggcaaaggaaacagctaggagcagtttctttcactcctacagccccgttttctcagtgtttagacctcgaattattactgggctagagggaaggcagcctctgaagtgtggcaggaggaggggaagtctgcctgcatcttggtgtgtctgtcagatgccagcactaataacctggcttctgtgaggcctgtcagtgctctcaggaatgaaaggggacccctgagaggtgctcagtaccagcaggctgtgaatgctctctacccaccaccctcacctcctcgttaaagatggtgctacctgccacacagcagacatctggtcgctgcacacccgaaagaccccaaggcagtctgccccttgtccagccacacgccagcacccaccctcctggcccctgcctcggcctccccagaccagctgcacccagcccccaacacgcaccccttctccagatgtgtgcagggcctcattttgcagagcaaagacagatgtttcagccacacgctttattaacttctaaaacctgtgctcaggacactcttcaacagtcatgaaaagtttgatcacttgccacagtcaggacctttgtgtggggctctgatctgatgttcggtctcatcatctcccaaaccagcagtcgtttgtaccccaaccctctgctcaggggctcatacccccaaatgattttcctgatttatgtatttccctacaaagggctttctatacctagcatctgcctccagcatgagaagggggaataggtgagacccatttgccagtagcagacggggaccctggggagaaaatggcagagcctgttggagactccctgtctccagctgaccagccaatgggattcctcttccctccactgtctcccacaaagtagaagaatcctggtacatttagcccatgagcctggcacagatccctatctagacatgaggccctttagacatgactttggcattgaccagcctgttggcaatgggtcggggaggcagaggggatgctcacaccagtaattctcatcccctgaatgcttgggatcacctggggagagttcacaaaatactggtgcaggggtcccacctctgatgatgctgagtggtgggtctggggtgtggcccaggcatcatgatgtttcaggcccccaggtgacttcttaggcagcccagctaagcccctagagccttgcaatttcccccaaatgacctcagagggcccgatttgagggaaatgcctaacttcaggggccgtaagaatcccccagggagcatgtgaaatgcagataccaggcccacccccagagatgagctgaggtgggtcaggggtgaagtgcagggatcagtgtttttcacaagctccatacctccaggaaatggtgttgtggttgggcccgtagaaaacattctgagagtcctgttgcctgtgccttggtgcacgtggggtggaatcccagtggccctgccttgaggaggatgtgcattaacgtggtaggggagacagagacagctccacctgccccctgtcccaccggggacctccaaaaacttcatggatgttagagcaagcagccatgctgcagcagaggatgaggctggcggatttagtaagagccctctgtgtttgggctgagttctttctctagttgccctgtcatctggcctctggataacccacctctcctccctcatcctaaaattacagatggcgaaagacggccacatttagtgagacccctaaggtcctccaactagggtgggtccacagtggcccctggtgcatggaccacacactctcttccctcctctggctcaggactacggtctgaaattagggagatatgaatgtctttcttgaaaacttctcttcccagtcttcccactttgcttgggggtccttggtcaaggccagctttggactagggcttgttgcgactaccagctgtctcattttgctgtactgcaaactcaggcttggttccaagcttatgggggccctgtccttcccctagtagggtttgttttggggtcacatctggtcatacccttcagagagctcttccccagcctctacatcagggagagaggtaggtagggaggagcattcaaggattagaagaaggactaaagtacaacagccttggaggaactgccaggaactaagggcgagcactggagaaggcaacctgggaccccctgcgcttctgagcaggaagaccaagaccttcaggggccctaagcactgaaaacatcattcctcatccccaagccctggcatccccctgttcttctaaaataattcttttctaggtatttctgattgcaaaattctggatgggttcatccaagctgacctttgctgttttttcccttcccaacaaggcctcactttttggagccaccttagttggtgcctaggcagaggggcagtcagcagtggttatcaggatcctggctctatgggttgccttcctcctggtctgtaaagcccctgcaggcagggacttcttagatagctgcttccttagggcatggcatgtggtgggtggttaatgaatggaagagagggaatgagtgatcaagggagggaggagggagtggagtggagatttctcatcctttcctgttaatttatgacatcctcctgcctatgagtccttgactctggagttttacaaagcagtcacatttcaaataaaagtctgggaaagcaacacatcatcgccaacttttaattttgctaaataaggatattag

SEQ ID NO: 13519 - DNA, 2273 bp, Homo sapiens
agcccactgccggcggctgggcgctgccgaggctcggggcgcgcgcagttggcgtctgccagtgccaagactgtgccgcccccacagccgaggcgcgaaagggggacgcccggcctctgggccgctgccttcgctttctcttcgttgttgcgaacgccgtccgctcaggaggcgccccgcgaccggcgcgatgagtgccaacgaggaccaggagatggaactagaagcattacgctctatttatgaaggagatgaaagtttccgggaattaagtccagtttcttttcaatataggataggtgaaaatggtgatcccaaagccttcttaatagagatttcctggacagaaacatatccccaaacacctccaattctatctatgaacgcttttttttaacaacaccatatcatcagctgtaaagcagagtatattagccaagctacaggaagcagtagaagctaatcttggaaccgctatgacctatacattgtttgaatatgccaaagacaataaagagcagtccatggagaatcacaatcccatcaattccgcaacatcgataagcaatatcatctcaattgaaactcctaatacagccccatcaagtaagaaaaaagacaaaaaaagaacaactttcaaaagcccagaagcgtaagctggcagacaaaacagatcacaaaggagaacttcctcgaggctggaactgggttgatgttgtgaagcatttaagcaaaactggctctaaggatgatgagtagcacttggaatttgagacaaggaaagagcattctttaaagagtaaaactgggttcaaaatctttcattactattttctggtattgaggcgactttttataaaacacaattttttgtatgtttcttacattaaaaaggttgtaagttgaaagttcatgaagagatcttgttgtattaaattattttcacaaacttgccttaataaaaggtgaaaatgttactgtttagtatactttatgaagccccttgagctttataaatggacaggcatggggaataagaatcagtgttaatttaaatgatcttatcctggtggatgtgctattttcttaaaggagtatgaagcccttttcaaactatcatcccagtggagcggagtactcagtgaacagttactccatagtgcaatccatattaataggcttcttctcttaagtcttcatctcttcttttgcttaattactgaaccgtaaattacttcagagaaatttaaatgctggtatttgaactttatacatgatactttttgtagtttcttttaatttttgaaagatgaactgcttccttttaataaattaatatctatttatacttttctcttgatttgggtcaagatgtttgatcatgagtgctttgagtggtatgtggaataggagaatataaaaacaaatctgccaaatacactagaaagcattttagtaagaaatgctggccctttcttaaaacatttctcttgcatataccaggatgggagtaaaagatgccttaatatttagtttttgtattgttggagacattgattttaataaaatcctatttatctgctgttgtgtgcttttagttgttggataactgaggtctcctaaatggttcaacataaaaccacatttcaagtcttgtttctttttggggtgtcttttcaagtattcaaatgtatttctcaacctgagcatctttttaatcatatacatgggagtcttttaaatgctgaactgttacacatgcttgatttaaaaataataataatagaggaaactattggtctagttgtgccaagaaaagtttctgatgtttatgtgtgatgtacagtgattttgtatatgcgcccagctttaagaacacataaaactattacgtctggtaggaagattgttagtgcctcaagttacacctgtgcagcttgggtctgagttttgatagaacagtaaacatttaaagaagttaagagcagtttgagctgtatccgcggtttttactcgttaactgacttcagctaaatagtttgaattatagagtaagtataattacagcaaaggagttaatctcattttcaaagctgtttctcattttatttcttgaattaatgtagagcaaaacatgttaaaattcaggaccactggaatatggcaacttatgtttcagggttgtgtgtgggtagtatttgtggttgtattggtttgttttttgtttttggagaaacatctgctagtggaataaaatactttgttttgctctg

SEQ ID NO: 13520 - DNA, 1828 bp, Homo sapiens
  CDS (31)..(1491)
agttctgtggagcagcggtggccggctaggatgggctgtctctggggtctggctctgccccttttcttcttctgctgggaggttggggtctctgggagctctgcaggccccagcacccgcagagcagacactgcgatgacaacggacgacacagaagtgcccgctatgactctagcaccgggccacgccgctctggaaactcaaacgctgagcgctgagacctcttctagggcctcaaccccagccggccccattccagaagcagagaccaggggagccaagagaatttcccctgcaagagagaccaggagtttcacaaaaacatctcccaacttcatggtgctgatcgccacctccgtggagacatcagccgccagtggcagccccgagggagctggaatgaccacagttcagaccatcacaggcagtgatcccgaggaagccatctttgacaccctttgcaccgatgacagctctgaagaggcaaagacactcacaatggacatattgacattggctcacacctccacagaagctaagggcctgtcctcagagagcagtgcctcttccgacggcccccatccagtcatcaccccgtcacgggcctcagagagcagcgcctcttccgacggcccccatccagtcatcaccccgtcacgggcctcagagagcagcgcctcttccgacggcccccatccagtcatcaccccgtcatggtccccgggatctgatgtcgctctcctcgctgaagccctggtgactgtcacaaacatcgaggttattaattgcagcatcacagaaatagaaacaacaacttccagcatccctggggcctcagacatagatctcatccccacggaaggggtgaaggcctcgtccacctccgatccaccagctctgcctgactccactgaagcaaaaccacacatcactgaggtcacagcctctgccgagaccctgtcctcagccctctctgttgagacaccaagttacgtcaaagtctcaggagcagctccggtctccatagaggctgggtcagcagtgggcaaaacaacttcctttgctgggagctctgcttcctcctacagcccctcggaagccgccctcaagaacttcaccccttcagagacaccgaccatggacatcgcaaccaaggggcccttccccaccagcagggaccctcttccttctgtccctccgactacaaccaacagcagccgagggacgaacagcaccttagccaagatcacaacctcagcgaagaccacgatgaagcccccaacagccacgcccacgactgcccggacgaggccgaccacagacgtgagtgcaggtgaaaatggaggtttcctcctcctgcggctgagtgtggcttccccggaagacctcactgaccccagagtggcagaaaggctgatgcagcagctccaccgggaactccacgcccacgcgcctcacttccaggtctccttactgcgtgtcaggagaggctaacggacatcagctgcagccaggcatgtcccgtatgccaaaagagggtgctgcccctagcctgggcccccaccgacagactgcagctgcgttactgtgctgagaggtacccagaaggttcccatgaagggcagcatgtccaagcccctaaccccagatgtggcaacaggaccctcgctcacatccaccggagtgtatgtatggggaggggcttcacctgttcccagaggtgtccttggactcaccttggcacatgttctgtgtttcagtaaagagagacctgatcacccatctgtgtgcttccatcctgcattaaaattcactcagtgtggcccag

SEQ ID NO: 13521 - protein, 487 aa, Homo sapiens
MGCLWGLALPLFFFCWEVGVSGSSAGPSTRRADTAMTTDDTEVPAMTLAPGHAALETQTLSAETSSRASTPAGPIPEAETRGAKRISPARETRSFTKTSPNFMVLIATSVETSAASGSPEGAGMTTVQTITGSDPEEAIFDTLCTDDSSEEAKTLTMDILTLAHTSTEAKGLSSESSASSDGPHPVITPSRASESSASSDGPHPVITPSRASESSASSDGPHPVITPSWSPGSDVALLAEALVTVTNIEVINCSITEIETTTSSIPGASDIDLIPTEGVKASSTSDPPALPDSTEAKPHITEVTASAETLSSALSVETPSYVKVSGAAPVSIEAGSAVGKTTSFAGSSASSYSPSEAALKNFTPSETPTMDIATKGPFPTSRDPLPSVPPTTTNSSRGTNSTLAKITTSAKTTMKPPTATPTTARTRPTTDVSAGENGGFLLLRLSVASPEDLTDPRVAERLMQQLHRELHAHAPHFQVSLLRVRRG

SEQ ID NO: 13522 - DNA, 1910 bp, Homo sapiens
gtttggataaattttctctgatttgcctgttcttaccctttgctcatgtatctattgatgtttttcattataaatttgtagaaattcttactacatagtgcatattaatcatttgtagctctaatgtgttatgacgttttcatcttgactttattgatgatatattttcctttaaaatttttaaactttttaggtagacccttatctcttttatagattttggtttcctttttttatcacatggatgcccccaccaaagtcatacaaatattcacctacattttcttctaataactttattatttttaatgtttaaatgtttgatccatctgaaatttatttttgtatatggtgtaagatggggatccagctataacattttgttcacattggatacctgattgtgacatttatttaaaatgttacccattttcaaatttctgagccaatatcatgatttaattatagtggcttcatcgtaagttttagaatccgataaagcaagtcccacttcattagttttttttttctttatataatatgtcctagacattcattttttcatgtgaaaaaatgaaatgcagaattttaataaaattctaattatgatggctgacatcacaattaaaatcctgcatttttgtttagagggctctttagtaatattaaatcttagcactcaagagtcttcgtacatcattgaaatcttttggtcttgttattggaatattcttcacgtaagtatatcatagctaactgaatttatttctaagtatttttacagttttatttcatattttgacattgtgaattggtttttttcttctcatttgtaattagctatttttgacaatatagacaacctatagatttttgtatttttatcttctgtctaatgagcttatttaatcattgaaattacagtagatttttaagaatataatattttgggttttctagatatgaaattatttcacctgaacatatagatcattttatttcctcttaatgtttatactgattactgttacattagctggatttttcaaaacaatgttgaagagtgatgacagacgtgactgtcttgttcttaattttcatggaagtaagaatgcaaaatattaatagggaatagtattccctattagtatgacatttacttttggttattagtaggtagtcattaacatgtttaagagtttccgctattcctgttttatagtgttattgctagaagtggttcctgaattttataaaatgccttttcagcatctattgataaaattgtatgattttttttctctttaatttgttgatgtaatgaattagaatggtaggcatttgatgtggaaccaaacttgtatttctggaacaaatactacttggtcattgtgaaataatgatttgctacatgagtggattttatttaccagtatttaatttagaattattgcattttcattccaaagtaaaattgtattttgtccttctgatgctatctttatcaagttttgttattgaagttgtgctagctttaaaaaaatatgaatatgtgagttttcaatttttttcctgtggtctggaataatttaaatagcattagaattatttgtttgttaaaagttagctaggacaaagtgtaaaacaatctaatcctgatgacacttttaatagtagatttttaatcagctttgtgatttctttaatagttattggtttattcaggctttttattaaaaaggtatatacattctctgtgacatacaaagttaaaagttctctattattgctgattgtactggttgttgcttgttgactgtactattcagatggctttatgcttttgtgtattttatgtcacctagatctaattctgaaaacattgtaataaaataattagctataatggt

SEQ ID NO: 13523 - DNA, 2877 bp, Homo sapiens
gcgcaatgggaagcaatatactggagctgagtgtggatagaaagagcaactttagaaggagcaagcagctaatgcttgcttcctaggaacccataatgaatttgctttctaagtacattcccggtgtttctgcattgggtacgattgtgttcgtttcagaagaaatacgccataaaagcatgcttccactttaatgtttcagttggttcattttattggtctcagtcttctcgtctacttatgcccatcaggaagagtccaatcacaagtgcgcaggtaactttgaaacttgcaacaagcatgctgtctactatctttggttatcccaaaagtattttgtctgggtgtcctcaacatccttttctgtcatttacctcacttcttaaagatgctctccctctcagatttctcttgttctcttctacaatgaacttctgcttcattcactgttactgaattttcctttgccggcattgcactattttattgtgctcactaggtcactggcggtgacattcaagttctgcagatttccagcaatgccacagtactgggcattggctgaagctaatctagatagtaatccaaagagttcaatgaaaagttgagaatcagaacattaggtaaacaggtgtgtgagtgcttgtctgggtgtgggtagaggtttgactgtctgggtctgtaaaagctgacaaagtctccatgctgcccaacttctctgtacaacaagtacttctctgtgcgacaaggccagcttgtcaaataagatgcttcatgagcatatatgtactgctccccgcagtcatgccggcggttggaatgttctaccagagtttgagggtgtcacacttcatttattaatagacactgtgaatcatggccagtggctttgacacttccctggtggtgcaaccctatccgaagaaccttcctcactgtgaaaagctaccttgcagtgtttgtccctaagattgctgctctgactttgcaggaatactaagatgagctgaagaacttgtctaggtcatatcttccacatctgcatatgacggggtttactgccttttgaaaatcagtgaagctcttttaccccaccaaattaagctttttcatcctttctcttaaggttccctgtgctgaaaatctagtctctacttccccttcccagtaggatcagctgtctgtttgaatggccccctgataccacctcagtcttaaggccaaggacaaaatgatgaattagcagcgatttaattctttgtgagattaagatgtctccattgtcaactcaaacttcctgaaaatgcagaaagccccagcatgtaatatcactttaagatgccaaacagctgagaacagggggttaatgctactgccacctcatttttatgtcacttagttcctcagataaaagtccattttaatcaaacttttcatcatttcctcgtagccaatatatccttgatgccagttagaatatttgatattaattattcagtcaaaggcctccattatgagtttagttagaatattagtgatttaaaacatgttaagactcatacagtagtgatgtccccaaagtagttttaactgaatcttgatgaaccacatacattaaattctataggttttttactttttccctcattttccatagaaaattccaaactgctacacatttgttggctaagtactcttttgagaggaagagtatgtgcctgctctttcgagagtgccaaatctgacattaccttggacatgaaatctattaagcttggtaagctgacttgcatgttttccctcctgcacatattaaagggaattttagcatttatttcctacttctccagccaaaagaaaagaaggttgttttgtgcctaggcatctgcttagagtattgctctatatctcatttctcataatctttggtagttcttgatgttttcctatcttattgccatcccaccatctgcctcctaatgctcattgccctggaattatggtggtgattttcttgataatgctgtaccgttttgcatgatgcacactgtctttctgcacctacctcctcctgtcttctctgactccagccatttgcactgtcccttgattcaagttcctgggtttgctgtgtataggtatcttagtatcaacctactatagacagagacattatgaataaatgaagtgtattaatttattataacatctgatttgtatgtttgtgaggcctgtgctttatgattatttaaaatgacattatatcactgaaatacataaccatcttggataaaaagttagtgcctcaccaaatgcatgaatacatgatattattcaacaggagtaattaacagtaaaatcactagtcttattttccatttttatataccaagatctgcatgcaaattgtttcaaagatgtcatgtttattcctaaactagttgattgtatttaaatagaaaataaaactaagaacaatcaaggcaagggagaggttgtaaaacctattgcgtgccttctatgtctgtacgttttgcatgccttgtctcattttatcctcactgtccagctggctaggagtcatatgatgctcctttaataaaagaaaaaaatgtatccttgaagtcacagaatcagaatcagaattcaaacccaggactctctggtttccaaggcctttttaatttcacttgaccccacatgactaacattggcaagtcaaggagaggttggaatgcttacatcatctgttttcataagtaatgtgagttcatgagatgggagatatcttagaccatatgaagaatagcccatgttcattgtgaacatcttttaaggttccagagaaaatagaaaatgtcaaaacctacgggttgt

SEQ ID NO: 13524 - DNA, 1846 bp, Homo sapiens
  CDS (33)..(1115)
aaggtcagataagtagtaattatgatgatgccatgcagttttcaaagaaaagaagatatttaccaactgccagcagcaacagtgccttttctataaacgtaggacacatggtctcccaacagtctgtcattcagtctgcaggtgtcagtgttttggacaatgaggcaccattgtcacttattgactcctcagctctaaatgctgaaattaaatcttgtcatgacaagtctggaattcctgatgaggttttacaaagtattttggatcaatactccaacaaatcagaaagccagaaagaggatcctttcaatattgcagaaccacgagtggatttacacacctcaggagaacactcagaattggttcaagaagaaaatttgagcccaggcacccaaacaccttcaaatgataaagcaagtatgttgcaagaatactccaaatacctccaacaggcttttgaaaaatccactaatgcaagttttactcttggacacggtttccaatttgtcagtttgtcttcacctctccacaaccacactttgtttccagaaaaacaaatatacactacgtctcctttggagtgtggtttcggccaatctgttacctcagtgttgccatcttcattgccaaagcctccttttgggatgttgtttggatctcagccaggtctttatttgtctgctttggatgctacacatcagcagttgacaccttcccaggagctggatgatctgatagattctcagaagaacttagagacttcatcagccttccagtcctcatctcagaaattgactagccagaaggaacagaaaaacttagagtcttcaacaggctttcagattccatctcaggagttagctagccagatagatcctcagaaagacatagagcctagaacaacgtatcagattgagaactttgcacaagcgtttggttctcagtttaagtcgggcagcagggtgccaatgacctttatcactaactctaatggagaagtggaccatagagtaaggacttcagtgtcagatttctcagggtatacaaatatgatgtctgatgtaagtgagccatgtagtacaagagtaaagacacccaccagccagagttacaggtaaggtcccaaaagtggccaggctggaggtcttctaatgtaattttgttttattttgagaacactgccattggaatgtttctacacgatcctattaagaataatgtgatgccctttcaatgcaacttttcatatttagtttattttgttagcgtgattttagctctgtttgtattatgatttttaatcaaaatcaatagattaaaaatagtttgacattcaaagtgacaatgtttagcaatcaaatttacatgtatagatcgtcagggaatagcccaaatgttttaaacgcaacaaaaaagacaaaaaaaaaccaaaaaaaaaaaacctacaaaaaaaactttgttgctaggattaaggttattctaattgctttactctcaggaaagtgtaataacgcatgggaattctgtacgttatcactgtaatggaatatccaatttacagatagtatgatatacatttcatcatttaagtaagggatcgaaaacatttcaaattgctctatctgggctgatagacatttcgtcatttaagtaagggatcgaagacatttcaaattgctatctccatctgggctgatccaaaattctgagattgttggctacctatattttgttgcagcttttaaatgtactctgaacttccaaaccacattcattccagcctggtagaacaaatattcttggatctttgatcaaagcctggaatgatagctttaataaaagaagg

SEQ ID NO: 13525 - protein, 361 aa, Homo sapiens
MQFSKKRRYLPTASSNSAFSINVGHMVSQQSVIQSAGVSVLDNEAPLSLIDSSALNAEIKSCHDKSGIPDEVLQSILDQYSNKSESQKEDPFNIAEPRVDLHTSGEHSELVQEENLSPGTQTPSNDKASMLQEYSKYLQQAFEKSTNASFTLGHGFQFVSLSSPLHNHTLFPEKQIYTTSPLECGFGQSVTSVLPSSLPKPPFGMLFGSQPGLYLSALDATHQQLTPSQELDDLIDSQKNLETSSAFQSSSQKLTSQKEQKNLESSTGFQIPSQELASQIDPQKDIEPRTTYQIENFAQAFGSQFKSGSRVPMTFITNSNGEVDHRVRTSVSDFSGYTNMMSDVSEPCSTRVKTPTSQSYR

SEQ ID NO: 13526 - DNA, 1764 bp, Homo sapiens
atgctgagactacataagtgtccttcaaataatgcagaagaaaaagatcataggcaggcaaaaattacttaataaattaagctttttaaagaagtgaaagaattatatccagaaccaacagctcttaaatattctatttcaataaaaacaatttctatacaattgcggtgaaacttatttttggcaaatactcttccgtaagttatgaacatttctcttgataaattttatactaggtatataagttcctttattggtgttttggatgacagcaaatgactttccataaggcagatgtagattttattcacacaacttttcaggagtagctttatgttaatatgttaggactgtccttccttgagctttacagttaaccaatgaaagtgagttattttagggaatggttagatttggacatggaccaaaattagttttctaatgagtggtgttaaagatgtgtaactactattacagagataatgtaaatggccttctactttttaattctctgattctgatcttgttttgtagtaagaaaggctcagtatgaatttgaggtacttaactaacttgttacagtggtggtcagtgaagaaagattctatcgggcaggactctctggaatgcatgtgtcagaagcccagcccaaattggcctcagcagaaaacaaaacatagcgaaaagcaaatgacaattcattggctaaagcaatggaaaaatacaaggatatctagcttgagactcagctagagccaaatattcaaatctggtcatccaacattgattggtctctttcaatttacttagctgtgctaaacactgttggcttggttttggggcacgttcttctcaaacatggtgaaagtggcccctagcaccgccaagattgatcctgtcacagcccagcaatcccagtggttgcttaaaagcaagtccttttcttgataattctagcaaaaatcatagggaggtcacccattggcccagtttagggcatgtgccatcccttaaccaatcagcaatctgattagccaggcctgaggcacgtcttcatcactaaaactagtcgtgatagaatcaacttaagtggaaccctgttgagagaaggagaggagggatggcttccctagtggaaatgagctattaccaagagtggatgagggcgggcagaaacaagaggtgcacattacagggataccagggatttgagtctgcagtctctctgattttccatgagtgcttatcttcttgggggaggtgggggcggtgtgtgaacatccacacagcctcctgctcctcctcatctactggggcgctcagtcacccaggtttggaatgcttctgaggtgatacttaatgttacagttcatggtcaccgtgctccatgtacgtgaggtcatgtgtattgtgtattgtcactgtctctcttcccagttatttttttcagtcaggtgctagggaattctccttttcttactatgtcatggctgtcctccccactccatggggctttcagaaagacaggtagaacataagagtctagagagaccttgggtgtcacccaggccattgaggctccatctgggcttgaaagagccctcacctgcagtaaaggtgcctctgaggccaaggagaaattatggcataagaagggaacaccaaggagatgggggcccggacataccctctcccacctccttcagatttcattctttataaaatttcacataagggaagagtctccaaagtgtaaggagggcc

SEQ ID NO: 13527 - DNA, 1590 bp, Homo sapiens
  CDS (385)..(879)
gtaaagcattgcttgaggttgcccaggtagtttcgccttacacttcttgtcccagtgcaattattagtagagctccctttcactgtcaaatttccggttggggataaattgcattgtcgttttggtttgagataggaagatgaggggaggaaggaggtgaggcggtaaggggcgttctctctcttgggtcccgcgcccaacttccgctggcccaaagaaactataattttgaaccaacagacctctgctggcatctgcgattgcatttttcctgttttaacaacggctgtgctagacgaagtggtgaagcccaaagacttatttttgagctcgctgtaagactgagaaatcacgtagtccttcctgaaaccactaagaggaaaaatgtctgtgacactgcatacagatgtaggtgatattaaaattgaagtcttctgtgagaggacacccaaaacatgtgagatggagtctcgctgtgtcccccaggctggagtacaatggcgcgatctaggctcactgcaacctccgcctcctgggttcaagcaagtcttctgcctcagcctcccgagaactggaagaggaggcaacagtatttggggcaagaagtttgaggatgaatacagtgaatatcttaagcacaatgttagaggtgttgtatctatggctaataatggcccgaacaccaatggatctcagttcttcatcacctatggcaaacagccacatttggacatgaaatacaccgtatttggaaaggtaatagatggtctggaaactctagatgagttggagaagttgccagtaaatgagaagacataccgacctcttaatgatgtacacattaaggacataactattcatgccaacccatttgctcagtagctatgatagacctggacaaataacttgacaaattgctggaacacacttattgtggtttacccggttttaattatgagccagcttgacgtggttgtggccgttgggcgagatgaagctacactgtgaggtggaggtgatcagccggcacttgcccgccttggggcttaggaaccggggcaagggcgtccgagccgtgttgagcctctgtcagcagacttccaggagtcagccgccggtccgagccttcctgctcatctccaccctgaaggacaagcgcgggacccgctatgaggattccatatggctctcatatcattccattccatctctgccaagatttggataccgcaaaaatttgtgtttgtggaagattctgtctgaactctttcattcaaggaactactaccatgaatctgcattctgttgcccacactgtggtcttagtagataatttgggtggtactgaagcacctattatctcttatttctgttctctaggctgttatgttaattcctctgatatgttaaagtaatgggtgagaccagaaaaagaaatttcaataacagatcagtttggggtgcatgtatgattttgcagcgtcaaattggagtaagggaagatttctgtatacttgctggagaggaggaatgtgtatagttactcatttagatgactccaaaacttttattaaaaccaattttagtttt

SEQ ID NO: 13528 - protein, 165 aa, Homo sapiens
MSVTLHTDVGDIKIEVFCERTPKTCEMESRCVPQAGVQWRDLGSLQPPPPGFKQVFCLSLPRTGRGGNSIWGKKFEDEYSEYLKHNVRGVVSMANNGPNTNGSQFFITYGKQPHLDMKYTVFGKVIDGLETLDELEKLPVNEKTYRPLNDVHIKDITIHANPFAQ

SEQ ID NO: 13529 - DNA, 1704 bp, Homo sapiens
  CDS (637)..(951)
ttcagtgtgtgcgtgtgttttaaatatgttctactttgatcatttcattttgttctatgagttctgcagtgactcagaagttccatgatactataactggagtaattttgctgtatttttagccatgtcctccaagcctcccagtatatgctgtgatctttgccaaacagaatctgatcagtgttacaggggaaatgatgtgtgaggctctacaaggagagggtctccagggcccacacctgagtcatgccttgaagcaacctcagcacacttagcctcccagtgattctgtgcaagtctgtctcaatcttttgagcttatgttagttctttgggggaaaaaaaatagaaacaacttctgaatagggcagtatgtttggggcagctttgtgaatacatatctaaaattacctccatttgccattttttaaatcaattttttttcaagcaatcagattcttttctcctagaggagctgtgggcaagaaaactaatgaattctacatccttctcatcacctggtttaaattgttttctgctctgagtaaacagtaattactgtttaagtacatctcagcagaattttatcccaattgcaacagttcatgttcctcctaatgtaatctctgcggaggaaatgatcgtcaagggaagcaggctgacctgctcacgggatggcgttcttacaatctgcatcttatgtaatggtgattctgtgtgcctgtgtcataattattggaatattattttatgcttttttttttttgagacggagtctcgctctgtcgcccaggctggagtgcagtggcacgatctcagctcactgcaagctcccctcccaggttcacgccattctgcctcagtctcccaagtagctgggactacaggtgcccgccaccacgcccagctaatttttttttgtatttttagtagagacggggtttcaccgtattagccaggatggtctcaatctcctgaccttgtgatccgcccgccttggcctcccaaaatgctgggattacaggcgtgagccactgcacccagcctattctatgcattttttaacattacaatttattttgtgccatgttctgacttttaagtcattaaatcgtcttttaaatgaggaggaagatgaagttattgatgaccaggaagaggatgaagaagaaacaaatgatagtgacacttgggaacctccacgacatgtgaaacggaagctgtctaaatcagatgactgaaatctgcctaaaacgttgaaggagaatcaattcttcaactcaagatgtctgatttactgtgaatttgcccaatctttgatgacattgaaaacgttttggggcatacacactcaaaaagcaggatccaatacccaaaagaaatggaacttaatgttgtgccaaagttaaactactgcagttggtggaagttctgcaatgtaaatagaacactaattaaaaaacaacttgtaaaaatgcaatttaaattttaatacagtacatttttcttctaatatgatggagacattctgaatcttagactttctgagggggtttaatgaccactagagcttgtcctcatattcagtccagtttaatactgtatgtctagtaagatgggctatatattgcctctattctttgagatgtgattaagcttagaactttgaccaaaaattttacagtaaaaattgttagaaatgggt

SEQ ID NO: 13530 - protein, 105 aa, Homo sapiens [sequence omitted]

SEQ ID NO: 13531 - DNA, 1652 bp, Homo sapiens
ttgtttgttttttgagacagagtttcactcttgttgcccaggctggagggcaatggcgcgatctcagctcactgcaacctccgtctcctgggttcttgattctcctgtgtcagccttctgagtagctaggattacagatgcctatcaccatgcctgggtaatttttgtatttttagttgagatggggtttcaccatgttggccaggctggtctcgaacttctgacctcagatgatctgcccgcctcagcctcccaaagtgctgggattacaggcatgagccaccacgcccagccatcaatgcattttttttattttttttttgagacagagtttcgcacttcttgcccaggctggagtacaatggtgcgatcttggctcactgcaacctccacctcctgggttcaagcgcttctccagcctcagcctcctgagtagctgggattacaggtatgtgccaccatgcctggctaattttgtatttttagtagagacggggtttctccatgttggtcagactggtcttgaactcccgacctcaggtaatccgcccgcctcggcctcccaaaatgctgggattagaggtgtgagccactgtgcccagcccatcaatgtgttttaaagctagctgtcagggttccacttaatttaaagctgggcagggagatgtgtaatgatttcaaagttaacacctgtttgttttctaaagggcatgccaagtcctgctgtatcagggaagtatcctgtgctaaaatcagcgatggttcattgctctagtctctctcacccttctaggcagtgcatcagtcagctctaaatctggtgcagagggttaacagcataacccttgttggcaaaatggaatagatgttaagacctcaaatagggatttgggatgaaacagctgcagttagcactgttatctgagcatgaaagaactggaaacgctccttacgtcgagatgttggaccttgaagccctcctgaggccaacatgcaaatctggctgtgacggttcatctgacacctgtgtaaagctgaccagcctgctctgtacagtgacaatgaggagcccctctcttccttaagtaggaatctgtgaagcaaaatgtttgctgccaaagacaaatcagactgtcagtcattaaaaacagcattagcaggatgaggatagcaatggggaagggttgtgggcaatgcagtaacagggaaatggcttcagaaatggtttgagttggaagacaacattcttcatctctcaggacttctaattccttgatgctaaaagaagaggcatggattctatgagcttccaagtccctttccactttaaccttctacaaatctttcagaggactgcctagtagcaaaggttattcctggacacaggaaagacgggcattacagggaccaaagctctgaaaggtgacttttattaccaacacactggctggaaaagggacaaaccacatcacgggtgagtgatacttctcagtcttctctactcattcaacaaaggaaatgtgggctggggcagaggtcttttttcattcaatactggaaaaatattgaagagcatccatgttcacttatggctggttttgctatagaaattggaaaataaaggccacttttttgaaatccccagtttaatt

SEQ ID NO: 13532 - DNA, 1899 bp, Homo sapiens
  CDS (496)..(825)
aatttggaaaatacagaaactacctataatttttccattgttaacatttgagcatatttcttgtcacttttaatggtgctttaaatatgtagcaaatgtatcatttcgtattttaaaaaaatgctaggtaagcatttcctcctgtccttaaaaagctcttttaaacaactttaaaatattgtatagatagatgtacacaattttctgaataattggagttatatttacatcttttcactctttaggaaaggactggcctgtttctgtgttgggttccttcctgagtgtggcttccagctcagtggctcagacttcaagatgaagacttcagtcctggttgtgtatggtcttgggccagttaccatatgtctaatgaatacttagttttgtcatctacaaaatgaaaatagtaatatttgcctcaaagactattatttgggaggatctagtgcaaatgttagtaatgtggatattgtgtagtgtcccaggatattaatgtttttagcctcttggcttttattctgtattgttgccccaaaagatgatgctcacttatctttcatccagtgtaaggatatctggaaagacaacagaaagtatagctgttttcatttcaaaagtgatcagctgcttgagctagcaagcaaggcttgcactagcttccaggcgcagtcacgcagtttcacagcaggcgcggttccctcggagcacccagagctgccctgcggtagtcagcagttgtgctgtggctgcactgccaggctgggtggcaggtggatcggagccagcagatgtggctcaggaagtgccttcttggcctctccttaatctctttcagagtctgtgggcccttgattgcactgtgggttgtttcagactccagtattaggagactgaaccccttggtggtttttttgtgtgtgtgtgctgagctgggttgaggacatgttaagcaggtggggtgcctcccctgggtttgctccgggtggtacctgtggtgtggggtggttctgagtagttctggccccactgctggagtatctgcccactcagtttgtgagatggcagggcttcatcctggtctggtgcctcattttcttctttagcagtgggcttagaaccaatgcagattcccaagttaagtattttttctgtagcttaattattacaggcttctggtacctaagccctttcttactttctgttctgaggggaagagaagataatgttgtttctccgcccccccccggagtggccccaggaccttgcatggcatttgcagcatttgcagcgtgcttgggtttgctttactagggtgaaagtgttgcaccccccagcacccacaaaggcacctctgctcacactccggtgaggttctgactggccctgggacatcacctgctccaggatcctatgtggctcatcccaggagagatgtgggagggaaggggaaaaaaggcttacatttgctgagtggaattcatgtagatctgagttccgcattgattcctaagctgcagagcccttatgccttggctgttttgtgaatgttagtcggtcttaacctttttcaccgagttagcattggctgtctcaggaggctcacagctcctgctcctcctccaggggagtgcgccctcctcctctgtcggtagctgtcaggtgcccctttcctctgcagcagactgtcctgggtccttgcctggccttccccttacacgtgagcctgcagcttcattcacagcccctgtgtagaaagataggcacatcgataggtccctccctgcccagagtgggcggaactgaggcaggcactaaaagcagctgactggcagccctagaaacatgaagggtttcatttatagtttcagtccttttccttctttcgagccttaattt

SEQ ID NO: 13533 - protein, 110 aa, Homo sapiens
MFLASWLLFCIVAPKDDAHLSFIQCKDIWKDNRKYSCFHFKSDQLLELASKACTSFQAQSRSFTAGAVPSEHPELPCGSQQLCCGCTARLGGRWIGASRCGSGSAFLASP

SEQ ID NO: 13534 - DNA, 1595 bp, Homo sapiens
aaaaataaaataggcacatttagaattcagagccaatatgtgcttgcttattagttttttagctagcaacatatttgaatcaggctggtaattcgggtaacccaggtagcacagatttttaatgacatatctaaagatacgtaacagctaaaattctgccagtgagaaattttcctgtttgatattcttacaaaagatgtttatgtccaccattatctcatcagggctgtgctgaatatttgataatgagactgatcattccgctttttctttcttaaaaatattagtcagagttaagcaaattaattatagctatctttaagctataaatgtgttaacatgtatatataccatttattatgttctactttagtgatataccttaatttagtgggctttggcagggcgggggagggggaacgttcattaatctctgaggaaaacaaaacctgttttctacttgagtctaacatatggtcccaatttattaatacttctgttaaatttgatgtcaggtcaacatttttcagaaatgtatttattctcagaaacagaaccagagagaagttaaacaaaaggttatgtaactgttcctttaatgttgtaattgaaaacttggtttagcgtcttttttttctttctctttttttttcttaaaatgccaactaaaataattagaaagtagcttatttattgcatgcttatacattgatattggaattggaattggttgttaatttctgttactggctttgctagaattcatatgtgcataaataacactaatatttatcatcttgggggctgttctgtgatctattacatgatttttgctctctttttatttttctagtatcaaatgtgttctggctgagtgaatttggatagatataatatgcaagctaattggactttttcatttttctcattaaaaaaaggaagaagtagtccactttttgctagcatactattctgagacttacattaatttgggaaaagtcaagggtcaacaaatttttgtgtctgtgaggggccagatagtaattatttaggctttgcaggctgtgtgatttctgttgcagttattcagctttgccaatgtagtgtgaaaacaatcatagataatatgtaaaaccttactaataaaaacaagctgggttatgttggcacacaggcagtagcttgttcacctctgctgtaagttaatttgggttaacctttgtaggagaaattacagattatttttgtctttgttcatagtttttttgtttagggactgtagtggattatggccaagcagcagtagctagttaagtcttaatcatgaaggtagtagaaacctagaataaaattattatgcccttttcactcatttcataatatgtttgtattgccgtgttgaaaagccaaataaaatacaatccagttaagcagtgagcacccattgttttcccaaaaatagagctccttgctttgtttttgttttttcttttttttttttattatggaatggaattcaatataaagagtttattgtggaccccatggaatgtgattaaattattagcataataaaaagacatcctatgaatttg

SEQ ID NO: 13535 - DNA, 1551 bp, Homo sapiens
aaaacatgttgatcccaatgatgtgatcacttttgaacctttccattacaaagcattgtatagataactttttaattcagtaggaggagaaagttcattcttggcctgttggctttgattattatgggtactttaaagtcagtatttatcaagaaagggaacttgaccaccattggcacatgtgacatttaagctcttcagccttttcctttttagttgtaggtgtttacatttcatttctaagccaactctgtatttatgagagaagtttaagccttacatcatttgatactaaagggttatttgtggtaaatgaaaaatgaccccaaaattacagaggaatatgccagtttaagaaatggctacttaaagttgcttctctctttccttcttactcatgaaattaattggtcttcttcaagtttctttagattccattaaatgattaaatcactattaagagccattcatcaacgtgatttgtgtgttagccaatgaatctgtctcagcttttgaccaaatgggttttagacaaatgcaaagatctgcctctagtccatatggctctttttgagtgctagtattttgcatttcacataatgtagttattttgagcttttaaagagagcatttagacaaagaagcaaagagaggaagggaccaatcaactcatcagttccatgcatcaacaaagcatagctagtagaggaatataaatgacagattgacaaactgtaggaaacactgttactctctttctgaagttttcaagcaccatcctatgtgaaagttccctcctgtccaaacaagctcaaggcccatcttctccctatacaaggcaaacctgtaaggccttccttccaaagagtacattgctttggttttcttcctaaattcctattggaattagaactctcagaatccctgggagacagagcaaagatgacttaattcattgagcagcagagctccctataagtgaacatcaccttccccatctttcctactgccacacccatacgagagaggatctagaaagagcgatggcagcctgaacacagaaaacacccccacttggcagacctctcctcagcaatccccccagcctcatgcttcacttgcaaagtgtgacataaccacgggacgagtgccttgcttgaaccaaagcaacgatttagccagtctggacctctctgtgctttttttaattcttcctgtgaatacctcagcttcaactgggcctccatacagtcagttggtgggcttattgtactgtggtgctttgcaatgcaaccctgcaaagaacaagatttgtactaataccaaaggttctttctctatgtctcctcctctgcctccctcgttcttcccttttttctagttcttcacggttccaaagctttactatgaacctgggcatgttggcaatgcagaccgcgcaattccttaccgaattttctcagatatacctcatagacaatagtgtttagagtaatgttattatagcgtatgtaataaattattcactgtttcttttggtaactgtgattt

SEQ ID NO: 13536 - DNA, 1724 bp, Homo sapiens
  CDS (40)..(1356)
aatcatgtgatccgagggaaccgccccatcaaaactgagatggcccatcagctatatgtccttcaagtcctaacctttaaccttctggaaggaaggatgatgaccaagatggaccccaatgaccaggctcaaagggacatcatatttgaactgaggaggattgcatttgacgcagagtctgatcctagcaatgcccctgggagtgggaccgaaaaacgcaaagccatgtacacaaaggactacaaaatgctgggatttaccaaccacatcaatccagccatggactttacccagactcctcctggaatgctggccttggacaacatgctgtacttggctaaagtccaccaggacacctacatccggattgtcttggagaacagtagccgggaagacaaacatgaatgcccctttggccgcagtgccattgagctcaccaaaatgctctgtgaaatcctgcaggttggggaactaccaaatgaaggacgcaatgactaccacccgatgttctttacccatgaccgagcctttgaagagctctttggaatctgcatccagctgttgaacaagacctggaaggagatgagggcaacagcagaggacttcaacaaggttatgcaagtcgtccgagagcaaatcactcgagctttgccctccaaacccaactctttggatcagttcaagagcaaattgcgtagcctgagttactctgagattctaccactgcgccagtctgagaggatgagtcaggatgacttccagtccccgccaattgtggagctgagggagaagatccagcccgagatccttgagctgatcaagcagcagcgcctgaaccggctctgtgagggcagcagcttccgaaagattgggaaccgccgaaggcaagaacggttctggtactgccggttggcactgaaccacaaggtccttcactatggtgacttggatgacaacccacaaggggaggtgacatttgaatccctgcaggagaaaattcctgttgcagacattaaggccattgtcactgggaaagattgtccccacatgaaagagaaaagtgctctgaaacagaacaaggaggtgttggaattggccttctccatcctgtatgaccctgatgagaccttaaacttcatcgcacctaataaatatgagtactgcatctggattgacggcctcagtgcccttctggggaaggacatgtccagtgagctgaccaagagtgacctggacaccctgctgagcatggagatgaagctgcggctcctggacctggagaacatccagattcccgaagccccaccccccatccccaaggagcccagcagctatgactttgtctatcactatggctgagcctggagccagaaacgacggtacccaggagaagggattttgggcccaggagagacacttacattctggtgccttgtcttttgcttgtacagaatctgtagtgattttggtggccagtaaatgccagccatttctcaaacccacctcggaccacccagagtttcctcttggtccctgtctactaagagtcatgaaggcagggtgctctgcccactccatcaccatgaagcctgggattgggccacgaggaacaaacagcagatgcccttgccttccagtccaagaaactgcttcttgaaatggatttaacaacagccaggagcttcctgtcagtaaccatgttttcaataaatactctttcacgt

SEQ ID NO: 13537 - protein, 439 aa, Homo sapiens [sequence omitted]

SEQ ID NO: 13538 - DNA, 1769 bp, Homo sapiens
ggcttaatgactggccctgcattcttcacaatatttttccctaagctttgagcaaagttttaaaaaaatacactaaaataatcaaaactgttaagcagtatattagtttggttatataaattcatctgcaatttataagatgcatggccgatgttaatttgcttggcaattctgtaatcattaagtgatctcagtgaaacatgtcaaatgccttaaattaactaagttggtgaataaaagtgccgatctggctaactcttacaccatacatactgatagtttttcatatgtttcatttccatgtgatttttaaaatttagagtggcaacaattttgcttaatatgggttacataagctttattttttcctttgttcataattatattctttgaataggtctgtgtcaatcaagtgatctaactagactgatcatagatagaaggaaataaggccaagttcaagaccagcctgggcaacatatcgagaacctgtctacaaaaaaattaaaaaaaattagccaggcatggtggcgtacactgagtagtttgtcccagctactcgggagggtgaggtgggaggatcgcttcagcccaggaggttgagattgcagtgagccatggacataccactgcactacagcctaggtaacagcacgagaccccaactcttagaaaatgaaaaggaaatatagaaatataaaatttgcttattatagacacacagtaactcccagatatgtaccacaaaaaatgtgaaaagagagagaaatgtctaccaaagcagtattttgtgtgtataattgcaagcgcatagtaaaataattttaaccttaatttgtttttagtagtgtttagattgaagattgagtgaaatattttcttggcagatattccgtatctggtggaaagctacaatgcaatgtcgttgtagttttgcatggcttgctttataaacaagattttttctccctccttttgggccagttttcattacgagtaactcacactttttgattaaagaacttgaaattacgttatcacttagtataattgacattatatagagactatgtaacatgcaatcattagagtcaaaattagtactttggtcaaaatatttacaacattcacatacttgtcaaatattcatgtaattaactgaatttaaaaccttcaactattatgaagtgctcgtctgtacaatcgctaatttactcagtttagagtagctacaactcttcgatactatcatcaatatttgacatcttttccaatttgtgtatgaaaagtaaatctattcctgtagcaactggggagtcatatatgaggtcaaagacatataccttgttattataatatgtatactataataatagctggttatcctgagcaggggaaaaggttatttttaggaaaaccacttcaaatagaaagctgaagtacttctaatatactgagggaagtataatatgtggaacaaactctcaacaaaatgtttattgatgttgatgaaacagatcagtttttccatccggattattattggttcatgattttatatgtgaatatgtaagatatgttctgcaattttataaatgttcatgtctttttttaaaaaaggtgctattgaaattctgtgtctccagcaggcaagaatacttgactaactctttttgtctctttatggtattttcagaataaagtctgacttgtgtttttgagattattggtgcctcattaattcagcaataaaggaaaatatgcatctc

SEQ ID NO: 13539 - DNA, 1438 bp, Homo sapiens
cttattttcaatagttttcctctgatgttctgctgggtatgtaggattttacctcgatttttcttttttcgttcatgcaagtgtcccctttgtttttcattataattatcattataatgataattgaaaatgaaacttccccatctatttctaattatttaatggtcacagagctatgtttattactgaagctaaatgtaacaactatgaaatgtataattgccactctgaagtctaaacttgcaaatgaaatttgatatctgagaagatatagcaaaccaaaaattgctaactgtagaattaacattttatagctaagacagactgtaagtggtatagtttctgtatagtttcttttttgtttaaaaaaaatgtacttactcatttggaaaaaatttttaaaattcacattaaaaagttcttataaaatacccttcataaataaccactgttaaaattttgctatgtatcattctcttatgtttttctatgcatttaaattcttatcataccaagaaggcagtgattaagagctcagtttctggagtctgacaggcctgatgatgaatcacttaatacatgtgtggctttcaaaaagttacttcacctctataaccttaattatctcatctgtaaaatgaaaaataatgatactatttgcttcatagggttgtcttaagaatttaagttaaaaatgtatataaatcacagcacaatgattaaaatataagtactcattaaacagtagccattattattaaattgtctatagcttttaacctatcttgcttacttagtaatatgagcatctttctatgtcatgaacatctttatatgttgtaaattaccttctacaatattacttggatttttgatattctaattgatagatgtgacatagttttttcaccaacccgtattttggatatttttgttgtgtcttattttctagttttaaaaacaatgctgtagatgatccttcagaagttaaaggttttggagtcatctcttaatcaaactcagtaacttctgttatttctacttttattgaaagtatatgcagaacttttaggtctaagatttctatattttatattgacagcaggaatagatcatttttatgtcttcatgagtttaatgatatattggaagaagcagtctttagcatttgcatttgactgatttactggcagacatttaaaaactataaacccaaagtcgtctgaaaagctaacaagcttgagtgtgtaaaaatattatactgcgaggcacagcatattgagtaccagccctaggctaccatattataactttatgagggctgggcacagtggctcatgcctataatcccagcactttgggaggccaaggagggaggatcactgaagcccaggagttcaggaccagcctgggcaacatagtgagaccctgtctctac

SEQ ID NO: 13540 - DNA, 1514 bp, Homo sapiens
  CDS (663)..(1016)
agtgcttttcatgtcttcaattatccaagtaccccaagcctgtggtttgcctcagtttgggtgggcatagccaagggggttccagggccgtccagccttcactcaaggatgactttccctaggctgagggcagtggacccttgacaaaatttaattaccgtctctgcttatggctggacctcagctggcagggtctcgggggctttaaacaaaagcaggagcctctccagaagtagattagggagatttgcattcaggccagggatttgtacatggtgttaattctcctccaggcagatatctgcttgggaaagggctgtgtgaccctatttagaaaaatggctacactttgttaacctttttcccttaagaaggaaaaatcattaatggcagaagttcaggccccagaggggattttctgggtgattctttgtttcaagagtcatgtttccccagatgtgattaaattgtccgtaacttttaactcttccctcccccgtgctttagttgaaaaataaaatctctgttcatatttcttgcatatcataggcttatgtctctttccagctctataagtcaaggctaaagattttttttttaagaaagaggaaaaaaaagacatttatttgagaagacatttttgtgtgtgccctgctcccaccatgcattcattcggtgctggaaagtggttaggggattctaagcagcccccttgctatagctggactgtgacgctgtcccttactgtcagtctgcttggctcctccagacctgatgcagatgctgcccgctccccacacagccctcctttttctctgttcccggaacactgtttgcttctgttactgagaaggcaatactgggtaaaggagaatgatgcacgatgtggagctggaagacccaggcccaaaggcagcttttaccacctcctagctgtgctaccctgggcccctgagcctagagttccttcactgcacttgcaattgcactgtgcaatgccttctcagtctcctggctagaaaatggaactcctggaggacaggatgtttttcatcctattatttccagtcatttatctagtcattcatttctttatataatgaccctcctaggacctaagaatagagagatgaacgcgatacatgtggtaggaattgtaagttgctgcttctttttgtttttgttttgagtgatccactgatggttgagaaagcctaggatctttctccccagagagaatgccactagagagggggcagaacatgaccctgcctgttgaccccaactgtgacacttctgaaaccaatcttaggaaagcctctcatgggaatggcatttccaagattaggggtaaagtgggacctccctgttgaaaagttgtcctgccctctgtcagctagacatgccataagcaagggaaagaatgacttttaatgacaggggtagaaattgggagcaagaggctgaacacatggaacagaattttttgaagtgccttgttaaatggaaagtag

SEQ ID NO: 13541 - protein, 118 aa, Homo sapiens
MHSFGAGKWLGDSKQPPCYSWTVTLSLTVSLLGSSRPDADAARSPHSPPFSLFPEHCLLLLLRRQYWVKENDARCGAGRPRPKGSFYHLLAVLPWAPEPRVPSLHLQLHCAMPSQSPG

SEQ ID NO: 13542 - DNA, 2012 bp, Homo sapiens
  CDS (187)..(870)
agagctgctcgtctgaggctgctgaggcgacggccggtgtcgtggtcgcggtacctgttccaacacggctcgcgggcccgtgccggctccggtccccggcgcggctgtccgagcccctgcggcgggcggacgatggtgtggcggagcacgcggacgcgggcggcgcggcggcgggcatgaaggaggatggaagggcaggacgaggtgtcggcgcgggagcagcacttccacagccaagtgcgggagtccacgatatgtttccttctttttgccattctctacgttgtttcctacttcatcatcacaagatacaagagaaaatcagatgaacaagaagatgaagatgccatcgtcaacaggatttcgttgtttttgagcacgttcactctcgcagtgtcagctggggctgttttgcttttacccttctcaatcatcagcaatgaaatcctgctttcttttcctcagaactactatattcagtggctaaatggctccctgattcatggtttgtggaatcttgcttcccttttttccaacctttgtttatttgtattgatgccctttgcctttttctttctggaatcagaaggctttgctggcctgaaaaagggaatccgagcccgcattttagagactttggtcatgcttcttcttcttgcgttactcattcttgggatagtgtgggtagcttcagcactcattgacaacgatgccgcaagcatggaatctttatatgatctctgggagttctatctaccctatttatattcctgtatatcattgatgggatgtttgttacttcacttaccaaatacttcaagggattcagaaacagccaagccttctgtaaatgggcatcagaaagcactgtgagacgcacagacggcgtcttctgccaccaagagacccgagaactccagattcacgacattcctgtcccatgtagaagcatttccattcatccgtggcccctcttcagaacctagacctatcagtgccatttttttttcataatctacgaagaacttggctatggctgatctttttttaaatttaactttctgatggaccctgtagtttccagttaagtgcagattccttacagacatatagaacagcgcattcttctgtagacatttgctcatgttggtaaatacaatcacccatatgaaaaaattgttttcacctgatatgaaaatgttagaaaaggcaaactccgggacttctaaagatttacttaaatcccattatgtactctattcagaatgtagaagctgacttgaaaggcatccttggtactaagtgaagcttattcagaaaatgcatttttcaaatgcaatggcaactgcttgtagatatcatttttgcagtgtatgttggagctgtaatggttgcaattatgtttcttatttccttaaaagcaaaaagcgtagtttctgatttatgttatagaatgatactgattagactttgagccaaggggaagatactaaattcttttaaacctggagccttagagagccacaggaatatcttctgttgtacagtctaataagctgtggtaggaagtatcatgtaatcacagtttaatgacagtttatgtatatatataattcagtattccctctgataacatagttgccagtgtttaatacacttgtaacttggatttttaccttataggctatatgtatactcagttttttaaagcatttttttcagagatcacttaattccccatgcttctgcaatgcatataaaaactataaatgccgagtggtagaaactcctctttcttcatagtcctcaggctttggttacatttgcatatgccatttgaagcctccagcttttaccagtttaacatccaaagttcacagcatcagcattcatggtgtaagaacagttttgcagtataacacgatctgataatcattcagttattaaattgtaaataattattgggatggtttcttggctttaagtccactgaataaaaactatgaaattgc

SEQ ID NO: 13543 - protein, 228 aa, Homo sapiens
MEGQDEVSAREQHFHSQVRESTICFLLFAILYVVSYFIITRYKRKSDEQEDEDAIVNRISLFLSTFTLAVSAGAVLLLPFSIISNEILLSFPQNYYIQWLNGSLIHGLWNLASLFSNLCLFVLMPFAFFFLESEGFAGLKKGIRARILETLVMLLLLALLILGIVWVASALIDNDAASMESLYDLWEFYLPYLYSCISLMGCLLLHLPNTSRDSETAKPSVNGHQKAL

SEQ ID NO: 13544 - DNA, 1605 bp, Homo sapiens
  CDS (51)..(473)
attgtgggatctgtcggcttgtcaggtggtggaggaaaaggcgctccgtcatggggatccagacggtaagaccctcattcagtatcctccactgggggacccctccccatctggttctggccactcagctccggaccaggggctgtcgctgccgaccccgccccgcagggctctgggcccaccgtggatgctggggtcccgatcccgcacatccgggctcgggactccgccaggttacccctctgcccttggcatgcctccgcgctggagctcgggatcgccacccctgggacggtcaccacccaagccccgggctcttacccagcctggcggtcacgctgcctcctctacccacagagccccgtcctgctggcctccctgggggtggggctggtcactctgctcggcctggctgtgggctcctacttggttcggaggtcccgccggcctcaggtcactctcctggaccccagtgaaaagtacctgctacgactgctagacaagacggtaagttggggaagaaagggccagggtgaaggaggggaccagagtgctcctggcatgtagggtacagcacccacggtggttgggatgcccaagggacgtggcagcgccaggcgcgcttggtgaaacacttgtgtcctccaccctccagactgtgagccacaacaccaagaggttccgctttgccctgcccaccgcccaccacactctggggctgcctgtgggtaaggaaagtgtggagtgggctcctttccctggtatcctcagaaggtgactcccctcctgggatctcatgaaacacgctgcttcaaccggtttgctccacacaccattccccttcccccacttggctctgcatcctccaagctgtgaggtgccactgggcccctctagagtgtggcttccatgacccccatccagctttaacactcaacagtcttgcctcttccctgcaggatttgctaattactccctctgagcaagcactactaactttttcccattgcccagacccttttggctcatctgtcaaggtcctggcagtaactggcaggaaacgctggaaataagtgtttcctcaactgggcgcttataagagatccaactgagggctcaatggggcaaatcttccctgccttgtagctccttgggaccacagcaggaagcaagacatcttgttctctcaaatctctttgagtattttgagggatgcagcacatcacagacaacccttatgtagctctctgcacggtccccaggcaaacatatctacctctccacccgaattgatggcagcctggtcatcaggccatacactcctgtcaccagtgatgaggatcacggctatgtggatcttgtcatcaaggtaaggggctaggaagggacccaggggctgcttacccattctttctgggatttgtagaaatttctaagatttgcctgacagcaggaaatggtatgtactctgtggatgtgaagaaagatgagctactcaggagactgaggcaggagactcacttgaacccaggaggcggaggttgcagtgagccaagattgcgccactgcactcaagcctgggcagcaagagcaaaactctgactc

SEQ ID NO: 13545 - protein, 141 aa, Homo sapiens
MGIQTVRPSFSILHWGTPPHLVLATQLRTRGCRCRPRPAGLWAHRGCWGPDPAHPGSGLRQVTPLPLACLRAGARDRHPWDGHHPSPGLLPSLAVTLPPLPTEPRPAGLPGGGAGHSARPGCGLLLGSEVPPASGHSPGPQ

SEQ ID NO: 13546 - DNA, 1622 bp, Homo sapiens
aataaacacttaataaataacaaaactacctttctgaatataaatctttgcaaatgtatccagataacttccattttgtgcctgtgttcaggcatgatttattttgcagttgccctaccattaacagacctccatttgtctcgtgtgtccacacgccccacttgtaggccagaaatagggcttcagacacagaggcttattttttccatatagactggagtggggaaaatttggccttagggaggacagacacaagtccaatgggtaaaccagcgagtagtaggtggacagccgtcccacacaagggtttgtatctgggctacacagattcccttcagaaaagcaccaatggtgagagagttcttcactcagtaacttacattccctggtctggtgcctttaaaaaaccatcagcaatgaaaaggaagtgcatacacatgacaaaaaaattcaaatagggcaaaagtcagagacagcatctcctttccattcttcatcccagtaccccaggtcctctccccagaagtaaccactcttacccagttttagtgtctccttcagacattcaaagcacattcgtataaatgtgtcttttaaaagtggtagtgacctatatgtgctgtgacatgcttttttccctttgtatgtggacatttcacgttagtgtatataggtctacccattctttcagtgactgcttgatagcctactcctaatgatggagttgactttcctcatacattgtgctacactggcacatgtgcacataaatcgggagcagcgtagttactgggacaaaggttacgtatttaagactgatggatattgccaattttcctccaaaagaaattctcctgatttacattaatgtaatgtaaatgagagtgtttgttccatcacaacctctcaatgtattagcagatttcttgattttgaagaaattttcagaacctgtgctgccacaagtgggcatccttttagaaaagactgttgcaatatgttgcttataaaggatggataataaatagtaaacaggtgatacttagcctgaagaaatgcaggtataaggtgaaggtactgccctcacttttcaagtacattctcaaaagataggggtaacatagcctgccaaaggcttaaggaaatgcagatatttattcacaataataatgtaactttcttttccttttttttttttttttgagatggagtttcgctcctgttgcccaggctggagcgcaacggcacaatctcagttcactgcaacctctgcctcccgggttcaagcaattctcctgtctcagcctccggagtagctgagattacaggtgcctgccaccatgctcggctaattttttatatttttagtagagacagtgtttcaccaagttggccaggctggtctcgaactcctgaccttcaggtgatccacctgcctcagcctcccaaagtgcaggggattacaggcatgagccactgcgtctggcaataatgtaactttgaagcttaaaaattaatcccagtttgtagcaataacagaagactatctacaacggaagaaagaagcaactgccttacagttctgtaaagaattggcaagaaaataaagcctatagttgccg

SEQ ID NO: 13547 - DNA, 1804 bp, Homo sapiens
  CDS (265)..(1299)
atttcacaaagaactttacttttgagcagagtgtaccaggtggtaagttggggaatgacggagaagaagaatgttgtgtgaagttagcagcagggcgcgtgtggtttggtgtggctgaagaaaggggcacattttcttggagtatagagtagaagtcagagaagatagtgttgaaaaatgtacacaaaggcctctttcttgttgtattgtctctttaaaaaaattctttctaattgtttattgttttaaaagaaaagcagagaaatgaatctagaaggaacgaatctagacaaacttccaatggcctcaacaatcacaaaaatacccagtccgttaataactgaggaaggacccaacttgccagaaatcagacacagaggccggttcgctgtggagtttaacaaaatgcaggatcttgtcttcaaaaaacctacaaggcagaccatcatgactacggagacactgaagaaaattcagattgataggcagtttttcagcgatgtgattgcagataccattaaggagttgcaagattcggccacttacaacagtctcctgcaagctttgagcaaagagagggaaaacaaaatgcatttctatgacatcattgccagggaggaaaaaggaagaaaacagataatatcacttcaaaaacagctaattaatgtcaaaaaggaatggcaatttgaagtccagagtcagaatgagtatattgctaacctcaaggaccaactgcaagagatgaaggcaaaatccaacttggagaatcgctacatgaaaaccaataccgagctgcagattgcccagacccagaaaaagtgtaacagaacagaggaactcttggtggaagagattgagaaactcaggatgaaaaccgaagaagaggcccggactcatacagagattgaaatgttccttagaaaggagcagcagaaacttgaggagaggctggagttctggatggagaaatacgataaggacacagaaatgaaacagaatgaactaaatgctctcaaagccacaaaggccagtgacttagcacaccttcaagacctggcaaagatgataagagagtatgaacaggtcatcattgaagatcgtatagaaaaggagaggagcaagaagaaggtaaaacaggatctcttggaattaaagagcgttataaagctccaggcctggtggcgaggcactatgatacggagagaaattggtggtttcaagatgcctaaagacaaagttgatagcaaggattcaaaaggcaaaggtaaaggcaaggataagaggagaggcaagaagaagtgaccaagttctcttttgtgttttctgctggtattctggaggtgggaaggacttggagagagttaagaaacacctggtacctcaaagatgactcatctacaggttgtttcctattgagactttcccagggaagcctgatttcactttgcctgttaatttcactctgcctgttaggtgggttttcaaaccctgatttaggattacaccattgacttagggcttcctcataccttgctgggaagaagtttctagtagtcctgtgaagattcattcttcttgctctttctcagcagaacaaaggagttcactggcttagctacagtgacgcattgaaacttgagtaattcctgtaatgtcagattttgattttacccaatttgtctgtagtgaaaaaactcttatgagcaaaagtattcagtaggaattacaatatgatgttattagctgtccagcataatatatacacagcaaagttttaataaatgttggttcctgcctgcctttt

SEQ ID NO: 13548 - protein, 345 aa, Homo sapiens
MNLEGTNLDKLPMASTITKIPSPLITEEGPNLPEIRHRGRFAVEFNKMQDLVFKKPTRQTIMTTETLKKIQIDRQFFSDVIADTIKELQDSATYNSLLQALSKERENKMHFYDIIAREEKGRKQIISLQKQLINVKKEWQFEVQSQNEYIANLKDQLQEMKAKSNLENRYMKTNTELQIAQTQKKCNRTEELLVEEIEKLRMKTEEEARTHTEIEMFLRKEQQKLEERLEFWMEKYDKDTEMKQNELNALKATKASDLAHLQDLAKMIREYEQVIIEDRIEKERSKKKVKQDLLELKSVIKLQAWWRGTMIRREIGGFKMPKDKVDSKDSKGKGKGKDKRRGKKK

SEQ ID NO: 13549 - DNA, 1780 bp, Homo sapiens
  CDS (1144)..(1545)
tacagagatgaaaaatcatctggaattcggaaaagggaactaattccatggctggcagcgatcgcacccgtgcacggagccacatacatgtgcgacatacgtgtgcgctcacatgctataggtcccggccctcttgctggtcttgccaccatcttcctacccagcttggtgacctccctcatggccttgctcggtccaccccatgtgtgtgtggcacctgccctgggacacccctgcaggccctctttctctccaaggggcgcccatctcaatccccacttctgggaagcttgcgtaccccgtgatcacccacgctgattcctgctcttgggggtgtagctggcgcccagggttggggaggatggagagctggggaccagcacacctgggctgtggagcctgcagggagggggtggaagggggggacttgaagcccagcttctattcccagcctgcccaggggagccctttctcctggggggcctagtaggaccctgtgggcacgttggggaggagcctacaggcgcctcagctgcacgggagtgtgtttgcatccagcagtttgggcccccggccggtggcgtctccacctgcacgtgaggctgtgtgatgcttgcaggcatctcggtggggagggtggcagcgggtgcccctcaagaggaacaggaggagtgggagcactgccatccccgctggagcatcgtctttgccctccaccccctccttcctccctggcgagacatgtggccagggacacacaaggctctgggttctgtgtgggttcctctcacggatctgatttccacatgccagacacttccccttcttccagcccctccgtggggaggcagggagaggggctcccgaggcgggggttccctgggtctgaaaccctgaccccagtgaccctgaaggtgccatggcaagacagacagctcctcccaggctgggtttggggcaaagtggttgctattgggcaccctgatggaaggggagagacgggtcctggagtgaggtgggaggccaagtagaaacatggagggggtcccggtgtccccagaatccagatgtctgtctgtctctccacctgtgcataggtgtcctctgcctgtgtggcctggatggtgatctagccaagggtgcatgtggccacgtgaccatcaggcacatccggtgttcataagggtcccttgtgtgctggtgtttgtgttttgcagagggggtggtcatgctgggggaggtagggctgcaagaaggagtagctgtctgtgtgcacacatggagctgtctgcatcttttgtgcacctgcagttgtgtgctcaggatttcttggagcaaggctgggtgcaccttgtcatgcaatctgcacacacttgccaagtgccttccccacccagcaccatgcggggggtgccatgggggctggtggccacgtcctgtcctcatggagctcacactctagcaacacatatggggtttccatcaaagctctcctatcagctgggcgtggtggctcatacctgtaatcccagcactttgggaggctgaggtgggtggatcacctgaggtcaggagcttgagaccagcctggccaacatggtgaaaccccatctctactacaagtacagaaattaggcaggcatggtggtgtgcacctgtagtcccagctaccagggaggctgaggcaggaggattgcttgaattcaggaggcggaggttgcagcgagccgagattgtgccactgcactccagcgtgggcgacagagcaagactcattctc

SEQ ID NO: 13550 - protein, 134 aa, Homo sapiens [sequence omitted]

SEQ ID NO: 13551 - DNA, 1907 bp, Homo sapiens
  CDS (335)..(838)
tgccatcaccaaccctggctggcagccaccacgtgagagcacagccttcctaggcttcctcaaggagcaggttcagcgggatggagcagctgctagcctcgcccaagggggtctgctccctgaaaatgccctctttacgtctatccagtccttacaatctgagtctgagcccctgagccttatcgcaaatgtggtagctggctcatcctgccggggccctccactgcccagagacctgcagggctccaggcacagggctgaagtcgcctctgccctgcgctccttctccccgctgcaacccgggcaggcgcccacaggccgggctcacagcaccatgacaggctctggggtggatgccaggacagccagctccgggagcagcgtgtgggaaggacagctgcagagcctggtgctgtcagaatatgcatccacagagatgagcctgcatgccctctatatgcaccagctccacaagcagcaggcccaggctgaacctgagcggcatgtatggcaccgccgggagagtgatgagagtggagaaagcgcccctgatgaagggggagagggcgcccgggccccccagtctatccctcgctctgctagctatccctgtgcagcaccccggcctggagctcctgagaccaccgccctgcatgggggcttccagaggcgctacggtggcatcacagatcctggcacagtgcccagggttccctctcatttctctcggctgcctcttggagggtgggcagaagatgggcagtcggcatcaaggcaccctgagcccgtgcccgaagagggctcggaggatgagctaccccctcaggtgcacaaggtatagacaaggctgagcagggttcctgtggcccaggatggaggccaccgctgccctgccatcccgtctgcctgccatgggacggctcctctgagtgttccctggccccacgtgtgtggtgtttgtgtgtctgtgcctggccaagggaggtgccaacactgggcttgccacagccccaggagaggaatttggggcctaggaaccgagggcacacgggactctagcctcatccccaggacccccttggctcagagtgtggtgctagaaactggtccccagcccagccccagtactgccacctttacacctacccctgcaagtccccagagggccgcccacgatagaagctgccaagcagggagaacctgtgccaactgtggagtggggaggttgggcctggaccctcaacccctgcaaccttccctagccccctcaatagatgagcaggtcaggctgtggcccttacctcacccgcagttctcgcccagtgctgcagccggctcacctctctccgcttcttgcacatcactggcctgtgtgtgctgcttgctcctgttctgttcgcttgctcccgttccgttcggcttttgctttgcgttagggtgaagaccctagcgtccagctcccctcaacgctatattttgacactaaaaaagaaggtttctaaattgtaggagcaggatggaaatactttgctgcccttgccatcttttaggatgggcccccaggagactgaggtcttcctgggccctcattgctgcttatcgtaccccccatcacctgcacatgggacagaccgggctggagggtgaccttggctgtgtacgtcccagcaaaagagctctggcccgcatctcgctgtgccctgaagggggatgaagggcgatgcctcgcccgaggctttgggctgctgcactgcatgctgggactgctcctactctctgtcccacccctcacccagctgtggtccggctttgggagagtggtgaattgcgctgcccgaactcggagcggagcagggtagggaccgtgtacagcttgataacccttaataaaaagggagtttgaccag

SEQ ID NO: 13552 - protein, 168 aa, Homo sapiens; identical to SEQ ID NO: 11184

SEQ ID NO: 13553 - DNA, 1602 bp, Homo sapiens
aaaaaaaaaaaaaaatatatatatatatatatatatatgtatatgcacacacacatatattcgtatgtatatatatacacacatatacacatatgtatacatatatttatgaaaaggacatagaggtggcatatgatcgcatatgtatacatatatatatatatatatatatgccacttataatagctcaaaaaaattaaatggttagatgtaaacctagcaaaccatgcacaagacttctgtgctgaaaactgcacaatgctgatgaaggaaaccacagaatatttcaataagtggggagacatactgttttcatggatggaaaactcaacctagtagagctgtcacttctttccagattgacagacagttttaccacaattcctatcaaaatctcagcaagatttttttgtagatatagacaacataattctaaaatttatgtggaaaggctaaggaaccagaatagccaaaacaactttgagaaagaattaagtggaaggaatgaggttacctaatttcaagacttattgtatagctacagtcatcaagactgtggtgtggatggaggaacagacacttaggttcatgaaacagagtagagaacccagaaacaggcctacacagatatgcccagctgatttttttgacaaaggtacagaagcaagtcggggaaggtcagcctttcaacaaatgatgcgggggcacctgggcacccacaggcaaaacaatgaacagccaccaaaggctcacactttatacaaaaattaacttaaaatggatgatggacttaaatgtaaaatgtaaaacatagtattttttaaaatgggagaaaatctttgggatcactaggcaaagagttatgaggttaggacaaaagcatgaaccataaaaggaaaagttgacaaattagactttataaaaattaaacatttttgctatggaaagaacctgtgaagaggataaaaaagacaaactgcagagtaggagaaaaggtttgcaaaccacatgtccaaaaaaaggaatatcatctagaatgtatataatctctcaatactcagcagtaaagaacaaacaattcacttagaaaatgagccaaactattattaaaaagtcgaaaaacaacagatgctggcaaagctgcagagaaaaagaacatgtatacactgttggagggaatgtgaattagttaagccactgtggaaagtagtttaaagatttctcaaagaactgaaaacagaactgccatttgacccagcagtcccattaccggatatacacccaaaagaaaaaaaatcattctaccaaaaagacgcatgcacttgtatgtttatcacagcacaattcacaatagcaaagacatggactcaacctaggtgcccatcaacagtgaattggataaagaaaatgtgggacatatacaccatcgaagtactccgcagacgtaaaaaaagaaccaaatcatgtcctttgcaacaacatggatgcagctgtaggccattgtcctaagcaaattcagtatcccctgaatttaaaataaaagttgaaattaaaaagaaaagccactgactaaattaaataaatggatttttattcagtagg

SEQ ID NO: 13554 - DNA, 1757 bp, Homo sapiens
  CDS (4)..(456)
atcatggcgtcaatgcagaaacgactacagaaagaactgttggctttgcaaaatgacccacctcctggaatgaccttaagtgagaagagtgttcaaaattcaattacacagtggattgtagacatggaaggtgcaccaggtaccttatatgaaggggaaaaatttcaacttctatttaaatttagtagtcgatatccttttgactctcctcaggtcatgtttactggtgaaaatattcctgttcatcctcatgtttatagcaatggtcatatctgtttatccattctaacagaagactggtccccagcgctctcagtccaatcagtttgtcttagcattattagcatgctttccagctgcaaggaaaagagacgaccaccggataattctttttatgtgcgaacatgtaacaagaatccaaagaaaacaaaatggtggtatcatgatgatacttgttgatgccactgttatcatcctcctagcagaagatagtcctactgagaaaatgagcactttgatcattcagtctttgaactttaacctttgactggaagtgacctataggcaatgaagactacttccttttactgcatttttactcgtgtgcattctgggcgcatgttgatcgctggttcagtccaggcaactgacatgcttttattagtcatacagtattaatgcaggtgtcaggaaatgtcaaatataattccattttttatttttatttttttaagcttttggaaaagctccaggtcctcatgtattgtgcaataacaatgacttccttggcggttttggtacgttcattgccggcaatgggcgttgtaacaggaaaagttttcattaactcctgccattcaatgattaatgcatgatagggcctatgaaatgaacttactggttatagtgagaatataaataaagtgagggatccaacattactttaaaagtcaccccaactgtttatatttggattctatgcactgtgatcctaaggttaacagcatgaattaacatgcgtctttaaaggactgtaatgaaagatcattgcatatttattgaattgtttatatctactgtcaagttgttttgacatggaagattttcaagtaacattggcagagaggtacagtatgttatccctatggtgaaaataaattaatttgttgtatatagttcctcaatctctgaagtaaaggtatgagtaatatagggtatgaatggtttaatcaaggctttattttggaagtaagaaaaatggcagtgatgattaaattgctgcagtccataatttgggcttatttgtacattaaagattttttccaagtaagttacactctgttaacttcctgctagccatcagcatgagccctactgcctaaacactatttcatttatttatgtttggaaaccccgtaaacatttttgtttgcaatcttgtttcttttgttataagtcaagtttgaatgttacaatacttttattgaaacttttgttaagttttttcttgtaaattttctttacttgtgagtatcatcttgtcctttaatcctgtaccctaaaataagaaatacatttttgacagaggcttaatgttttaacaaaagagtgtggacatttttattttaaaatttaggcaaaaatcactatcaaatggttgcttatttgtctcacacagccatatagtttttcctggagggttttgttttgttgttgttgaaaagactttgcttacagctagatgaaactttctatag

SEQ ID NO: 13555 - protein, 151 aa, Homo sapiens
MASMQKRLQKELLALQNDPPPGMTLSEKSVQNSITQWIVDMEGAPGTLYEGEKFQLLFKFSSRYPFDSPQVMFTGENIPVHPHVYSNGHICLSILTEDWSPALSVQSVCLSIISMLSSCKEKRRPPDNSFYVRTCNKNPKKTKWWYHDDTC

SEQ ID NO: 13556 - DNA, 2172 bp, Homo sapiens
taaacaaatgaacaaaaaagagtgggagatgaaaataagtgtaacggggaaataatgcatgcaaggaaaaaggtttggagtagggggatttcagttttaaacagtatgatcagggtggtttcattgagaaggtgatagctgagcaaagacctggagtgtcccaggcagagagaacagcaagtgcaaaggcccttaggtggggactgtatctatcttttttggggtgtggggggacagggtgtgtcttgctctgttgcccaggctggagcacagtggtgcaatcacagctcactgcagccttgaactcctgggctcaagcgatcctcccatctcagtctcccaagtagctgggactacacttgtagctgggactacaagtgcgcttcattacgtctggctaattttttaatttctgtagagaaagaggtcttgctatgttgctcaggctggtctcaaactcctgggctcaagtgatcctcctgcctcagccttccaaagtgctgagattgtgcctggctgtctctgtcttctttggggaaaagcaaggccaatgtagctgaagcagagaggagagaaaggtgagggctgactgcatggagcctctgtggggcattgtgatggctttgaagtcaccttgcttgaggaggctgcctcagggcctttgcatatcctgatccttctgcctggcatacttttccctctgttctttgccatgttaccacatcctttagatctcaaaccaaatattactccttacacaaagccctgcctaacttcatacgctcatggtttataacactccataattacacaggcctttgtgtcataatttgatgactgtctgtcttctcctttgggtatgagaccttcaagggcaggggccagggctgtctgggtccctgctgttctcttctttgtgcacatgggtgggcggtggctaagcacagaggaagttctcagcacatatttgtgaatgaggagctaagattcacgcactcgcactgtgcctagctttgtgctaaatcctctatgcacctgatccaattggcgcttctcactggagtgtcggtcccataagggcagggagattcatccatcctggtcactgctgtgtctctagcacctggcacagtgcctgacacaaagtaggtgctcagtaaacatgttgggttttttgttgtttttgagataggttttcactttgtcacccagtctggagtgcagtggcacaaacacagctcaccgcagcctcgacctcctgggctcaagtgatcctcctacttcagctcccacaagtagctgggactgcagctatgtgccatcatgcctggctgatgtttatatgttttgtagagacgaggtttcaccatgttgcccaggctggtcttgaactcctgagttcaagcgatccacctgccttggcctcccaaagtgctgggattactggtatgaaccaccacgcccgacagtaaatatgttttgaatgaataaactctcataaatgaagtatgtgtgagtatcctggtttcccaagtaacaacagctgacttaactgctttctcaccagtactagttatggttcaaaacaccttccatggatttactcatttattcctcacaacagaggagtaaatcaagagggaggtgctgttattagcccgtcttacagatgagggaactgaggcacagagagatgaagccacctgccccaggtcacacagcaagtaaatagcaatgcctggattcaaactagggcagcatctgactctggactcgggttcttcaccgcagccctgaacaccccagagaggttcagagagcagaacgtgcccaagacgtcactgccgtttgaatccagacaggcttgcctcaccacccaggcttttaactgccaggaaggggagacgggttggtgtgggatatgatgaggtttctcttcaaataacccgatcaatcttttattctttaattgatagtaccccccacctttttcccttcttctcctcttttcctttttgcctttgttaaatgcccagacacgccacaataccaggcgttatcaataccagctcacattcctttccttatttaaaaaaaggactaactttctaactcatcacagacaccccttcccctttcctctctgctttcttttacgtgtccaccttatct

SEQ ID NO: 13557 - DNA, 2389 bp, Homo sapiens
  CDS (700)..(1593)
aggtgcggctactcccccggccccggcagacctgcgactggcccagtcgcccctggggccctttgccactcccttggcaaggagagccgagacctcagttcccggcggctcttgcggggcacaggtgagccctggctgcgcgcgcggcccctcctccccggcgcctcccagccagggccccagcccctatgatgaaagcgaagtgcacgactccttccagcagctcatccaggagcagagccagtgcacggcccaggaggggctggagctgcagcagagagagcgggaggtgacaggaagtagccagcagacactctggcggcccgagggcacccagagcacggccacactccgcatcctggccagcatgcccagccgcaccattggccgcagccgaggtgccatcatctcccagtactacaaccgcacggtgcagcttcggtgcaggagcagccggcccctgctcgggaactttgtccgctccgcctggcccagcctccgcctgtacgacctggagctggaccccacggccctggaggaggaggagaagcagagcctcctggcgaaggagctccagagcctggcagtggcacagcgggaccacatgcttcgcgggatgcccttaagcctggctgagaaacgcagcctgcggccttgcacagcctgggcctggcgctgctctccgccctgcaggccctgatgccgtggcgctacgccctgaagcgcatcgggggccagttcggctccagcgtgctctcctacttcctctttctcaagaccctgctggctttcaatgccctcctgctgctgctgctggtggccttcatcatgggccctcaggtcgccttcccacccgccctgccgggccctgcccccgtctgcacaggcctggagctcctcacaggcgcgggttgcttcacccacaccgtcatgtactacggccactacagtaacgccacgctgaaccagccgtgtggcagccccctggatggcagccagtgcacacccagggtgggtggcctgccctacaacatgcccctggcctacctctccactgtgggcgtgagcttctttatcacctgcatcaccctggtgtacagcatggctcactctttcggggagagctaccgggtgggcagcacctctggcatccacgccatcaccgtcttctgctcctgggactacaaggtgacgcagaagcgggcctcccgcctccagcaggacaatattcgcacccggctgaaggagctgctggccgagtggcagctgcggcacagccccaggagcgtgtgcgggaggctgcggcaggcggctgtgctggggcttgtgtggctgctgtgtctggggaccgcgctgggctgcgccgtggccgtccacgtcttctcggagttcatgatccagagtccagaggctgctggccaggaggctgtgctgctggtcctgcccctggtggttggcctcctcaacctgggggccccctacctgtgccgtgtcctggccgccctggagccgcatgactccccggtactggaggtgtacgtggccatctgcaggtgtgtggccgcacatgaaaacatcatttggtgctggagctgatactggttgtttagctccgggtgtatccaaacctacttaggatgaggccggtgtgaccaagcccctggtgggggccctggggtgcatcttctgtcccctgtacccgcccctcagcctttgcaccccgccctccgcaggaacctcatcctcaagctggccatcctggggacactgtgctaccactggctgggccgcagggtgggcgtcctgcagggccagtgctgggaggattttgtgggccaggagctgtaccggttcctggtgatggacttcgtcctcatgttgctggacacgctttttggggaactggtgtggaggtgagggggtcctgggcggactgggtggtgagtgttctccccttagtggccgggacgtgtggccgggaggttctcaggcctggacctttcccatcagggccctgtgtctccacccttcagaggaagactcaggaaatagaaccgaactcatttttagattggaaaggaaaacaggtttcaaagtgatgtgtatggccaggcatggtggctcatgcctgtaatcccagcactttgggaggctgaggtgagtggatcacctgaggtcaggagtttgagaccagcctggccagcatggcaaaaccccgtctctactaaaaatacaaaaattagcagggcgtggtggcgcacaccagtagtcccagctactcgggaggcagaggcatgagaatcgcttgaacctgggaagcggaggttgtagtgagctgagactgcgcctctgcactccagcccgggcgacagagcaagactgtgttgcc

SEQ ID NO: 13558 - protein, 298 aa, Homo sapiens
MPWRYALKRIGGQFGSSVLSYFLFLKTLLAFNALLLLLLVAFIMGPQVAFPPALPGPAPVCTGLELLTGAGCFTHTVMYYGHYSNATLNQPCGSPLDGSQCTPRVGGLPYNMPLAYLSTVGVSFFITCITLVYSMAHSFGESYRVGSTSGIHAITVFCSWDYKVTQKRASRLQQDNIRTRLKELLAEWQLRHSPRSVCGRLRQAAVLGLVWLLCLGTALGCAVAVHVFSEFMIQSPEAAGQEAVLLVLPLVVGLLNLGAPYLCRVLAALEPHDSPVLEVYVAICRCVAAHENIIWCWS

SEQ ID NO: 13559 - DNA, 3553 bp, Homo sapiens
  CDS (1699)..(2994)
aggggcgggcgcgccgctgcatccccatcctcgtcgtcgcccggcacagcgcgagcgggcgagcggcgcgggcggccggagcgccgaggcccggccatggccaccaccagcaccacgggctccaccctgctgcagcccctcagcaacgccgtgcagctgcccatcgaccaggtcaactttgtagtgtgccaactctttgccttgctagcagccatttggtttcgaacttatctacattcaagcaaaactagctcttttataagacatgtagttgctacccttttgggcctttatcttgcacttttttgctttggatggtatgccttacactttcttgtacaaagtggaatttcctactgtatcatgatcatcataggagtggagaacatgcacaattactgctttgtgctgatgaatcccctaatgattttggtaaaaatcattaagttaaggtggatacacatcttgtcatatgatcaaatggtttcgcgaaaaatcaataatcagacaacaagatgtgcgaactcgatattttacacgactctctttaccaattctgccccgaattacacttaaaacgactcaacagcttaacgttggcttgccacgcattacttgactgtaaaactctcactcttaccgaacttggccgtaacctgccaaccaaagcgagaacaaaacataacatcaaacgaatcgaccgattgttaggtaatcgtcacctccacaaagagcgactcgctgtataccgttggcatgctagctttatctgttcgggcaatacgatgcccattgtacttgttgactggtctgatattcgtgagcaaaaacgacttatggtattgcgagcttcagtcgcactacacggtcgttctgttactctttatgagaaagcgttcccgctttcagagcaatgttcaaagaaagctcatgaccaatttctagccgaccttgcgagcattctaccgagtaacaccacaccgctcattgtcagtgatgctggctttaaagtgccatggtataaatccgttgagaagctgggttggtactggttaagtcgagtaagaggaaaagtacaatatgcagacctaggagcggaaaactggaaacctatcagcaacttacatgatatgtcatctagtcactcaaagactttaggctataagaggctgactaaaagcaatccaatctcatgccaaattctattgtataaatctcgctctaaaggccgaaaaaatcagcgctcgacacggactcattgtcaccacccgtcacctaaaatctactcagcgtcggcaaaggagccatgggttctagcaactaacttacctgttgaaattcgaacacccaaacaacttgttaatatctattcgaagcgaatgcagattgaagaaaccttccgagacttgaaaagtcctgcctacggactaggcctacgccatagccgaacgagcagctcagagcgttttgatatcatgctgctaatcgccctgatgcttcaactaacatgttggcttgcgggcgttcatgctcagaaacaaggttgggacaagcacttccaggctaacacagtcagaaatcgaaacgtactctcaacagttcgcttaggcatggaagttttgcggcattctggctacacaataacaagggaagacttactcgtggctgcaaccctactagctcaaaatttattcacacatggttacgctttggggaaattatgaggggatctctcagtgctttgtgtttgctctgggatacctcacagtgtgccaagttactcgagtctatatctttgactatggacaatattctgctgatttttcaggcccaatgatgatcattactcagaagatcactagtttggcttgcgaaattcatgatgggatgtttcggaaggatgaagaactgacttcctcacagagggatttagctgtaaggcgcatgccaagcttactggagtatttgagttacaactgtaacttcatggggatcctggcaggcccactttgctcttacaaagactacattactttcattgaaggcagatcataccatatcacacaatctggtgaaaatggaaaagaagagacacagtatgaaagaacagagccatctccaaatactgcggttgttcagaagctcttagtttgtgggctgtccttgttatttcacttgaccatctgtacaacattacctgtggagtacaacattgatgagcattttcaagctacagcttcgtggccaacaaagattatctatctgtatatctctcttttggctgccagacccaaatactattttgcatggacgctagctgatgccattaataatgctgcaggctttggtttcagagggtatgacgaaaatggagcagctcgctgggacttaatttccaatttgagaattcaacaaatagagatgtcaacaagtttcaagatgtttcttgataattggaatattcagacagctctttggctcaaaagggtgtgttatgaacgaacctccttcagtccaactatccagacgttcattctctctgccatttggcacggggtatacccaggatattatctaacgtttctaacaggggtgttaatgacattagcagcaagagctatgagaaataactttagacattatttcattgaaccttcccaactgaaattattttatgatgttataacatggatagtaactcaagtagcaataagttacacagttgtgccatttgtgcttctttctataaaaccatcactcacgttttacagctcctggtattattgcctgcacattcttggtatcttagtattattgttgttgccagtgaaaaaaactcaaagaagaaagaatacacatgaaaacattcagctctcacaatccagaaagtttgatgaaggagaaaattctttgggacagaacagtttttctacaacaaacaatgtttgcaatcagaatcaagaaatagcctcgagacattcatcactaaagcagtgatcgggaaggctctgagggctgtttttttttttgatgttaacagaaaccaatcttagcaccttttcaaggggtttgagtttgttggaaaagcagttaactggggggaaatggacagttatagataaggaatttcctgtacaccagattggaaatggagtgaaacaagccctcccatgccatgtccccgtgggccacgccttatgtaagaatatttccatatttcagtgggcactcccaacctcagcacttgtccgtagggtcacacgcgtgccctgttgctgaatgtatgttgcgtatcccaaggcactgaagaggtggaaaaataatcgtgtcaatctggatgatagagagaaattaacttttccaaatgaatgtcttgccttaaaccctctatttcctaaaatattgttcctaaatggtattttcaagtgtaatattgtgagaacgctactgcagtagttgatgttgtgtgctgtaaaggattttaggaggaatttgaaacaggatatttaagagtgtggatatttttaaaatgcaataaacatctcagtatttg

SEQ ID NO: 13560 - protein, 432 aa, Homo sapiens
MVTLWGNYEGISQCFVFALGYLTVCQVTRVYIFDYGQYSADFSGPMMIITQKITSLACEIHDGMFRKDEELTSSQRDLAVRRMPSLLEYLSYNCNFMGILAGPLCSYKDYITFIEGRSYHITQSGENGKEETQYERTEPSPNTAVVQKLLVCGLSLLFHLTICTTLPVEYNIDEHFQATASWPTKIIYLYISLLAARPKYYFAWTLADAINNAAGFGFRGYDENGAARWDLISNLRIQQIEMSTSFKMFLDNWNIQTALWLKRVCYERTSFSPTIQTFILSAIWHGVYPGYYLTFLTGVLMTLAARAMRNNFRHYFIEPSQLKLFYDVITWIVTQVAISYTVVPFVLLSIKPSLTFYSSWYYCLHILGILVLLLLPVKKTQRRKNTHENIQLSQSRKFDEGENSLGQNSFSTTNNVCNQNQEIASRHSSLKQ

SEQ ID NO: 13561 - DNA, 1999 bp, Homo sapiens
ctttctttataatatttgtgatgatggaaacaaaagccttggaacaattgcactttaagtattacacagaagtaaaagaactacagaaaatgtacagcaagacaagtgcccggaagttcactgatccttcagaaggaaatgcgctttactgattgcaaagccttcagaatattggagtgtggtgtgtttgctcatctgatgctttttagttcagttacatgtaacatcacattttttttatcacgtgaaagatgttagatttgtttgcttataaattttttaccactcccacataaaatgctcatagtttgggagaggaaagagggaagattctctcttcttttaacagagagatgattgctctgtatacccattgcttcctccctgaggctgtcccaaagtgaacactgatggagtggtcaaaatcataagattgtagcaagccaaagatacgtatgtgacggaagcacataagcaataagcagaaaaccagaagtgcatgctgtgatgcctgtgactccttcatcccgctcagtgccatgtcctcttttgtgatcttccagaaagctccaggattcatttgagttccacatccaagtaacagatgaattatattcatgttgtaatgcattttgtggagtttacaaaaccggtgtctgttaaaactttggaaaatgtcttagaaaacgttggtgcttggtgatgctttatttgtttaattatcaagaacaaattatggcaatgctagtttctgcttaaccaaaatactctgtgtatatattatacatatataaatacatgggattgtgtatgtctatatgtgtttaaagcttactatgtcttcattttggcttccatgatcttttatacatggaattccttaagattgagaatatgtcactgagtgaatgatacctgcagacagtcagttgatatatgtagagttcagaatgactgttttctcatgtgcctttggccatgattctcaacactgattgtataacagaattttggggggagcttttaaaaaataatgactgagtctcccaccagaccgattacatcattctcttgtggcgggacccaagtagaattgccttttcttttaaagttctccagatggagctaatatgcaacaaagttgaaaaccactgatcctgggggtgtcttgttaattttgaagtaaaagtgtacagaagacgtagtgtatgagaaagggccatttttaagacagttacctgttgtgctgctgttacaatatataatgaaaccaagtcaggggagtgaatttatcaatcttttgatgtaaagtaaaaacgtagttcacacttcaggagagaacttcatagcacaatgtctttctataagatatttttaatgatttagtattttacaacatttgtttaccatattttgatataccatttttttctatctgcccagttttattaaaaaaactatatattattttctaaagaaacaatcatatttttatacaaaattatgttttcaggtaacgaaatagatgtagggtacagtggaacataagcagtgttacccctggctgggagtcagtattatacaacaaatggtgagctggaacatgccctgtctgtgctgtccctcctgtgctgggtcgcggatatgtaggcaacattgccttatcacgctaggttcacctgacactttaaaaggaaaaaaagttccatagagttctgtggtcacaaaattgttttgcttttatcaaatactttaatagaaccaaagttgcagatattggaatgtatggaagtatctcagtctctgcataagaggattaaagtatgaaaggatcatttaatgactgttttacttataagtcattaagtaatccaccatttcttatggatgatgcttaagcctggtgaggtttgtactctaaggagcccagatcataatgcagtgcatttccttagcccttagagtttcttgcaaacatttaaaaaaagacatatttaag

SEQ ID NO: 13562 - DNA, 2047 bp, Homo sapiens
aaaattaataataaatgtctaagctattctgctgccacaatgtggccttactgctccctgatatacggtgcctttctcctcccttgtttcattctcttcactttcttcttccagatgctcgtacacccagtccccctacctgggaaatcacaacctcattaagagctcagctatcttaagtcctatttcctcatgaagtctaactcaactgctgcaacttccgagtagcaattaaatcagctccagcataacctcttttttcccttgtctcctgtgttagtattatgtcactaactttgtggggacaaggtcatataacactctagagcatatcagaatgacagaacatcttcagctataacctacctagataccaatatttgcccccaaggcaatgtttgatttttattccccattatgagaaacaaactcacccctccaaacccaaagaatggactcagagacctggagaacagcgaaagtgagacttttaatgatgctcttgtaatattgggtgtctggcagcaggcacacccagcacagtttcaacaagcaatttatcccctagtgcacaggtgcctcccccagttcctcatgggctgtgtattatggggtcacaatcttcccggacattgcctattggtcgttgggtaggggcttcgggtgttttctttagggttgtcctgctgcgttttgttgcagcccacaatgcattgcaatcctagttagctcaggggctcttcaggtatttgacttatgacttaagtagctggggcaggctgataagaacaggcaacacgagctattttgcagctagtaaactttcatcttagactaaacttctttggttcaggtgagggtaactaagggggttgggggggggtgacaagcaggcattggctgtccaagcaggagcctactgtatcctgttttcttctgtagtctactgacctaagttgatttaaggcactttgtcttggaaatggaccactgtatacatttccttcacccagctaagttttaaattttttttgtagaggtggggtctcactctgttgcccaagctgctcttgaactcttggcctcaagtggtcctcctgcctcagcctcccagagtgcttggattacaggcatgagccacctgttcggccatcattgtttaaacaaaaaagtttagaggactcccaactaggaactattgcaataatctgggccagatattattctagctgggttgaaacaatgaccaaaataaaaaggaggaagatggggaaaggctgggaggtgtacaaccgacaggacttgcaagtaagcagatctggtggcaaaggtcagagaaaaccaaagaagactcccaggtctccaggtgatgaggctagacatggtacatggtagtgctggcagacagagtgggagtgcataccactacacagttggcccacacactctggctgcaaagggccagggaccgtgtggtctccagcttgctgcctgaatttggacaacccactcactctcactgcctgtcttcacaatttgaaaatgaagctaaaacaaacccgtctctagcttgttttgtttttgtttttttctgagatgaagtcttcctctatcacccaggttggagtgcagtggtgcaatcttggctttctgcaacctccgactcccaggttctagcgattctcctgcctcagcctcccaagtagctgggattcaggtgcccaccaccatgcccagctaatttttttgtatttttttcagtaaagatggggtttcaccatgttggctaggttggtctcaaactcgtgaccacaggtaatcctagcactttgggaggccgaggcgggcggatcacctgaggtcaggagttcaagaccagcctgatcaacatggagaaaccccgtctctgctaaaaatacaaaattggccgggcgtggtggcacatgcctgtgatcccagctacgcgggaggctgaggcaggaacttgcggtgagccgagattgcgccattgcactccagcctgggaacaagagctaaactccatctc

SEQ ID NO: 13563 - DNA, 1738 bp, Homo sapiens
  CDS (54)..(1541)
tcccagcgtgcgcggggcccgcgggccgggccggggtgacctgggctgcagccatggaagaacagagggaggccctgaggaagatcatcaaaacactggctgtgaagaatgaagaaattcagagctttatctactccctgaaacagatgctgctgaacgtggaggcgaactcggcgaaggtgcaggaggacctcgaagcagagttccagtccctcttctccctcctggaggagctgaaagaaggcatgcttatgaagataaaacaggaccgtgccagccgtacctacgagctgcagaaccagctggctgcctgcacgcgggccctggagagctccgaggagcttctggagacagccaaccagactctgcaggccatggacagcgaggactttcctcaggctgccaagcaaatcaaagatggagtgaccatggcccctgccttccggctatcattgaaagcgaaggtcagtgacaacatgagtcacctcatggtggacttcgcgcaagagcggcagatgctacaggcactcaagttcctgcctgtgcccagcgcacccgtgatcgacctggctgagtccctggtggcagataactgtgtgaccctggtgtggcgcatgccggatgaggacagcaagattgaccactacgtgctggagtaccggcggaccaacttcgagggcccgccccgcctcaaggaggaccagccctggatggtcatcgagggcatccggcagacagagtacaccctgacaggtctcaagtttgacatgaaatacatgaacttccgtgtgaaggcctgtaacaaggcagttgcaggagagttctctgagccggtgactctggagacaccagcgttcatgttccgcctggatgcgtccacatcccaccagaacctgcgggtggatgatctctccgtggagtgggacgctatgggcaggaaggtgcaggatatcaaggctcgcgagaaagatggcaaggggcggacggcgtctcccatcaactccccagccagaggtactccatctcccaagaggatgccctcaggtcgtgggggacgggaccgcttcaccgctgagtcctacacagttctgggggacacgctgatcgacggcggggagcattactgggaggtgcgctacgagccggacagcaaggcgttcggcgtgggcgtggcctaccgcagcctgggccgcttcgagcaactgggcaagacggccgcctcctggtgcctgcacgtcaacaattggctgcaggtcagcttcacggccaagcacgccaacaaggtcaaggtgctggacgcccccgtgcccgactgcctgggtgtgcactgtgacttccaccaaggcctcctgtccttctacaatgcccgcaccaaacaagtgctgcacactttcaagaccaggttcacacagccgctgctgcctgctttcacggtatggtgtggcagcttccaggtgacgacaggcctgcaggtccccagtgctgtgcgctgcctgcaaaagcgaggcagtgctaccagcagctccaacaccagcctcacctaggcccccaggcacccacccagctggggtgtttttgggggagtcgccgccatgcccaggctgctggagccaggcaccctcctctgtcacttgctgcttggagccttaactccagatgggggggtcaccaagagggagtgggcaccctggcgggccctctccccacctcacctcttaataaaggtcagacactggcc

SEQ ID NO: 13564 - protein, 496 aa, Homo sapiens [sequence omitted]

SEQ ID NO: 13565 - DNA, 1366 bp, Homo sapiens
ttccaaaatgattccattccattctagaaatttgaagtatgtaacctgaaatccttaataaaatttggatttaattttataaaatgtactggtgatattttgggtgtttttttttaaatgaatgtatatactttttttttgaagagtggagagtagtgatgtctagagggagctattttgtgctgaggccactatgttctgtaaatatataattttaagagcaacctcacaatccctgctaagtggagtttattatttgaagactaaaatggaattccatagttcctgataggttatattctgagttattattctgagttatctacaaacatttttgagatttgtctttacactctgattgtagtttccagcagcccacgcacactgccaagtaagtctcattttttcctgttagaaatggtgaaatatcatataatcacttataaagaaaactgatatgaaaaaattttagagttgtttgctttatggtcactcaagtagggtaagtgttccacaaattccacaagttgatagtttaacatggatgtctgaaagccacatatataatttcttaggattcttaaattagtaaatctagcttactgaagcagtattagcatcactattttagattgcaaaaataccttaattgtgtggaactggcttgtagagtggtacttaagaaaaatgggattctacctctatttctgttttagcacacttaatcaggaaaggatatattaactttcataaaaatatttttgttgtgtgaataggttaatgatatggtaaggcccctaaaataactgaattaattgtttattgtaattgtaggccattcccattattaaaaataaagacaaaacttgaagtaactgaaaatcttatcgtgctatgtagaaatattgaactaatattcaaatatttgaatgctttggtttcagggattggtttaaaattggagtccttttttatgggttagtctcacaaaaatttaagcctttatatttttgactttaaatcaaaacaaatgttattttaaatgtacagaatagattggtagtgcagaagagtgtaagttcttcataggagctttagaaaagagaaatatgtgctaattcagtttttttttaatctgcactgtacatatatacttggtaattatgagcttgattttgtttttggaaatatgtgttcataatttaggtaatttgctacttaaagcactaagtctctgatacctgaaaagtacatgtaaatggtgatggtgaaataatactgcagttaacttaatagatgtatactggtgatttttgtatgctggattaaaactccagatattaaaatataacctggataaaaagcc

SEQ ID NO: 13566 - DNA, 1813 bp, Homo sapiens
  CDS (130)..(1416)
gttgcctgaggtgggtggcggtggaagttaagggagtcaggggctatcgctcctcgagactcgcagtcgcggccactgcagtcacttcgccagttagcccttagggtaggagtcgcgccggcagcagccatgagcggcggcgtgtacgggggagatgaagttggagcccttgtttttgacattggatcctatactgtgagagctggttatgctggtgaggactgccccaaggtggattttcctacagctattggtatggtggtagaaagagatgacggaagcacattaatggaaatagatggcgataaaggcaaacaaggcggtcccacctactacatagatactaatgctctgcgtgttccgagggagaatatggaggccatttcacctctaaaaaatgggatggttgaagactgggatagtttccaagctattttggatcatacctacaaaatgcatgtcaaatcagaagccagtctccatcctgttctcatgtcagaggcaccgtggaatactagagcaaagagagagaaactgacagagttaatgtttgaacactacaacatccctgccttcttcctttgcaaaactgcagttttgacagcatttgctaatggtcgttctactgggctgattttggacagtggagccactcataccactgcaattccagtccacgatggctatgtccttcaacaaggcattgtgaaatcccctcttgctggagactttattactatgcagtgcagagaactcttccaagaaatgaatattgaattggttcctccatatatgattgcatcaaaagaagctgttcgtgaaggatctccagcaaactggaaaagaaaagagaagttgcctcaggttacgaggtcttggcacaattatatgtgtaattgtgttatccaggattttcaagcttcggtacttcaagtgtcagattcaacttatgatgaacaagtggctgcacagatgccaactgttcattatgaattccccaatggctacaattgtgattttggtgcagagcggctaaagattccagaaggattatttgacccttccaatgtaaaggggttatcaggaaacacaatgttaggagtcagtcatgttgtcaccacaagtgttgggatgtgtgatattgatatcagaccaggtctctatggcagtgtaatagtggcaggaggaaacacactaatacagagttttactgacaggttgaatagagagctgtctcagaaaactcctccaagtatgcggttgaaattgattgcaaataatacaacagtggaacggaggtttagctcatggattggcggctccattctagcctctttgggtacctttcaacagatgtggatttccaagcaagaatatgaagaaggagggaagcagtgtgtagaaagaaaatgcccttgagaaagagttcccaagcttctaccttccttttgtcaccttacgtttcatagctttagtatactcaggaaaagaatgaccatcttttgtagaatgtttatacatttttgcatatttcaatttccacttaaattttttaaagctttaactggctctataaattaagtttgtgctttccttgaaatgcacttattcttattacaagcattttataattttgtataaatgtctattttctctaaatattttgctttcagtaaaatgctttccaactctgtttagtgtattaattaccagtggattggtagaactgctttttattgactagtaaaagttactgcctatgctttttaccttaggcttacagaattaaataaaaattagccattccagaaat

SEQ ID NO: 13567 - protein, 429 aa, Homo sapiens
MSGGVYGGDEVGALVFDIGSYTVRAGYAGEDCPKVDFPTAIGMVVERDDGSTLMEIDGDKGKQGGPTYYIDTNALRVPRENMEAISPLKNGMVEDWDSFQAILDHTYKMHVKSEASLHPVLMSEAPWNTRAKREKLTELMFEHYNIPAFFLCKTAVLTAFANGRSTGLILDSGATHTTAIPVHDGYVLQQGIVKSPLAGDFITMQCRELFQEMNIELVPPYMIASKEAVREGSPANWKRKEKLPQVTRSWHNYMCNCVIQDFQASVLQVSDSTYDEQVAAQMPTVHYEFPNGYNCDFGAERLKIPEGLFDPSNVKGLSGNTMLGVSHVVTTSVGMCDIDIRPGLYGSVIVAGGNTLIQSFTDRLNRELSQKTPPSMRLKLIANNTTVERRFSSWIGGSILASLGTFQQMWISKQEYEEGGKQCVERKCP

SEQ ID NO: 13568 - DNA, 1629 bp, Homo sapiens
  CDS (995)..(1348)
gatgaactgttttcagcccgggtcaccccagccctggggtggaggcccattgaggatggccgagcaggggcgggcatccaggcaggtccagcagtcctggcgggctgaggagaaggaggtcagtgctcagggagacatccgcagagggacctggcaggcagagctccagaagggagggaactgcccagacagaaagctccagaaggctgcctgagggcctctgaggcctccggagtcaggcgccatgcatgtggaaggtggactcttcagcatgggtgggaccctagggggctgtggacccccggcccctgggacccacaggtgggagacaggagttccaaccgccagggggagagtcctggaggatcctgggctgttggcagccacccagcagggcccgtcctgggagtggggctggactcttcctgcaggaaaggctgggctggacctgctctgagaggcttcagaaccagccacacgaagaccaaagtgaagagcaaggagctgaactccacgcagaacacagcgcagcgtcctttaaaggaaggccaaaaacaacccaacaaaaatgccaggtgatcaaagcggtcacagcacaatgtccacatccaacgagaaattgctgctacgtccagacgcagggaaaggtggccgtgggaacgtgagtcagcagcaacaggcccagaagggcagccacggtggacttgtcagacgtggaccctgaaatgacaatcacagcatgatttcaggcaggagcctgaaatggtacagctttggacatcggtttggcaaattcttttagagagaaacacacaccttccctaggacccagcaactccactcctaataaccaagtgaaatggaaggagttgtcctcagcaaaacgtgtgtgcggaagttcacagtcactttctcggtgataaccaagagctggaaaccactgcaacacccaccagcaggtgaacggattaacacactgggctagggccacacaatgagatgctccgtggcaacacaaaatgaaccgtggacacacactgcacggcggatgaatatgcagacatcaggccacgtgaagggagccaggccccgaggcgccacgctttgtgattcagggtggtccctctgcgcccaagacccggctgcctcctcctcttcctggctgcagggagtgcttgtgtctgaagaacgccaggctggtgtccccagagggcggctggaggggctcagaaaccattttcaccttctgtctcctccatgtctgcactgtttgggaaagaaagcacgcagccaaagagcgcaaagaggctcagaggaggcccgggtgccctggagagacgctgcgtcctgacgacacagcatccctgtcccgcagcggagatttcccagatgaaggattccccggcgggagacagggccctgcacacaggtcctctgccacgctgctcaccatgcctgtgtgttatctccccatgaaaagtcacctaggccgagcatggtggctcacgcctgtaatcccagcactttgggaggtggaggcgtgcggatcatctgagatcaggagtttgagaccatcctgagtaacatggtgaaaccccgtctctaggaagaatacaaaaattaactggg

SEQ ID NO: 13569 - protein, 118 aa, Homo sapiens
MRCSVATQNEPWTHTARRMNMQTSGHVKGARPRGATLCDSGWSLCAQDPAASSSSWLQGVLVSEERQAGVPRGRLEGLRNHFHLLSPPCLHCLGKKARSQRAQRGSEEARVPWRDAAS

SEQ ID NO: 13570 - DNA, 2222 bp, Homo sapiens
ctgcccaaagcacatcttcttcctatgctactctctttctgtgcttatgtgaaaccaccattttctctctggcaactcagcagccaagagaaatggctgagtcttcaaggatgaatgtgacgtggtacccaaggtcatttgatgtttctacccttaacacctgtttgtcacccttcttgcacttgagcaaaactaaactgctggtccctgtacttcccatttttcccatttatttctttcccaatagttccaccaattagaaatgtcctaattcttcccactcccttattcttcagatacatttttaagtttaggctcaaatgccacctccccagagtttcctctgatacctctttgcagctagaaatgatctgtctttctgggaactcccatagcttcatactcatatctatctatactgcttatggcacttctcactgtctactgtaccttttaactctttatatatgtctcctccgatgcgagtgtaagctccctgagattagttaacgaatcttttaagttcccgtattagatctgtcgcagtgccttgaatatacaagcattcattcagtagatatatgaatgaatggattaatgggtgatttcttatatttctttaaaatacatagaaataaagttagtaattaggtaacctatgataacataataatgtggacgcctggggaaaccctcctcatgtttgtcatcttctacctctgccattttcctgcaattccgcttcctacttaggcagttcagagagaacaattctaataaaaacactcctctcctattaacaaaaaatgatgcagtacccatttttcgtatcctgcttttcttatattggagtaaaaaggacagggtatagacatgaatgatgatattctgcctggcctgtcatttcttacctggaaacatttacttaagagtttctgttactttttgttcagatggggatttgctaaaggttctgggaagctaataattgaattattagaaaaacatttcagaataggaagtaaatgataaacttatattctttattatttagtacaaaaatacagattcccagtagatatccacaagcaatattagcagggcttctgtttctaagtgaccacagactgaccctttctaggctttaacattgtaaataatcctataaacagtttgattttttaagatgattcttgatttgaagagacaggctttacataagccttcattccttcaaaaggtcctgacaaaatacttgggtttttttctctttttttcattctggtatgctttgcagcatttcagctgctttggtggggacacagataacccctcttccagctcttaaaattctttatctttttcttggcaaaaccagaattaagagtgtaagatagattccatgtgtgcttatataggtccctgcacagattggacttgaaccaaaattaagtccaaagaacatatgtttagaccaacttcatggaagtggaagatcctgtgctcttgaacttattttaattcttataatttgcacctatataaacaaagctcctactgtattcttctcttcatcaaccttttgtggtgatgggttgccttttctacgagcatttggaaggagtgatcaaataccgaaattgaactttctaaaacctacgcatagcatgcgtttaaattctattatataaagccccaagtgctttaccttctaaaacatgcttctctataggtgcaaagttataagatatttagaagaaaacatccatcagaatcttctggagaatatggtcagagtcttaaacaggcccagtgctgagttctttgtccacttagtcacacatcttttgtgggaatgggaaaggaaggagacagccaaactctgacaaaggcttttccttatagaataacccaaagcctaggtgagggttgatatataatgtcccatgatttaatatatgtggtttgggggaaaggacaagaaaaaactataattccacatataagaaggcagttgcccatttacaagttccagttatgtgtgtaaaacagaaaaattaagtaccaaacctattaggaaatttttttaaaaagtggatttaacttaaattactgtgtacttgaggttggctttggatatggattttctaaaaagtgatgttttattgtttatcatctaatggctgtaaactgtagtactagaataaaaaaaatggaaaatc

SEQ ID NO: 13571 - DNA, 1683 bp, Homo sapiens
tttgaacatgtaatgctactattagtaaaaataagtgtaattaatgtaaagttgtgtaacgattactaaacttgtatacttgaaatgattgaatagttcctagaagtcatttgtttctcttttatttaaaatgtagcaagtttctaattttaaatacatacatattaagagatgcatttacatttttttatttttagttattatggatacataatagttgtacatatttatggggtacatgtagtattttgatagaagcatacaatgtgtgatgatcaaatcagggtaattcagagatccgtcacttcaaacatttatcatttatttgtgttaggaacattttaatttcattcttttagttattctgaattatataataaattatagtcaccctattgtgctgttggacactagaatttattctatctaactgtgtttttgtacctgttaacctttccctctttgtccctccctccctgctccccttcccagcctcttaaccatcattgagagagatgcctatgtaaatcttaagattttcaaaaggagcacacacatttggtaaagcactctaactgtaatgcacggtacacacaatgcgcattttctctttccttgctgtaacctctggtctctcaggtccctgcagacctttatatatatgtatatgtatatgtatatccttccagatacatataaacacacatgccaccctttaaaaacacaaacggtagcttattttatacactgttctatgctttgctcttttcatgtaatatacttgaaggtatataatcagtaagtactgtagctctgcctccttctttttaatataacattccattctgtggatgcaccataatttatttagtctagcttatgttgattgctctgctctgggctgtcaaagcctcctgagtacagcagaggcacacacaatacgtggatttgggtgtgtacgtgcgtgtgtggattaggggagtggcactggcttagatggcaaagattggcagctgagggactgtttgctcccttttattcctgaccctacaaccagctgcttgtcccttggcactctggcatcagatgtggtgtgaggatattccacctgttctttgagctggtccagtgttgctggagagctctgcttgctgccttggtctgcagtggcagctgtgctttcctacaagcccaacttcatatattctgtggttttgggttttgatgtttcctagtttaatcaaggatgggcatttctgtttccattttgtgttatttttagttatccatggaaagatacaaacagaactatctttaatattaaaattacaagtttccaggaatcagttctgaaattattttgcatctttgaagtgtcttaaattttaaaaattggtcttggccaggtgcggtggctcacgcctgtaatcccagcacttcggaggccaaggcaggcagatcacggggtcaggagatcgagaccatcctggtgaacactgtgaaaccccgtctctactaaaaaaatacaaaaaaactagccgggtgtggtggtgggtgcctgtagtcccagctactcaggaggctgaggcagaagaatggcatgaatccggggggcggagcttgcgctgagccgagatcaagccactgcactccagcctgggcaacagagcgagactctgtctc

SEQ ID NO: 13572 - DNA, 1515 bp, Homo sapiens
  CDS (287)..(1222)
actagcggagccgcgagggagaggccgcggccccttcccgttgcctgcggccaccggccggcattcagagcccctcgcctggcgctaaatttaaaaacgtaacacgagcagcaggctggtctcggaaacgaaacgaaattcggtccctgggcctcctcccgggcgctgccggtccctcagcgcgccgcgccacccggaacagacccttctcccgccattttcggcggggctgggagactgaggcccgcggcgctgagcctgcggcgccccggaagaggcgggcggcatggccgctggcgtggactgcggggacggggttggcgcccggcagcacgtgttcctggtttcagaatatttaaaagatgcttcaaagaagatgaaaaatgggctaatgtttgtaaaactggttaacccctgttcaggagaaggagccatttacttgttcaatatgtgtctacagcagctgcttgaagtaaaagttttcaaggaaaaacaccattcttggtttataaatcaatcagttcaatcaggaggtcttctccattttgccacacctgtggatcctctatttctgcttctccactacctcataaaggctgataaggaggggaagtttcagccccttgatcaagttgtggtggataacgtgtttccaaattgcatcttgttgctgaaacttcctggacttgagaagttacttcatcatgtgacagaggaaaaaggtaatccagaaatagacaacaagaaatattacaagtacagcaaagagaagacattaaagtggctggaaaaaaaggttaatcaaactgtggcagcattaaaaaccaataatgtgaatgtcagttcccgggtacagtcaactgcatttttctctggtgaccaagcttccactgacaaggaagaggattatattcgttatgcccatggtctgatatctgactacatccctaaagaattaagtgatgacttatctaaatacttaaagcttccagaaccttcagcctcattgccaaatcctccatcaaagaaaataaagttatcagatgagcctgtagaagcaaaagaagattacactaagtttaatactaaagatttgaagactgaaaagaaaaatagcaaaatgactgcagctcagaaggctttggctaaagttgacaagagtggaatgaaaagtattgataccttttttggggtaaaaaataaaaaaaaaattggaaaggtttgaaactttgaaaataaaatctagcaaaaatatttgctttttacatgtttcagtttgtccttcctgactgttaatgactacctttggttgggggaaggaagaggccaatttcatgttctcttaaacatttctttgcatttggtttttgtgttcctgaacaaaatatgggaaagtgtctaacttcatggctatggccttttggagtctcatctgacataatgaaaagtaatcacttgaagagaattaacatatagcatcatgattttctcaataaactgatgtgtgacaatgtt

SEQ ID NO: 13573 - protein, 312 aa, Homo sapiens
MAAGVDCGDGVGARQHVFLVSEYLKDASKKMKNGLMFVKLVNPCSGEGAIYLFNMCLQQLLEVKVFKEKHHSWFINQSVQSGGLLHFATPVDPLFLLLHYLIKADKEGKFQPLDQVVVDNVFPNCILLLKLPGLEKLLHHVTEEKGNPEIDNKKYYKYSKEKTLKWLEKKVNQTVAALKTNNVNVSSRVQSTAFFSGDQASTDKEEDYIRYAHGLISDYIPKELSDDLSKYLKLPEPSASLPNPPSKKIKLSDEPVEAKEDYTKFNTKDLKTEKKNSKMTAAQKALAKVDKSGMKSIDTFFGVKNKKKIGKV

SEQ ID NO: 13574 - DNA, 2839 bp, Homo sapiens
  CDS (810)..(1436)
agaagccgggagggaacgagggcggaagcggaccagggccaggcttgtgttcgcagccttgccggggctggggttccgatgtggtccccggagcgggaggccgaggccccagccgggggagacccggcgggccttctgccccccgagtgggaggaggacgaggagcgcatgtccttcctgttctccgctttcaagaggagtcgcgaggtgaacagcaccgactgggacagcaagatgggcttctgggcgccgttggtgctgagccacagccgccgccagggggtggtgcgcctgcgtctgcgggacttgcaggaggcctttcagcgcaaggggagcgtcccgctggggctggccacggtgctgcaggacctgctgcgtcgaggggagctgcagcgggagtcagacttcatggccagtgtagacagcagctggatctcctggggggttggggtcttcctgctgaagcctctcaagtggactctttctaacatgctgggagataataaggttccagctgaggaggtccttgtcgctgtggagctgttgaaggaaaaggctgaggaggtgtatcgtctgtatcagaactcgcccctctcctcccaccccgtggtggccctgtcagagctcagcaccctctgtgctaactcctgcccagatgagaggaccttctacttggtgttgctgcagctgcagaaggagaagagggtcacagtcctcgagcagaacggggagaagattgtgaagtttgcccgagggccacgtgccaaggtctctccagtcaatgacgtagacttggggtgtaccagctgatgcagagtgaacagcttctctcacgcaaagtggagtccttatcccaggaagcagagaggtgtaaagaagaagcccgccgggcatgccgagcaggaaagaagcagctggcactgaggtctctcaaggccaagcaacggacagagaagcgcatcgaggccttgcatgccaagctggacactgttcaaggcatcctggaccggatctatgcctcccagacagatcagatggtttttaacgcctaccaggctggggtaggagcactcaaactctccatgaaggatgtcacagtggagaaggcagagagcctcgtggatcagatccaagagctctgtgacacccaggatgaagtttctcagactctggctggtggggtaacaaatggcttagattttgacagtgaagaactggagaaggaattggacatcctccttcaggataccaccaaagaacctttggatctgcctgacaacccccgcaataggcattttaccaacagcgtgcctaaccctaggatctcagatgctgaacttgaagctgaacttgagaaactgtccttatcagagggaggtttggtcccaagcagtaaatctccaaaaaggcaattggaaccgactctaaagccattgtaggaccctcaagtgaaggaccctcatgtaaaagagagaccaggcttgctgggtgtgtacatagttatttaaacaagaaactctcagaatgtgtttggaagaggagaaaggagaaccactgattttatctggatgctactacttactacaggacagatagaatttctggaagcgatgctccaaaggcttgctcccagctgtatcatggacctgccttctcatctttatagtgccacgatttatacagtcctgtgtctgacctgtcatttcatagcctgcagttcttgccattggcacacttagatttgtcttcacccaccagcttcgttccagcccatgaaggggaaagatttgcagctttgccaaatctgaatcagttcccactcccccctgcggttttttagaggggtttatcctgtcgctaatgtcagttaaatagcttattcctgtcccacttgatttcactggtaagaatgagaatgaaatacttaaaggttttatttgaggggacttagctgccattttatggaaaaacatgtagtataaaaggtttttctccagggtcatttgacagaattctccaggtgttcagagaaagaggtcgccccaagtggcccagagtcgtgacagtccggaggggctggtgtggccggtgggcgctgcctcttcatctgatggagccaggaggtccgccggtgggggaaaggcttcttccgaggcttctgcactcgcctgggaagaggcccagtcactacaggaccctgagatgtccagaccccttatgcaaagaggcaaaattgttgccttggccccatcatggagtaacttaaaaatacatatctatcttccagaacaagccacacaacaacacacctcccctccttgagcctggcacacagcaccgggctctctgaatttggaaagtgtttcattttgtggcctactgctcggggcaggggggctgagccaggatgtgcaatagaagcaggggttgtcccctctgccagatctgtggggagctgcccaggccacccgtgcacctgtcctgcttcctgcagtccccactccctgcctcctttgagggactgggggacttggggtagggggacagacgggaaagggtctgaatgctctggcaatggcgagaagaagcgatcgccacactgccactctgctgcccagccaccaggatttctgcctggagccctttgccctgtccctgctgcctgaggtggcgtagagcagaggagaagaatttgctccaggccaggagcacaaatcgttgttcaatgaatttctctccaactcgaccttggtaaacggaaatgttgggggtgaagagaaacaatcactatttttttcttttttatctggtaaataattaaaagaaaaaccgaacactt

SEQ ID NO: 13575 - protein, 209 aa, Homo sapiens
MQSEQLLSRKVESLSQEAERCKEEARRACRAGKKQLALRSLKAKQRTEKRIEALHAKLDTVQGILDRIYASQTDQMVFNAYQAGVGALKLSMKDVTVEKAESLVDQIQELCDTQDEVSQTLAGGVTNGLDFDSEELEKELDILLQDTTKEPLDLPDNPRNRHFTNSVPNPRISDAELEAELEKLSLSEGGLVPSSKSPKRQLEPTLKPL

SEQ ID NO: 13576 - DNA, 1589 bp, Homo sapiens
  CDS (102)..(1310)
gggtactgccgtcgccgccgcccaggccggggaggggtgcgttagtgtcaggaagcgggctgcgccgaggtcgtagcggaaccagctggcgaccccgcagaatgaaccacaagagcaagaagcgcatccgcgaggccaagcggagtgcgcggccggagctcaaggactcgctggattggacccggcacaactactacgagagcttctcgctgagcccggcggccgtggcggataacgtggaaagggcagatgctttacagctgtctgtggaagaatttgtggagcggtatgaaagaccttacaagcccgtggttttgttgaatgcgcaagagggctggtctgcgcaggagaaatggactctggagcgcctaaaaaggaaatatcggaaccagaagttcaagtgtggtgaggataacgatggctactcagtgaagatgaagatgaaatactacatcgagtacatggagagcactcgagatgatagtcccctttacatctttgacagcggctatggtgaacaccctaaaagaaggaaacttttggaagactacaaggtgccaaagtttttcactgatgaccttttccagtatgctggggagaagcgcaggcccccttacaggtggtttgtgatggggccaccacgctccggaactgggattcacatcgaccctctgggaaccagtgcctggaatgccttagttcagggccacaagcgctggtgcctgtttcctaccagcactcccagggaactcatcaaagtgacccgagacgaaggagggaaccagcaagacgaagctattacctggtttaatgttatttatccccggacacagcttccaacctggccacctgaattcaaacccctggaaatcttacaaaaaccaggagagactgtctttgtaccaggaggctggtggcatgttgtcctcaatctcgacactactatcgccatcacccaaaattttgccagcagcaccaacttccctgtggtatggcacaagacggtaagagggagaccaaagttatcaaggaaatggtataggattttgaagcaagagcaccccgagttggcagtcctcgcagactcggttgaccttcaggagtccacagggatagcttccgacagctccagcgactcttccagctcctccagctccagttcgtcagactccgactcagagtgcgagtctggatccgagggcgatgggacagtgcaccgcaggaagaagaggaggacgtgcagcatggtgggaaacggggacaccacctcccaggacgactgtgtcagcaaagagcgcagctcctccaggtgacccagcaaggctgttgtctgtatggaaggacacgctcgcggcaagggcagggcctggggagggtggcctgtccagtcctgcagacaaggggaggcctgacagagcccaagaatgaggacaccctcggcacgggaacccattcacttagcgtttgctccagtagctttccctctgctaccaatgcagataaacgcggcttgttttactcaggcaagagaatgtgaatagtgccaagaaaatcctttacattatttaataaaaattgaatccattttc

SEQ ID NO: 13577 - protein, 403 aa, Homo sapiens [sequence omitted]

SEQ ID NO: 13578 - DNA, 1334 bp, Homo sapiens
  CDS (34)..(381)
aatgtgtttgtatgtttttttttttaggagatcatgaatcagacagataaaaatcaacaagaaatcccatcataccttaatgatgaaccaccagaaggttcaatgaaagatcacccacagcagcagccaggcatgttgtcccgtgtgactgggggtatcttcagtgttacaaagggagctgttggtgccaccattggtggtgtggcttggattggtggaaagagtctggaagtgaccaaaacagctgttacaactgtgccttccatgggaatagggctggtgaaagggggtgtctctgctgtggctggaggtgttacagctgttgggtctgctgttgtaaacaaagtgcccttaacaggaaagaagaaagacaaatctgactgaaatatagagatacacttgcgctccacagcactgtaatgccagtggcattgaattgctaaattatggactacaaccaagtcaactgttttggacgtttatcttctaaactgctgtgttgaaagtattgatgactggctttcatctaaaaagaagagaccaatacgagcacagtatatgaaggtttctcatacttaagttccaggtttttatctggtaaaatgttacacttactcggttgtaactgaagatatggtatgtttgaatatttactataagtctttcagtttgactaaaaatgtgaaagttgaatttagtagatgatcttcacagttccatatgtataatgtgccaggtaactcacctgccccttaagaagggaaccttgaattacataagccgtacctttgatgtgcctaatagtttcagatgtcttagttttttataaccatagttgattaggccaagaggcattcatttcttatttaagctggcaaaattagcaggaattagagaagtttaaaaagataaatggttttatgataatgttaaccatcttttgttagtaaatatgcgttctattagtttaatcattgatgccttacaaaagaaaacatcttttctaataccctgaatatgtgctgttcttagaatcatctatggattcttttaaaggttgtttgtgaaattagttttccctttttagaatctcaggagtagtggggtaaagacatttcctgctgtcagtggataagacagagcttgttaactgttttggcagtagttaaaatcaaattgtacacttctcagcctgggttcatgcttcatcattaatacacctcacagtgcctaaggaacatttacttactggtcagaaggtattttggaagagtttcatattaaggaggaacaaataataattttaagttcttaaaaattacctaaaacacccc

SEQ ID NO: 13579 - protein, 116 aa, Homo sapiens
MNQTDKNQQEIPSYLNDEPPEGSMKDHPQQQPGMLSRVTGGIFSVTKGAVGATIGGVAWIGGKSLEVTKTAVTTVPSMGIGLVKGGVSAVAGGVTAVGSAVVNKVPLTGKKKDKSD

SEQ ID NO: 13580 - DNA, 1843 bp, Homo sapiens
acaaaaatggttgctgtagccctgcctgattttgtacacgtttgtctaagaattgagttggcacttaagctcacttctcaaagtataataatattgtatgacctcatttgtcctttcacaaaagcacttgcatcatttccttaagtcatctgctccctgacatgttttcttccctaataaacaacttctgtctgttattcctgccaatgatgttctgtttctgatgccatatcctattgagcgtgcccctgtactaatatcattgaaaatattgatatgcaaacacatttccttttcatccccattctatctttccctttggggacagattgctttccaaaagctcatgaacaaatatttggaatgctggtacctttggggcagaggtaagggtgggcggggtgggggcagaaaggtaatgcttaatgcagataactcttctaatcagtgtccatggcaatatgaacgcttgaagaaaactcagtgacatatcttgctcagtagtttcttattcctgaagaaccacaagcataaagtgaggcctcagtgctggtgctcttggagtatggggaatgtgcaaatatttaactgttttgtatgctgcacattgcaggtctgctcatgtgcattctccctttgtcttcctttgtcatatgtgtttttgcttttttgaaagtgcagtctttattgtaccctcctccagcttgtagcaaattagaatgcttagcatttatgttcattcattattgtatttgccatgtaaaatttttattaccttagacaagcttataagctgttactacataacttatcttactgtaactcttttatttcccccgacgttgtaatttgtttgtgatgtatattgtgaaattgtattctatgttaatttaatcagcacaattcactgacatgctggactgacatgctggctgctgtttcaaagtgtaaagtttgtgtagggctgttgggacaactgcaactctgttgtcaaggtactgtgctttggttcctatagcaacactgggtgtggcccttgaattgctaagggcatttaatacatcctggagcaaattttaactgcagattttctttgtagaaattctatgtataatgcaggtacctacttggcccatggctggtaactatttgggcaattagaaaaaaagaaaaaaacataaaaactagtgtctattgctgctttgaatatgtttgaaagtctgaaaatgtaaatagtttatcaaaaaaaaatcttgtacagtccagtgtaaagtttttaaatgaccttaagggttgccatcacatctttctcacactctcctcttgataataataataaaaagtttgctaaggattaaagaaatgggaaaaataaaaaaaatctcttcaaatttacaggaatgaatcattgttcttagctttgttgcatacacaaacttcttggattttgttgtgcagtattgacgtgagataaagctcaacattgaataatctttcagtggtacttttcaaagtcttcccctcctctgcctcataattaagggaaaagacaaaattgaaagacacactgtctttatctatcctggtgtatgttggcaccttagctactttttttttttcctttttgcacaaggtgctttcctgatatgttcaacatgccatctttgggtgataatgtatatgccgtgatggggctcaggccccttaggggagtgtctataagaactgcctatttatgctcatttacctcaagactgtcctctctaccctaatctagttgtcatcactccatcttttgtactgctgttgacacttacaaattaaagataaattttgttttatg

SEQ ID NO: 13581 - DNA, 3125 bp, Homo sapiens
aaccggcgccagccatggcctctggggcgggcggaagctggggtcgctccccaccgcagagcgcagtcccgacgccctgggtcaccttcctgcagcccctctcgtgggccgtcccacctgcgcccccgcagccaggccgcgtgaaggaagacctgctggaactgatgatgctgcagaacgcgcagatgcaccagctgctgctgagtcgcctggtggctggagcgctgcagccccggcctgcctcgccctgccctcaggtctacctggaggttccacaggaagagcctgaggaggaggaggaggagatggacgtgcgggagaaagggcctttggtgtttcaccaccactacttgccctatttgatgccctccccgggtgccctgctgccctggccagcccccttcttccccacccctgcttgtcagccctacttgcaggacgtgcccagcattcagcactgtcctgcctccagggaaagggaggtgagagctgtgcccccacccccaccccccagtgccacagggactgtgggtgctgatgtacccccggcttcagactactatgatgccgagagcctcctatgaggacagaccccggccctgggaactgcaccagcttcctgctctggatacagccccggagccgcctcctgcacctctcttgtcgactccccggtgcccatggctggcagtccttctcactccctcaacctcagccaggccctcttctcctgggggaaatcagtccctaccccacgccaatgagttcctggacgggccggatctgtgctgttgtgtaagagctccctagagcaccacccaggcccttgaagccacgtcagcccgcctctgccccactgcttcctgcctggagcagggggaggcctgggaacagagcccccaccctctctccctcacccctctctctgggatgatgaggtctccttccagcctagtaggagcaagaggggagggggggattccttctgctttccacagctttgaaggcccctttgaggtggctggaggggcccagagtggtcggggagagactttgctgggcagcgcccctgagcagagtcagttcgctgggccccccacccctcatcccaggaagcagctctgttggcagaaaggagaggtcagagctttgtcctgctgtggccaggagtggcctgaggtctcctggggccaggtgggaacagtgtgtcctctgccccctgggccagggtgtgtttcccccaccctccctcagtagcaatgagctactcgggccagatgggggcctgttgcatgggctgggaggcccctgtgaaggagagggtggggagggaggcatctagggagaggggtcccccatggtggctcccctccctggccattgttatcccaggaggagacactgtgggcacagggctaagtccaggtgtttgtattcgggctagaaaaggcaatgtcccaagtctctgctgcctgtcacagtccttcagccagggctggacctcaaccctgaggagtcacactgagttccagtgaccaccgtggtggtggccatgccactcatggttgctatggccggaaggcctggggcagcctcctccaagccgctcgcaccccgtaggtgcccatccgctgctggcgcaagtgctggccgaagatgaagcagagcaggacagatgtcacgaacagggacagcaacaccgacaccaccgtgactatgatgaccatctggctgtccgacacaggctctggggagggagggggcaagggtcttagacgtcctgtgatcccagttaccagggaccaaaagggagtggaagtccacccccaacccagacccccagaccccgccgcccgctcatgcatccagcagtcaccccagttgcagagatgagtggtgaatggtgtctgcattaaaattattatctggaaaaaaggtggcccagggctcaggctaccagctggacttctgtgtggctgtgagggcagatgtccccttgtcagcagccatgggaccagtgtgtagctgctggacaccgtggcctggagggtggcatggtcccagccaagccccttcttgggcagagctgagtgaacttcatgccaggctccctgtgtgccggccgtccagagtcaccaagcagcagagctctggggacctcagtgggggcagtcaggccaaacttctcattgtggaggggagccaaggccagggagagccgtcaaggtcatggggctggatggtggccgaggaactagttgacctctcccgacctctggagcagttgaggtccaagctggggacttggaaagaacttcagggaagagggagagtaagagggaagcctcaggatgaagggtgggctcctgggtgtttgcttcccaagtgggactcaagatttttcttcccccgaggggtgaaagtgacttctcactcccaactccatccacggatcccccctcaccatagatctccaacatcttcggggctgagtgtttgtgaaagatgttgccaccgcgagacatcaagtccagcacagccaggcaggagaagttgcggtggccatcctctctgtcagccgtgctgttgaatgtggctgtggcctcctgcggagcaggggctgccttcccgaaggtctcatagtgcagagtctcattgccacggaacaggaagagggtgaggctgtccaggggctccacggtgggcaccctgcactcaatggtgaaggacttgcccacagccaccaaagtgggttgcagtgtcaggatgacctgccttggaggctctgcaggggacaaaggagggaggtctggtcaggatgggggtgcagtcccagcagcctccccctggccagggccatctcctgtcaccatggtgttccacggttggggaggaggtggcctggccggctccagtgcagagaggaagagggcggcagttgaggatggaggctggactgtgtggtagttttacagacatgatggtttccggtgaccaggtgtctacaaggacaaggttcagaaattgtacagccaactggaaagatataaaagtttgggtctgtctcctctccttcagaaatgaaatataaatttcaaacattaaacagttgggtgatcacgttg

SEQ ID NO: 13582 - DNA, 1711 bp, Homo sapiens
  CDS (312)..(1148)
atgctgggggaggggctggcggcctcgacggcagctgcggaactaggccgagggacaaaggctaagtttttccatggtttggactggatatcggtggaactctggtcaagctggtatattttgaacccaaagacatcactgctgaagaagaagaggaagaagtggaaagtcttaaaagcattcggaagtacctgacctccaatgtggcttatgggtctacaggcattcgggacgtgcacctcgagctgaaggacctgactctgtgtggacgcaaaggcaaactgcactttatacgctttcccactcatgacatgcctgcttttattcaaatgggcagagataaaaacttctcgagtctccacactgtcttttgtgccactggaggtggagcgtacaaatttgagcaggattttctcacaataggtgatcttcagctttgcaaactggatgaactagattgcttgatcaaaggaattttatacattgactcagtcggattcaatggacggtcacagtgctattactttgaaaaccctgctgattctgaaaagtgtcagaagttaccatttgatttgaaaaatccgtatcctctgcttctggtgaacattggctcaggggttagcatcttagcagtatattccaaagataattacaaacgggtcacaggtactagtcttggaggaggaactttttttggtctctgctgtcttcttactggctgtaccacttttgaagaagctcttgaaatggcatctcgtggagatagcaccaaagtggataaactagtacgagatatttatggaggggactatgaggggtttggactgccaggctgggctgtggcttcaagctttggaaacaagatgagcaaggagaagcgagaggctgtcagtaaagaggacctggccagagcgactttgatcaccatcaccaacaacattggctcaatagcaagaatgtgtgcccttaatgaaaacattaaccaggtggtatttgttggaaatttcttgagaattaatacgatcgccatgcggcttttggcatatgctttggattattggtccaaggggcagttgaaagcactcttttcggaacacgagggttattttggagctgttggagcactccttgagctgttgaagatcccgtgatcattacctggggaggggttcctgaaaccttccacaatgggatctgtggactttcatttttttaagagacttactcaatttcatgactgtactacctgaaacaaagtgagaaaggacaggtgtatttttctaagtcatcaagataaatccttaagaattcagtctaaattggcaaccaggaaggaaaaatatattaaaaacaacaaaaaagtggcacatgtccaggcagtgtgaggatttgctgtatataagttgcctgctttgtatttttgaaatctctgcatcactcattggaagtgcttctgaagagagctgctctgtgttcagttgactggttttgtgtcctgtttgaacttgctgaatgtaaggcaggctactatgcgttataatctaatcacaatttgtcaatatggtcttggcaatcatctgtgcattactctggtttgcaataagcctgtgtgtgaacttactgtaaaacatgttttatttcaaggttctgcgaaattaattgggcaggttaattgtgtacctgaaacttaacaagcagtttttggaagggc

SEQ ID NO: 13583 - protein, 279 aa, Homo sapiens
MPAFIQMGRDKNFSSLHTVFCATGGGAYKFEQDFLTIGDLQLCKLDELDCLIKGILYIDSVGFNGRSQCYYFENPADSEKCQKLPFDLKNPYPLLLVNIGSGVSILAVYSKDNYKRVTGTSLGGGTFFGLCCLLTGCTTFEEALEMASRGDSTKVDKLVRDIYGGDYEGFGLPGWAVASSFGNKMSKEKREAVSKEDLARATLITITNNIGSIARMCALNENINQVVFVGNFLRINTIAMRLLAYALDYWSKGQLKALFSEHEGYFGAVGALLELLKIP

SEQ ID NO: 13584 - DNA, 1370 bp, Homo sapiens
  CDS (9)..(581)
agcccaacatggcgatgcacaacaaggcggcgccgccgcagatcccggacacccggcgggagctggcggagctcgtgaagcggaagcaggagctggcggaaacattggcaaatttggagcgacagatctatgcttttgagggaagctacctggaagacactcagatgtatggcaatattattcgtggctgggatcggtatctgaccaaccaaaaaaactccaatagcaaaaatgatcgaaggaaccggaagtttaaggaagctgagcggctcttcagtaaatcctcggttacctcagcagctgcagtaagtgcattggcaggagttcaggaccagctcattgaaaagagggagccaggaagtgggacggaaagtgacacttctccagacttccacaatcaggaaaatgagcccagccaggaggaccctgaggatctggatggatctgtgcagggagtgaaacctcagaaggctgcttcttctacttcctcagggagtcaccacagcagccataaaaagcgaaagaataaaaaccggcacaggattgatctgaagttaaacaaaaaaccacgagctgactattagaagacacattagtgcagaagcttccaggctgtagagccctgcttcccttctctgacctcacaaagataaacatccttcacctgagttcgtggccatccacctctgctctcccagacccagtgcctgtgactttgagtagtttgttctaaatgtggtgacaaacaagtcatttctgtaagacattgggtcttactttatgtcatttttagtaacagaactgcaggaagatgaagacaatgttgtaatcccagcaagttgctaactgtgcgtttctcccttcttagaatgaatgtctcccccaaaactggctggcaccagcttcatctgtgatacccttcaagaaatgttctctggttttgttttatgctgaaagtagaacacaagtcacatttcagatggaggctgtaaatatctggcattttcttatattgttttatgttttcttgtttttctcttgttgtttttatcttattttctttggggttttttttgtaatgcctttgtacagctcatactttcctgctgacatatctgatcatctctttcatgcagttgccaatattcataactgaaaataatctggtttatcataagtaaaatgggaaacttgcctctgttttttgcaaggggaggtaaagagtgtttagtaattacctatcttaaatctttctgagttggtagtagattcatgttcaaggaacaggaaaaatggaaaaacataagtttaaatcagttctttttaaataactttttattcttttgtataaataaaatttcacaggcttc

SEQ ID NO: 13585 - protein, 191 aa, Homo sapiens
MAMHNKAAPPQIPDTRRELAELVKRKQELAETLANLERQIYAFEGSYLEDTQMYGNIIRGWDRYLTNQKNSNSKNDRRNRKFKEAERLFSKSSVTSAAAVSALAGVQDQLIEKREPGSGTESDTSPDFHNQENEPSQEDPEDLDGSVQGVKPQKAASSTSSGSHHSSHKKRKNKNRHRIDLKLNKKPRADY

SEQ ID NO: 13586 - DNA, 986 bp, Homo sapiens
  CDS (13)..(579)
aaaaaaaagctgatgaggtcggaaaaaagggagaagaaaccgggaccctctctgagaggcaacagaagcagcaattgtttcagcgaaaaaagcagcaagggagggagtgaaggaaaaaagcaaaaaagggggcgacacgcaagtgcctgtaggggtgaaaggagcagggaccggcgatctagggggggatcagctacaaaagaaactgtcactgggagcggtgcggccaaggaggaagcagtgctgccaggctctgctccagggcacagctggctggcggctgccctgtccgcagcaaaggggcacaggccggggaccgcgagaggtggcaaagtggcaccgggcgccgaggctgctgagcgctcgccgagacggcgaccggactggctgccccggaactgcggcgactctccctactcagaacttggcctacgtttcccaggactctccccatctccagaggcccccacaaaaccgggaaaggaaggaaaggacagcggcggcagcagctcaatgagtgcctacagcagaaagcctgtgatttggccaggctctatgggaggaatgaggttgttagcctgatgcaggcaaacagggctgggggagccacaaatcttcaataaacgtggggagggctcccccacgttgcctctactttatcaattaactgagtagctctcctgacttttaatgtcatttgttaaaatacagttctgtcatatgttaagcagctaaattttctgaaactgcataagtgaaaatcttacaacaggcttatgaatatatttaagcaacatctttttaacctgcaaaatctgttctaacatgtaattgcagataactttgactttcttctgaatattttatctttccttggcttttcccttgcttccccttttgccaatctcaacacccaagttgaagactttgtttttaaaatggtttgtcctgatgcttttgtctaattaaaacactttcaaaacagg

SEQ ID NO: 13587 - protein, 189 aa, Homo sapiens
MRSEKREKKPGPSLRGNRSSNCFSEKSSKGGSEGKKQKRGRHASACRGERSRDRRSRGGSATKETVTGSGAAKEEAVLPGSAPGHSWLAAALSAAKGHRPGTARGGKVAPGAEAAERSPRRRPDWLPRNCGDSPYSELGLRFPGLSPSPEAPTKPGKEGKDSGGSSSMSAYSRKPVIWPGSMGGMRLLA

SEQ ID NO: 13588 - DNA, 1799 bp, Homo sapiens
  CDS (404)..(787)
ctgtcagttcatcaaactcatcctccgtccagttttgtttccttgctggctaggagttgtgatcctttggaggagaagaggcgtttttcagcctttttcagctggtttctctccgtcttcatggatttatctacctttggtctttgatgttggtgacctttggatggggttttggtatggatgtcctttttgttgatgttgacactgttcttttctgtttgttagttttcccttttctgtttgttagttttccttctaacagtcaggcccctctgctacaggtctgctggaggtccactccagaccctgtttgcatgggtatcaccagcagaggctgcagaacagcaaagattgctgcctgttcctttctctggaagctttgtcccagaggggcacccgccagatgccagctggagctctcctgtgtgaggtcctgactgtcccccagtcaggaggcacgggggtcagggacccacttgagggggcagtctgtcccttagcagagctcaagctctgtgcggggagatccactgctctattcagagccagcaggcaggaatgtttaagtctgctgaagctgcacccacagccaccccttcccccaggtgttctgtcccagggagatgggagttttatctgtaagcccctgactggggctgctgcctttctttcagagatgccctgcccagagaggaggaatctagagatgcagtctggctacagcggctttctctggctgcagtgggctccacccagttcgaacttcctggcagctttgtttatgctgtgaggggaaaactgcttattcacgcttcagtaatgacagatgcccctctcccaaccaagctcgagtgtcccgggtggacttcagactgctgtgctggctgcaagaatttcaagtcagtggatcttagcttgctgggttccttgggggtgggatccattgaggtagaccacttggctccctggcttcagccccgtttccaggggaatgaacggttctgtcttgctggcattccaggcaccactggggtatgaaaagaaacccctgaagctagctcgatgtctgcccaaacggctgcccagttttgtgcaggaaaccagggccctggtggcataggcaccagaaggaatctcctgttctgagggttgtgaagactgtgggaaaagtgtagtatctcggctggaatgcatagcccctcacagcttcccttggctaggggagggagttccctggctccttgtacttcccggatgaggcgacgcccaaccctgcttctgctcgccctccgtggtctgcacccactgtctaaccagtcctaatgagatgagctaggtacctcagttggagatgcagaaatcacccaccttctgcattgatcttgctgggagctgcagaccagagctgttcctattcagccatcttgccagccctttgacttgctatatttttcatgccgactgtccctgtgcagacaggatacattcttgttcactcttccctgttgataggaggttttgtaggttttgtgtgcagtgtttctattcctgctgatttcttagttgaaaactggtgtaatacctcaagggatgtagacaaatactcaaggttattttataataaactgtgatgtactaaaatatttaaatgtagttttaagaaaaatgaatgcaggttgagcatccccaatctgaaaatccaaaatcctaaatgcttcaaaatctgaaacttgatgagcacccaaatgccgctcaaaggcaatgctcattataagtataatgaaactattccaaaattt

SEQ ID NO: 13589 - protein, 128 aa, Homo sapiens [sequence omitted]

SEQ ID NO: 13590 - DNA, 1825 bp, Homo sapiens
cttttaaatggggaaggtgctctgaagatttgtgccgaaacgccctctcctcgagatttaactaattgttctctcctctctctggctgttggacgcgcacctttccggaggatgggggaggtaaccgaggtcctgagccggtacctgaacttgggtgaacagagaacctcaacttttgctttctagcactcgaccgcacccagcaaggcgtccgcttactcagtggttcttagtgtttggagtgcttaagaataactggtggtgtttgatttcaccaagtacattcgggcagatcttagttcttgggggggtggggctggaatctgcgggtgtgacctccactctaggtctgtgctgtccagccaagtagccattggccacatgtggctgctaagcatgtgaaatacagctaatcaagactgaaatattaaaacacacaccagttttagaagactaggaaaaaagcaaacttttattagatgtttatgttgattatatgttggaaagataatattttggatgtgtcaaacgttaaaaattaatttcacccatttttgtgacgtggctactaaggaatttcaggtgatgcttgtggctcctcacacggtttctattggacagtgctgctgcaggtgattcgaaggcgggtgggtgcaggaacccagctgagagttcagaaattagtgtaactttggagacaagtgtctgtgggggaaggagcctccggacgtggagatacaactcttgctcctaacatttatcgagtctttaattaatgccctgggtaactataaggttggaactgtaattgtcaccatattgatgatgagaaacttgagaaaggataagtgacttgtctaaaatcacacagtaaaacctcaaatcaaacccaggccctctggctccagactctaaattatactctgaatgatactcactgattgtccgaggacacaaagagtgtcgaggcactatctgctgggtgtctgcagaaccttactgttctaaagcaaaacattttacccctggacaagagcagcaaaggtggcgttcggccctccttggctctcatttgactgttcaaagccaggtgcttttctttcttgggtcagaacgtattttcagcagcattttgaagcacccctggcgtgcactgcacagggaaaccaggaccacattggtgtgctgtgtcctccttaccaactggctcttggagaaggtgagacagaagtagctgagactccattcctgagatcttcacttaacaactcctgcagcttgtgcagagccttactagaaatactgaaggcagaagtccctggaaaatagggcccataactaattagtaatttgtttttgagtaatttgttaccgttatttgagcacattctgcagtccaggcattttgctaaactcttacatggcaggcagtctctcacgcaatttcaatgcctactttttttctccatcttatttttgaaaaatgttaaaaaaaacacaggaaggtcgagttatacagttaatactcacataaagaccacttaagggccgggtctggtggctcacgcctgtaatcccagcactttgggaggccgaggttggcggatcacgaggtcaggagttggagaccagcctggtcaatatggtgaaaccctgtctctactgaaaatacaaaaattagctaggcctggtggcgtgcatctgtagtcccagctactcgggaggctgacgcagaagaaatgcttgaacccgggaggcggaggttgcagtgagccaagtcgcaccactgcactccagcctgggtgacagagcaagactctgtctc

SEQ ID NO: 13591 - DNA, 1651 bp, Homo sapiens
aataaatgcattattatgactgtgacagtgactaatccccctatgaccccaaagccctgattaaatcaagagattccttttttaaaaatcaaaataaaattgttacaacatagccatagttactaaaagatgagttaggtggatttttattatgtcaactagttgtacatggctttttaaaagttaatgattattttgtaattagaaaaaaatagtacgtaccagggtaggaatttgggaaaatacagaaccgaggagaaaacagaagtctttgcagtagatacagggtgtctcctgaccaagtgaaggattcaggggcggggggtgaatattgcttgacattacccacctatggcatgtgttggatgtcgtgtgattgaaagggggatgcattcccctgtatgcttggaccacagttcagtattcatgtggaataacttgcagtgcttaaaatgacaacaggcattcatcacagttatggctcttgcttatgaaggctgtgtcaacttggaagagatttctggggtagacagattttgttcctgtgctggagtctgccacctgctggaggactctgaggccaaaattgcctgtgcagagttgtatagaaaatgcgtctggaggctgggcaaggtggcttatgcctataatcccagcactttgagaggccgaggcgggtggatcagtagaggctaggagtttgagaccagcctggccgatatcgtgaaaccccatctttaccaaaaaatacaaaaattagcccagtgtggtggcaggcacctgtaatcccagctattagggaggctgaggcaggagaattgtgtgaacccaggaggcagaggttgcagtgagcctagattgtgccactgcctgggcaacagtgagatcctgtctacaaaaaaaaaaaaaaaaaaaaagtgcatctggatttttttatacaaccttaaaccaccttctttagctttaggcgtctgcggttgcccttggatctgttctcaatcctcagtgtgtgtggcagcatgtggtcatagagagctgggcaaagttcactttctctttgctgacagtctcaccttttctcactgggaagctgcacaggagcctttgggctggttcagcccagaggcccctgttctcctgccttcctggcattctctgctccccttctgcatggcacccctctactcctgccaggttagaatggagcagaggcctttgaacaagatgacatttgtagacaacctgatccatcaggatgtggagagatctggacaaatggcaaataatttggggttgaattatggcccagagaagtaagcaaatgaaaaactaaacaattataaatgtatctgggaagcaaaggtattcataatatgtcccatggccagctgcgagcagtatttaactagacatgctgttgtcaatattgaacatgaatcaagccaaatactgatatagctattgagagaaggttggcaggaagaaatcatgggtgagggtatgtgggagtgataatcttagctatagattttaggtaaaactgattctgaaagctttctttgaaacaaatttataatttttcttctacatgtttctagcacaaggactcaatttttttttggttataatgttcattaaaacatatgccttc

SEQ ID NO: 13592 - DNA, 2041 bp, Homo sapiens
  CDS (193)..(1509)
aaagggccggctgtttcggcggccgcgggatgcccctgcgctgaccgccaggggcaggtgcccgcccgcgtagacgcacccggcctgaccccgcgcaaccatgtaaacggcgccagcaggcggacgctggcttctccgcctgggacccctccgccccgacccgggccccgcggccctcgatgaggacacaccatgctgaccggggtgaccgacggtattttctgttgcctgctgggcacgccccccaacgctgtggggccactggagagcgtcgagtccagcgatggctacacctttgtagaggtcaagcccggccgcgtgctgcgggtgaagcatgcaggacccgccccagccgctgccccacctccaccatcatccgcatcctcggatgcagcccagggggacctctccggcttggtccgctgtcagcgccggatcaccgtgtaccgcaatgggcggttgctggtggaaaacctgggccgagcccctcgagccgaccccctacacgggcagaatggctctggggagccgccggccgccctggaggtggagctggcagatccggcgggcagcgatggccgcttggcccccggcagcgcaggcagcggcagcggcagtggcagtggtgggcggcggcggcgagccaggcgccccaagaggaccatccatattgactgtgagaagcgcatcactagctgcaaaggcgcccaggccgacgtggtgctctttttcatccatggtgtcggcggttccctggccatctggaaggagcagctggacttctttgtgcgcctaggctatgaggtggtggctcctgacctggccggccacggggccagctctgcgccccaggtggccgcagcctacaccttctatgcgctggctgaggacatgcgagcaatcttcaagcgctatgccaagaagcgaaatgtgctcattggccattcctacggtgtctctttctgcacattcctggcacatgagtacccagacctagtgcacaaggtgatcatgatcaatggcgggggccctacggcgctggagcccagcttctgctcaatcttcaacatgcccacctgcgtcctgcactgcttgtcgccctgcctggcctggagcttcctcaaggccggcttcgcccgccaaggagccaaggagaagcagctgttaaaggagggcaacgctttcaacgtgtcatccttcgtactccgggccatgatgagcggccagtactggcccgagggcgacgaggtctaccacgccgagctcaccgtgcccgtcctgcttgtccacggcatgcacgataagtttgtgccggtggaggaagaccagcgcatggccgagatcctgctcctggcattcctgaagctcatcgacgagggcagccacatggtgatgctggaatgccctgagacggtcaacacgctgctccacgaattcctgctctgggagcccgagccctcgcccaaggctctaccggagccactgccggcgcctccagaagacaagaagtagccgctgggccggcggggcatcgcttggtgagcacagccgcagcaggaggaggcccgagcctgcgccaggtctgcagcgcagaccacctgggcgggccgttcgctccggtgggcggggccaggtcagggagacgcccccaggctgcctgggcggggcgtggcatccgagggagcccagcggacattccgctctccgcttccgtcccgcggggcccatcggcgttttggggccgcagccgggaccctcacggaagatgaccttgtacagaagctctccctcaccttccccccaacgccacggccaaggcaggccccccaccccgctgtcttccgtgtcagccgtgcttgatcctgggacccacgagccccacagggaccctcgaggccccatcccgttatccgagacccttcctaccccccattcctcggcgctgggagctatttttgcccaagggggggggatgggggggctggcgccaccgaacctgcacatctcaacttgtaactcaataaacagaagtgacaatcgg

SEQ ID NO: 13593 - protein, 439 aa, Homo sapiens
MLTGVTDGIFCCLLGTPPNAVGPLESVESSDGYTFVEVKPGRVLRVKHAGPAPAAAPPPPSSASSDAAQGDLSGLVRCQRRITVYRNGRLLVENLGRAPRADPLHGQNGSGEPPAALEVELADPAGSDGRLAPGSAGSGSGSGSGGRRRRARRPKRTIHIDCEKRITSCKGAQADVVLFFIHGVGGSLAIWKEQLDFFVRLGYEVVAPDLAGHGASSAPQVAAAYTFYALAEDMRAIFKRYAKKRNVLIGHSYGVSFCTFLAHEYPDLVHKVIMINGGGPTALEPSFCSIFNMPTCVLHCLSPCLAWSFLKAGFARQGAKEKQLLKEGNAFNVSSFVLRAMMSGQYWPEGDEVYHAELTVPVLLVHGMHDKFVPVEEDQRMAEILLLAFLKLIDEGSHMVMLECPETVNTLLHEFLLWEPEPSPKALPEPLPAPPEDKK

SEQ ID NO: 13594 - DNA, 1818 bp, Homo sapiens
actgtgcttttcctgcgtgcagatgaggactttgtgtcctacacacctcgagacaagcagaaccttcatgagaacctccagggccttggacccggggtccgggtggagagcctggagctggccatccggaaagagatccacgactttgcccagctgagcgagaacacataccatgtgtaccataacaccgaggacctgtggggggagccccatgctgtggccatccatggtgaggacgacttgcatgtgacggaggaggtgtacaagcggcccctcttcctgcagcccacctacaggtaccaccgcctgcccctgcccgagcaagggagtcccctggaggcccagttggacgcctttgtcagtgttctccgggagacccccagcctgctgcagctccgtgatgcccacgggcctcccccagccctcgtcttcagctgccagatgggcgtgggcaggaccaacctgggcatggtcctgggcaccctcatcctgcttcaccgcagtgggaccacctcccagccagaggctgcccccacgcaggccaagcccctgcctatggagcagttccaggtgatccagagctttctccgcatggtgccccagggaaggaggatggtggaagaggtggatagatctattatgtgaaaggcagcttcacccagttttctggactctcatgcccccatctccgacctgggagacttcaggaatgacaacctacccagcctggtggggctggcaggatggtggaggtttctcaaggagctggagacttcagggagcccctctcatggggaggaaagagcttccagggggcgaacgcagcacagaggaagaggcctgctccacttgtctgggaacctgggcaggaggcacagaggaagccaaggcctggagctgcaggtcccccggcatctctctctgtcccggcagcccaggatggcctggtgcccccacctgctgcagcaggagccccaaggagtgctagctgagggtggttgctggggtggtcctcatggacagtgaggtgtgcaagggtgcactgagggtggtgggaggggatcacctgggttccaggccatccttgctgagcatctttgagcctgccttccggtgggagcagaaaaggccagaccctgctgagttagaggctgctgggatccactgtttccacacagcgggaaggctgctgggaacaggtggcagagaagtgccatgtttgcgttgagccttgcagctcttccagctggggactggtgcttgctgaaacccaggagctgaacagtgaggaggctgtccaccttgcttggctcactgggaccaggaaagcctgtctttggttaggctcgtgtacttctgcaggaaaaaaaaaaaaggatgtgtcattggtcatgatatttgaaaaggggaggaggccgaagttgttcccatttatccagtattggaaaatatttgacccccttggctgaattcttttgcagaactactgtgtgtctgttcactaccttttcaggtttattgtttttatttttgcatgaattaagacgttttaatttctttgcagacaaggtctagatgcggagtcagagatgggactgaatggggagggatcctttgtgttctcatggttggctctgactttcagctgtgttgggaccactggctgatcacatcacctctctgcctcagtttccccatctgtaaaatgggagaataatacttgcctacctacctcacgggggtgttgtgaggattcatttgtgatttttttttttttttttgtacagagcttttaagcattaaaaacagctaaatgtg

SEQ ID NO: 13595 - DNA, 1309 bp, Homo sapiens
  CDS (274)..(1128)
aaaagcgacggcgcagcacggtgcggcgcagctcctgctcgcctttcccttcgctgggcgagaggtgtctatggggcacccgctgccgccgccgctaccgccaccgccaccgccaccgccgccgagtgctgtctctatggcgaggaggaggaggaggagcgcgagctcagcgacacaagtacataaataaaggataaaatattttatgaaacaaatcttcaatcaagtataacattttgatgcttggcatctagactcccttgtgccctcactatgccagcggcaactgtagatcatagccaaagaatttgtgaagtttgggcttgcaacttggatgaagagatgaagaaaattcgtcaagttatccgaaaatataattacgttgctatggacaccgagtttccaggtgtggttgcaagacccattggagaattcaggagcaatgctgactatcaataccaactattgcggtgtaatgtagacttgttaaagataattcagctaggactgacatttatgaatgagcaaggagaataccctccaggaacttcaacttggcagtttaattttaaatttaatttgacggaggacatgtatgcccaggactctatagagctactaacaacatctggtatccagtttaaaaaacatgaggaggaaggaattgaaacccagtactttgcagaacttcttatgacttctggagtggtcctctgtgaaggggtcaaatggttgtcatttcatagcggttacgactttggctacttaatcaaaatcctaaccaactctaacttgcctgaagaagaacttgacttctttgagatccttcgattgttttttcctgtcatttatgatgtgaagtacctcatgaagagctgcaaaaatctcaaaggtggattacaggaggtggcagaacagttagagctggaacggataggaccacaacatcaggcaggatctgattcattgctcacaggaatggcctttttcaaaatgagagaaatgttctttgaagatcatattgatgatgccaaatattgtggtcatttgtatggccttggttctggttcatcctatgtacagaatggcacagggaatgcatatgaagaggaagccaacaagcagtcatgacatgaaatagtccttttatttttatttcgagctacacacatgcttgtatataggttttatctctggttgaatccctcgaacaatagacagtacctttcccccccctttcatggcccattttattgtctgcctttcagtactaagtatgaccgttcctatctcagatcttaataaaaag

SEQ ID NO: 13596 - protein, 285 aa, Homo sapiens
MPAATVDHSQRICEVWACNLDEEMKKIRQVIRKYNYVAMDTEFPGVVARPIGEFRSNADYQYQLLRCNVDLLKIIQLGLTFMNEQGEYPPGTSTWQFNFKFNLTEDMYAQDSIELLTTSGIQFKKHEEEGIETQYFAELLMTSGVVLCEGVKWLSFHSGYDFGYLIKILTNSNLPEEELDFFEILRLFFPVIYDVKYLMKSCKNLKGGLQEVAEQLELERIGPQHQAGSDSLLTGMAFFKMREMFFEDHIDDAKYCGHLYGLGSGSSYVQNGTGNAYEEEANKQS

SEQ ID NO: 13597 - DNA, 1600 bp, Homo sapiens
  CDS (17)..(619)
aggggcgggcgccgccatgggtaacctgttcggccgcaagaagcagagccgcgtcacggagcaggacaaggccatcctgcaactgaagcagcagcgggacaagctgaggcagtaccagaagaggatcgcccagcagctggagcgcgagcgcgccctggcccggcagctgctgcgggacggcaggaaggaacgggccaagctgctgctcaagaagaagcgataccaggagcagctcctggacaggacggagaaccagatcagcagcctggaggccatggttcagagtattgagttcacccagatcgaaatgaaagtgatggaggggctgcagttaggaaatgagtgtctgaacaagatgcaccaggtgatgtccattgaagaggtggagaggatcctggacgagacgcaggaggccgtggagtaccagcggcaaatagacgagctcctggcaggaagcttcactcaggaggatgaagacgccatcctggaggagctgagcgcaatcactcaggaacaaatagagctgccagaggttccctccgagccccttcctgagaagatcccagaaaacgtccctgtcaaggccaggcccaggcaggcggagctggtggcagcttcgtaatgtggcctcgtcttgtgggactcacggggatgccccagggactgtggcccacagagagtttgggtcacggccagcccctgaccgggttccctggagcccagtgcgcacggtgctgagcagagctgcagccacgcaggcgcattgcaggaggactccagagcgtctcctggagaccttgagcctgaacgcactcaggcgccactggcctgctctcagtccggattaactctcgaccgagcccagcttctgccggttgtgggctcccccggtggccgaggcccaggcccaacgcctctggtgctgttcccctgcagtcccagccccgcgtggctcgcgctcgtctgtgaggaagacacctccagaccttggggtccccgcgcttcctcttgctcctcgctgctcccattagctggtgcaggcttccgttaaggggtccctcccttggcctggcttcccggcgcacctcagcttccctgctggtggggggatccccaggagaccagcatgtgctgaacctctctgtgcctctgcctccgcaccctagacacccacctccagtttgaaggtggcgggccaggggctttcttgctgaattgacgactccgagagccctgactcccgccttgccactcacggctctgtccactagggctcagccctgctgagaaaggacctccgatgcttgggagacgctgctccggcaggtgcagccccggaagtttgtccatgggggtccccgcggctggggctcatggaactgcgagacccgggaccctcctgccctgcgggtccccgagccaccagcagccaggactggaggctgtggggcatggcgtgacttctcgtgcacagggctggtttggttatgagacgatctcgctgggaccgcccctgcccgtggaaagccacaaggacaaagggagcggccacctcgacccccagacaggccggcccgtattaaagttggccctgcacgcc

SEQ ID NO: 13598 - protein, 201 aa, Homo sapiens
MGNLFGRKKQSRVTEQDKAILQLKQQRDKLRQYQKRIAQQLERERALARQLLRDGRKERAKLLLKKKRYQEQLLDRTENQISSLEAMVQSIEFTQIEMKVMEGLQLGNECLNKMHQVMSIEEVERILDETQEAVEYQRQIDELLAGSFTQEDEDAILEELSAITQEQIELPEVPSEPLPEKIPENVPVKARPRQAELVAAS

SEQ ID NO: 13599 - DNA, 1767 bp, Homo sapiens
  CDS (132)..(623)
ccaacagctttggctaaattaaccctggctggacccattttcttccattttactcctttgccccttcaggtggacaatttgacctttgatggggaagaatatcagtgggcagcagaaggggcacggcccgcatgcattctcaagtcttctctgcctttccccacagcctccctctgcgctcctgggtgaacgtgattaagaacccccagttcgtgtttgacatccacaagggcagcatcacggacgcctgcctctctgtggtggcccagaccttcatggactcttgttcaacgtcagagcaccggctgggcaaggactccccctccaacaagctgctctatgccaaggacatccccagctacaagagctgggtggagagatactacgcagacatcgccaagctcccagccatcagtgaccaggacatgaatgcctacctcgccgagcagtcccgcctgcacgccgtggagttcaacatgctgagtgccctcaatgagatctactcctatgtcagcaagtatagtgaggagctcatcggggccctagagcaggatgagcaggcacggcggcagcggctggcttataaggtggagcagctcattaatgccatgtccattgagagctgagaggaggagcctcgcattcctgggaagagggacctgtccaagctgtcacactgggagtctcagatggaaggacaagtgatggggatcaggccccagagcttgctgtcccctgagaccccatcctggggagaggggaggactcctctccctacgccagccaagtttcgtcatagccagttccagctgggagagacagtgggcgtcgtccatcctcagtgagaacaccagagaacccggggccgggagaaggtggttcttcaagccgagaggcacgagttggggacagttctgcctctgtgactgctgctttgcatgaaaactcatttgatgtatattggggaaataatgagaactttatttaatttttttaagaaaaagggaaaaaaacagaaataaaacaaaaagccgccctgttaatcccgtccaacttttgtttaattctgatttctgtctcccttccttcttttctcccattcctccttctttatataatgcctatttccaaatgccagagaaagcagagatgctgagagacattggagagaaaatgactgtctccttttccttgaaattaaaaaaaaaaaaaaaaagagagaaagaggagaagaagaatgatgagcacaagtatgcaccaaacacttcgcaaaaacagaggccagtaaaacctggaattatcccggcagccagaggagtatggaacttccagaactttgcacaaattgcaaagccatcaagagctcaccctggctggctggaaactgagctttatctaccacacacctgtatattctcatcttttgagaggagatgtgtacctagatagtaccaatgctttttgctactgttttttgttttgttttatttaatcctaaacctcaacaaatgaggagctggtctttgatatgtttcctttcaatttccctaaagttactatgagaagtggggtgaggtgggcctctcccagaccagacacctggcagccctgcctcatatcaatccctgtcataaaccaggcaccctggggaaacggcctggaggtgtgtgggccaggcctccacgaggttccatttgaaagttgatttggagacataggtgtttgactttggagttcactccaatcatccagtggtccctggcaatt

SEQ ID NO: 13600 - protein, 164 aa, Homo sapiens
MHSQVFSAFPHSLPLRSWVNVIKNPQFVFDIHKGSITDACLSVVAQTFMDSCSTSEHRLGKDSPSNKLLYAKDIPSYKSWVERYYADIAKLPAISDQDMNAYLAEQSRLHAVEFNMLSALNEIYSYVSKYSEELIGALEQDEQARRQRLAYKVEQLINAMSIES

SEQ ID NO: 13601 - DNA, 2186 bp, Homo sapiens
  CDS (21)..(1202)
gcggccggggaaaaacccggatgagctgggcagcagtgttggcagtcgcggctgcgagatttgggcacttttgggggtgccggtggcccgggccgatggcgcaaggttgggcaggcttctctgaggaggaactgaggagactaaagcagactaaagatccatttgaaccacagcgacgtctccccgcgaagaaaagtcgacaacaacttcagcgagaaaaagcccttgtagagcaaagccaaaaacttgggcttcaagatggatcaacctcattacttccagagcagctgctttcagcaccaaaacagagagttaacgttcaaaaaccacctttttcttcccctactcttccgagtcatttcactctcacctcccccgttggtgatggacaaccacagggcattgaaagtcagccaaaggaactgggacttgagaattcccatgatggtcacaacaatgttgagattctacctccaaagccagattgcaaattggagaaaaagaaagtggaattgcaagaaaaatctcgttgggaagtcctccaacaagaacaacggctaatggaagagaaaaataaacgtaaaaaagctcttttggctaaagctattgcagaaagatccaaaagaactcaggcagagaccatgaaactaaagcggatccagaaggagttgcaggctttagatgacatggtgtcagctgacactggaattctcaggaaccggattgatcaggccagcctagactattcatacgctcggaagcggtttgacagggctgaagcagagtacattgcagcaaagctagatatacagcgcaagactgagataaaagagcaactcactgaacacctttgtacgatcatacagcaaaatgagctccgaaaggccaagaagttggaggagttgatgcaacaactagatgtagaagccgatgaagagactttggagcttgaggtggaggtcgagggattgctacacaaacaagaagtagaatcaaggagaccagtggttcgtttagagaggccatttcagcctgcggaggagagtgtgacattagaatttgctaaagagaacagaaagtgtcaagaacaagctgtttccccaaaggtagatgaccagtgtggaaattccagtagcatcccctttcttagtccaaactgcccaaatcaagaaggtaatgacatttcagctgctttggccacatgaagttctggtattcttttgagctaatatggtattgagtaaagtatactttttgcagtagatcatgccctgacctccaataaaaacctcttcaaaacaatgctgatttttgaattcatgattagttttagtaaattaataggtttggccattctaaaatccaaaattatgataactgtatttctaggggtatgtttcaccttgattttggcccggttctttcagtgttccgtttaccctttttactgaaagtaagtgacttaaaaggatggaagaaaaactacatggttggagtgtttttagatcagataaatatagaaaagtaaaatggaaaatgatactcaatacctagttaaactcatttcacttctcctgggagacgtattaagactggaagtcctattttatttaatcagtatcagtaaaaagacaaaaattacagtgtgaacaagagaaaaacaggaatagaagaaaaaagttgcaggttgaattatctatctggatattactagagttgtaaaacacaacttggaaactggaatttatgtgaagaaccaaacaacttaaaccagcatcacttttgtcttcaatttgccttccagtgattttagtttacaacctgcgttttgttatttgaaacacacacacttatatataaacacatgtaattttactattttattgtctttcctttaatcgatgaattgattaaatttagacaattaaaacatttctaaagtgagactgaaaataatatagaaaatctcattgctacttgtgattatcaaaaaaagtatgtattttctttctaaagttatctataaatatgtttttgatatgttggacatgaattaccctgtcatgaagcgtttaaattgttaaaatgctgattttcttattagtttgttaattgcctgttactagtacttgaccaatacattgtgctatatgtaaatgtgtaaataaatattgtaattttctcac

SEQ ID NO: 13602 - protein, 394 aa, Homo sapiens
MSWAAVLAVAAARFGHFWGCRWPGPMAQGWAGFSEEELRRLKQTKDPFEPQRRLPAKKSRQQLQREKALVEQSQKLGLQDGSTSLLPEQLLSAPKQRVNVQKPPFSSPTLPSHFTLTSPVGDGQPQGIESQPKELGLENSHDGHNNVEILPPKPDCKLEKKKVELQEKSRWEVLQQEQRLMEEKNKRKKALLAKAIAERSKRTQAETMKLKRIQKELQALDDMVSADTGILRNRIDQASLDYSYARKRFDRAEAEYIAAKLDIQRKTEIKEQLTEHLCTIIQQNELRKAKKLEELMQQLDVEADEETLELEVEVEGLLHKQEVESRRPVVRLERPFQPAEESVTLEFAKENRKCQEQAVSPKVDDQCGNSSSIPFLSPNCPNQEGNDISAALAT

SEQ ID NO: 13603 - DNA, 1868 bp, Homo sapiens
  CDS (14)..(829)
ccatttaaagaagatgctcggccttaaaggaaatggcggtgcggttctgtccatggcccttccttttcagccagagcagagagattcagaggatttattgaagaattttaattcagagtgtgatacacactgtggccttgatactgcacgacaagaatatttgggtaactcattaagacaggaatcagacttgaaaaaatccacctcgtcagataattcaagctctcatcatggtgaaaataaacaaaatctgactgttgatccctgtgacattttgggtggagttgataatcagcaaagactgctacacattgtctggcctcacaggtgggagcatgataaagatccagaaagcttttttaaggtattaatgcatcttaaagacttaggactcaatttccacgtgtctgtacttggagaaaccttcacagatgtcccagatattttttcagaggccaaaaaggcattgggatcttctgtcttacactggggctacttacccagcaaagatgactacttccaagtactgtgcatggctgatgttgtcatctcaacagctaagcatgaattctttggagtggcaatgttggaagctgtgtactgtgggtgttacccactttgtcctaaagatttggtttatcccgaaatatttccagctgaatatctgtattctacacctgaacagctttcaaaaaggctccagaatttctgcaagagaccagatattataagaaaacatctctataagggtgaaatcgctccgttttcttgggcagccctacatggtaaattcaggtctctgcttacaacagagcctagggaagatttgtgacagatggggctaagtcacaaacttgcagcctaaggcagaatctgaagaactttccagagtgtgcccatatttacctgatcagagagaaaagaaaatctgcagaggaagctgagcctggctgcttgtcatagctgacacagagccatctgccacaaacctgtggcggcttcagatctccaatccctgccaccaccccaactcaaattaaatacagattcctagagacgttatgatggttacacatgtcctcggcatcacatgtaggagactgttcaaaaaaaatatgtggcctgttgtataaccgcactcatgtatcccatatgtggtgccacattgaatttccggttgaatccgtttttatcctttgtactggatgacatggtgcctgaattctttcttttcgccgacacgatggcagccaaactgcagcttcaaacgctcacacttggctgggtttctacctaggttgccaggttatcatcggagccttcttgtgtcctcaaagggccacgaggcctgaaaggaggatcagaatgctttgggattaattgggcagccatcgcagaattgtttgtgggcaaagggctgctttagcacttttcttttagcaaattaatgactctcaggcacagggggttttaagtgaaggtattaataagaggtctggcaggtattcccatgattcacagagttacatttgcatttaattaatcttaaagttgcaagataaacagctgtaattcggacaaacatgacaaacacagtgaagccaactatcccataaaatgaacactgacatacttgttttaatttttttcccagcgtaaaaatagaaaaatcaaaatactcctaacaaaaccagtgattttgatagaaatatttctccaatatacttgcatccacctacaaatataaccttttcaagataaatcgcttatgatttcaatagtcaaactgctgtgtttgttgatgtaaagatgttttgaatggctagatggtaaaataaattcttaataaagtacccactgcaattttt

SEQ ID NO: 13604 - protein, 272 aa, Homo sapiens
MLGLKGNGGAVLSMALPFQPEQRDSEDLLKNFNSECDTHCGLDTARQEYLGNSLRQESDLKKSTSSDNSSSHHGENKQNLTVDPCDILGGVDNQQRLLHIVWPHRWEHDKDPESFFKVLMHLKDLGLNFHVSVLGETFTDVPDIFSEAKKALGSSVLHWGYLPSKDDYFQVLCMADVVISTAKHEFFGVAMLEAVYCGCYPLCPKDLVYPEIFPAEYLYSTPEQLSKRLQNFCKRPDIIRKHLYKGEIAPFSWAALHGKFRSLLTTEPREDL

SEQ ID NO: 13605 - DNA, 2030 bp, Homo sapiens
  CDS (39)..(1697)
atgctgaaagaagcggagagtgttatcaccaggttgccatgggtcaaggtcaagctgatttagcaattcaaatgctaaaagaatgtgcccgcaatggagactggctctgtttgaagaacttacatcttgtggtatcttggctgccagttctggaaaaggaattgaatactcttcaacctaaagatacctttcgtctttggctcactgcagaagttcatcccaactttactcctattttactacagtcaagtctgaagataacatatgagtcacctccaggtttaaagaagaatttaatgcgtacttatgagtcttggactcctgagcaaattagcaaaaaagataatacacatcgagctcatgctctcttcagtcttgcatggtttcatgctgcatgtcaagaaagaagaaactatattcctcagggttggacaaagttttatgaattttctttatcagatcttcgggctgggtacaacattattgacagactttttgatggtgccaaagatgtacaatgggaatttgtacatggtttacttgaaaatgctatttatggaggacgtatagacaactattttgaccttagagttcttcagtcatacctgaagcagttttttaattcttcagttattgatgtattcaaccaaaggaacaagaaaagcatttttccatattccgtatctctaccacaatcctgcagcattttggactatcgtgctgtcattgagaaaattccagaggacgacaaacctagtttctttggtctgcctgccaatatcgctcgctcatctcagcgcatgatcagttctcaggttatttcacagttgaggattttgggcagatccataacagctggttccaaatttgacagagaaatctggtctaatgaactttctcctgtcctcaatctctggaagaaactaaaccagaattcaaacctaatacatcagaaagtgcctcctcctaacgatcgacaaggatctccaatactgtcattcatcattcttgaacaatttaatgctattcgtttagtacaaagtgtccaccagtctcttgctgctctcagcaaagtcatcagaggaactactttactgagttcagaagtacaaaaattggcaagtgctttattaaaccaaaagtgtcctctcgcatggcagagcaagtgggaaggcccagaagatcccttacaatacctgagaggtcttgttgcccgtgcccttgcaatacagaactgggtagataaagctgaaaaacaggctcttctctctgaaacacttgacctatcagaacttttccatccagacacatttcttaatgctcttcgccaggaaactgcaagggcagtgggtcgttctgtggatagccttaaatttgtagcctcatggaaaggtcgactgcaagaagcaaagctacaaattaagatcagtggcttgttactagaaggatgtagttttgatggaaatcaactttctgaaaatcagcttgattctcccagcgtgtcatcagtgctcccttgttttatgggctggattccacaggatgcacgtggtccatattctccggatgagtgcatctctttgcctgtttacacaagtgctgaaagggatcgtgtggttaccaatattgatgttccatgtgggggcaaccaagaccagtggattcagtgtggagcagctctattcctaaaaaatcagtagaatctaatgacaacaaaagccatcttcacaaaagggaacattgattctttaagctttaaatcaaacatgtggtcagtctacatttgaaatgttagttcaaaatattaacatatagttatgttgttgatgtcactgaaattttaatgtgtaaaagcagcactgtgcatcttttaaagtaataaattaatggagttattgttaaaacagagtattcttttgacaacattaaatatttctgtgagaaagttcacttttccagtggctcaaaaatttgttttaggtcagagattttaagtggtatattaaccaataataaatattttggctgtc

SEQ ID NO: 13606 - protein, 553 aa, Homo sapiens
MGQGQADLAIQMLKECARNGDWLCLKNLHLVVSWLPVLEKELNTLQPKDTFRLWLTAEVHPNFTPILLQSSLKITYESPPGLKKNLMRTYESWTPEQISKKDNTHRAHALFSLAWFHAACQERRNYIPQGWTKFYEFSLSDLRAGYNIIDRLFDGAKDVQWEFVHGLLENAIYGGRIDNYFDLRVLQSYLKQFFNSSVIDVFNQRNKKSIFPYSVSLPQSCSILDYRAVIEKIPEDDKPSFFGLPANIARSSQRMISSQVISQLRILGRSITAGSKFDREIWSNELSPVLNLWKKLNQNSNLIHQKVPPPNDRQGSPILSFIILEQFNAIRLVQSVHQSLAALSKVIRGTTLLSSEVQKLASALLNQKCPLAWQSKWEGPEDPLQYLRGLVARALAIQNWVDKAEKQALLSETLDLSELFHPDTFLNALRQETARAVGRSVDSLKFVASWKGRLQEAKLQIKISGLLLEGCSFDGNQLSENQLDSPSVSSVLPCFMGWIPQDARGPYSPDECISLPVYTSAERDRVVTNIDVPCGGNQDQWIQCGAALFLKNQ

SEQ ID NO: 13607 - DNA, 1449 bp, Homo sapiens
agagaaactgactcaggctccttgtggatattaatttgaggacagtagtggtaatcaaaagtacagtagagaacacttgacattgtgaatgtgacctctgaccccaaccgttgtaaagccaataactttgagggtgaataaggtaacacttgcttagaaaacccagccctttcccccagtctcctgcgctcttatacattgatactttacaactatttttgctgtacctctcagtctttcctggataatgggaccacttaaaaaaaaaagtgattcatcttcctcaaactagaatttcaaagcctaatactacactatgttccagcttcactgagttttgaacaaaaagacttaagcatgccttgtgtttaaggaaaaataattgatgtgtgaatggaatcaatcacctattgacgggaagggtgtcaggatgatgtagggtgatatgcctttaattggataaagagaactgtattaagtataactaatttaataactgattgaagcaccattcttaattttaaaatatttttgttaatttcttttgtggttttaaaaattaataatttttttttttttgagatggagttttgctcgttgcccaggctggaatgcaatggcgcgatctcagctcactgcaacctccgcctcctgggttcaagagattctcctgcctcagcctcccaagtagctgggattacaggcgtgtgccaccacgaccagctaattttgtatttttagtagagatggggtttcaccatgttggccaggttggtctcgaactcctgacctcaagtgatccacccgcctcggcctcccaaagtgctgggattacaggtgtgagccactgtggccggcctaaaaaaaattctttttaatagttatcagactactttaaccagtgccatgtttaaacatacttggacaatagactcagtttttttaatagtttgaagtacattatattaaaactacaaactcacttattcaagcctaaatttcatcatagactataaattgggtatcaatttcctattttggtggacaattccagtctgtctactacgacaatcatctttttaggtgtaatattgtttaagacataggtaattttaggttttatacttttctcctaggcttatggaatgaaagctaataggatatcactttcagaatgaaatagggaattatggctagccttcttatagggctgccgtaaatgatacttaaatgtttgttatatcactgattttcttttctcttctgaagctgttgtgaatgtccactttgccatgattaaaagttgagatttgtaaacattacaatttgaaccataaattttctcaaacatgaaatcagtatgaataagtataaaatttgaaatgatcatacatgagaatcccaaaagtaaatacttccaaaccatagagggataaccactgtattttt

SEQ ID NO: 13608 - DNA, 1031 bp, Homo sapiens
  CDS (102)..(734)
gggttgagcgggaggcgcgatcggtccggtcggtggctccccgcggcggggccgggcccgatctcgggcgggaaccgagcgcagagccggtagcgggaaggatgaccacgctcacacgacaagacctcaactttggccaagtggtggccgatgtgctctgcgagttcctggaggtggctgtgcatctcatcctctacgtgcgcgaggtctaccccgtgggcatcttccagaaacgcaagaagtacaacgtgccggtccagatgtcctgccacccggagctgaatcagtatatccaggacacgctgcactgcgtcaagccactcctggagaagaatgatgtggagaaagtggtggtggtgattttggataaagagcaccgcccagtggagaaattcgtctttgagatcacccagcctccactgctgtccatcagctcagactcgctgttgtctcatgtggagcagctgctccgggccttcatcctgaagatcagcgtgtgcgatgccgtcctggaccacaaccccccaggctgtaccttcacagtcctggtgcacacgagagaagccgccactcgcaacatggagaagatccaggtcatcaaggatttcccctggatcctggcggatgagcaggatgtccacatgcatgacccccggctgataccactaaaaaccatgacgtcggacattttaaagatgcagctttacgtggaagagcgcgctcataaaggcagctgagggggcacctgccaccccactgatgcccaaactgtcagactttgggggatccccgcctagggcagtgctgcatggctgccctgattccaagtgctcttatcgcctctgtgtgtggatcgcccgccccagcccggggccgctcaggtctgcttggaggatgcctcccccaggagggcagtgagggatgccgcaacctcgacttctcagcctcctggggttccgccggccaacactgtctgtctcaaatactgtgctgtgagttgtttcaataaaggggccccaagggctgggctg

SEQ ID NO: 13609 - protein, 211 aa, Homo sapiens
MTTLTRQDLNFGQVVADVLCEFLEVAVHLILYVREVYPVGIFQKRKKYNVPVQMSCHPELNQYIQDTLHCVKPLLEKNDVEKVVVVILDKEHRPVEKFVFEITQPPLLSISSDSLLSHVEQLLRAFILKISVCDAVLDHNPPGCTFTVLVHTREAATRNMEKIQVIKDFPWILADEQDVHMHDPRLIPLKTMTSDILKMQLYVEERAHKGS

SEQ ID NO: 13610 - DNA, 2323 bp, Homo sapiens
  CDS (166)..(498)
tgtccggaccatgggcttgatttgagtacctattgccaggaagataggcagctcatctgtgtcctgtgtccagtcattggggctcaccagggccaccaactctccaccctagacgaagcctttgaagaattaagaagcaaagactcaggtggactgaaggccgctatgatcgaattggtggaaaggttgaagttcaagagctcagaccctaaagtaactcgggaccaaatgaagatgtttatacagcaggaatttaagaaagttcagaaagtgattgctgatgaggagcagaaggcccttcatctagtggacatccaagaggcaatggccacagctcatgtgactgagatactggcagacatccaatcccacatggataggttgatgactcagatggcccaagccaaggaacaacttgatacctctaatgaatcagctgagccaaaggcagagggcgatgaggaaggacccagtggtgccagtgaagaagaggacacatgaaggcttgctacccccagtggaagatcatcccctccccttgtgtgtatgtgacagcgtgtatgtaacggcttctgatttctgtgaaagctgctcagcaacaaacgtacttccaccagatgtgtccccagatccacagcaggcacatatctctccaagggatgaccagttttatgcttactgtgtgcttctcatcccctggttgtggtaggtcaaggaaaagagcccctttgatccaccaggagcaattaagaaaggtccttcaggtaatccctcaatggctgctttgaacttactcaggaaagccagcccccataatattgtattaccaaacagtatcgctttgttaggaaggatctggaataatcttgaagggaagtcagagttttctccctgcctattaacaaaaacccaattttgttcatattgaagcatgaaataaatgagagcaaggtagggccaaattaactcttgtgggcagtccctaaaagtccagttctacatttgtgaaaattgtggtgccatgaattaagatggatgactggaaaaaggtgttggagaaagagttaaagatgaggaagagatatttttagtatatgaagttatccaggacttgatattcataattcagtgctgtggaaatgaaaaaaatgattgaagaggtggaacggaaatgaccttagggggaaaaaaaaggaccaaagaagtctgattaaaagttgaaatcagtatttctgaattcaaattgcttgaatttccaaaatagtcagtaaaggatctaatagaaccagaattatttgggtgaattctgcaggttttatgggcttgtcacaacgtgaagggctggaatgtatattaccaaatgggaatttccattgtaggtttttgctagtcccacccccattttagcctaatttggcttaaacgcagtatggggagaattgttcccattccatgtgttctgaattcagctcatctcccagcatatagatatatcctcctttaactccgaccagaacccttcttcctgtggcactccccacccatagaccttcagatcatctcccacaccctggatctcactctcctcttagtaacagagacactcctgaggttggacttccttgcttttctctacttccaaatcacaatttcttacaaccaagctttgtgctcccgagtaagcagggatgtactaggggaatgtaaaactgcaaacttaaaaacctgcatcttcttgaagcatcagttttacttaccaaatggtttagagtcataagatgacctatttttatataaaagttatattatagaataaaatgttcatacgcatagactgttaagataaaaaaataggaatcttgcaaggtaattcttatttgcaagtgggttatgtgttcactctcctctacctttatggtattttggtgttcacttacgaagcatacaactagaaccatatccaagcagactctgggttgctgttaacccagggcctagacttctagtgcctctgaggcagaaccaaaggagcctgcactgggggaaatcccttttcctgcctgcctgtctgcctgtgacctgtgtacgtattacaggctttaggaccagctgattgttatgcttgcaggatggttttgaaacagaaacaatacttgtttactgtaggaatcctatttatattatttttcagtcctgtgaatgctgtgaaaagatttattcctttgaggccaggaagctcccaggcatatatgcttctaggttaggattgtcctgactcactaaagatgccaggatattggggctgaggggagtttgaggtgtt

SEQ ID NO: 13611 - protein, 111 aa, Homo sapiens [sequence omitted]

SEQ ID NO: 13612 - DNA, 1492 bp, Homo sapiens
cttttcctctgggagcttgccgggctgcaggggagtcgagcactcggaggaggataggggaggatatggatgattaatgcggggtcctcacctaagggagcgtaaggggggattgtagaaagggaggcgcagatacgcgagtccacaaatgattgattgataacccttgtttactaagcgcctctcggggccaggagcgcagtcttcggggagtcagacaagtagacgattccactgtggtataaaaagcgtcacgaaggcagctcagggagtagcgagacgctcaggaatgctgtctgcctatgttgagttactgtgtccaagacgctgccaagagggactgggttagagaagaggcaattaggtgtctgcctaccagaaactgaccactcagtgcagaaaacggggaattcgtggagtgggtgaagaaatgagactgtggacaggagggggttcgcagcttacagagaggaatggccctcctctctatgcttcccccctttcttttaattacatacctaaccctcttcacgttggtttttcagcctaagaactctgtttactcaacattctaaattgcttgatgattcccaccacacctttcccatgtatgatttgagtatatgccctcccccacgttgttttatgagagcttttgttgatgttgctggtggtttcctcttcgtttttccttcatctcctctatgctatttgcttaaccattgtggctggacctccttgctctctaaaactggagtggctacggagacagttccagtgaagcttaggatgttccatattggcgagtattttcaggtctttgaaatgaaaagttctaagtgccggcacttctcagattttgttacggctggattttaaactgcatggagattatcaattttcaaaaaaaagtgtgggagaagggactgtactaaatttttccagagatttatgtaacaatcgagaaagaagtgagaagttttaacttcagacttaaatcaatgaatactgcttctaaccacgttatttttctccacctcttgtaaacttctcatcattaagaggattgtatgaagaagctcattaatattgatttggcctggaattgggttgagacttactttctattgttctagggtttgtttccttttttgggattttctcggcaattttgtggtataagtttgaaaaacgagatagaaatctcgttttaggctgggcgcggtggctcacgcctgtaattccagcagtttgggaggccgaggcgagtggatcctgggtggtcaggagttcaagatcagcctgaccaacatggtgaaaccccatctctactaaaaatacaaaaattagccgaacatggcgcacgcttgtgatcccagctactcaggaggctgagtcaggagaaccgctggaacccgggcggtggaggttgcagtgagccaagattgtgccactgcactccagcctgggggacagagcaagactgcatctc

SEQ ID NO: 13613 - DNA, 2039 bp, Homo sapiens
  CDS (1205)..(1711)
tccatacgcaggggctgcccatgtgcggcttcaaaggccgtgtgagccgagagcgttttgatcgccgactcgggcacctttctctggggaaggttgtctggcgcaggcggctggggctctggggtgcagtggctctcgctttaagaaacaggatcctgtacgcagccagcatctcatccccttcgaagtctgcggcagtaatctgctcacatcaggccacgagtatggtgcgggtaggatgcgtgcttctgtattctgtacctagtttccacccgaagctacaggtggggctcccagtgcagtgaccgtgatactcatgggccacgtggagtctgtagggctactcgctgggctgtgctggcttctgtgagctgatgatatggacctggcctgggcatatgaatcactggtctgtgctagcttctacgaactgatgatatggacctggcctgggcatatgaatcactgggctgtgctggcttctacgagctgatgatatggacctggcctgggcgcataagttcacaaggactttccagtctgggcatctgcccatccgtccacacgggaagggtcaggtcttgcagtcaaacttctcaacaacaaaggagttctcccctggcccctgacctccttgatgcagcctgggcaggggtggcaatagcgagggcggccatgagaagctgaggcggagcgtccgagcagatccgggccatcatggtcctgcagtgccgcgaatcaccacagacggttacaggcagggaggacgggagccggtggacagcaggagccgctgcagccgaaacggtgcggtgtgtgtgtaatcactgatcgcagggtgaagctcaaggtctggattctgttatggaaatgaaacaaaattgttttcttcctgagtttttataaaaatcactgctttgaaaattatcccgtcagaaagagaataaacggcatttattcataccaccaccaggccctcctagagttattttattttgtattgtaaataggctgcaatctcttaatttggggcatgtttttggccagacttgaaaaggattgaatttgcactgccctgcagccagcacgcctgtgcaaggcagaatttatcatttgcaaatgaaagctaagtgcagactcagagctgagggggtgagcccagcagcccctcccaagtgttaaatccagatctgaggcacagcagatgagagctgcaccctcacgtctgggtgtgcagatgctgatggaaaagctccccacgtggacgcgggcagagagggtagcctgttggcatgggcagggaacagtgcaggccgtggggcttcctgaggtacagccaccggcaggatgtgttttcttcccattgttttccaaaaggaagaagacagacaggaggccggtgcagacccctgccctggtgtgggatgcacctgctgtcgctggcacagatgcagctctcctgagcctcatgtctcctccagagccaggaggggccagcctcctggggtgtcaggaggagcaaagtagacctcgggagccgaagtgtgggcacacagcaggtgctcttgtcagggagggcagagcaggtgagcagagccagccaccttccccgaaagcagctgcaaactctcccggaggcagaacagtggggcttggaacacggaaaactcaccactcctcggcgctgggaaatgggagctgtaaagtgctttgacctctttttcaaaccagatcagctcctgcgttgctcctctccagtgaccgcaagtttcaactgggtgaggagctggtgtccctgctcggcctcgcccagcggagtcccggcctgctctcgtacgcccggctccccgcggctcctctgagcttcccaaaggcctcccagccctgccagccctcggcatgtcccttttagactccatgggattatccgtgggaagctttctccatgtttccccccgcctttttcctgtctttattgcgaaagagagagaaaaggagaggagagaagcgagagagagagaaagaaaggaaaagaaaac

SEQ ID NO: 13614 - protein, 169 aa, Homo sapiens
MRAAPSRLGVQMLMEKLPTWTRAERVACWHGQGTVQAVGLPEVQPPAGCVFFPLFSKRKKTDRRPVQTPALVWDAPAVAGTDAALLSLMSPPEPGGASLLGCQEEQSRPREPKCGHTAGALVREGRAGEQSQPPSPKAAANSPGGRTVGLGTRKTHHSSALGNGSCKVL

SEQ ID NO: 13615 - DNA, 1873 bp, Homo sapiens
  CDS (19)..(651)
agtaactgagcgccagacatgaaccgcaagaaactgcagaagctgacggacaccttaaccaaaaattgcaagcattttaataaatttgaagtgaactgtcttataaagcttttttatgacttggtgggaggagtagagaggcaaggtctggttgttggactggatcgtaatgcatttcgaaacatcctgcatgtgacatttggaatgacagatgacatgattatggacagagtattccgaggttttgataaagataatgatggctgtgtaaatgtattggagtggattcatggattatcactgtttcttcgaggatctttggaagaaaaaatgaaatattgctttgaagtgtttgatttgaatggtgacggattcatttcaaaggaggaaatgtttcacatgttgaagaacagccttctcaaacagccatctgaggaagaccctgatgaaggaattaaagatttggttgaaataacactgaagaaaatggatcatgaccatgatgggaagctgtcttttgcagactatgaactggctgtgagagaagagactcttctactggaggcctttgggccatgtcttcctgatccaaagagccagatggaatttgaagctcaagtattcaaagatccaaatgaattcaatgatatgtgaataactaaatgtctatattgtctcaagtgagtaaaaaaggaggcacacacatattgcttattttttctacttagttcagaaaaatgatgttgaattgtgtgtttcagggtgaagatgaggttcacttacatatatcatttaacatcagtgtaagatgcaattaaaatagatggaagacaagaagtcccttattagatgatgggtttggcaagacagttaacttttctacagatgttttatcacatagactatctgtcgaagcacacaactggcataaaacctttgggttcattaaatgaatagagagattacataattatgaattgttaatacaaatattctgcatgtcaaaaagaagctgggtgtacactgaaaaatcattgaaactactggatttcctttgaaacaaataatgaagatggcatcaaaagaataagagtattctattgagcattgaaacgcctttctggtaggcattgagggagatctagagagatgaaagatacatggaaatcatattatattgaaatataatatgatttgcattattgtttgaggctttggctaaataacgttactgattgtaagcacctgaaggcaagggttttatccaccacatctttgtctgccatagcatttagtcctctgcatacaatgggctgtccataattactgtagattggactgaaaatcaaaaagtaccacaagataaatgcaaactcttggtgagcagagggagaacatgtactgagtttcttaggtttcatggctaatgcattggcacagctttcagtgtatccctgcagtccttccagatagtccctgccccatgcattgcagatggttgccaaggcccccctctgtcctggcacccagtgttcctccatcctgactccacgtattgcccccttgccactgcctgagtgcaccatagtgtccccatccccccagtatgtgctgtgggcatcctgagaagcctgaaaaagacagggccaggttaggcttgggtgagctgctttctgccttcttggtacacacagtaagcagtggagaggcgtgttacaccgtatctgttctatcctcatctaaatactgagaggctagttgggatagtaaatctttcttactacatatgcattaagtttaagtaaaatagaatactgtgtgaaaaaatgcactgttactaataaatggaataaacagatccatgaaataaaag

SEQ ID NO: 13616 - protein, 211 aa, Homo sapiens
MNRKKLQKLTDTLTKNCKHFNKFEVNCLIKLFYDLVGGVERQGLVVGLDRNAFRNILHVTFGMTDDMIMDRVFRGFDKDNDGCVNVLEWIHGLSLFLRGSLEEKMKYCFEVFDLNGDGFISKEEMFHMLKNSLLKQPSEEDPDEGIKDLVEITLKKMDHDHDGKLSFADYELAVREETLLLEAFGPCLPDPKSQMEFEAQVFKDPNEFNDM

SEQ ID NO: 13617 - DNA, 1666 bp, Homo sapiens
  CDS (958)..(1665)
aattgagatggtttactgtaaaattaaaatgggagttagttttctagacatgtaactctctggggagtataaaactggtcacaatgggctttgcgttgaagtatctgtccctcagatctcatcagaaggagtatataatacaaaaatataaattcaacctctgtatgttttcttctatgttttatgctgggactcactggagatctttgtaagtaatcaaagctggccctttatctttgattttggcttttagggaattctagggacttcctttccccaaattaaaactcattttgaggtgtttggttttgtcttttaatttttgcaacttcaaaattgatgactcagttctagtgtactttatcctcgaacttgtttaaaataggttactttcttgaaataaataataatataatgaagagatcatgacttggatttgggtgggggaattaaataccttttcaaaattgccatcagtatcatcttggatgaagaaagttcagtggttaaaagcgtcttctgaagtgtggtcatagtcggtgaggtttatttcagtttggcttctcattacaattttcagatgtatatcacatatatgtgaaaagtactgacaaaaataatttatgaaataaacacagtagggcatgaggttgtgttatttgtgaggcagcaatggagcatgacttgtagtcaacaaacatgggtgtcctgatcaaagctctgctgtgctattcggcaagactctatgtggatgcctcttgtagaatgtggttaataataccagccgatctcatagggcactgtgcagactcagcattatggtgcacagctccttgaactcataggagtggcacttaactggagctttgtgtcgtactcatcaaacatcttcccccagacaatgattcttctgattctgctaactctggacagagtttgcattgtcttttgagaaaaatgaatttatcacttagtcaaaaaactgtaaaaatacataggctctttccgatgcttgctttctcagagccctatgagtttgtctctctggaatggctgcaaaagtggttggatgaatcaacacctaccaaacctattgataatcacgcttgcctgtgttcccatgacaagcttcacccggataaaatatcaattatgaagaggatatctgaatatgcagctgacatttcctatagtagatatggaggaggtccaagactaactgtgaaagccctgtgtaaggaatgtgtagtagaacgttgtcgcatattgcgtctgaagaaccaactaaatgaagattataaaactgttaataatctgctgaaagcagcagtaaagggcgatggattttgggtggggaagtcctccttgcggagttggcgccagctagctcttgaacagctggatgagcaagatggtgatgcagaacaaagcaacggaaagatgaacggtagcaccttaaataaagatgaatcaaaggaagaaagaaaagaagaggagggattaaattttaatgaagatattctgtgtccacatggtgagttatgcatatctgaaaatgaaagaaggcttgtttctaaagaggcttggagcaaactgcagcagtactttccaaaggctcctgagtttccaagttacaaagagtgctgttcacagtgcaagattttag

SEQ ID NO: 13618 - protein, 236 aa, Homo sapiens
MNLSLSQKTVKIHRLFPMLAFSEPYEFVSLEWLQKWLDESTPTKPIDNHACLCSHDKLHPDKISIMKRISEYAADISYSRYGGGPRLTVKALCKECVVERCRILRLKNQLNEDYKTVNNLLKAAVKGDGFWVGKSSLRSWRQLALEQLDEQDGDAEQSNGKMNGSTLNKDESKEERKEEEGLNFNEDILCPHGELCISENERRLVSKEAWSKLQQYFPKAPEFPSYKECCSQCKIL

SEQ ID NO: 13619 - DNA, 1201 bp, Homo sapiens
gtttaatatgaaggatgataagcatcaggtaaggaaaaaaggagaaataaaaccaagatatggtaatgtgaatacaaatgaaagttagcactggtggaaaggcaacagatctggcctgagtattttagaaagtttaaaaaatagtgaaaggaaacagtgaatagaaattttttattggaaaattatgtgaggcaaaaaaagcactacccaaaaggtctgagggaaaagatagggaattatcatgtagccatctgattaattttttgtttccctagaccccactcctctccctattccccaccaccatttggtgctccacattgcagacagggcaatatttctaaaatacaaaaataggtcatcatattccttgtagccctcagaatcaagtctgatacatgcagccaacaggcatatgaaaaactcagcatcactaatcattagggaaatgcaaatcaaaagcacaatgagataccatgtcacaccagtcagaatgctattattaaaaagtcaaaaaataaatgctggcgaggctgcagagaaaaggaatgcttatactctgttggtagaagtataaattagttcaaccgttgcagaaagcagcgtggctattcctcaaagagctaaaaacagaactaccatttgacccagcatttccattactgggtatatacctgaaggaatataaatcattctaccataaaaacacatgtaggtgaatgttcattgcagcactattcacaatagcaaagacatggaatcaacctaaatgctgatcagtgacagtttggataagaaaatgttgtacatatacaccatggaatactatgcagccataaaaaagaataagattgtgccttttacaggaacgtggatggagctggaggccattgtcgttagcaaactcacacaggaacagaaaaccaaataccacaagttctcacttataagtgggagctaaacattgagtacacttgtacacaagggaacaaagacactggggcctactggagggtgcacagggtgggaggagggagaggatcagaaaaaataatattggatactaggcttagtacctgggtgaagaaataatctgtataacaaacccctgtgacacaagtttacctttataacaaacctgcacatgtaccctgaacctaaaataaaagctgaaaaaataaatctcattgctgttcaaaac

SEQ ID NO: 13620 - DNA, 1391 bp, Homo sapiens
actgtttaaacaataaaatgagctatgctacagactctggcctcatgttttatttttctcctcatcgtctccttgctgttctgcctacattaatgttgggtcagtagtgtcccagaaattgatcttggcccttaactttgggggttttgtagcactgatttaattattagcatctgggatagttaatatttcagttcaatatttaaccgtatatctgtgtatatctatataatccttccttgcagttcctaataaatacagtcatcccaagctttctaaacaatgacagtaaaaaaaaaaaaaagaaagtgcagttatagaatcgcagacctcactctctgagaaaggcctttgagcaatacgttgaagacgatgtgtgccatgatgactggactgtggtctctgtgagagaaaaaccacagggcatcaaacactgaacagaaaaggtaagccccggggacaccctgtggctgtgggtttagtggttacatgaatactgcaggagagcaatttcttcctgcaaatgcctgaaaaggagcagcatcttgtgtttccaagaagcagtgctacttttcaacacaagcaggggtgatgttcccttttcacagggagacatacacaagggctaaaaccgaggaccgggtcccaaatccagcctcactgaaagcagcatttctgaatggagtcagctggagttcaataatagctaattgaaaaggaatgagcttaaatggttttgtgatccatctgagtgatgtgcataaatgaagcaaaaataatgcaagcttcattgaaaatagagataaaaatgcctggaatttgactatcccaaccaaagacttgctgagacagatctgactgcctgatccgaccaactctgatttgtggctgaggtttctttcatgtccccaaaccaccctggtttccaccactgtgtgtggagtcgtatggaaattgatggactataatatcctggaaaaaaaaaattggagaatcctggaagtatgagacagtaattggatttcttagaaaatgaagacatttcttaagaaatgtttgagaatattatcattgaaataaaacttttacctatagagagatttttgcctttttaaaaacgtttggctctattggcagagatcaagatttaggctgaggcggatggattgcttgagcccaggagttcaagaccagcctgggcaacatggtgacactcccatctctacaaaacatacaaaaattagccaggcatggtggtacatgtctgtttttccagctactcaggaggctgaggtgaaaggatcacctgagcctgggaggttgaggctgcagtgagccatgatcttgccgctgcactccagcgcctgggtgacagagcaagaccttgtctc

SEQ ID NO: 13621 - DNA, 1623 bp, Homo sapiens
ttctaaaatggctccaattttgtgttttaagcttcagcttaagaggaagtttatgttctaattcttgactgagaatacagtattgagattctctgttttacagataacaactggtttttattactcattaagttcatttgcatcccgtagccctctgtaaatgtttcccctagttgcatgtacgtaaatgcacgcttatccagtgtatattagacatttttgtgctaaaatatattaagtgggatttttgtagcaaagcattctatttttctgttcttacagtgtgtgtgtgtgtgtgtgtgtgtgtgtgtatgcgtttttttaaccttaacttcagtttaaacactggtgtatttatttttttaagcaacttgactcttagaagccttagactgatttttttcaataaatattcaaccaaaaattataaatttattaagatgtggccttacatatggcattccttgtgttcgtaatgtgagatttttgatttagataaatcaagattcaggattaaagtttcattgtaagttgaaatagaaaatgtattaaaatgtctaggcttctgggaggaagttcttatactcttctttcttggcattagaaagaagcaatatgaatttttgtgaatattctaaatattcaggcaacactgttcagattgatttaggtttgtcttaaccaatgttctttttttagaatttcaggtagtggcattcactgagtatgcagctactatggtttttgtatgggacgtataaatacttgattatatacgacagattttaatgtctttaaagacttcctgctgtattaacatattgtaatggagtcttttaaatactaggttgaatttaattgaagtcacacacatcttgaagtggtaactgcatagtaaatactaccaagagtttttttcacgtgggagtatcctaaaactctgccatgggtgtaaatgttttacattaatttcataattggacagaccctgcatttagcgaaaacattttgttttgaaagtgtgttctttttgtcgcactgttactgcgtaacacttctcaacattctgtaagttaaattattttaaaataactatggtgaattcatgtttatttttttactttgaaaattgtagtactcaggtggtatttaatgggaaaggatcctttgggtataaatcataatgtattttaaggaatgcatctataacattgataactttagccttaaaaaaaaggtctattattccttcctctgcatcccatggtatattagcaaagtagtttacagccctgtacagccttacaaagttgttttacaatttttaatggaaagcccttaacaacaacaacaaaaaattgtatcattttaccaatatccacgaattactgatcacagtttgtaaataatttgtttaatatcagaaggccaaagaaagtcttaaaattttagctattgactctatggtgacttcacaataagatttctgtgcaaaaaggtaaggtgataattgatctaatagacttttttttttttttttttttttgctgtccatgagaattagacttcatattagcttcaattaaaaagctcattccattttattaaaatgtttgtaattgc

SEQ ID NO: 13622 - DNA, 1910 bp, Homo sapiens
agaaactatgtagtgaaattacatagtgatttttcattctcgcagtaaaaatttcctgggatttttttctttttaatgggtgggaaactacctggaaatagtggatgccagagtcttaaacagaaggaatgaaataataaagatcagagcagaaataaatgaaatagaggccaggaatacaacagaaaagttcaacaaaacagagttggtttttgaaaaggtaaacaaaattgacagacctttagttggactaaccaagagaaaaaaaagtcaaaatacatgaaggagacattacaactgataccatagaaataataagatcataaaagactactctgagtaaatatatgccaaaaaattgaacaaactagaagaaatggataaattcctaaaacatacaacctatcaggaccacatcatgaaggaacagaaagtctgaacagacctataatgagtgaggagattgaatcactaagtcaaaacctcccaacaaatagaagcccaagagcagacagcttcacgggcaaattcctctgaacatctaaagacgaattaccaccaacccttctcaaacttccaaaaaaactgagcaggagagaacacttcccagattcattttatgaggccagcattacccttaaccaaagccagataaggacattgtaagaaaataaagttacaggccaatatccttgatgaacagttgcaaaaatcctcaacaaaatactagcaaactgaattgaatagcacattaaaaggagcgtacaccatgatcaagtgagatttttcctctgaatgtaaaaatggttcaacatatgcaaatcattaactgagctgcaccaaattaacagaatgaaaaataaaaaccataagatcatcttaaaagatgcaaaaaaggcatttgacaaaatgtaacatcctttcacaatgaaaattctcaacaagtaaggtatagaacagtatgccacaacataataaaggctatgtgtggcaggcccacagctgacatcatacttaatggtgaaaagctgaaagcttttcctctgaggtcaggaagaagacccttgctacttccattaaatatggtaagttctagccagaacagttaggccaagaaaaagaaataaaggcagccaggagtggtggctcatggctctgattcccagcactttgggaggctgaggtgggcggatcacttgaggtcaagagttggagaccagcctggccaacatgaaaccctgtctctactaaaaaatacaaaaattcaccaggcatggtgatgcatgcctgtaatcccagcttgctcgggaggctgaggcaggagaatcacttgagcccaagaggtggaggtcgcagtgagctgagattgcaccattgcactccagcctgggcaacagggcaagactgtctcaaaaaaaaaaaaaaaagtaaaagacacctaaatcataaaggaagaaataaaattatctttatttgcagtggcataatcttgtatgtagaaaaacccaagacttcatcaagaaatctgttcacttagtcaagttctgggatacaaaaatcaacatacaaaaatcagttttctgtctatacactaacaacaaactattcaaaaaagagattaagaggtcaggtatggtggttaacacctgtaatcccagaactttgggaggccgaagcgggcggatcacctgaggtcaggagtttgagaccagcctggccaacatggtgaaaccctgtctctacaaaaaatacaaaaaaaacaactgggtgtggtggtgcaggctgtaatcccagctacttggaaagctgaggcaggagaattgcttgagcctgggagagacggaggctgcagtgagccgagatcacatcactgcactccagcctgggtgacaagagcgaaactccatctc

SEQ ID NO: 13623 - DNA, 1461 bp, Homo sapiens
gtgaggacatgagatttgggaggggccagagatggaatgatatggtttggctgtgtccccacccaaatctcatcttcaattcccacatgttgtgggagggacctggtgggaggtaattgaatcatgggggcagatctttcctgtgctgttcttgtgttagtgaataagtctcacaagatctgatggttttaaaaagaggagattccttgcacaagctctctgtgcctgctaccatccatgtaagatgtgacttttctccttgccttcctccctgattgtgaggcttctccagccctgtggaactgtgagttctccattaaacctcttccctccattaaacctcttccctttgtaaattgtccactctcgggtgtatctttatcagcagcatgaaaatggacgaatacacatatataaaaattttacatgtataaaaatgaagctgctctgacagaagctgttagccttgtgctttgaaattctcttgtgtagtacttttccccacctcttccttgagttacattactagaattgaacatggagatcaatttgaaaaccactttctagtctagattcttccttttctagatgaggaagctgaaacctattgagtttataattatccttttctttggttttaatctgtaaagttatctggatttagaacagagaagaaaaaaatacatctaaactaacactgattctaggacctttcagcagtgtgcaagtctgaacgtcttccctgtttttgttcatgttatcactactgttgttctgggtatcatgccaaatttagtgcaatactctcttatattagtttcctagggcttctataacacattatcataaactagtgacttaaatatattctcacacagttctggagcgcagaagtctgtaatttgtgctatgcatcctatttcaaaatcaagccgtgttccctccagtggctctaagggagattttgttccatgcttctttcagctttggtggctacaggcattccttgtcttgtggctgcataactccagttttttcctgtgtctttacatggccttctcatctctctgacctcactctgtgtattttctgtaaggacacttgtcattggatttgggatctacctggataatccagtgtcatctcatcctgagacctttaacttaattacatcttcagagactcatttttccaaataagataacaggttcatttcacctaattactctttctgcatctgtgctctcttttttccagtacaatatgtgaactgttagaccagttttcctatttactcttgttaattttttgacttcctgtattttcaacctgcaatattctgtttctcctcctgactacactttaagtttcccaaggtaaggagcatgcttcatctcctttgtccttcctcagcataaatgcctggcccatacaggtaggttgttaaataaacgttagttt

SEQ ID NO: 13624 - DNA, 1477 bp, Homo sapiens
ttttaataatgttgcaaaactctccaaacactactctgtgtggatgtctttcagaatatgatgaatactagtagtcttattctgcccttttctctctatcacaatatatacattctatattgcatacacatattttccaaatattacatatagtttcatgtaatttatagacctattaaggcccaaccattttcttggataggggattctttagaagtccagcttaaataaagcccgtatagaaagtttttttaaaatttatacataatcacctaaagtaaccttatctactgaactcttagtacatgctactggaaccttttatcatgtttcttcctggcttgcattacaacactgttgacatatctcagccttacttctaggcttctttgagagcatgactcatgtttgtattcctcactgaggttgaatgaataagagaaactacagtagtaggaaaaaacagtacatgtagatatcaatgaatatgaaagggtcaaatggatctattatagtaagcacaaaatcaactgacaccagcaaagtaaacccaaaatttttaatggtattttaatagatcaagaggagcaagcagatttttgagacagttgtctcctactttctctatcacagggagtaattttaaaagaaaaatggagggtaagtttctttaagagaaaattgtagtttaaaacaggtcatgggataattagaaataatttaatttctttagaggattttaatctttcaactgcttgcaattagatcctaaggcaataaaagaataaggagatttggaaaaccattgtctgtaatctctgaagaaaagtggacattaggggagtcagttgaaaagcaaagctatcaccattttctaaagaggaaaaaggtgaacctcacaaactatagaccaaaaaaataggacatcgagagaaagaatatgaagctagcataggttcacaaagaatgagtcaaatcaaacaacatgcattttttatttataaagcatgacttgttcattgtcaattcatgttagcttaatcattaggcattaatgccatcactgcaatgcatatgtcagcaataaataatcaaagaccaggcttccatcattctgtttaatatcttcaagtaatgcttaagtttgcaaatgctcttttaacacattctccatatgcagcctgcccagcactgcacacaatagacctgttacttccccctcacgagcactcctaatatttcatgtgctcatccaattgacttctcccactggtgcctcatattgaatttgtagaattacacctgctcctttttcaaaactcttctgagttttttcttaaataattcactgaccccaaagttgtcagatatttgaagactactcgcacaattttaatattataaatgtataatgtaaatgtaattaagatttgtataatgtacgatgtactttggtaaataaaagtatgctgtgaat

SEQ ID NO: 13625 - DNA, 1462 bp, Homo sapiens
gtatgtgtttttaaactccaatgatataagctgtaattataatacaaagcaactaaattaattttaattattccaaataattagcttttttcataaaaagctagttattccaaatattagcttttttcatgaaaagctagttattccaaataattagcttttttcataaaaagctagttattccaaataattagcttttttcataaaaagctagttattccaaataattagcttttttcataaaaagctagttattccaaataattagcttttttcataaaaagctagttattccaaataattagcttttttcataaaaagctagttattccaaataattagcttttttcataaaaagctaatttaaatttggggcaagtgtattattaatggtacatattgtattaaagtttgtgtaatgtaatataaagtggccacattacaaaatataggttgtttcagcttgcaaaattaaacaactgtataaaacaaatttataactgattgctagtaagaggtaccatgtaagaattgtgtttccagctgaatgaagaaattttaaaacctggttccatatattacaaatcatgagccaggactttggtaggggaggaattgggggctttggctcccaaaaatctctgtcacataccccctccccaccacaagtacacaatctatggaaaacttgtgcttatcataattacagctttaagtaattttcccttctctttggatattgtatatttgcatattgaagaggttcaaaacaacagtaataacatgcatattaagagaatttgcatttcataaatagtacaagatagtactaaaaaattggacatttgaaaatatgaagcaactaagagttgcttaatgagatgtcatttcctaacaggatgttcatttatggtttttggctactattgctctttggtgtgtttgtggaatagaaattattccaagctattgtgaagagtcaataattaaccaaatgtatttatttcctaaaaagactaaaactgaaattattatcatgtaaagatggcatctgtcctaggcaacttggctttatgcagtttgtcctttcagttttcaggaatgagacctcttgacccctcccctccaatgcagcccctactaagggggagtttaaggagccatacatagttctataattcaaatcaagtaaacatgcttcttgtcccaggttaacttgtgctgcctcagtcgctgtttaaacatttttatacgcactgttaacctgcctgcccattaccctattacttttaatgggtaaactactgttccctgggcagttgtctcttttaacgtcccaccctaaacttgccaaccctcatatgaaggcctcaggcttgttattggcaaaggtcagaagtcttaagctagtgaccttgcaggctaaagtaggccttgaatttgtttgaccaggaactaaatt

SEQ ID NO: 13626 - DNA, 1418 bp, Homo sapiens
tttttgcgatttggtgtgtgtataaggcacagtcttctgaattactgaggaagcatgactgctgttcttgtctgcaaggtgcatgctttttttttttttttttttaaatcagaaaccactattgtatagatttcttgagagcagggactttgttttgttcattactgtacccatagcctctagaacagcatgtggcacgtagtaggcagtgagtaaatatttattgaatgaaggtatgaaactgtctcatttacttaaacagcaggcttttctttaatgttccttggtttgccccttttgttaggtcttcttttttttcttttgagatagggttgctctattgaggctggcatgcagtggtgtgatcttggctcactgcagcctccgcctcctgggctcaagcaagcctcccatctcagcctccttagtagctgggactacaggcgtgcaccaccacatctggctaatttttgtactttttgtagagacacggttttgccatgttgcccaggctggtcttgaaccccttggctgaagtgatctgcctgcctcggcctcccaaagtgctaggattgcaggcaagagccactatgtccagcctttttttttttttttaaacagagtcttgcgctgctgctcaggctagagtgcactggcacgatcagggctcactgcagccttgacctcctgggctgaagctgtcctcctgcctcagctcccgcatgcctcacccccaacttcaccccacagtcgctgggactacaggcatgggccaccatgcctggctaatttttgtatttttagtgtagatggggtttcaccatgttgcccatgcttgtctcaaactcccggactcaagtgatcagcctgccttggcctcccaacgtgctgggattacagaggtgagccaccgcacctggctgttagctcttaaggggagcatgttttctgtgatatctgtgtgatcgtcccattaaatagaatgaattctactattctttggttttatcaagaatcgactttctggtctgttggccagtgaggcaggcattactggttacctaactgatagtcttccctgtgcctgcttctttcatgctcaagaaccgtaattttgttcagatattgagtaagcaacaatgcacttaggggaggtattaacattggcttaaacctttcatgataattctttagtaatcccagtgactggcatagactggtctcatctcattggttctggccaatcaaagaaagtctcctgggggagggttcttggaaagattttcttttttgatcagaatgggagacagttctgtgaagaaagcctctttttgctgccactcacatttcctgcgtttgaatgtggtagtgtgagtgtgattctgaaagctatagcagccgactcgtaaccccgaggc

SEQ ID NO: 13627 - DNA, 1612 bp, Homo sapiens
  CDS (799)..(1116)
cttagacgctccccagatgattctaatgagcagcctggttgagaactacttcacgtggtagcgcctcctgcccagaaccgtgggatatagccctgggcaaaccctcaccaggatcaggcctgtcttccctatgaggtgtaacctatgctccaggctctgtaatgttcccccaggcaagagcttcctcctccagatttaagggtgcccaggctgggagactgtcccctgtctttcccaggtggtcctgtgcttcttgggctcatcacaggaaagacctgtcccaggtgcaaggtctctctgatgtagaaggcctcccctgagatggacagtctgggggatcttcccacgtgaacctgtctcttgctccgcaggtgtaaggtatgcccactgacctttttcaccaagtcagagatgcagatccactccaagtcgcacacagaggccaagccccacaagtgcccgcactgctccaagtcctttgccaacgcctcctacctggcccagcacctgcgcatccacctgggcgtcaagccctaccactgctcctactgtgataagtccttccggcagctctcccacctccagcagcacaccaggtgagtggcctgcctgctgccctgctgcagcccgactcagctcagcacccgtggcctggcacatggagccagtgcaaggaggggcaaggaccttctccaggtgcccattgccctcggggtcacggcccttgtggacctcactggcctcagctgttgttactgcaccccgtccccactgtttctcatctctaggtctttgcacatgctgtgtcctttaccagagagacacccctctcccgcttttccctgtttctctggccatccccttgtcctctctcagtctagcttcctccaggaagccctccctgattgctctagctgggtgagggacccgacctctgtgtccccacagggctctgtgcatgtccatcatagcagtggtaggctgtcacgcccgtgtctctttatctgcccacctcactcaatctactgggagttcttgaaggcaagagctcagtctcctccatttccatatccccagtttgtggcacaaaataagcaattattaaatattttggaataaatataactggtttttacagagcatatgattcatccatttaacaaatacttatagaaacttttactctatgccagacactattctagatgttgaggatacagcaaggaagaaaacagacgaaaatctctgccttcgtggggcatacagtctagttgagtgtgtgaaagggagactcaaagctataaatgctttaagaaaaatttgtggctgggtgcggtggctcacacctgtaatcccagcactttaggaggctgaggcgggtggatcacctgaggtcaggagttcatgaccagcctggccaacgtggcgaaaccccatctctactaaaaatacaaaaattagctgggtgtggtggtgggcgtctgtaatcccagctacttgggaggcttaggcaggagactcgcttgaacccaggagatggaggctgcagtgggccgagattgcgccattgcactccagcctggatgacaagagtgaaactctgtctcaagag

SEQ ID NO: 13628 - protein, 106 aa, Homo sapiens
MLCPLPERHPSPAFPCFSGHPLVLSQSSFLQEALPDCSSWVRDPTSVSPQGSVHVHHSSGRLSRPCLFICPPHSIYWEFLKARAQSPPFPYPQFVAQNKQLLNILE

SEQ ID NO: 13629 - DNA, 983 bp, Homo sapiens
  CDS (164)..(586)
aaagattagggaggaaaagtcgcttaaaaatatatatatagaaacacataaacaaattctacaaacattcatgcttacggctataactgaaaaaacggatgagccatcatagtattcctatcttactgaaagcgaagggttatttgtctaatctaaggcaaaaatgagggtggaaattgagtacaaagaaagatatctgggccctaagcatgctctaaaatcccaccatccaataaatcctgcaacttcattttccaatttcattatcactctcttaagtatttcaaaagatcagcatcgtcaatatcagtgtcccaatgactcaccagctctgacagcctcattctccaggacaaccctattaaaaataaaacggatatatttggaggggacaggcgttctagggccctctttgcccaacaagtgtagaatcttagtagccagaacagtgtgttcacagtcctcaatgaattcacaaaggtgggctaggcctgcttctttactctcagggttctcttccacaatgctgattatacagtccacaatggcccgcttgtactcaaagcctccctggcaaaaaagaagataaaactgccattcattctagggacacattttggagaaatgcttacactccaaggtttatgcttataatattcaaatttcatttcccaccttttatgaaagaagcaaaagtgtttttttctccaagtggggaaagcaaagcaatggcatgtttagtaataagacagtaaccagacttagtgtactacttgagaggcatactgagatgataaggaaatcttaaaacactatggtatttcatggcaatcctaagaatttaagacagcaacttcctatgattaaaaagtagtctacctacatcatctcggagcatgttggagaggaaagtcatcatgacactgtgctttcgagggtatttctgacagagagcactaattgcctgtacaaccaccacctgt

SEQ ID NO: 13630 - protein, 141 aa, Homo sapiens
MRVEIEYKERYLGPKHALKSHHPINPATSFSNFIITLLSISKDQHRQYQCPNDSPALTASFSRTTLLKIKRIYLEGTGVLGPSLPNKCRILVARTVCSQSSMNSQRWARPASLLSGFSSTMLIIQSTMARLYSKPPWQKRR

SEQ ID NO: 13631 - DNA, 2215 bp, Homo sapiens
  CDS (619)..(918)
aacctagaaaaggcaccactgaaagtacttgaaaactggtggtcagtacttgaacctccactattcctcaagatagtagaactttttaaggaagttgtggtacatcttttgaaactctacaagatcggtattcccccttctgaaagaagaattttcaacagttttcttcatactgcattaaaggttttagaaatactacatagggtaaatgagaaaatgggacagattatacagtatgataaattttatatacatgaagtacaagaattgatagacataagaaatgattatatcaactgggtccaacagcaggcctatggaatggtaggttttctgtgcaatttgtgatttcatttttatgtatatgtatctaataaaaaaaggaacaattgcttggttttgaaatgagaaagttttttcagaacttttatccagaacttactttttaaataataacacattgcaaaggagtgctatatattttacaatatttatatgcaaacattctactcttttaccaaagccaaaccaaagaaatggattacactgtaaaacaaaacaaaacaagacaaaaaaaacctacaagtgtgaaatggatttttaactcttttattttccatgaggttgcctcttatttctccagtgttgaaaatactggcattcttcatactggaactcctaagaatgcattattgttgtgaaattggtgcttcaagactaccaaaagaggactgggtgtggtggctcatgcctgtaatcttagcactttggagcctgaggcaggtggattccctgagctcgggatttcaagaccagcctcggcaacatgtcgaaatcccatctctactaaaaatacaaaaaattagccaagtgtggtggcacatgcctgtaatcccagctactcagaaggctgaggcatgagaatcacttgaacctgggagatggaggttgcagtgagccgattatgtgtttacttttatttcagatttttaatataaatgtgggtgcgtacatctttttatgcagctaagtctttaataactagacactatcccattaaaatagtaccatggtcttataaaacttgaattaggcacataaaattttaatgcagaaatgggtaagcagttagatacaaaatatttaggtttactactcttatttgctagccatttgtgtatacttgaggcccacttttctgtacccaggtaatttaatatgtgtgcagcagttatataatagaagggtgagtaacttttcattgcttgctaggcaccagctgtaagctccttgtggatgggtgctcttgtcagtcaaccagcacctctgacagtgtctagaatatgtctagtaagcactaaaaaagtacagtagtttttgaatggcaatctggttagtgcacgctgtttttaggatactcccacctcccggaatcaggttgcttctagacatcttttccttccctagtgtacttgggtctggactgggagagactcattgacttttctcctgagtcactttgaggctgggtcaggtttatagccattctatagatttaggtctattcatttgcttattcaacaaacaatgagaatctgttatataacaggcactgatttaggtattggaaatacagtggtgaaccagacagagccttgtttctcatggaattcgtaatctactgggcaagattggcaatagtcaaacaaagcaaaaaataccagctaataatatgtattattaaaatgaggggacttagtaaagataggtttcagaaaagacttatctaatgaagtatgagtactaatctgaatgacaaggagcagccctttaagatcagggcagagagaatttcaagaacaacgaacatttggtaaaatacctgaggtgaaaacaagcttgacatgattgaaggacagaaaaaagccagcattaggccaggtgtggtggctcacgcctggaatccctgcattttgggaggccgaggtgggcagatcacgaggtcaggagttcaagaccagcctgaccaacatagtgaaaccccgtctctactaaaaatacaaaaacttagccaggcatggtggtgggcgcctgtaatcccagctacttggaaggctgaggcaggagaattgcttgaacccaggaggtggaggttgcagtgagcttagattgcaccattgcactccagcatgggcgacagtgtgagactcctttc

SEQ ID NO: 13632 - protein, 100 aa, Homo sapiens [sequence omitted]

SEQ ID NO: 13633 - DNA, 1495 bp, Homo sapiens
  CDS (241)..(645)
gcatcccgggactgaacccctcctccctttcacagattacctcatccgagcaagattcctccctccctccctcctagagacctgatcccgccacatccccgcctccctctctgggcagatgtgttactcctagggcagttttcctctcgggcgtctctcgggtgatggcctcatccagggccacgttctcctggcccttggggatcgtgtcccttccagcaccttgctttcgaaaacccgatgaaccctcgcgccatccccgggccaggtccctatactgccagccactcccccttccttcacctccaccctctacccccaccccaagcagaccgatcctcccccatcccgcccttctcttctcgtcatttcattattgatccaccttttcctaggccaatcctggggcttggaaggggtgggggaagccaggttggggtgaggagagtagataagggacagttatactttagtgtggtggcggtggttgctttgggatgggagaaaaaggattatcaagcaaagttattccttagaaaggacttggggttgtctctgattcttgtaaggggacccaaggtggatgaagggtcagagcgttgccccttccccattagtactggggcaagaacggagttgcttctataaacattattcggcccccttcagcaaaaaggaaagttgcccaaggaagggaagttgagttcaggttcagccagtggcgttgcgcatttgttttccattggatgcagaaggggggagttcgaattgtagaggggggaggatggcatgggggatgctaggaggaggaagagcagctgctaggggctgaagcgaaggggggtagggggttgctgctctggagtgctcttgattgaaacagaaagggaaagataacaaccagccgtttcctgcgtgctctgccgttggtgcacacaaaatatcctgggcaaaccccttgtcccctattgtgccccgcacccctttagatttacggaaagatcctgggaagaaggggagggaggagatcccaaggaccctggcccctcctttcaaggagctggcattttttagttgttagtcttcctgcctcctttttttttaatcgtttctaaggcagcctgatcaggagactgacaacaacccgccttctgacagagcaaggaggacatgatgggggcgtgttccttgctatgtagctagctgcagcgtcccctttccctgcctctttctgctctatctccacctccttttcccagccttcagaaggcagctgcagtcagcagggttgtttgagactatttattggttgctgtagattattatttttttttgaaaggccaattctgtattttttaagctaacaacacagatcccatgtagttggagaaccaaaggccacatacatgacaaaaagactgaaccgttcaggttacttgcatggagttggtgcttaaatgtgagttgattttgcttttttaaaagatacagcagc

SEQ ID NO: 13634 - protein, 135 aa, Homo sapiens
MNPRAIPGPGPYTASHSPFLHLHPLPPPQADRSSPIPPFSSRHFIIDPPFPRPILGLGRGGGSQVGVRRVDKGQLYFSVVAVVALGWEKKDYQAKLFLRKDLGLSLILVRGPKVDEGSERCPFPISTGARTELLL

SEQ ID NO: 13635 - DNA, 2152 bp, Homo sapiens
  CDS (71)..(2152)
gtgatcggtttccggtcagtggtgtggtaccgggtacccggagacgtgtatcggacggtgggccgcagccatggccgagagaaaacctaacggtggcagcggcggcgcctccacttcctcatcgggcactaacttacttttctcctcctcggccacggagttcagcttcaatgtgcccttcatcccagtcacccaggcctccgcttctccggcctccctgctcttaccgggagaggattccacagatgttggtgaggaggacagcttccttggtcagacttctattcacacatctgccccacagacatttagttacttctctcaggtatcaagcagcagtgatccttttgggaatattggacagtcaccattaacaactgcagcaacctcagttggacaatcaggattccccaagcccctgactgctctcccttttacaactggatcccaagatgtctcgaatgcattttcaccatccatttcgaaggctcaacctggtgctccaccttcctcactgatgggaataaattcttatctgccttctcagccaagtagtctccctccttcatattttgggaaccaaccccaaggaattccccaaccaggatacaatccatatcgccatacccctggcagcagcagggctaatccttacattgcaccaccccagctgcagcagtgccaaacaccaggccctcctgctcatcctccaccttctggaccccctgttcagatgtacgagatgcctcaagttgaccatttggtgtttgtggtgcatggcattggacctgtgtgtgacttacgctttaggagcattattgagtgtgtggatgattttagggtggtttctctcaaattgctgcggacacatttcaagaaatctttagatgacgggaaagtaagcagagtggagttccttccagttcattggcatagttctttgggtggggacgccacaggtgtggacaggaatattaagaaaatcactttgccaagtattggtcgatttcgtcactttaccaatgaaactttgctagatattttattttataacagccccacctactgtcagacaattgtggaaaaagtaggaatggagataaaccatctgcatgcactctttatgagtcggaacccagacttcaaaggaggtgtctctgttgctggtcacagtttaggttctttaatattgtttgacatcctgtctaatcaaaaagatttgaatttatcaaagtgccctggacctcttgctgttgctaatggagttgtgaagcagctacattttcaggaaaagcagatgcctgaagagccaaagctgactttggatgagtcgtatgaccttgttgttgaaaatgaagaagtcctaactttgcaagaaactctggaagcacttagcctctctgaatattttagcacttttgaaaaggaaaagattgatatggagtccctgcttatgtgtacagttgatgacctgaaggaaatggggataccccttggacccagaaagaagatagctaactttgtagaacataaagcagccaaactgaaaaaagcagcatcagaaaagaaggcagtggcggccacttctacaaaaggacaagagcaaagtgcccagaagactaaagacatggcttccctcccctcagaatccaatgagccaaagaggaaacttccagttggtgcttgcgtgtcttctgtgtgtgtgaattatgaatcttttgaagttggcgccggacaggtttctgttgcttacaactcattagattttgaaccagagatattctttgccttggggtctccaattgctatgtttctcactattcgaggagttgataggatagatgagaattacagccttcctacctgtaaagggttcttcaatatttatcatccgcttgatccagtggcatatagattagaacctatgattgttccagatttggacctaaaagctgttctcattccacatcacaaaggcagaaaaagacttcatttagaattgaaagagagtctctctcgtatgggatctgatttgaagcagggttttattagctctctcaaaagtgcttggcagacattaaatgagtttgcccgtgctcatacgtcttcaacccagttgcaagaagaattggagaaggtggccaatcagatc

SEQ ID NO: 13636 - protein, 694 aa, Homo sapiens
MAERKPNGGSGGASTSSSGTNLLFSSSATEFSFNVPFIPVTQASASPASLLLPGEDSTDVGEEDSFLGQTSIHTSAPQTFSYFSQVSSSSDPFGNIGQSPLTTAATSVGQSGFPKPLTALPFTTGSQDVSNAFSPSISKAQPGAPPSSLMGINSYLPSQPSSLPPSYFGNQPQGIPQPGYNPYRHTPGSSRANPYIAPPQLQQCQTPGPPAHPPPSGPPVQMYEMPQVDHLVFVVHGIGPVCDLRFRSIIECVDDFRVVSLKLLRTHFKKSLDDGKVSRVEFLPVHWHSSLGGDATGVDRNIKKITLPSIGRFRHFTNETLLDILFYNSPTYCQTIVEKVGMEINHLHALFMSRNPDFKGGVSVAGHSLGSLILFDILSNQKDLNLSKCPGPLAVANGVVKQLHFQEKQMPEEPKLTLDESYDLVVENEEVLTLQETLEALSLSEYFSTFEKEKIDMESLLMCTVDDLKEMGIPLGPRKKIANFVEHKAAKLKKAASEKKAVAATSTKGQEQSAQKTKDMASLPSESNEPKRKLPVGACVSSVCVNYESFEVGAGQVSVAYNSLDFEPEIFFALGSPIAMFLTIRGVDRIDENYSLPTCKGFFNIYHPLDPVAYRLEPMIVPDLDLKAVLIPHHKGRKRLHLELKESLSRMGSDLKQGFISSLKSAWQTLNEFARAHTSSTQLQEELEKVANQI

SEQ ID NO: 13637 - DNA, 1576 bp, Homo sapiens
  CDS (635)..(1576)
gaaatgaaggcaagaattttgaatttttaaaaaccaactaagactttgatcacttgttgaggatgtttctctctcataaatgaaagaaaaacgtattcacaagacaagaagtataaaaagttgagaggaatgacaactgagtccactcactcgaagaatgtcagtacttcatcatcttctttgggcaaacatacacaaatgcatcatacatgtgtggtgagcttatcaccagtgatggttttctgtgctagaaatgactcttaatttgaattttggagtgctttttctcttttttttacaatgtgtgttccaactctttgtgttaaatagatttaagtaaaggaggtaaatgctaaattcatagtgttttttacctgtatcacttccctgtgtattatggaaaaattagagattttaacgttattcaaagttttactggaagcaaaactgtgccagggacagagatatacaatttaagttttctctttttggcaactgcacttgcttaaaatgtactgaatgtcagctggatttcacagcatatcagatttacagtctttgtcttatcaaggcctttactgtatgttttatactaaccagatgggaaacacattgagcatcatatctgacatgtatgcctaagggaggagctcccccatggatcatggcgttaatgtttacaggacacttactattcttagcattattgatgtttgctttctctacttttgaggaatctgtgagcaattattccgaatgggcagttttcacagatgatatagatcagtttaaaacacagaaagtgcaagatttcagacccaaccaaaagctgaagaaaagtatgcttcatccaagtttatattttgatgctggagaaatccaagcaatgagacaaaagtctcgtgcaagccatttgcatctttttagagctatcagaagtgcagtgacagttatgctgtccaacccaacatactacctacctccaccaaagcatgctgattttgctgccaagtggaatgaaatttatggtaacaatctgcctcctttagcattgtactgtttgttatgcccagaagacaaagttgcctttgaatttgtcttggaatatatggacaggatggttggctacaaagactggctagtagagaatgcaccaggagatgaggttccaattggccattccttaacaggttttgccactgcctttgactttttatataactgcaagaagtctttgtcttctgaagggcaccacatggatcttcctgatgttgtcattacctcacttcctggttcaggagctgaaattctcaaacaactttttttcaacagtagtgattttctctacatcagggttcctacagcctacattgatattcctgaaactgagttggaaatcgactcatttgtagatgcttgtgaatggaaggtgtcagatatccgcagtgggcattttcgtttactccgaggctggttgcagtctttagtccaggacacaaaattacatttgcaaaacatccatctgcatgaacccaataggggtaaactggcccaatattttgcaatgaataaggac

SEQ ID NO: 13638 - protein, 314 aa, Homo sapiens
MPKGGAPPWIMALMFTGHLLFLALLMFAFSTFEESVSNYSEWAVFTDDIDQFKTQKVQDFRPNQKLKKSMLHPSLYFDAGEIQAMRQKSRASHLHLFRAIRSAVTVMLSNPTYYLPPPKHADFAAKWNEIYGNNLPPLALYCLLCPEDKVAFEFVLEYMDRMVGYKDWLVENAPGDEVPIGHSLTGFATAFDFLYNCKKSLSSEGHHMDLPDVVITSLPGSGAEILKQLFFNSSDFLYIRVPTAYIDIPETELEIDSFVDACEWKVSDIRSGHFRLLRGWLQSLVQDTKLHLQNIHLHEPNRGKLAQYFAMNKD

SEQ ID NO: 13639 - DNA, 1709 bp, Homo sapiens
cttctacaaggaaacaaaaggaaaccgaattcactgctcaataaatgtgggaattcctggagttatctacattggcagctgtcatgagtggttactaggaatctagctaaatccctaagtaactgggcgatggatttgggtgggggaattgtcacacctctgcttataagagaggatggagtcgtgtagttgggcttcccacgtgacgtctaggtcctagaattgtgttctgtggacagacagtccagcacgcatgttttgaatacttcctacgggccaagaattggactaagtaagactttcaggttgaagaaggcttagtccctgcccttgtggagggcatggttcagattgagagagaaatgaatatgtaactatggttaattataataaccagtcaaagtactaattactagaggcatgagaaggtgttgtaggtaccagaggggccaacctattttgcccttgtggatgagaaacttatcacagagggtgacatttaggatggtcttcgctgcatgtagtaggtactcaaggaacatgcagcttgctgtgtgctgatatttcttaaaattcttttgtgcctattttatcagtctgtgggccaatttgcaaattagttattaaaaggtattgctttcagtgagaaagctttatgaaatgggccagccctcctccttgttagaatgagtggccgcttagcgatttcatgtttggcccacttggagctgtggctgacctatggggcccagacatgtagctggtgttttcacaaatagccctgaacctggatacccatgagcacactactactctcaagcagttgctggaagatcccatatcttatcccagccatgccccctagacgcagaaggcttggggcctcttttggcacgtgccatggcatgttcttggtaggtgatccagttgagaagttaaatcttctgcggtggttaagtcatgaggctagcacgtagaccagcgctgagggaagggttccaggatgagattggagcctcgcaataaggagactactgcaaggcattggatgatactccagtgttgtcctcgagaaagccgagtgtgtcccagctctttctggtcattgcacttacgcagagatgcaccttctgctgctgtcatgaggctgtggggattgtgggcagactctgaacacttcctgagctagaatccgggctgcaccctcgtcttccgcaggctctgccatccttccagatcccagtctcaccacacatctacaccagtgtcagctgggctgctgccccctccgccgcctgctctctctctccggtccggagccggtcgctaagcttcagcgagccccagcagccagcacctgcgatgaaatctcatctgatcgtcacttctccaccccgggcccagagtggtgccaggaaagcccgaggggaggctaagaagtgccgcaaggtgtatggcatcgagcaccgggaccagtggtgcacggcctgccggtggaagaaggcctgccagcgctttctggactgagctgtgctgcaggttctactctgttcctggccctgccggcagccactgacaagaggccagtgtgtcaccagccctcagcagaaaccgaaagagaaagaacggaaacacggagtttgggctctgttggctaaggtgtaacacttaaagcaattttctcccattgtgcgaacattttatttttt

SEQ ID NO: 13640 - DNA, 948 bp, Homo sapiens
  CDS (317)..(775)
cttcctggggggctgtggcctgagccctgcacccactggggactatggcttcccagcagatggcaagccatatgtggcaggtgcgctgacagccattgtggccggcgaggaggagctccgtggcagctataactgggactacctgctgagctggtgccctcagttccaaccactggccagtgtcttcacagagatcgctcggctcaaggatgaagcgtggcccacccaggagccaagtctgtgccccccaagccagcaaacacagctgcagcccgggccatcttcccaccagcttctcaccgctcccccatcagccatgaaggctccctgtcctcagctgccatgtcccccagcttctcaccctctctgtctcctctggctgctcgctcacccgttgtctcaccatttggggtggcccagggtccctcagcctcagcactcagcgcagagtctggcctggagccacctgatgacacggagctgcacatctagctgtggcccaggctgggccccgacctgggatgcgcacagtgtccccaacgcaggccccactctgagcctgccctgggcagcctcggactatgactggctacggggaggccaccaccaggccccagctctccaccctgaactccccagccccctcagagtactaggaccacagaagccctgttgctcactgacctgtgaccaggtccaatgtggggagaaatatgaaggaggtagcagccctgggttctcctcagtgagggatccctgccctgcaccagcaccctgagatggagctgagactttatttattgggggtagggggatggaggaggtccctccaacatgtttggacccagctcctttgggctccactgacacccctgcccctgcccctgcccagaaccaagtgccatttctcactctggagccttaataaactgcaatttgtatccagtc

SEQ ID NO: 13641 - protein, 153 aa, Homo sapiens
MKAPCPQLPCPPASHPLCLLWLLAHPLSHHLGWPRVPQPQHSAQSLAWSHLMTRSCTSSCGPGWAPTWDAHSVPNAGPTLSLPWAASDYDWLRGGHHQAPALHPELPSPLRVLGPQKPCCSLTCDQVQCGEKYEGGSSPGFSSVRDPCPAPAP

SEQ ID NO: 13642 - DNA, 977 bp, Homo sapiens
gatttccttaattaagatgatcagaggagacttccaagtggagatggtatttgacatgagcagaattttgaaatcaggaaagggctatcatcaaggtgatttttttaaaaaacttgctttaaatatttattgtaaaaagcaaagctgtaaaaactatttaagctgatacttctgcctcttaatttgttttcatgtgaataatttttaagtaattaaatggcattttagtcgggaaaaatagaaaatatgaaacatttataattcttaatattctgaaaactcttcaagttttcagcatggtagaagtagattattttagctatttatttaaactcaattttcttcttgttttaaaaaaccatagcctttcgttgttgtttctcttctttttgacaactattgccaaataagttttatggaatacttgggtttttcttccccatgtaatgctgggcagttagcaatagttctgaattcaggtcacttctctgttgataagtgtaaaatgcatatctataggtcagtgctaacaaggggtctagttagcttcttagctatctgcagaatatattttcttttcatcacaaaacaagtaagactagatttggcatccttcattatcccaaaatgaagcaaaactacttgagtcatttggattatgcccaggaaaacatattgactcagaaagataaacaaggctgggcgcagtggctcacgcctgtaatcccagcactctgggacgccaaggcggacagctcacctgaggtcaggagttcgagacccgcctagccaacagggcgaaacctcgtctccagtaaaaatacaaaaattagccgggcgtggtggtgggcgcctgtaaccccaggccctcaggaggttgaggcaggagaattgcttgaaccaggaagtggaggttgcggtgagccaagattgtgccactgcattccagcctgggtgacagaataagactccatctc

SEQ ID NO: 13643 - DNA, 1151 bp, Homo sapiens
  CDS (192)..(1031)
gttgaagattttcctgagacctcagagcccgtttggatactgggtagaaaatacagcattttcacagaaaaggacgagatcttgtctgatgtggcatctagactttggtttacatacaggaaaaactttccagccattggaggttgtcgggacatttcactctccccacctcggacacaggctggggctgcatgctgcggtgtggacagatgatctttgcccaagccctggtgtgccggcacctaggccgagattggaggtggacacaaaggaagaggcagccagacagctacttcagcgtcctcaacgcattcatcgacaggaaggacagttactactccattcaccagatagcgcaaatgggagttggcgaaggcaagtccataggccagtggtacgggcccaacactgtcgcccaggtcctgaagaagcttgctgtcttcgatacgtggagctccttggcggtccacattgcaatggacaacactgttgtgatggaggaaatcagaaggttgtgcaggaccagcgttccctgtgcaggcgccactgcgtttcctgcagattccgaccggcactgcaacggattccctgccggagctgaggtcaccaacaggccgtcgccatggagacccctggtacttctcattcccctgcgcctggggctcacggacatcaacgaggcctacgtggagacgctgaagcactgcttcatgatgccccagtccctgggcgtcatcggagggaagcccaacagcgcccactacttcatcggctacgttggtgaggggctcatctacctggacccccacaccacgcagccagccgtggagcccactgatggctgcttcatcccggacgagagcttccactgccagcacccgccgtgccgcatgagcatcgcggagcttgacccgtccatcgctgtggggaagcagggaaggctggtgcgatctctcattccttgggctccacgtccgagttcatggtgcgccgctgtgctgggagctgcagtggtaatgtgtgggacaccttgaccaaaggggagctttgtctcgtgtgttttgaaaaaggcttaatgaagagaatgttgttcattcttagtagtatagtttgcaattcttaatggcaaataataagtttcagtagaaaac

SEQ ID NO: 13644 - protein, 280 aa, Homo sapiens [sequence omitted]

SEQ ID NO: 13645 - DNA, 1524 bp, Homo sapiens
  CDS (379)..(897)
ttccagccctggccccaccttcccttcagcagtccgtgttgtctgggtagtctgtggccagtgtagccctgttgcagagtgaggtctccgctgaaaggagaactggcgtggtcgttgtttgaaaagaatcaggccccagcaaggttcactggaagctaacactggacgcagcagagtctgggtctgacaggaggtcagcgtcaccattttgagggtgatggacatgttttctgcactctagcactgtgtggaagcgctggctgacagcagcctggctgtccgaattccaaagaaatgggctccttctaaatattcaggtgctgctgcatactcgggagcacacgctttccttgcccttgcaggtgggggtgtccttggatggagagggtgctcctctgtgccgcgtctcagcagccccaccagagctgcctccccttccccatgcaggtgcagggagctcacctgaggctgaggcaggcccaggcccagcacttgcaggaggtccggctggtgccccaggaccgtgtggccgagctgcatcgcctgctcagccttcagggagagcaggccaggaggcgcctggatgcacagcgggaagaacatgagaaacagctgaaagccacagaagagcgggtggaagaggcggagatgattctgaagagtatggaaatgctcctccaagagaaagtggataagctgaaggagcagtttgaaaagaacacgaagtccgacctgctgctgaaggagctgtacgtggagaacgcccacctggtgagagcacttcaggccaccgaggagaagcagcgaggcgccgagaaacaaagccgcctcttggaagaaaaagttcgcgctctcaacaaactcgtcggtaggattgcccccgcagccctctctgtgtaaagacagattattttctaggattcattcgaaagcacatcttttaaataagccactgtgctgccttagattccgtgggtcatgagccatgagtcctgggacatctgaggattgggattctttgttcaccccgcagatagttaatgaatggtctgccctgggcaagatggaggtgggggctgggggaatatgcatgttgcagaagccggcgtttttattagcggtcctgagtaatttcccttggcaaaattcccagttttgccactcgctggagccagatcctgggagctgtcagcaaggagcaggtaagtgagcagttatggacagcactttccatgtggtgcttccgaccctggctgtcagagtgaaatgtaaagtcagggctctgtacagttttgccatttcactgttctgctttaagcttagcttattagaactcttggtggagggtgcgtacacacattccagaaaaggcttcactcgctgggaacgtcaacccagcgagaaaggaggggaagccccttctccggggaccttatctgtggactcagggatgatggtgtttattgcaaatgcacaatctttttcccattgaaatgtcatcacactggaaattgtactatatgt

SEQ ID NO: 13646 - protein, 173 aa, Homo sapiens
MERVLLCAASQQPHQSCLPFPMQVQGAHLRLRQAQAQHLQEVRLVPQDRVAELHRLLSLQGEQARRRLDAQREEHEKQLKATEERVEEAEMILKSMEMLLQEKVDKLKEQFEKNTKSDLLLKELYVENAHLVRALQATEEKQRGAEKQSRLLEEKVRALNKLVGRIAPAALSV

SEQ ID NO: 13647 - DNA, 1941 bp, Homo sapiens
  CDS (107)..(1483)
ttagcgtctcagttgcgctgcagccggggaggaaggaggaggccgagcctggggcggagtttgggctgactggggctggaccgggcaagacgccgccgctgcccggatgttgcgatggctgatcgggggaggccgagaaccgcagggactggccgagaaatctcctttacagacaataggtgaagaacaaacccagaatccctacactgaactgctagtactgaaggctcatcatgatattgtacgatttctggtacagttagatgactacagatttgcatctgctggtgatgatggaattgtagttgtgtggaatgcccagacaggggaaaaacttttagaactgaatggacacactcaaaagataacagctattattacatttccttccttggaatcttgtgaagagaaaaatcaactcatcttgacagcctctgctgatagaacagttattgtgtgggatggtgatactaccagacaagttcagagaatatcatgcttccagtctactgtaaagtgtttaactgttcttcagagactagatgtttggctttctggtgggaatgacctgtgtgtgtggaaccgaaaattagatctcctgtgtaagactagccacctttctgatacaggtattagtgctttggttgaaatacctaagaactgtgttgtggcagcagttggcaaagaactgataattttcaggttggtagcacccacagaaggatcactagaatgggatattcttgaagttaagcgcctccttgatcaccaggataatattctctcattgattaatgtcaatgatttgagttttgtcaccggctcccacgtcggagagctgatcatctgggatgccctggactggaccatgcaggcctatgaacgcaacttctgggacccatctccacaactggacacccaacaagaaataaaactctgtcaaaaatcaaatgacatttctattcatcatttcacatgtgatgaagagaatgtatttgctgcagttggaaggggtttatacgtgtatagccttcaaatgaagcgtgtgattgcctgccagaaaactgcacatgactccaatgtcctgcacattgccagacttccaaacaggcagttaatctcatgctcagaagatggcagtgtacgcatttgggagttaagagaaaaacagcagcttgcagctgagcctgtaccaacagatttttttaacatgtggggatttggaagagtcagcaaacaagccagccaacctgttaaaaagcagcaagaaaatgctacttcatgttcactggagcttattggagatttgattggacactcatcatctgtggagatgtttctatactttgaagatcatggactagtgacgtgctccgctgatcatctcattattttgtggaaaaatggagagcgagaatctggattgcgcagtttaagattatttcaaaaattagaggagaatggtgacttataccttgctgtctagtttaaggaattaaaaatacacatgcatgaaccttgaacatcaaatatcgggtactactctgaaaaccattaatatattgatcacttaaattggtaattttttttgtcagtccataaaattctgcatgtttaaattttttgtggacctaccaaccaggaacatgttgcttctcaggtcctagtatatcctccaaagaatataccacaagtttttccatttgactttgagctgctgttgaagtggtgagtgctgtgttttgagcttattttgaacctagatccttgtgaaaggtacaaatagaggtaatagttaagttatggcatttattagaagttttattatttggcttcctttagaattattgtgaagtttaaaaatagcctttctcctgcaaattttcctagtctttagtaactgttagtgttctatatagcacaaacttgaatctctcagcc

SEQ ID NO: 13648 - protein, 459 aa, Homo sapiens [sequence omitted]

SEQ ID NO: 13649 - DNA, 1552 bp, Homo sapiens
  CDS (163)..(1047)
atacttagagctagaggagaggcccctacacatgtccaccatcatccttcgggctcatttaacacttactatttctatactgtaaatggcaacaagattttccctacctcaacctgactttgagcaggagctgttgctggctaagcagcctgaacaattcacatgctcagaacagagcctactcgaccccctccctcccagagcagtcggccccagaagaaggagagacggttcaacgtgctcaaccaaatattctgcaaaaacaagaaagaagagcagagagcccatcagaaggatcccagcagggaccgatacagagaggaggacacctcagaagtcaatgacatcatcaccacctttgatagcatcgtgggtaccaactgccaagaacagcctggtgatcaggtggctatggttgaatttaagaagaaaacctcagacaattcaaaatatctcttaccagaaaagaaaccgctggcccgtaaggggcttccaccaatcagaacgcagagtctcccacccatcaccctgggcaataacttcctaacagcctcccatagggccacttcccatgcaggcctgagctctgctcctcatcatatggcccagcgatctcagaaaagtcgaagtgagcaggatttattaaataacagaactggctgccagatgttactagataacccctggaagagtgattctaatcaggtattttcctacaaagtttggactgtgtcttcttctgataagctgctggacagattgctcagtgtccggcctggtcaccaagaggtctccgtgccaccacaccttcgccatctacataatccatcatcaggacaaaattttcagcatctttccccaaacagacacaaaatcagggatcttcctttcactcggaacaacctagctcccctaccagatcaaaaatttctatctggagaacctctgcggacaaaccgagtgcttcctgcaattccaagtcaacgaagacacagcacagcagcagaagagagtgaacattctgccaaccccaccagtgatgaaaattaactgtgggccactcgctgcagaaatgtagatgaatatgtattttcaactctcaaaggacaagattactccagtttgtaagaacgaagaccaatttagtaagctgcattctataagccatcagttttataactcgaaattctttattccaaataaagatactccctaaataagcacttagaatatttgggtgtgcatattaagtctgtgaatttctgtgacttccacatgccaaaattaaaagacaaaatatgttatcagtaggaaaactgagctatgtttggtttgctttgtggcatgtgcactgtttttttgttattgttctttggttgtttttttgctgaatgattttatgttttgggaaaaaaagtacgctttgctgaataaaagcaaaaaacaaaacaaaaaaaaaaccacatcccagacaaacatgtcttcacatttattgtcattctaacttgaactaatgaaacctatttaaaaataaattcctatgatcagtcac

SEQ ID NO: 13650 - protein, 295 aa, Homo sapiens
MLRTEPTRPPPSQSSRPQKKERRFNVLNQIFCKNKKEEQRAHQKDPSRDRYREEDTSEVNDIITTFDSIVGTNCQEQPGDQVAMVEFKKKTSDNSKYLLPEKKPLARKGLPPIRTQSLPPITLGNNFLTASHRATSHAGLSSAPHHMAQRSQKSRSEQDLLNNRTGCQMLLDNPWKSDSNQVFSYKVWTVSSSDKLLDRLLSVRPGHQEVSVPPHLRHLHNPSSGQNFQHLSPNRHKIRDLPFTRNNLAPLPDQKFLSGEPLRTNRVLPAIPSQRRHSTAAEESEHSANPTSDEN

SEQ ID NO: 13651 - DNA, 1551 bp, Homo sapiens
aataaacaaacccgtaaactgttttatacagagacagcaaaatcttggtttattaaaggacagtgttactccagataacacgtaagtttcttcttgcttttcagagacctgctttcccctcctcccgtctcccctctcttgccttcttccttgcctctcacctgtaagatattattttatcctatgttgaagggagggggaaagtccccgtttatgaaagtcgctttctttttattcatggacttgttttaaaatgtaaattgcaacatagtaatttatttttaatttgtagttggatgtcgtggaccaaacgccagaaagtgttcccaaaacctgacgttaaattgcctgaaactttaaattgtgctttttttctcattataaaaagggaaactgtattaatcttattctatcctcttttctttctttttgttgaacatattcattgtttgtttattaataaattaccattcagtttgaatgagacctatatgtctggatactttaatagagctttaattattacgaaaaaagatttcagagataaaacactagaagttacctattctccacctaaatctctgaaaaatggagaaaccctctgactagtccatgtcaaattttactaaaagtctttttgtttagatttattttcctgcagcatcttctgcaaaatgtactatatagtcagcttgctttgaggctagtaaaaagatatttttctaaacagattggagttggcatataaacaaatacgttttctcactaatgacagtccatgattcggaaattttaagcccatgaatcagccgcggtcttaccacggtgatgcctgtgtgccgagagatgggactgtgcggtcagatatgcacagataaatatttggcttgtgtattccatataaaattgcagtgcatattatacatccctgtgagccagatgctgaatagattttttcctattatttcagtcctttataaaaggaaaaataaaccagtttttaaatgtatgtatataattctcccccatttacaatccttcatgtattacatagaaggattgcttttttaaaaatatactgcgggttggaaagggatatttaatctttgggaaactattttagaaaatatgtttgtagaacaattatttttgaaaaagatttaaagcaataacaagaaggaaggcgagaggagcagaacattttggtctagggtggtttctttttaaaccattttttcttgttaatttacagttaaacctaggggacaatccggattggccctcccccttttgtaaataacccaggaaatgtaataaattcattatcttagggtgatctgccctgccaatcagactttggggagatggcgatttgattacagacgttcgggggggtggggggcttgcagtttgttttggagataatacagtttcctgctatctgccgctcctatctagaggcaacacttaagcagtaattgctgttgcttgttgtcaaaatttgatcattgttaaaggattgctgcaaataaatacactttaatttcagtc

SEQ ID NO: 13652 - DNA, 1391 bp, Homo sapiens
attgtttttagagatggggtcttgctgtgttgtctgggccggagtacactgggtactcacagatgtgatcattgcatactacagccttgaactcctgggctcaagtgatccttctgtctcagtttcctgagtacctgggactagaggtgtgtgccaccatgctggttatctataagcacttttacatttatttatttatttaattcttgtagtaactctttgtggtaggtactattatcctaagtatcctataagaaaactgaggcactgcagtttgaagtaacttgctcagggtcactcagccaattaatggtggagcagcggtttgaacccaggctgtctagttccagagcctatagccataactactgtcttatattatccctaagaatatgtaaacgacgtcaaaccccgatcctatttgcattcccctccccacgggtaactatcttgaatcagagccaatactacactattgcattagggtataatttaatcattaggggatagttttcatgcagaaactagaaagcactgatgagattctactcatgttcctttaccagctttagttataaaggggaagcgggaaaatggaagcacgtagaggataaggtgataacctccaccttaccatcttccttcttcccccttaaaaaagaaatggaatgttgagtctatctggaatgttgacaggttaaaaaggagctgttgaagcctgtcgttcacagtagcatcgaaaggtgaaaatttgtctccacttgagtaccttgaaatggcaggtgtgttattggaatattgggctattgttggtcagtactgctgagtatagacttttgtaggtgtttatcctgaatctgtagtgaccggaatttcagcaaatgaggtatttaatactgttttttcccttttgtttctgaaaggagcagaggatagaaagacaattgttctagcctcaagtcccagtacactcattagttaagtgtgacggtggtcaagtgatgttgctttgtgtgtctgttttctcttaggtggttcaggtaccctgaaataaatcctaacttatatgtctgttgctcattcatctctgtgtgtggagaaagtgatttaaagtgtcctttctttaagaaggaaagagccagggcatagtggctcgtatctgtaatcctagcactttgggaggctgaggcaggaggattgcttcagtcaggaggttgagactggcctgggcaacatagtgaaaccatgtctctactaaaaaaaaaaaaaaaaaaaaattagcttcggagactgaggcgggaggatcccttgaactccagagatggaggctacagtgagctatgatcttgccactgcactccagccttggtgacagagtcacacactatctc

SEQ ID NO: 13653 - DNA, 2152 bp, Homo sapiens
  CDS (643)..(1395)
ccatcatgcatcttcaggtctgctagagcaaaccctgagggctgctttagagagggttatcaagggagacttcttggaggaggtggtttctgactgacttgaatgccaggactgtttgccctgccccctgccatctctccttcccagatggtgctccaagaggcagcttgtggacctggtgatggaaggggtgtggcaggagctgctggacagcgcccagattgagatctgtgtggctgctggtgagtgaggagcggcaccctgccccagagcagcaacaggcttggcagcggctctgcaacaggggctcatttcccgccccatcaaccccacgggtagcggctgtcactgtgcaccctttgtgatgaggctgagaggggaagtgatgcagagccggggaaggtagagctttggagaagccagagcccccactctgcactcctgcccaccctcatcccagcaggctggggtggtccacagggggccactgtggcttgatacccctctgaaacgagacacctcccctgaccaccttgtggatgcccagggtctgaaggggtgggagcatggtgccctgtgagctgaggctcagggagcatagttgggacaggactggcttcagagcctacaggcttaggatgaatgccttcttcccaaaacacccaggttctgccccaaagcattccagctcctccttcaggctgtggctcttccatagaaaatctggtctcttccctggggctctggctcttccctgaagtcatcaggcacctgccctgcattgtggttcttccccagagcatcctttcccgtcccccaactacctacccaaaagcctccagaatcaaccgcaggaccacccaggctcctcccccaggaccacccaggctcctcccctgctctggctccaccccaggaccacccagactcctcccccaggctctggctccaccccagggtcacccaggcttctcctccaggttctggttccaccccaggaccacccaggctcctcccccaggaccacccaggcccctcccccaggctctggttccaccccaggaccacccaggctcctcccccaggaccacccaggctcctcccctgctctggctccaccccaggaccacccagactcctcccccaggaccacccaggcccctcccccaggctctggctccactccaggaccacccagactcctcccccaggaccacccaggaccctcccccaggctctggctccaccccagggtcacccaggctcctcccccaggctctggctccaccccaggaccacccaggctcctcccccaggctctggctcctccccaggaccacccaggctcctcccccaggctctggttccaccccagaaccaccaaggctcctcccctagaggttcccaggccaggacgtctccaaatgtggtccagatgtgcaggaccttcatcaagatggagccagccctcagcctcccgccccgaaacccagagagctggctgggtgacgggggcatagaggctgactgctgcctggcaggtggggcgctcgagagaactgcggctgcgtctaccagctccgggtccgccttctggatgtgtatgaaaaggaagtggtcaagttctcagcctcacctgacccggtccttcagtggactgagaggggctgccgacaggtctcccacgtcttcaccaactttggcaagggcatccgctacgtatcttttgagcagtacgggagagacgtgagttcctgggtggggcactacggcgcccttgtgacccactccagtgtgagggtcaggatccgtctgtcctagcgactggactactgcctgacgttgtcagtcaagaccagccttgcagccaggtgcagtggctcacacctgtggaatcccagcacttcaggaggccgaggtgggaggatcacttggagctcgggagttcaagaccagcctgggcaacatagtgaaaccgtctccacaaataatttttaaaaaattagccaggcatggtggtgccgcctgtagtcccagctactcaggaggcttgggtgggaggattgcctgagaccaggaggttgaggctgcagtgagccgtgatttcaccaccactccagcctgggtgagaaagcaagaccctatatcaatg

SEQ ID NO: 13654 - protein, 251 aa, Homo sapiens
MPSSQNTQVLPQSIPAPPSGCGSSIENLVSSLGLWLFPEVIRHLPCIVVLPQSILSRPPTTYPKASRINRRTTQAPPPGPPRLLPCSGSTPGPPRLLPQALAPPQGHPGFSSRFWFHPRTTQAPPPGPPRPLPQALVPPQDHPGSSPRTTQAPPLLWLHPRTTQTPPPGPPRPLPQALAPLQDHPDSSPRTTQDPPPGSGSTPGSPRLLPQALAPPQDHPGSSPRLWLLPRTTQAPPPGSGSTPEPPRLLP

SEQ ID NO: 13655 - DNA, 1648 bp, Homo sapiens
agggaaatgtttgtactatatagaatccatatatttgactgcaagttacaaagttttaagaacatgatggttggtctctaatatatttggaactgattcataagaaaagttattaaaattatctttgaaacacctcttgaagctaatttattagaaaaaatatttcagttggaaggctgtagaagtaatgtttaaatgctaagtcataagttcaggatatttcttttctatttggttgtgcaaaatgtttttcccagttatttaatcgaagtaattccttttaatagaaagagtcagttaaaattcagcattcatggatagatttttggaacgaaaaagggtaagtataagaaaatattgcaaacacattaaaacagttgtatggtgcaggaaaagaagattggaaaaagaccaaaacacacttctccagcaacactccatcagctttttaaaatttagagctatctgctaattttttccctcttccttctcaataaatgaaacaaacactgggcagctgcaggtttctcccaatcatgtctctttatgtaaagacagtaacatgcaaacacttttagtttacatccctcattcacagtgtaaagcaggaaatggtgtgggagatgtgagaccattctgaggtcagcgatagcccaaaggctctgcagtattccctccaatggccaaggattccgtgtgtcatctgcaggagtgagtaggcctgctgtatttcttgtaactgctgggtgttacaaaataagttacaatgttttacactttaaaaaaaaaacagaaggaacatttgctttattggttacttactagtttagcctctaggttatggcacagcatgctaaaaaatcatgtgtttaaaagtaaatgttggtaaaatgctggcatctggtcctattgtgttgatgcattttcacttctgtggtcataggaaatggactggtctaaagagagtgaggcacaacacaagcagggcactagtttgaataggaagtcaatcatatttggttttatggcctggtgtattttgggtttaagataaaatagggaaaaatgtcagaaatgatccctatgcatttattttcatggatacccttaatttcatgggcatgcctaataatgatctatgttctaactggagcttagggcttattttagatattggagtgtagctttattacagatggattttatccttcaacattgcattttgatcaactttgtatattcacgtgtattaaaatattgtgcactaaatgttttgcccttgtttgctattatatggtcaaggcatttatcagcactattgtaatgaactcatgtaagtggcatgggtcagggaaaattatttcctacttttctgcctaattaaatttctgttttccagtattacattaatttatttttggcttccatttctgtataaccaaaatagttactgtatttgtgtggcattcctattattttgttgctaaaaatattgtagtttttatttaaaataatctgtaccttaattttttaaaatgtaaccaattcaagcactttaagcaataatgtcaatcttgtgaaattttaatcagtttaacaccctgcctctaaaattgtttgcaaaaaataaataaatgaataaaatggg

SEQ ID NO: 13656 - DNA, 1571 bp, Homo sapiens
tctttgatgtttataacacaagttgtaattggcacattacaaaacattttctacaaacaggacagggtatgctataagtaacattcttactgcagaagatgacaggcgttggttatttgtacttctcttgctcaattattacagttttaaacataaagacaatgatttcaagttttatttgatgaagaaacaggaatgcttcatgattgaggatcagtatgatgactgaagaccttgattctagcgtgctcagtagtttagttccttagacatgcctttggtttcagtcatttggtgagtatttagtgcctctcacatgcactgcactgtgcggagagcacttggattacaggaagcatgctctgtactctcagtggtgtgttcagttgaagaaacacataaaataactgaaagatattcagttactagactaggtagtattgactaagttcaggagttgagaaaaggattagatcagtgaaaaaatagactgccttgtgagcaatagcagatatgggctgcgctttgaaacgaacaggtgggatttgcagggaagggtattctgattgggataatggctcgtaggagacagtgaagatcaggactaccaaaatggaatggatgggcctgttggggattagcagaagtgcttaggtgggtggaattacagagggctaggaaagctagacagagctagtcaaaatgagacctgatgtgaaaggccactagggcaccagcctttttaatctgaaagctctgcttcctctgtttctttatcctgttgctgtttgttgaccacataattatttgtttacgtcatcagctggcacagggcctttatgaggtcagagactgcctagccctgtgttcctggcacctaacaatgcctgtcataaaaacaggcattcagtacgtttttgatgatgaacaaattatacttatttccttggtatttgacaactacttgactgtatatgatgataattagaatatccactctgagaaatcatttaaaagagaaaactcattcaatgcaatctcaaatgcctttactcatcacgctctcattttcttccagattcctggtgcccctgatgatgaagcagtacggatatttttagaatttgagagagttgaatcagcaattaaagcggttgttgacttgaatgggaggtattttggtggacgggtggtaaaagcatgtttctacaatttggacaaattcagggtcttggatttggcagaacaagtttgattttaagaactagagcacgagtcatctccggtgatccttaaatgaactgcaggctgagaaaagaaggaaaaaggtcacagcctccatggctgttgcataccaagactcttggaaggacttctaagatatatgttgattgatcccttttttattttgtggttttttaatatagtataaaaatccttttaaaaaaacaacaatctgtgtgcctctctggttgtttctcttttttattattactcctgagttgatgacattttttgttagatttcatggtaattctcaagtgcttcaatgatgcagcatttcttgcact

SEQ ID NO: 13657 - DNA, 1604 bp, Homo sapiens
gttgttgaggcccttcttgtgtatctggagaaaatagaggttctgactcctcaggagcaaaaaacataacctgaagagggaggaagtggatttggggttcaccatttcttggggcacacttgattgaaaactgagacttctgaagagaaggccagaagatacaaagacagaccatcccagttgaatgctgtcttccaagaacagaagaaaatgatccaggcccaggtaactgacttttggtttgttttattctttcctttgttccataatagatttgtagaagcctataaacatcaatttcactaatataaaaagtataaatttcaaaaagcaggatctggagagaagtaagcttagtttttaaactcaatatcatgcaaaatagtaggataaggaatataatgttcatagcattaacactaaattatgaattttgtgacaccatgcatggctggaggatcctgtggattatattagctgtcagcttgcatctaatatctctgacagccaatgtcacaagaaaatcataatttacatggtatgtcctgtttttgaagataaaacagattacttcctgggggttgccattatttcatggcactttggtctcaggaaatttcttcagtggttcttcctagagttgatgtggtggatggtgtccagaatagcagccttctcataaattcagatgcaggtttcctgtggctgtttcttgaaggactccttatatactgttacggaatagactaagcaaacagtaaacacagggaccaacacaagttaatttcagccttgtggcagtctggatttaacttggaataaaacctagacatcctgggaatatggcaggattccaggactttcaaatggttctcaatgaacagatagctgaactggtgtttgaatatagatttggagacagggagttgaaagtgatattgtctgaacaggacttggattggagtttacagatttcctttagactttcaccttgtagaaaatgccaagtccttattgtatagtaaataattgaacaaagggagctttggcctttgtgttcaagctaatggagggtgagctctgggcttctggaatatcttgctaatggtagtgtctttgtttgcttgggtcctttggccactggacagcctaaaaatacgaactatgatagatctgtgatctatgataggccagaaacttccagaactagaggctaaagttaaaacctgacttctgggagagtgtggacctaagatcagccacataggtcatctgtgattgtgtcccagtaaagtaagaaagtacacatatcaaaaaataaatttcggctgggcgcggtggctcatggctgtaatccagcactttgggagaccgaggtgggtggatcacgaggtctggagatcgagaccatcctggctcacaccgtgaaaccctgtctctactaaaaatacaaaaaattggtcgggtgtggtggcaggtgcctgtagtcccagctactcgggaggctgaggcaggagaatggcgtgaacccaggagacggaaattgcagtgagccgaaatggtgccactgcactccagcctgggtgacagagagactccatctc

SEQ ID NO: 13658 - DNA, 1585 bp, Homo sapiens
  CDS (896)..(1282)
aacaggtacgaaaaaatcaggctactaagcccactgttaatatagacgcagaccaattgttaggaacaggtccaaattggagcaccattaaccaacaatcagtgatgcagaatgaggctattgaacaagtaagggctatttgcctcagggcctggggaaaaattcaggacccaggaacagctttccctattaattcaattagacaaggctctaaagagccatatcctgactttgtggcaagattacaagatgctgctcaaaagtctattacagatgacaatgcccgaaaagttattgtagaattaatggcctatgaaaatgcaaatccagaatgtcagtcggccataaagccattaaaaggaaaagttccagcaggagttgatgtaattacagaatatgtgaaggcttgtgatgggattggaggagctatgcataaggcgatgctaatggctcaagcaatgagggggctcactctaggaggacaagttagaacatttgggaaaaaatgttataattgtggtcaaatcggtcatctgaaaaggagttgcccagtcttaaataaacagaatataataaatcaagctattacagcaaaaaataaaaagccatctggcctgtgtccaaaatgtggaaaaggaaaacattgggccaatcaatgtcattctaaatttgataaagatgggcaaccattgtcgggaaacaggaagaggggccagcctcaggccccccaacaaactggggcattcccagttcaactgtttgttcctcagggttttcaaggacaacaacccctacagaaaataccaccacttcagggagtcagccaattacaacaatccaacagctgtcccgcgccacagcaggcagcgccacagtagatttatgttccacccaaatggtctctttactccctggagagcccccacaaaagattcctagaggggtatatggcccgctgccagaagggagggtaggccttattttagggagatcaagtctaaatttgaagggagtccaaattcatactggggtaatttattcagattataaagggggaattcagttagtgatcagctccactgttccctggagtgccaatccaggtgatagaattgctcaattactgcttttgccttatgttaaaattggggaaaacaaaacggaaagaacaggagggtttggaagtaccaaccctgcaggaaaagccacttattgggctaatcaggtctcagaggatagacccgtgtgtacagtcactattcagggaaagagtttgaaggattagtggatacccaggctgatgtttctatcattggcataggcaccgcctcagaagtgtatcaaagtgccatgattttacattgtctaggatctgataatcaagaaagtacggttcagcctatgatcacttctattccaatcaatttatggggccgagacttgttacaacaatggcatgcagagattactatcccagcctccctatacagccccaggaatcaaaaaatcatgactaaaatgggatagctccctaaaaagggactaggaaagaatgaagatggcattaaagtcccaactgaggctg

SEQ ID NO: 13659 - protein, 129 aa, Homo sapiens [sequence omitted]

SEQ ID NO: 13660 - DNA, 1689 bp, Homo sapiens
  CDS (186)..(1688)
ataaatagagccggttttgtggtgttttcactactcggttggatgcctcagccatagtaagtgggaaagtgagcgagcaagcgagctactagcgaccggaggaaagtgaacagggggagaagggaacagcaagaacaggactccagagcgataaacactcgctggagagggagacgcaggaagcgatgaaagagatgtctgcaaacaccgtgctggacagccagcgtcaacaaaagcattatggaattacctccccaattagtttggcatctcctaaagaaattgatcatatttacacacagaaattaattgacgccatgaaaccatttggagtgtttgaagatgaggaagaattgaaccacaggctggtggttcttggtaaattgaacaatttagtaaaagaatggatttctgatgtcagcgagagtaagaacctcccaccttctgttgtggctactgttggtggtaaaattttcacatttggatcctataggcttggagtacacaccaaaggagctgacattgatgcactttgtgtagctccaagacatgtggaaagatctgatttttttcagtctttttttgaaaaattgaaacatcaagatggcattagaaacttaagagctgtagaagatgcctttgtacctgttataaaatttgaatttgatggtattgaaattgatctagtctttgcaagactggcaatacaaaccatatcagataatttagatctaagagacgactctcgcctgagaagccttgatataaggtgtattcgcagcttaaatggttgtagagttactgatgaaattttgcatttagtgccaaataaagaaacttttagactcaccctaagagctgtcaaattatgggcaaaacgacgtggtatttattccaacatgctaggattccttggtggtgtctcctgggcaatgctagttgcaagaacttgccaattgtatccaaatgcagcagcatctactttagttcataagttctttttagttttttccaagtgggaatggccaaatcctgtgctgctgaagcaaccagaagaaagcaatttgaatttgcctgtctgggatcctcgggtaaatccatcagataggtatcatctcatgcccataatcacccctgcctacccacaacagaattctacgtataatgtgtccacatcaactcgaacagtaatggtagaagaatttaaacaaggtcttgcagtcacagatgaaattcttcaaggaaagtcagattggtccaaactacttgagccaccgaatttctttcaaaagtatagacattatatagtattgactgccagcgcatcaacagaagaaaaccatctagagtgggttggattagtagaatctaaaatccgtgtacttgttggaaacttggaacggaatgaatttattactcttgcccatgtgaatccccagtcattcccagggaataaggaacatcataaagacaacaattacgtatcaatgtggttccttgggataatttttcggagagtagaaaatgcagaaagtgtcaacatagacttgacatatgatatacagtcatttactgatacagtgtacagacaggcaaacaatataaatatgctaaaggagggaatgaaaattgaagcaactcatgtaaagaaaaaacaacttcaccactaccttcctgcagaaattcttc

SEQ ID NO: 13661 - protein, 501 aa, Homo sapiens
MKEMSANTVLDSQRQQKHYGITSPISLASPKEIDHIYTQKLIDAMKPFGVFEDEEELNHRLVVLGKLNNLVKEWISDVSESKNLPPSVVATVGGKIFTFGSYRLGVHTKGADIDALCVAPRHVERSDFFQSFFEKLKHQDGIRNLRAVEDAFVPVIKFEFDGIEIDLVFARLAIQTISDNLDLRDDSRLRSLDIRCIRSLNGCRVTDEILHLVPNKETFRLTLRAVKLWAKRRGIYSNMLGFLGGVSWAMLVARTCQLYPNAAASTLVHKFFLVFSKWEWPNPVLLKQPEESNLNLPVWDPRVNPSDRYHLMPIITPAYPQQNSTYNVSTSTRTVMVEEFKQGLAVTDEILQGKSDWSKLLEPPNFFQKYRHYIVLTASASTEENHLEWVGLVESKIRVLVGNLERNEFITLAHVNPQSFPGNKEHHKDNNYVSMWFLGIIFRRVENAESVNIDLTYDIQSFTDTVYRQANNINMLKEGMKIEATHVKKKQLHHYLPAEIL

SEQ ID NO: 13662 - DNA, 1948 bp, Homo sapiens
  CDS (607)..(1809)
gtaggagtccgcggcagcctccgggtaagccaagcgccgcgcagtgctgagttcccgcacgccgcagagccatggagatcggcaccgagatcagccgcaagatccggagtgccattaaggggaaattacaagaattaggagcttatgttgatgaagaacttcctgattacattatggtgatggtggccaacaagaaaagtcaggaccaaatgacagaggatctgtccctgtttctagggaacaacacaattcgattcaccgtatggcttcatggtgtattagataaacttcgctctgttacaactgaaccctctagtctgaagtcttctgataccaacatctttgatagtaacgtgccttcaaacaagagcaatttcagtcggggagatgagaggaggcatgaagctgcagtgccaccacttgccattcctagcgcgagacctgaaaaaagagattccagagtttctacaagttcgcaggagtcaaaaaccacaaatgtcagacagacttacgatgatggagctgcaacccgactaatgtcaacagtgaaacctttgagggagccagcaccctctgaagatgtgattgatattaagccagaaccagatgatctcattgacgaagacctcaactttgtgcaggagaatcccttatctcagaaaaaaacctacagtgacacttacatatggttcttctcgcccttctattgaaatttatcgaccacctgcaagtagaaatgcagatagtggtgttcatttaaacaggttgcaatttcaacagcagcagaatagtattcatgctgccaagcagcttgatatgcagagtagttgggtatatgaaacaggacgtttgtgtgaaccagaggtgcttaacagcttagaagaaacgtatagtccgttctttagaaacaactcggagaaaatgagtatggaggatgaaaactttcggaagagaaagttgcctgtggtaagttcagttgttaaagtaaaaaaattcaatcatgatggagaagaggaggaagaagatgatgattacgggtctcgaacaggaagcatctccagcagtgtgtctgtgcctgcaaagcctgaaaggagaccttctcttccaccttctaaacaagctaacaagaatctgattttgaaggctatatctgaagctcaagaatccgtaacaaaaacaactaactactctacagttccacagaaacagacacttccagttgctcccagaactcgaacttctcaagaagaattgctagcagaagtggtccagggacaaagtaggacccccagaataagtccccccattaaagaagaggaaacaaaaggagattctgtagaaaaaaatcaagctgagatgagtgaactgagtgtggcacagaaaccagaaaaacttttggagcgctgcaagtactggcctgcttgtaaaaatggggatgagtgtgcctaccatcaccccatctcaccctgcaaagccttccccaattgtaaatttgctgaaaaatgtttgtttgttcacccaaattgtaaatatgatgcaaagtgtactaaaccagattgtcccttcactcatgtgagtagaagaattccagtactgtctccaaaaccagttgcaccaccagcaccaccttccagtagtcagctctgccgttacttccctgcttgtaagaagatggaatgtcccttctatcatccaaaacattgtaggtttaacactcaatgtacaagaccggactgcacattctaccatcccaccattaatgtcccaccacgacatgccttgaaatggattcgacctcaaaccagcgaatagcacccagtcctgcctggcagaagatcatgcagtttggaagttttcatgtactgatgaaagatactctacagaacttgtcaaatctttgaaacttggaatatattgctttcataatatgaagttttattgcctatct

SEQ ID NO: 13663 - protein, 401 aa, Homo sapiens
MISLTKTSTLCRRIPYLRKKPTVTLTYGSSRPSIEIYRPPASRNADSGVHLNRLQFQQQQNSIHAAKQLDMQSSWVYETGRLCEPEVLNSLEETYSPFFRNNSEKMSMEDENFRKRKLPVVSSVVKVKKFNHDGEEEEEDDDYGSRTGSISSSVSVPAKPERRPSLPPSKQANKNLILKAISEAQESVTKTTNYSTVPQKQTLPVAPRTRTSQEELLAEVVQGQSRTPRISPPIKEEETKGDSVEKNQAEMSELSVAQKPEKLLERCKYWPACKNGDECAYHHPISPCKAFPNCKFAEKCLFVHPNCKYDAKCTKPDCPFTHVSRRIPVLSPKPVAPPAPPSSSQLCRYFPACKKMECPFYHPKHCRFNTQCTRPDCTFYHPTINVPPRHALKWIRPQTSE

SEQ ID NO: 13664 - DNA, 1532 bp, Homo sapiens
  CDS (169)..(849)
gggcaaagttttggcggagccatcgctggggctgagcgcgcccccggggggagatcggggagcgcccgatgccgggcggccggagccattgacccgggacgccgccgtccgctgagcagccgaccaccccgccgcctccggtgcatggggactggctgaggagccagcatgggcaactgcgtggggagacagcgccgggagaggccggcagccccgggacacccccgcaagcgagcaggacgcaatgagcccctgaagaaagagcggcttaagtggaagagcgactaccccatgactgacgggcagctgcggagcaaacgggatgagttctgggacacagcgcctgccttcgagggccgcaaggagatctgggatgccctcaaggctgccgcctatgctgctgaagccaacgaccacgagctggcccaggccatcctggatggagccagcatcaccctgcctcatggcaccctctgtgaatgctacgatgagctgggcaatcgctaccagctgcccatctactgcctgtcaccgccggtgaacctgctgctggagcacacggaggaggagagcctggagccccccgagcctccacccagcgtgcgccgtgagttcccgctgaaggtgcgcctgtccacgggcaaggacgtgaggctcagcgccagcctgcccgacacagtggggcagctcaagaggcagctgcacgcccaggagggcatcgagccatcgtggcagcggtggttcttctccgggaagctgctcacagaccgcacacggctccaggagaccaagatccagaaagattttgtcatccaggtcatcatcaaccagcccccaccaccccaggactgatgggcccacggacccctgggaagaggccccgcctggagcactaggcccccaccctgctgctgccttccagtgctgtcattttcttcaggggccctcccctcggtgtggctggtgggtgagccgtgaagggaccctgcctttcagggcactacgcgccaccagttcccggtacccagggagcaggcagccacacacgggccttgcaaccttgtcagagaaaaggcgaacagggccctcaccctgcctgtctcccgaagcaggttcgagccacaagggccaaccaggaggcccctggagcccagatctgtcatctggtgctgccagctgtgctcactctggttttctgctcagggtctggagcagctgctgtctccctcctctgcccccatcccctggctctcccctgggcacagtgccactcccttggaagggagggaaccacccgtgagccccagggcttgggaagcctgaggcgggcctctgcctctccctgcccccagcacaattggcagagatgaggcgggtggtggacggctgggctgtcgtggcagggtctgcacagggccatgtcctggctgtaacccaggcagtgggaggtctgcagcctggtcatggcctccacagcaggtccctgtggacagacatatctgcatatttatcaataaagccttttgctcctt

SEQ ID NO: 13665 - protein, 227 aa, Homo sapiens
MGNCVGRQRRERPAAPGHPRKRAGRNEPLKKERLKWKSDYPMTDGQLRSKRDEFWDTAPAFEGRKEIWDALKAAAYAAEANDHELAQAILDGASITLPHGTLCECYDELGNRYQLPIYCLSPPVNLLLEHTEEESLEPPEPPPSVRREFPLKVRLSTGKDVRLSASLPDTVGQLKRQLHAQEGIEPSWQRWFFSGKLLTDRTRLQETKIQKDFVIQVIINQPPPPQD

SEQ ID NO: 13666 - DNA, 1608 bp, Homo sapiens
  CDS (25)..(1326)
agttcgccgcttgcaccgggaccgatgccatctgagacgcacgcgatgctggcgacgctggcgagggtggcagctctgcgcagaacctgcctcttctccggccggggcggcgggagggggctgtggactggccgcccgcagtcagatatgaacaatataaagccattggaaggggtaaaaattctggatctaacaagagtcctggcgggaccttttgctactatgaatttaggagatcttggagcagaagttataaaagtggagagaccaggagctggtgatgatacacgaacttgggggccaccttttgttgggacagaaagtacatattatctcagtgttaaccgaaataaaaaaagtattgctgttaatatcaaggatccaaaaggggtgaaaatcatctattgttccatcacagggtatggtcagacaggtccaatttctcagcgagctggttatgatgctgttgcctcggctgtttctggtctgatgcacatcacagggcctgagaatggagatccagttcgcccaggagtagctatgactgatcttgccactggcctgtatgcatatggagctattatggctggattgatacaaaaatacaaaactgggaaaggactgttcattgattgtaacctgctgtcatcccaggtggcgtgtttgtctcacatagctgcaaattatcttattggtcaaaaggaagcaaaacgttggggtacagctcatggcagtatcgttccttaccaggcttttaaaaccaaggatggctatattgtagttggagcaggaaataaccagcagtttgccaccgtctgcaagatcttggatttgcctgagttgattgataattccaagtataaaactaaccaccttcgggtacacaatagaaaagagcttattaaaatattatctgaacggtttgaagaagaactgaccagcaagtggttatatctttttgaaggcagtggagtcccgtatggcccaatcaacaacatgaagaatgtatttgcagaacctcagaacgctgtctctggcttccaaagcctgctgcattccttggcccatggccccttccttcatcttcaaggatcagcaagggtattacacaatggcctcgttatggagatggagcatccaactgtggggaagatttccgtcccaggcccagctgtgagatacagtaagttcaagatgtcagaggccaggccgccccccctgctcgggcagcacacaacgcacatcctgaaggaggtcctgagatacgatgacagggccatcggggagctgctcagcgctggagtggtggaccaacatgaaactcactgacaaaggaaaagggctcttcctcataacctcgatccgaatacactggcaaaggcaacactttgcttggacccttctccccagttctgataccactaagaagaagatttagagtaactccagatttcttacatggcatctccagaatggctctggtattaatgaatctagtgccttttaaatgtatcccacgttttgttccctaccatcttttttttcagatgatgatttcattatggatttgtgggatttttaaaaataaagatttaatttttttcctgg

SEQ ID NO: 13667 - protein, 434 aa, Homo sapiens
MPSETHAMLATLARVAALRRTCLFSGRGGGRGLWTGRPQSDMNNIKPLEGVKILDLTRVLAGPFATMNLGDLGAEVIKVERPGAGDDTRTWGPPFVGTESTYYLSVNRNKKSIAVNIKDPKGVKIIYCSITGYGQTGPISQRAGYDAVASAVSGLMHITGPENGDPVRPGVAMTDLATGLYAYGAIMAGLIQKYKTGKGLFIDCNLLSSQVACLSHIAANYLIGQKEAKRWGTAHGSIVPYQAFKTKDGYIVVGAGNNQQFATVCKILDLPELIDNSKYKTNHLRVHNRKELIKILSERFEEELTSKWLYLFEGSGVPYGPINNMKNVFAEPQNAVSGFQSLLHSLAHGPFLHLQGSARVLHNGLVMEMEHPTVGKISVPGPAVRYSKFKMSEARPPPLLGQHTTHILKEVLRYDDRAIGELLSAGVVDQHETH

SEQ ID NO: 13668 - DNA, 1772 bp, Homo sapiens
  CDS (44)..(946)
gtgcctaacagaggtgtcctctgacttttcttctgcaagctccatgttttcacatcttccctttgactgtgtcctgctgctgctgctgctactacttacaaggtcctcagaagtggaatacagagcggaggtcggtcagaatgcctatctgccctgcttctacaccccagccgccccagggaacctcgtgcccgtctgctggggcaaaggagcctgtcctgtgtttgaatgtggcaacgtggtgctcaggactgatgaaagggatgtgaattattggacatccagatactggctaaatggggatttccgcaaaggagatgtgtccctgaccatagagaatgtgactctagcagacagtgggatctactgctgccggatccaaatcccaggcataatgaatgatgaaaaatttaacctgaagttggtcatcaaaccagccaaggtcacccctgcaccgactctgcagagagacttcactgcagcctttccaaggatgcttaccaccaggggacatggcccagcagagacacagacactggggagcctccctgatataaatctaacacaaatatccacattggccaatgagttacgggactctagattggccaatgacttacgggactctggagcaaccatcagaataggcatctacatcggagcagggatctgtgctgggctggctctggctcttatcttcggcgctttaattttcaaatggtattctcatagcaaagagaagatacagaatttaagcctcatctctttggccaacctccctccctcaggattggcaaatgcagtagcagagggaattcgctcagaagaaaacatctataccattgaagagaacgtatatgaagtggaggagcccaatgagtattattgctatgtcagcagcaggcagcaaccctcacaacctttgggttgtcgctttgcaatgccatagatccaaccaccttatttttgagcttggtgttttgtctttttcagaaactatgagctgtgtcacctgactggttttggaggttctgtccactgctatggagcagagttttcccattttcagaagataatgactcacatgggaattgaactgggacctgcactgaacttaaacaggcatgtcattgcctctgtatttaagccaacagagttacccaacccagagactgttaatcatggatgttagagctcaaacgggcttttatatacactaggaattcttgacgtggggtctctggagctccaggaaattcgggcacatcatatgtccatgaaacttcagataaactagggaaaactgggtgctgaggtgaaagcataacttttttggcacagaaagtctaaaggggccactgattttcaaagagatctgtgatccctttttgttttttgtttttgagatgtggcaggagctcccagggaaaaaggaagtgcatttgattggtgtgtattggccaagttttgcttgttgtgtgcttgaaagaaaatatctctgaccaacttctgtattcgtggaccaaactgaagctatatttttcacagaagaagaagcagtgacggggacacaaattctgttgcctggtggaaagaaggcaaaggccttcagcaatctatattaccagcgctggatcctttgacagagagtggtccctaaacttaaatttcaagacggtataggcttgatctgtcttgcttattgttgccccctgcgcctagcacaattctgacacacaattggaacttactaaaaatttttttttactgtt

SEQ ID NO: 13669 - protein, 301 aa, Homo sapiens
MFSHLPFDCVLLLLLLLLTRSSEVEYRAEVGQNAYLPCFYTPAAPGNLVPVCWGKGACPVFECGNVVLRTDERDVNYWTSRYWLNGDFRKGDVSLTIENVTLADSGIYCCRIQIPGIMNDEKFNLKLVIKPAKVTPAPTLQRDFTAAFPRMLTTRGHGPAETQTLGSLPDINLTQISTLANELRDSRLANDLRDSGATIRIGIYIGAGICAGLALALIFGALIFKWYSHSKEKIQNLSLISLANLPPSGLANAVAEGIRSEENIYTIEENVYEVEEPNEYYCYVSSRQQPSQPLGCRFAMP

SEQ ID NO: 13670 - DNA, 1610 bp, Homo sapiens
  CDS (29)..(829)
gagcggacacagccccacgcgcggggccatgcaggtggccatgaacggtaaggcccgcaaagaggcggtgcagactgcggctaaggaactcctcaagttcgtgaaccggagtccctctcctttccatgctgtggctgaatgccgcaaccgccttctccaggctggcttcagtgaactcaaggagactgagaaatggaatattaagcccgagagcaagtacttcatgaccaggaactcctccaccatcatagcttttgctgtagggggccagtacgttcctggcaatggcttcagcctcatcggggcccacacggacagcccctgcctccgggtgaaacgtcggtctcgccgcagccaggtgggcttccagcaagtcggtgtggagacctatggtggtgggatctggagcacctggtttgaccgtgacctgactctggctggacgcgtcattgtcaagtgccctacctcaggtcggctggagcagcagctggtgcacgtggagcggcccattcttcgcatcccacacctggccatccatctgcagcgaaatatcaacgagaactttgggcccaacacagagatgcatctagtccccattcttgccacagccatccaggaggagctggagaaggggactcctgagccagggcctctcaatgctgtggatgagcggcaccattcggtcctcatgtccctgctctgtgcccatctggggctgagccccaaggacatagtggagatggagctctgccttgcagacacccagcctgcggtgaggactggctgtaggaacctgtgggtgaagggcctccaggatcctggccacccctagcccgtcctgctgaagcacccatcacctccaccaagccctcagtaactctcatccccgtttttcccagtagacacatcccccactgcttctagggcggtggttctcaaaaagacaagttccctaccccagacctgcccactaggactatctgggaattggccctttttacagattcccgaagagtttcttctacaggtgggccctgtctgctttgacccacactgacactgaactgcttagggaaagaggcctggatgtggccatctgttctctgtctcccggttgctgatggtcagagattgctaaatctttggatgctgtgtcctgcttgaacacgtactaagtttctgttttttggctggtttcctctgtttacttctttggcctttttgatgacaattcagcccttccttttcttgacccacaggaagaggtcaagagctattggcctccaccctttcgttcctcagcaccaacccagcccccttctccaatctctgcttggtcctgcctagcaaggaatcccagcactttgggaggctgaggcggggggaatcacatgaggtcaggagttcgagactagcctgaccaccatggtgaaaccctgtctctaataaaaatacaaaaattagctgggcctggtggtgcatgcctgtaatcccagctactcaggaggctgaggcacgagaatcctttgaacccgggaggcggaagttgcagtgagccgagatcgagccattgcacttcagactgggcaacaagagcgaaccttcatctc

SEQ ID NO: 13671 - protein, 267 aa, Homo sapiens
MQVAMNGKARKEAVQTAAKELLKFVNRSPSPFHAVAECRNRLLQAGFSELKETEKWNIKPESKYFMTRNSSTIIAFAVGGQYVPGNGFSLIGAHTDSPCLRVKRRSRRSQVGFQQVGVETYGGGIWSTWFDRDLTLAGRVIVKCPTSGRLEQQLVHVERPILRIPHLAIHLQRNINENFGPNTEMHLVPILATAIQEELEKGTPEPGPLNAVDERHHSVLMSLLCAHLGLSPKDIVEMELCLADTQPAVRTGCRNLWVKGLQDPGHP

SEQ ID NO: 13672 - DNA, 1909 bp, Homo sapiens
  CDS (517)..(966)
tgctacaaccccgggcaggaagagctcgtcgcggtagcagcggtcgaaggggaccaagctccagagggcgggcgcccgagccgtgcggggagcgggcggggcagccatgctcctgtctgggggcgatccttctcctgctccccttacacgccaacctatgcccacctggcagccgtggcctgcggcctggagcgctttggccagtccccactcccagtggttttcctcactcactgcaactggatcttcagcctcctgtgggagctcctgcccctctggagggctcggggcttcctctcctctgatggggctccactccctcacccaagcctgctctcctacattatatccctcacctctggcctctcatcccttccgtttatctaccgaacctcctaccggggctctctgtttgctgtgacagtggacaccctggccaagcagggtgcccaggggggtgggcagtggtggagtttgccaaaggatgtgccagcccctacagtgagtccccatgccatgggcaaggggcccaatttgctggcattacagctgagtgacagcaccctggccgacatcattgccaggctgcaggctgggcagaaactgtctggctcctcaccgtttagttctgcctttaactcactcagcctcgacaaggagagtggcctgcttatgttcaagggagataagaagcccagggtctgggtagtcccgacgcaactccggagggatctgattttctctgtgcatgacattcccttgggggcccaccagaggcccgaagagacctacaagaagttgcgtttgctggggtggtggcctgggatgcaggagcatgtgaaagattactgcaggagctgcttgttctgcatcccccgaaatctcataggcagcgagttgaaggttattgagtccccggcctctgttttaagggggcagggcgtctgcaacaggagtggcacacggtgaagtgctggcatggctctacctcccaacccctcccaaccccatcccaaagcctacagtcctctgctccttctacctccactgtatcctgcatcccagaccctacagattgtgtgattgcttcatctgtatcaccccccgagtcctgtggacctgccttctgtgtagagcaaaacccaggctccctcacagccattctttgcagagatcacccttgcagtgagtgtgagttccttccaggtgtgtgcgcgtacactcaccctctgaattgctgccgctgccaaggaagtgggctccaggtgaaggccagtgccacgtcactctggctggccttcttagtagtttcatttctccggaagctgagccagtctcctggtctagcccaggttgccagaacgcttggcattgcagagtgctagagccagtggagaacttgccaacttgattgttttacagcagaggaaagaggatcacagagggaaaatgattcacccaaagtcacacagcaagttcatggctgagctgagaccaggattaagcttcctgactcccagttcaccatgaaaagggttctggcaacaggttcaagctggagaatccttcaaaatgctacacccacattctctccaactcttcatctccctgatcttccagacaaactacctggatgttgcccttaaaccatttctagctgttaaccctatccagaaaaatgattgagtgatagctgagaagtggaaagtgtgggatttttggcaggtgctctctttcctccgccccccgcgccatcctttctcttcctcctctctgtaatggtatgtccagcctcactctccctccctggtgctgtatgcgttccccctgttagctacatttgtgatcacatacccttcttttaagtgaatttttttcatttgatttgtcaataaacgaatcaaactgg

SEQ ID NO: 13673 - protein, 150 aa, Homo sapiens
MGKGPNLLALQLSDSTLADIIARLQAGQKLSGSSPFSSAFNSLSLDKESGLLMFKGDKKPRVWVVPTQLRRDLIFSVHDIPLGAHQRPEETYKKLRLLGWWPGMQEHVKDYCRSCLFCIPRNLIGSELKVIESPASVLRGQGVCNRSGTR

SEQ ID NO: 13674 - DNA, 1369 bp, Homo sapiens
attctttcattattatgacataagctacctgggtccacttgtctttttttttgtttgtttcacagaaaagatgggttcgagttcagtggtcttcatcttccaagcatcattactaaccaagtcagacgttaacaaatttttatgttaggaaaaggaggaatgttatagatacatagaaaattgaagtaaaatgttttcattttagcaaggatttagggttctaactaaaactcagaatctttattgagttaagaaaagtttctctaccttggtttaatcaatatttttgtaaaatcctattgttattacaaagaggacacttcataggaaacatctttttctttagtcaggtttttaatattcagggggaaattgaaagatatatattttagtcgatttttcaaaaggggaaaaaagtccaggtcagcataagtcattttgtgtatttcactgaagttataaggtttttataaatgttctttgaaggggaaaaggcacaagccaatttttcctatgatcaaaaaattctttctttcctctgagtgagagttatctatatctgaggctaaagtttaccttgctttaataaataatttgccacatcattgcagaagaggtatcctcatgctggggttaatagaatatgtcagtttatcacttgtcgcttatttagctttaaaataaaaattaataggcaaagcaatggaatatttgcagtttcacctaaagagcagcataaggaggcgggaatccaaagtgaagttgtttgatatggtctacttcttttttggaatttcctgaccattaattaaagaattggatttgcaagtttgaaaactggaaaagcaagagatgggatgccataatagtaaacagcccttgtgttggatgtaacccaatcccagatttgagtgtgtgttgattatttttttgtcttccacttttctattatgtgtaaatcacttttatttctgcagacattttcctctcagataggatgacattttgttttgtattattttgtctttcctcatgaatgcactgataatattttaaatgctctattttaagatctcttgaatctgttttttttttttaatttgggggttctgtaaggtctttatttcccataagtaaatattgccatgggaggggggtggaggtgggaaggaaggggtgaagtgctagtatgcaagtgggcagcaattatttttgtgttaatcagcagtacaatttgatcgttggcatggttaaaaaatggaatataagattagctgttttgtattttgatgaccaattacgctgtattttaacacgatgtatgtctgtttttgtggtgctctagtggtaaataaattatttcgatgat

SEQ ID NO: 13675 - DNA, 1820 bp, Homo sapiens
gtgtttatgtataagattggtcaatgggttcagtccaatcggttcatgtgtagtctgttttttaaaaatctggaataagtttgtgtgtatcctgctaaatgtcatcttatttgctttagcccatcatcccattgtttggttcccatgtctgccaccaaatgtctccttcttagattcatatcatctgaaaatttgttaagcctgttaactttgtattcatccaaatccacataaacatgttgaacaggatagagctgaggacagagccctgtggcatgctactaaagactttcctccagactgacatggatcaagcatttttggggtatggtaactcaaccagttctgaatccacttagtatgataacacaatccacaatttctcatgttcttcatcgaaatatcattagagagagacagagatatctagttttcagttagaaagataagattatagtttaatagagagataagggctggagagaaatttggaagcaatctgtatcaggttttgtcacctggctaccacagaatcccctggggaacttcctggcttcacctggagattctgattctgtagtctggagtgggactaagaatctgtgttcttactaagttccccaggtgattcaaatgcagctggtctgatgactgatgttgggggaccacagatctgtatcactgggatagctggggcagagaggatggataagttctctgaggagagtgtttcatggggcgggaggagggctaaggataacactgaggagtgcgcatgggagaaaaggaaagagagccaaagacaaggaacccttggagaagcagtggcaggtggtgcctcaggcctggggcagaaagagggctggatgctgcgcagaggcctggccagcacctaggcagagcccacagcactggtgaccagcaagaaggcagcactgtggagttgtggaccctggagttgcatttctggtttttaaggaaatagtgggtaggagagaaagtgtcagaatcaaattataaaagtgtagcagcaaaagggagacaatggtgttcaagggaagactttctttaaggaggcaagggcaggagcttgaaaacagaggggagggagccaagtggtgaggtaaggagtgaagatacaggagagtggaggaataggaggcagcaggaactgctggaggcaggaaggagggaactgagcaatgtggaggccggggctgggcagcaatgagccttgtgaaggagatggaccccttctccccaggagagagggtacctcctggtgcataggtagatgaggagggcagatggaagacttgaagggggctcttagaactggttcagggaagcagaaaatatgagataaagggaccagacttgggatttgaggcaagataagatgatttggcaggcactgggaagcatttcaggggattaccactagatgatgaaaaggtgctaagcaaggagggtagaggcagaggcagtctaggtgagtgtgtagcgggcttggtgttgataagagttaaaaagagcatggccaggcgcagtggctcatgcctgtaatcccaggactttgggaggccaaggcaggcagatcacttgaggtcaggagttcgagactagcctggcaacatggtgaaaccctgtctctactaaaaatacaaaaattggccgggtgtgatggcaggcacctgtaatcccagctactcgggaggctgaggcaggagaattgcttgaaccccagaggcgggggttgcagtgagcagagatcgtgccattgcactccagcctgggtgacaagagcaaaactccgtctc

SEQ ID NO: 13676 - DNA, 2087 bp, Homo sapiens
  CDS (1411)..(1884)
ttacagccaagggtcaggattaggatgtaaactcctgggagtgtgtgtgtgttttatcctggtatctctcgtggtgactaattccttgcttgtgcatttcaagagctcaaaatatttttgctctttgcaatggtctgaatgtattctcccaaaattcatatgttgagacttaattgccaatgtggtagtaatgcaataaatcagattatatctttgtaagctttaagagataattaagttatgagggtagagccttcatggaaggaattaaggctcttacaaatgggcttaagggagtgggttcattaccttctatcccttcctccacgtgaggacacggcatttactccctctggagcatgcagcaacaacataccatcttggaagcagaccacagtgcaatcaaattggaacacaagattaagaaactcactcaaaaccacacacctacatggaaattgaacaacctgctcctgaacgacttctgggtaaataatgaaattaaggtagaaatcaagaagttctttgaaaccagtgaggacaaagagacaatgtaccagaatctttgggatgcagttaaagcagtgttgagggaaatttatagcaccgagtacccacatcaaaaagttagaaagatctcaaatcaacaccataacatcacaactaaaagaactagagaaccaagagcaagcaaaccccaaagctagcagaagacaaaaaaaaaaaacatcaagatcagagcagaactgaaggagatagagatatgaaaaacccttaaaaaatcaatgaatccaggagcttttttttgaaaaaattaataaaatagaccactagctagactaatagagaagaaaagagagaagaaccagatagacaaaataaaaaatggttaagggtatatcaccacttagcccacagaaatacaaacagccatcagagaatactataaacatctttatgcaaataaactagaaaatctagaagaaatggacaaattcctgggcacatacaccctcccaagactaaatcaggaagaagctgaatccctgaatagatcaataacaagttctgaaattgaggcagtaataaatagtctaccaaccaaaaaaagcctggggccagacagatttacagctgaattctaccagaggtacaaagaggagctggtaccatttcttctgaaactgttccaaacaattgaaaaggagggatttctccataactcattttatgaggccagcatcatcctgataccaaaagctggcagagatacaacaaaaaaagaaaacttgtaggtcaatatccttaataaacatcaatgcaaaaattctcaataaaatactggcaaaccgaatccagcagaacatcaaaaagcttatctaccacgatcaagttggcttcatcaatgggatgcaaggctggttcaacatacacaaaacaatacatgcaattcatcacataaatagaactaaagacaaaaaccacatgattatctcaatagattcagaaaaggccttcgataaaattcaccatcccttcatattaaaaactctcaataaactaggtattgaaagaacatacctcaaaataataggcatttatgacaagcccacagccaatatcatacagaatgggcaaaagctggaaatattccccttgaaaaccagcacaaaacaaggatgccctctctcatcactcctattcaacatagtattggaagttctggccaggacagtcaggcaagagaaagaaataaaagctattcaaataggaagaggggaagtcaacctgcctctgtttgcagatggcatgatcctatatcaagaaaaccccatcatctcaggccaaagccttcttaagctgataaacaaattcaggaaagtctgaggatacaaaatcaatgttcaaaaatcacaagcattcctatataccagcaacagacaagcagagagccaaatcatgaatgaactcccattcacaattgctacagagagaataaaatacctaggaatacagctatcaagggaagtaaatgaccttttcaaggagaaccacaagccactgcttaaggaaatctgagaggaaac

SEQ ID NO: 13677 - protein, 158 aa, Homo sapiens [sequence omitted]

SEQ ID NO: 13678 - DNA, 1561 bp, Homo sapiens
  CDS (405)..(1091)
tcttaattttacaagcgaggaaatgagagtgtttcttgtaggggtgtagtgagaatttaataaaacagtttaaggaaagaaaacaaaaggtagtattgctgcactttctagatggtaaaaagcaaaccaccatgtctgtttaatatatatcacctgctggtccctcggtctagcaggctgaactgtgtgcctgggaattttcttctcgctgtgtgcacccctttacgtcacagggtggactctcttcagagtcctagtggagcagctggccaggctgacatgatctgacaacattgtaggttaccactaccatctctcaccgtctcactttcttcctaggggtctcctgctgccagctaagtgtgggagaacttgtgcacgtatctcccctccgaatcccaacgatgggtaacgccagctttggctccaaggaacagaagctgctgaagcggttgcggcttctgcccgccctgcttatcctccgcgccttcaagccccacaggaagatcagagattaccgcgtcgtggtagtcggcaccgctggtgtggggaaaagtacgctgctgcacaagtgggcgagcggcaacttccgtcatgagtacctgccgaccattgaaaatacctactgccagttgctgggctgcagccacggtgtgctttccctgcacatcaccgacagcaagagtggcgacggcaaccgcgctctgcagcgccacgttatagcccggggccacgccttcgtcctggtctactcagtcaccaagaaggaaaccctggaagagctgaaggccttctatgagctgatctgcaagatcaaaggtaacaacctgcataagttccccatcgtgctggtgggcaataaaagtgatgacacccaccgggaggtggccctgaatgatggtgccacctgtgcgatggagtggaattgcgccttcatggagatttcagccaagaccgatgtgaatgtgcaggagctgttccacatgctgctgaattacaagaaaaagcccaccaccggcctccaggagcccgagaagaaatcccagatgcccaacaccactgagaagctgcttgacaagtgcataatcatgtgagccctgggccttaagagccagctcttcctatcctgtagcgtgtagaaaacgtggactcatttcactatgttacatgtacatggttgattttgtgctgttgtttggactgtaacatccatgttgtcaatacgtataccttgtaagtggataacttttctttttcccaggccagagaattcaaattgttaaaacattggcatttgaagaggagaacaaaatgtagcatgatgtatttaaagtaaggcctttagtaatgaatgtaatgagagaaaatgttttgaaaagaacaaaacatcaaaatgaatagaaagaaaaattggaaggcgtccttttggtaacccgattattgtgtattacctttaaatatttcacatcctgtaagtgcttaatcatatcttttaattgtgtatttaagaaaagtgttttcacaacaaaagcttttgataaattgctgcgtgacatatact

SEQ ID NO: 13679 - protein, 229 aa, Homo sapiens
MGNASFGSKEQKLLKRLRLLPALLILRAFKPHRKIRDYRVVVVGTAGVGKSTLLHKWASGNFRHEYLPTIENTYCQLLGCSHGVLSLHITDSKSGDGNRALQRHVIARGHAFVLVYSVTKKETLEELKAFYELICKIKGNNLHKFPIVLVGNKSDDTHREVALNDGATCAMEWNCAFMEISAKTDVNVQELFHMLLNYKKKPTTGLQEPEKKSQMPNTTEKLLDKCIIM

SEQ ID NO: 13680 - DNA, 1541 bp, Homo sapiens
  CDS (169)..(495)
tctcagttgaatgcaccaactggtttgagtcctgtgagcattcagtcagttgaaattaaagattcctcatttctcctgatttctattcttgtctcaatcttaaatttagagaccagttgtttttatgatatcagccatttgatttttttcattttctatttaagaaatatgaagaaaaaatacaccaagatggtcaaattactacacaaatcagcaccagcacagtctgatagctgcaaatgtccattcatctgctgtgtatgtatatccagaatcagcgtaggaagtcgttcaggatatcagtatataatgcacagaagtgtgggttgtttgaaagccaaacaggagaatcacatgaatccaggaagtggaggttgcaatgagccgaaatcctgccactgcattctagcctgggcacagagcaagactccatctcaaaaaacaaaatggtccagcaaggtggctcacgcctgtaatcccagcactttgggaggctgaggcaggcggatgacaaggtcaagagatcgagaccttcctggccaacatggtgcaaccccatctctactaaaaatacaaaatttagctgggcatggtggcacgcacttgtagtcccagctacttgagaggctgaggcaggagaatcgcttgaaccggaaggcagaggttgcagtgagctgagatgcgccattgcactccagcctggcgacagagcgaaaataaataaataataaaataaaatactcattcacttattcaaccaacaaatatttaccacgcacctatcgagtgttagacataggaatgtaataatgagcgagatagacggagactctgtcctcacgggatttgcagaccagtaatagttggaaggacacagctggtgtcgtgatcataactcctgtcagtgctgtgaggaatcctggtgccatgggaacattcagcagggatgtgtagcctatcagggaaacagatgggatcaagaggaagtgacgctcgggccagcgggagggtggggagtggacgttcagtttgagtgaactaataggtgaaagccctgagacaggaaagactgcatcatgtcagaggaactgcaaggcaggagtgtggcctgagggccaggaagggtctggggtgaggcctgaaggtcttctggacctatacacaaggtgtggatttgggcctattacctaagggcaatggaaaaaaggaacatttttaagaaggggagagagataatcagatttgcatgtttaaggccgggcacggtggctcacgcttgtaatcccaacattttgggagtctgaaggggatggatcacctgtggccaggagttcgagaccagcctggcctacatggtgaaacctcgtttcgggtaaatatacaaaaaattagtcaggcatggatggtgggtgcctgtaatcccagctacttgggaggctgaggcaggagaatcgcctgaatccaggaggcagaggttgcagtaagcctagatcacagcatttaaccccagcctgggcaacaagagtgaaactccatctcag

SEQ ID NO: 13681 - protein, 109 aa, Homo sapiens [sequence omitted]

SEQ ID NO: 13682 - DNA, 3042 bp, Homo sapiens
  CDS (53)..(889)
ctacaaagtagttcctgtttcgctctcagaggtttatttactccagtgcaatatgaagttcccaacccagtcttcctttgaccgggtgatgcctctcctgaatgtggcagtggcctctctccacccactgactgatgagcatatcttccaggccatcaatgctgggagcattgaaggcacactagaatgggaggattttcagcagagaatggagaacctctccatgttcctaatcaagcgcagagacatgactcgtatgtttgtacatccttcttttcgagaatggcttatctggagagaagaaggagagaaaaccaaatttctctgtgatccgaggagtggtcacacgttacttgccttctggttttcccgccaagagggaaaactaaaccgacagcagactattgaactgggacatcacatcctcaaagcacacatttttaagggtttgagtaaaaaagttggtgtatcatcctccatcctccaaggtctctggatctcttatagcacagaaggtctttccatggcactggcgtctttacgaaatctctacactccaaatataaaggtcagccgactgctgattttgggaggtgccaatattaattaccggacagaggttttaaataatgctccaattctatgtgttcagtcccatcttggttacacagaaatggtagccctgctgctggagttcggggccaacgtggatgcctcttctgaaagtggcctgactcccctgggatatgctgcagcagcagggtacctgagcattgtggtgctgctgtgcaagaaacgggccaaggtactggctgcccagctctgctgcttttcttccctttttctttattttcgatgcatactctttcttatctccagtgttacttcatgagtctgggtagagtatatcaaaccatgatggagaggagatcagagagagtgctggttctgcatatgtgcagggccactgccatccatcctgcaggagcacacagttctaaaccctttgagaggtgcttgggaaactgcatttatccgtaaccacaaaaagtttctacataacaacccagaaatgatctattgagctcagaagaagcctctttttaacaaagagaggaaggagaagtgaggaagccaggagactgcagtggcaggtctggaccaaatgacacctgcaggctctaagcctttcatgtgtagagaagaaaacttagccatggagatgagaacaggaccagacaccttcatcctgtccttgaagaccaccactctagagataaggggagaagatgattctccctatttatactcagactgaccaagggcacctcgaagtgcttctgttagtactgatcagttctctgaaaatatttccaaaatatgtttgctttatgtataaaaactcgatttcacaatattggtgaaaagaaaaatgctggtctcacaaatgtgggcctctgggaaaaaaaagtctggcctcatagtattttgtttcagtcctgaaaacaaactgaggactttagtggtttcatagtgaaatacaagtcatagtatgacttcattctgcggtattcagtgctgttacgaggggagaaagtgggactcctccactcctttgggaactgagacgtaggcctctcaatgacatctcagagccttagaagtttactgtagcacagtgattgtgcacctgtgacatcccattcatttgaatggacacctctaggaacaatgataactgggcctcgttactattttcgttttctttttagagacaaagtcttgttctgttgcctaggccagagtgcagtggcatgattgtagctcactgcagtcttcagcctccccagtagccaggagtataggtatgtgccaccacactcagctttatttttttcctattttgtagaggcagggtcttgctatattgctcggaggtttgctaaaactcgttggatcaagagatcctcccactgtggcctcccaaagcgctaggattacaagcatgagccacggcagccagcccttcttactattgctgtcacttcatattctgatcttagctgggtctttcctgctgttcagcccttacactgccaagccatccttttcttcatctttcattgttttccccagagcagaaatgtaactcatatgtacttctttcaagatcctatcacgcctcttctgcccttcatcactgtgatcgagctcatctcaaggtgcctgtatctcaaaactcttatcagttcttacgtacgctcacctctactttgccttagagaaggaagtacttaccttcctttccagagcaattgtctcctcctctacactcttaacccacggtgttgctcattctctcacgttatttcattctttttctaaattcacactaccttttttctcagtttctacaaacctatgaatgtagaaacctacctaacctaaaaaagaaatgttcctctcccttgctaaccagaagcaacatcccatctcttccctttcacctctgccaaacctgtcctaagagtcctctatactggctacattcacctctttattactccttaaccacttgcattctggcttccatgaatgagagaggaggcaactcattaaaatgataagctttaggatcagacacaactgggttaaatcctgtgtccatacttaatttatacaagggcttgaacaagtcacttaacctctctcaatcgcacttttcatctataaaaagggtgttaaaagagtcagtgtaagcattgaaagagataaagcctttttttaaaagaggtgttaaagtctcttttaatcttatatagtgcctaataaatagtatctgtaaaaaagaaaataacccaacctccctacattctaccaagctgctcttttaaaagtcactaatgactgccattcaccaaataaagcagctttgtcttattcctcacatctctgagcccctccatagtattagcaataataaacctttttttttttttttttttaaacagagcctgggcaacaagagcgaaactccgtctc

SEQ ID NO: 13683 - protein, 279 aa, Homo sapiens
MKFPTQSSFDRVMPLLNVAVASLHPLTDEHIFQAINAGSIEGTLEWEDFQQRMENLSMFLIKRRDMTRMFVHPSFREWLIWREEGEKTKFLCDPRSGHTLLAFWFSRQEGKLNRQQTIELGHHILKAHIFKGLSKKVGVSSSILQGLWISYSTEGLSMALASLRNLYTPNIKVSRLLILGGANINYRTEVLNNAPILCVQSHLGYTEMVALLLEFGANVDASSESGLTPLGYAAAAGYLSIVVLLCKKRAKVLAAQLCCFSSLFLYFRCILFLISSVTS

SEQ ID NO: 13684 - DNA, 1733 bp, Homo sapiens
gcacacatatgtctaggatagccagcattcaggaaaattgctgtgaacctcctgtttttaattttaatatagaaaaagtctttcaggtttgtgacacgaagacagatttagcttcccacttgtcagcaaatttgtaaaaacctcaaaacaaatgaatatttggaattcactctaagagatacaaatcctgaatttctaactatcttctcaaatattactgaggccagcaagatgcaagtgttctacaaaataatgaactgttctaagtgacagtgttgatgctggaagtggaatgttatgttttcgctcagctgtattcattcagaaagtttttcttgaacatctgccacatgaggtgcagagaatactgccaggtgctagtttttccagtatttgacttctgattactatttccttttctcatctttagtttttcaagattttgctttaccaaaatagtaaagcctttatcatcagcttatattgaataatgttgtaattggtttcaatcaaagtttctcctcaggtacttgggggcccctagccttctaaggaactcccaggcacctacttaacaaggccagctacacactcagtatgtgataagccccatgatggatgaaggttagaattcaaagacctggttggagtcctagatgtggagacaggatgatcaggtcacacttgttagatgactaacactatcagtagaagctcttgagagattttcctaacgcagcaagatttctgtgagtagaggtatcctgggaggtatcctgggaggcagcctattgacttgaccaagtaagctgatcaggtggcctcctctacccactaaagaaatgtgtaaacactagcaataattgctttatcttaaactcctggacatactcagttcttccattccactgttctattgccaataccttttgttgttttcttcacactcctcttggcagcaaatgtctgaaagtatttcaattgtgtaatgttaaggggttttttcatagcttcagaaaagagggcagcaaatatgaagccttaagttcaaaataagtcattctacctagaaatacagaccccagagcacattgcatgaaaatacctgtactctgcagttcctcaaagcagtattcttcctgaaaagccaaacaccacacctattttcctatttgctaagaatcagaataagcacgttgtaaatagtatccaaagcagattctaaaatgacatagtaagaagccagattcaaattgtaaccaaagaagacaatagaaatcccactttaccccactgtcatcagttagaacacccttgcaaaaactgtaaccacttaagcaattcatctgatcccagaagatcataccttcttttgaaagtataggacagatatcagtgggaaacgtcggcgttctgagcaacacaggataaatgtaggagggccttaaaaaataaatctcaattcatacactggagcagcaaaaaactgagcaggaaagaaaacagagtccaaccttggtgtcttctttgagttgcctggacagtatttatgaaacaaaaaactaaatgccccccatttggggacggggggaggggttcagacctctaacctggattcagagccttagaggccgagagggaatctggaatctggtattactgagatcctaggtaaaagaaccagcctggcagtctttcccacctcattggtccgtgcttttatttttaaaccc

SEQ ID NO: 13685 - DNA, 1975 bp, Homo sapiens
  CDS (197)..(622)
tttctaacttaaaagatttttctggagaagatagatttaagaatgttgaattactccaacaattgttttgaaccaagataattttttttcatatcatgtgaggcttcaaggatttgaggctacacatgttagattccaaattcttttaaaatgctttcctgatttaataacaaacagcattttccttctttttaatatgtctatcttgagatatggtttaaatgaaacagatcttgaaagggtctctgagaaggaaattttcatggcatgtcctctagcaccagacttgactgcaccaggtcaggggataaacagcactttgcagatgagtgtgctttattttgaggccctcagacacttcatgagacccctgtattctggaattcactgcctcactactgctgatatacacaatgctatgaaaaatggggaaccattactcatatatttgctaattatgatacctctcacctcttcccctcttttcccatcctcttctcttttcccccaaccaaataaaaaactaaaacaaatacatatatttgttttattttttgcttatttagttttactgtcttattccttaatgtgtgcacctgtagtctcagctactctggaggtttaggcaggaggatcacttgagcccaggagttctgggctgtagtgcactgtgctgatccactaagttctgcatcagtatggtgacctcctgggagtgggggaccaccaggttgcctaaggagtggtgaacaggtcctggttagaaacagagcaggtgaaaactcctgggctgattaatagtgggatagcacttgtgaatagccactgcacttcagcctgggcaacatagcaagattttgtctcttaaaaaaaaaaacaagtaagttgcaaaccacatatccgacaagggactagtgtttagaatatctaaagaactttaaaaatttaacaattaaaacacaatcaggaaatgaacaaaatacatgaagaacaatttcacgaagaggatacacagatagcggataagcacatgagaaaatatttaacaacattaacaattagggaaatgcaacgtaaaacccacaataagatattactacacacctgccaaaatggctaagataaaaaatggcaacaccatcaaattttggaaagaatgccgagaaactgcacctcttataattgctggagggaatttaaaatggcacagccactctggaaagcagtttggcagtttcttgtaaaactaaacatgcaattgccatatgacccagcagttgcactcacaggcatttatcccagagaaatgaaaacttgtgttcacacagaaacctgtacacaaacgttcatcacagtttcatttacaatagccagaaactagaaaccacccaaatgtccttcaaggggcgaataattaaactgtgatacatccataccatagactactccccagcaataaaagaaacaaatcattcgtgcaacaacttggatgatctccagggaataatgctgagtgaaaaacaccaatcctaaaaggttacatactatgtgattcaatatctgtaactttcttgaaatgataaaattgtgtaagtaaggaacatatcagtggttaacagggattagagatggagtttgggagagaggagagaagtgggtgtggttataaaagggcaacacaagggttccttatagtgatggaagtgaagcattctgtgccttgactgtggcgatgattacatgaaaactacagatgggatgaaatttcacagaactaccacacaatcaaaggactgtatggaaaatgagtgaattttgagtaagatcagtggatgacatctatctgaatatcctggttgtgacattgtggtataatattgcaagatgttaccattgggggtaactaggtaaggggtacacgggataattctgtattatttctacaactatatgtaaatctacatttatctcagtt

SEQ ID NO: 13686 - protein, 142 aa, Homo sapiens
MSILRYGLNETDLERVSEKEIFMACPLAPDLTAPGQGINSTLQMSVLYFEALRHFMRPLYSGIHCLTTADIHNAMKNGEPLLIYLLIMIPLTSSPLFPSSSLFPQPNKKLKQIHIFVLFFAYLVLLSYSLMCAPVVSATLEV

SEQ ID NO: 13687 - DNA, 2592 bp, Homo sapiens
  CDS (721)..(1695)
attgtacccagagtgcagagccgcctttccagcatgcaggggctgctcagcgtttagtcacatcaagaaatagaacagaattcagccatggccccaagaaagagaggtggacgaggtatttcattcatcttttgctgtttccgaaataatgatcacccagaaatcacgtatcggctgcgaaatgatagcaactttgcgcttcaggccatggaaccagcattgcccatgccccctgtggaggagctggatgtcatgttcagtaaagcattcctcagcccacaaatgccctgaaatccttcaactggtctaaactgcccgagaacaaactggaaggaacagtatggaccgaaattgatgatacaaaagtcttcaaaattctagatcttgaagacctggaaagaaccttctctgcctatcaaagacagcaggatttctttgtgaacagtaactccaagcagaaagaagcagatgccattgatgacactctgagttccaaacttaaagttaaagagctttcggtgattgatggtcggagagctcagaattgcaacatccttctatcgaggttgaaattatccaatgacgaaatcaaacgggcaattctaacaatggacgaacaggaagatctgcccaaggacatgttggaacagctcttgaaatttgttcctgaaaaaaagtgacattgacctattggaggaacataaacacgaactggatcggatggccaaggctgataggttcctttttgagatgagccgaattaatcactatcagcaaaggttgcaatcgctgtacttcaaaaagaagtttgcagagcgtgtggcagaagtgaaacctaaagtggaagcaattcgttctggctcagaagaggtgtttaggagtggtgccctcaagcagttgctggaggtggttttggcatttggaaattatatgaataaaggtcaaagagggaatgcatatggattcaagatatctagcctaaacaaaattgctgacacaaaatccagcatcgacaaaaacattacccttttgcactatctcatcactattgtggaaaataagtaccccagtgttctcaatctaaatgaagaattgcgagatattcctcaagctgcgaaagtaaacatgactgagctggacaaagaaataagtaccttgagaagtggcttgaaagcagtagagacagagctggaatatcagaagtctcagcccccacagcccggagataagtctgtgtctgttgtcagccagttcatcacagtagccagcttcagcttctctgatgttgaagaccttctagcagaagctaaagacctgtttactaaagcagtgaagcactttggggaagaggctggcaaaatacaaccagatgagttctttggcatttttgatcaatttcttcaagctgtgtcagaagccaaacaagaaaacgaaaatatgagaaagaaaaaggaggaagaagaacgtcgagctcgcatggaagctcagctcaaagaacaacgtgaaagggaacgtaaaatgagaaaagctaaagagaatagtgaagaaagcggagagtttgatgaccttgtttcagctttacgctcaggagaagtgtttgacaaagacctttctaaattgaaacggaatcgcaaacgtattaccaaccagatgactgacagcagcagagagagaccaatcacaaaacttaatttctaattttccatgaatactttttttttagaaagctcattagcagccctctaaagtgactagaacgtttcattacactgccttgcaatccaaacagtggcaattttttccttcatctgtgagtgaatgtgtgaacgtgtgtatgtaaatgtatgtgtgtatatattaaaaaatgtatatagatgtctgagtgttgtctggagacctatacgtatggttaaaaagatttatgttaatgtatgtgctccaaaacctttcgtgtatgcattcacattgagtgtggctcattttctttccccgaacgccatgactgttcagaagcacaatactatctcctgaaagagataagagacattccctagattcaaaggcaaaacagaagaaacaaacaaacaaacaaacaaagcttgcaaaatattttatggtttccaagcttgatatcctttaaaattattttcattgatggaactggagttgttggaaaaacatagatttaaaatgatttttgatagctgacattgtgatgttgatgtatcacatcagtaataggaccagctttgaatttctgacattggtgtggggatacagtctgtaaatgtttattgagaacatcttgcacacaatttgaattatgtagaatgtcaatcaagtttttgtatatttaaaagttggacatcaattttttcccctgatttcatcaagttatctctgccaagtgctcttgataatttcttcagatttttggaaaaaaacactatataaatgcaatccatgcttttttaaagaacaacattgccagagtatgcttgttctaacaatatagatatataaaccttaaaaataataaaatatctcacccaagacttaaaggaagaattctctgaagggataaagattact

SEQ ID NO: 13688 - protein, 325 aa, Homo sapiens [sequence omitted]

SEQ ID NO: 13689 - DNA, 1442 bp, Homo sapiens
ataccaatgtcaatgcagatgtgcaaaagttgcagcaacagttacaagacattaaagagcagacaatgtgccctgtgtgtctagatcgtctgaagaatatgattttcctttgtggtcacggaacctgtcaactctgtggagaccgcatgagtgaatgtcctatctgtcgcaaggctattgaacgaaggattcttttgtattaactaagacacatggtgtattttgttagctaatgtatctagtcatgagatcttaataggcttttgatctagttggaagttctgatgagttaatttctaatatcatagtttctttactagagtataattgggctgtaaatgtaccagaacaaaaaaccctacaaaatggtgttggaaattgtgtttcttgtttttgttttaaatttgaaacatcaaattcatgtaactcataggataatttacctttggcttctaagaggaaagtcctttaaggatatccttttttaaaaaattgcatttttctcttataatttgtaaatttgttggatctcaaaagacataattctttgtgatcagttatccttcatttcatcgtggttttacacagtgagttgataacgggttctctgagaagtcatgcatcaaataaaagaggcaggtcaaacaattatgtcacatggtaaattataaaatgacagtacaagttccagatagttaagggaataccgaagggatgattctttttttaagataacaggaagttacccacatgtttgtttctgaattcttagagtaaatggaagcatagaatgagggaataatgactttgcatttctcttgttttctagattcaaaaggaacattgtttaacttgaatcagattaccagtttcaaggtgactgatagacaagaaaaggaaaaataagcaataatagtgggcaactgaagagaaaaaaaaaacgagtatctattaactggccactaacagttgcctttcttacattaatttatacactattttgttcagccagtgtttttaaaaaaaatctatgaaaagtgtacttccggttttctgtgattacttatctgggcttgatctgaccagtgaaatgacattgccctatttggacctctgaggttctatttagctttgcagatgtacatagtatcccagtgatctgcaaaattaatgccttttccaagaaaaaatcttttcttctctgtatcagttaattctgacagtgttagtgattctgtcttcattataggccttatttccattatctctttctttatagtattttttgttataaagaaaacagtctttctgtgtatacctacggatgagggtattatttaaactgccaacaatatccaagacatggtcaataacctaattataaatactttagaaagagtgaccaggacatgtatagaaatgtctgcttacctgtagacttt

SEQ ID NO: 13690 - DNA, 1535 bp, Homo sapiens
  CDS (5)..(1087)
cgatatgccacacagtacttccaggtggagggataccgccaatgacaatgagggccactcggatggcctggcaagaagagggagaggcgagagttcaagtggctatcccgagccaaagtaccctgaagacaaacgggaagcgaggagtgaccaagtgaaaccagaaaaggtgccgagacgacgacgcaccatggccgaccctgacttctggacgcacagtgatgattactacaaatactgcgacgaagactctgacagtgacaaagagtggattgctgctctgcgtcggaaatatcgaagccgagagcaaaccctgtcctccagtggtgaaagctgggagactctgccggggaaagaagagcgggaacctccacaggctaaggtgagtgccagcactggcaccagccctggccccggtgctagtgccagtgccggggctggcgccggggccagtgctggcagcaatggcagcaattaccttgaagaagttcgagaaccatcccttcaggaagagcaggcatccctggaagaaggagaaattccttggctccagtaccatgagaatgacagtagcagtgagggggataatgattctggtcacgagttgatgcaacctggggtattcatgctggatggaaacaacaaccttgaagatgactccagtgtgagcgaagacctagaagtggattggagcctctttgatggatttgcagatgggttaggagtggctgaagccatttcctatgtggaccctcagttcctcacctacatggcacttgaagaacgcctggcccaggcaatggaaactgcccttgcgcacttggagtctctcgcagtggatgtagaggtggccaatccaccagcaagcaaggagagcattgacgctcttcccgagatcctggtcactgaagatcatggcgcagttggtcaggagatgtgctgccccatctgctgtagcgaatatgtgaagggggaggtggcaactgagctgccgtgccaccactatttccacaagccgtgtgtgtccatctggcttcagaagtcaggcacctgccccgtgtgccgctgcatgttccctcccccactctaaagaccaaggccgtttactcctggtctgattattttccccatctgaaatccacaatactgcaggagccctcttgaaattaacaatggaaataaaaccaatcagtcagttagcctaaacctattgattcctcgtgattatttccaatgtgaaaacagttgtgtatgattgcattaaaaatcatatcatcttttagaggttagaaaagggaaaactaaactttctaaatgctacttgagattgcagtaagaagatacgttttctaacctgaaagttaaatcgcatttgttttcttcagtagaatgggaatgtgttgctgttacttgtaatgtcaagtttatctgttaaatatgtccaaaaggcaaaatcatttttgttgcatgttatgggtcgatgttcctgtaattgcagtgccgtaaaagcttattaaagttgttcttttggtttt

SEQ ID NO: 13691 - protein, 361 aa, Homo sapiens
MPHSTSRWRDTANDNEGHSDGLARRGRGESSSGYPEPKYPEDKREARSDQVKPEKVPRRRRTMADPDFWTHSDDYYKYCDEDSDSDKEWIAALRRKYRSREQTLSSSGESWETLPGKEEREPPQAKVSASTGTSPGPGASASAGAGAGASAGSNGSNYLEEVREPSLQEEQASLEEGEIPWLQYHENDSSSEGDNDSGHELMQPGVFMLDGNNNLEDDSSVSEDLEVDWSLFDGFADGLGVAEAISYVDPQFLTYMALEERLAQAMETALAHLESLAVDVEVANPPASKESIDALPEILVTEDHGAVGQEMCCPICCSEYVKGEVATELPCHHYFHKPCVSIWLQKSGTCPVCRCMFPPPL

SEQ ID NO: 13692 - DNA, 1932 bp, Homo sapiens
taaaatactttcagttttcacattttgacaactggcaatcttgaatggtcaaaaatgaattatctgtgttataccatttgggccttgtttgcttgtttttgcctctggttcttacatttatcattaaaatctccactgtagaaagcagttgggtgaagcaaggaggaaattgaaagtcaatccatatggatgttgcttagcagcttttgtaaagtacaataacaaatctccctcacaaatgagagaaactaaaaggacttgttaaataaaactccaaacttaagtctgcttctaggaattgtatttatttatcgtttcaagtatatcttttcatactgactatgagtaaagcaaagcaatagattgtttgaaagtctatagtttatgatgagctttgtcttttcttttcttcttacttcaggctttgagttacacaggtagccacatgaaagtccacttacccagcttagtagagaatgaaatcctgaaagaggatggatcaataattaaaaggtttgggttagcatggggtgatgctttgccaactaacaccataaaaatttttccaattttaagaaaagaaggggagaatccctacatctaccctaaagaggatagaaaactgcctactctcctgtattataatactttggtcaagtaatggatctattgaagtatcatccctgaagtatcctcttgatacttcaaacataatactaagtcatagcaagaatgagactcacgcttacacagtctgactccctgggttttagcaagccatcaacttagttgaagccagcctgatggtattacattgtgtcgatagattcagagagcataggaagaagaatctaatcgatggatcacagattaattttgtgaccagctatattcagctcaatcttagtaaatcattactttgaatggtatgtgctttcttttaacagctgctttatgattctgcatgtgagtggccaataacataagcatgagtttgatatccatgaaacaaatatacctagcgatgctgaaacctggggctttaataagttaagcaagtgtcatgaaagcagtaagcagcacatttttacgcttatacaagggggctgactgtgaggcacactggtctgcccaggtctctgttatggatttgatgtataaacttgggcactgttccacagatctactctggcttctcactggtcctctaacagcactgtaagtattgagattaataaaatgtgctcagcttctcggtgaaaagacacaatggaaatccaagttacaattgtgcttctcacttcattgaaaagggagaaagattgtcattcagagtatgctacagaactattttaagcctttagaacataataattagaacagcaaaattaaaggttctgtcacaattccacccaccaatcaaatgggaaaagagcagcagctaggaatttaaaagagtgtaattgctctctcagaacttaaaaaatgctacatgaattaaggataaaatgccttttatactctcaacttttaagtcttttattcaattattcagatgaaaccacataatccacgcatgcactaacatcatgggctcttcaaacaggaatagatttagagatcaattaatccaaagttctcaattacagctggtgaatttgaagccaggaatatagacaactccatagagtttccacagctagttagttatggaagctagttagttacagaactctatttatgatgtacaacatttattttatacattgttaaagatatcatatacatgtgcatattcagaaacacattggcctacatttgcctacacagaatatcacgaaatgtcctataatggaggcttaacccctggcatcaatgctataaaggcttctactagcttttagcagaaatagtcagaaaagtgcctttttg

SEQ ID NO: 13693 - DNA, 2237 bp, Homo sapiens
agttcaatgcgagctgagcagacagggctgcaaggaaatctggcgcggttcaatacctcgtctagcctgggttccagtatctaattttttttttgttttaactgacaaactcatttctctactgggacaggatgctgtgctggctggaagttccatttctacagcaagaatcctatctggaaacacagaagttgtcctctagccacagcagctcgaacttttttgattgtcgttgctgctttctcccatcacccccatccccttttgacaaagatccaactgtaaaaagtcttacgtaacagttcaggactacttcggttcttttactgggtaagcactttcaattttttttttttaactaaaagccattttaaaattgaatctgttgaggggcttgactaaaatcttttaagtaatttgtgtaatggaatactgtcagtggattttttcgtctcatttctgcacgtgctcctttgttctcagaacagaagctttttatacacatcccataacgcagctggagagagttatgaagtcagttattataaggaacacaaaggttgctttccattctttgcctttagataattaatttttttgttttcttaaaatggagtatttaaagaaggaagaaattcacaagaaataaactgttggagaatttagaaaagtttgaagtttttaccaccttttctatctctagttttgtgtggccaaacacttgtgccgcctggggcggtgggggtagaggcaagcatagacagagaggaactaagccagacatggacaaaggcacgagccaaaaccagacagtcctggccgttcgataggccagcagtgggtgagacaggtcagccagctgcaggggcgggagcgggggggcgggtagggacatggatgtgtgaggtgctcatgcgtgcgatcgtgaccagattctgaaactgccagccattttcccagctccgctttgtgcaatctaaaggaatgcatcccctctgaagcagtcttgccagagcctagtgagggagagaagtatggtaaataccacaacatatggaatcagaaaataccgggaactggagtgggcaagggggaatgcagagggtgtggaaattttttagtgatctggaatgtgttgagtgacaggaagtgccccaagcttctcccccaccaactcttctcagtcgcgcctgcttttgtctaactcttgtaatctacacactactgcttacaaagctgtctgagtttaagacaaaaagaaacctaaaagtctccttacttcatagtacctgtgatatggaaggaatgtaaaagcatgaccctttaagcctatggacattttttcaggtatacaggagaaagataaaataattttccacagaaaaatgagaattatgaattatatagttcaggttccaaatctaatttttaaaagaattctgattctgctacactttacaaatgcttaggttggttcctaatttgaaggagacttgttttatttggttaatgcattgcatttgaacttgtttctattttctttgcataaatttggactttgggagaaaaatgcaaagtaataagtagaatgcacttgggggaaaaaaggaggatttttcccttcatgggttggaaagtattttaaagggttgttttcttgaaaaaacaagctctctcttactttctgcatctatgctataaagataactatgctataataaatgtaaggtagaaaactttaaagagaaaataacagtgttctaagtgaaaagctacttagcattttcccaaacttacacattatcaacagaaacactaaaaattaagagaaaagcagccaactaattaaatagctagccttattttgggggtatgggatagaaaattaagtgtgaataaaatgatacttgggaatgtttctccctcgtaccacaaaggatgttagtggtcagcctacgagttaatccttcctagcatggctctgagccttcatgccgagcagacgttattcacatgacgattcgaaaagtccattcatatatctcgctacctggatttggatagaaaccagacagcaattctttagttccagccaccattcgccccactggacaatagcgatttgttagcacagagtcacaggctgtgggacacaaagcttggagctgcagaaagatgggggattcagagaacaggaaattacaggctcgatgcactcctggcagctctgagaatac

SEQ ID NO: 13694 - DNA, 2527 bp, Homo sapiens
  CDS (642)..(1232)
acttctggggcagccgtgagcagcgggcacacgggcagccacgaaagcagcagcgagggtggtgcaaacacctcataactacaccgaatccagtagcgcctggcgcccccggcgcgcaaggccgcctctactccgcctcatctttgtcccaagtcctttcacagcctgccttcctcaaacggcccgatgcgcccccgtctttgccggagtaagcagaccgccagcagccggcccgcaggtcagtcgaccctctctggatgcaggtcgccgggaaaacccggagcggagcatccctcgggccgggaaacgccctcggcgcgcacccactggcgcgcatgctcagtccgcgcggcggctgcgagtaggaagctccgcgcggcggcgggggcggcgacggcgactggcgggtgggagtggaggcaccggctggcgggcgggggtacagggacggggcaggggctcccgctccaggttccttgaagcacttccgaccgcgaagcccggcgcgagaagcgagctaacccaagagccaacaacgagcgcggagagggcagcggactgagcggagccgccggccagagcgggctcggagcccgggtctccgccgctcgggacccggctaggcggcggcgggggcggcgatgttccactgcatccccctgtggcggtgcaaccgtcatgtggagagcatcgacaagcgccactgctcgctggtctacgtccccgaggagatctaccgctatgcccggagcctggaggagctgctgctggacgccaaccagctccgcgagctgcccgagcaatttttccagctagtcaaattacgaaagcttggacttagtgataatgaaattcagcggctccctccagaaatagcaaacttcatgcagctggtggaactagatgtgtctcgaaatgagattcctgaaattccagaaagcatttcattctgtaaagcactgcaggtagctgacttcagcggaaacccactgactaggttgccagaaagctttcctgaattacagaatttaacatgtctttctgtaaatgacatctcactacagtctctacctgaaaatattggcaatctttataacctggcttcactggaactgagagagaatcttcttacatatcttcctgactctcttacccagctgcgaagactagaagaacttgatttaggaaacaatgaaatatataatttgaatcaattggagccctcttacatctaaaagatctctggttggatggaaatcaactgtcagaattacctcaggaaataggaaatctgaagaacctgctgtgtttagatgtctctgaaaacaggttggaaagacttcctgaagaaatcagtggcctgacttcattaacggatttagtcatttcccagaacttattagaaacgattccggatggcattggaaaactaaagaaactgtcaatcttgaaggtggatcagaatagactcacacagttgcctgaagcagttggggaatgtgaaagtctcactgagttagttcttacagaaaatcagctcctgaccctgcctaaaagcattggaaaactaaagaagttgagcaacttgaatgcagacagaaataaattagtgtccttaccaaaagaggtatgtgcttttagagaaatcacatgataataattatgaagaaataataataatacataagggatcaaaaatgtcaaatgctttgaaaagacgcatgtgttgttttttaaaggtgtgaactctaaatctgtgagtatagagccaactggaggaattatgtcaaagaatgatcatcagtaacattaaggagagttggaaaaggtgaatttataggattttaaatgggagaaagaaagagattgacattttgggtttgatatacagagaatggtgacaccattggcagaaattgataatttgggagtttgacagaggaagtggatgcctttgggtttgatttttgaatttaatgtgaaattaagctccatcccataagcaattggaattataaaaattgatcttgatgcaaccatatttctgggcagagatttacattgggccatgctcatgtcttggatgaggttgaacaaactgttcacaaaggcatacacatagaggaaggtgaatgggaagctaaagccagcttcctaggactttttttttggttagtagtctaagcacgagaaaatgagacatcaccatctgttgtggagagtagctgtatggactgagaggcatttaaattctggcaagggaggtggaaatgctgacaatgaggaggaagcttatagtgggtcaaacaaggaggtgtctagtgtgttgtttaaaaagaaggcttacaattagccaggcgtggtggcgggcgcctgtagtcccagctactcgggaggctgaggcaagagaattgcctgaacccgggaggctaaggttgcagtgagccgagaccacgccactgcactccagcccgggtgacagagcgagactctatctcaaaaaaaaaaaaaaaaaaaaaaaaaaatg

SEQ ID NO: 13695 - protein, 197 aa, Homo sapiens
MFHCIPLWRCNRHVESIDKRHCSLVYVPEEIYRYARSLEELLLDANQLRELPEQFFQLVKLRKLGLSDNEIQRLPPEIANFMQLVELDVSRNEIPEIPESISFCKALQVADFSGNPLTRLPESFPELQNLTCLSVNDISLQSLPENIGNLYNLASLELRENLLTYLPDSLTQLRRLEELDLGNNEIYNLNQLEPSYI

SEQ ID NO: 13696 - DNA, 1857 bp, Homo sapiens
  CDS (71)..(1774)
cattaggagagaacaatgtaaaactgaagaaaaacttgacttacttacttctaaatgtgctcacctatgcatggattctgttaaaacttctgatgatgaagttggttctcccaaagaagaaagtagaaagtttactaatttccaaagcccgaacattgaccccacagaagaaaatgatttggatgattctttaagtgtaaaaaatggtgatagtagtaatgactttgtgacttgcaatgatatcaatgaagatgattttggtgattttggtgactttggctctgccagtggctcaactccaccttttgttactggtactcaagattcaatgagtgatgccacttttgaagagtcttcagagcactttccacattttagtgaaccaggtgatgactttggagaatttggggatataaatgctgtttcttgccaagaggagacaatattaacaaagtcagacctaaaacagacttctgataatttatcagaagaatgtcaattggcaagaaaatctagtggaacaggcactgaacctgttgcaaaacttaaaaatgggcaagaaggtgagattggacattttgattctgtgccaaatattcaggatgactgcaatggttttcaagactctgatgattttgcagacttcagttcagctggtcctagccaagttgtagattggaatgcttttgaggatgaacaaaaagatagttgttcttgggctgcttttggagaccagcaggctactgaatctcatcatcgaaaggaagcctggcagtcacataggacagatgaaaatattgatactccaggaacccccaaaacgcacagtgtaccttcagcaacttccaaaggagcagttgctagtggccatttacaggaatcagccacttcagttcagacagctttattaaaccgcctggagcgaattttcgaagcatgttttccttccatacttgtccctgatgctgaagaggaagttacttccctgaagcacttgctggaaacaagcactttgccaataaaaacgagagaggccttacctgaaagtggggaattgctagatgtgtggactgagctacaggatatccatgatgcacatggcttgagataccagtggggcggctcccatagcaacaagaagcttttgtcctccttgggaataggcacccgaaacattctcttcacgggcaataagaagcagcctgttatagtgcccatgtatgcagcaggattgggtatgttagagcccaccaaggaaccactgaaaccactttctgctgcagaaaaaatagcttccatcggtcagacagccaccatgtcaccagatatgaacacatgcacatctgatcagttccaggagtctctaccacccgtccagtttgactggagtagcagtggccttactaaccctttagatgctagtggaggttccactcttctgaaccttgatttctttgggcccgtggatgacagtagctctagcagcagcaccacaatcccaggtgtggatccggagttgtatgagttaacaacttctaagctggaaatctccacctcaagcctcaaagtgactgatgcatttgcaagactcatgtctacagtagagaagacaagcacatctaccagtaggaaaccgaaaagagaagagcacctaagtgaagaagctatcaaggtgatcgctggccttcctgacttaacattcatgcatgccaaggtgttgatgttcccagccacgttaacaccttccacaagctctcaagaaaaagcagacggataactgatgtgaattggacagtttctattgcttttccttttttccatcccttccctaccatcaaaagcatacctgctctaatt

SEQ ID NO: 13697 - protein, 568 aa, Homo sapiens [sequence omitted]

SEQ ID NO: 13698 - DNA, 1430 bp, Homo sapiens
  CDS (8)..(859)
gctgcagatggcggaaatggatccggtagccgagttcccccagcctcccggtgctgcgcgctgggctgaggttatggctcgcttcgcggccaggctgggcgcgcagggccggcgggtggtgttggttacgtcaggcggcaccaaggtcccactggaagcgcggccggtgcgcttcctggacaacttcagcagcgggcggcgcggtgcaacctcggccgaggccttcctagccgccggctacggggtcctgttcttgtatcgcgctcgctctgccttcccctatgcccaccgcttcccaccccagacttggctgtccgctctgcggccttcgggcccagccctttcgggcttgctgagcctggaggccgaggagaatgcacttccgggttttgctgaggctctgaggagctaccaggaggctgcggctgcaggcaccttcctggcagtagagttcaccactttggcggactatttgcatctgttgcaggctgcggcccaggcactcaatccgctaggcccttctgcgatgttttacctggctgcggctgtgtcagatttctatgttcctgtctctgaaatgcctgaacacaagatccagtcatctgggggcccactgcagataacaatgaagatggtgccaaaactgctttctcctttggttaaagattgggctcccaaagcatttataatttcctttaagttggagactgaccccgccattgtaattaatcgagctcggaaggctttggaaatttatcagcatcaagtggtggtggctaatatccttgagtcacgacagtcctttgtgtttattgtaaccaaagactcggaaaccaagttattgctatcaaggaagaaatagaaaaaggcgtagagatagaagagaagatagtggataatcttcagtctcgacacacagcttttataggtgacagaaactgaagtaaaaagcccttataggattaaaaattgttcagggctcttagagatggtgaaaactacaaaaaaaaccatggctttcatatggacagagaaaatgaaagaaagggaaaaggcagtggtgtgtaggcaaatatggtttggcattcgtcttttaatgacacctgatatgatgtcattttgattttgaaattgaacactagaactgttaatcacctttaaaaagaagagcttattgggaattatatattccttaaaatatacatgggggcctgaatgtcagccatctttatactatagaaaaaggattatggatgcatgaatggtcatgctttggagatcaaatattggttgaatgcctatgtatgtcaggccctgtgctgagccatgaggattaaaaagatgaataaacatatcttgtttaggaaatggatgtataaaaaaatcaagtgcaataaagtgtgtgtccaaaagctgacacaatggaaagg

SEQ ID NO: 13699 - protein, 284 aa, Homo sapiens
MAEMDPVAEFPQPPGAARWAEVMARFAARLGAQGRRVVLVTSGGTKVPLEARPVRFLDNFSSGRRGATSAEAFLAAGYGVLFLYRARSAFPYAHRFPPQTWLSALRPSGPALSGLLSLEAEENALPGFAEALRSYQEAAAAGTFLAVEFTTLADYLHLLQAAAQALNPLGPSAMFYLAAAVSDFYVPVSEMPEHKIQSSGGPLQITMKMVPKLLSPLVKDWAPKAFIISFKLETDPAIVINRARKALEIYQHQVVVANILESRQSFVFIVTKDSETKLLLSRKK

SEQ ID NO: 13700 - DNA, 2057 bp, Homo sapiens
ttgcattcataaaaattaaaattattcattaaaaacaccgtgaatgaaattaaaagtcaaaatgtaagccagaaaattatttacaatgtatgtgtcaggaaaagacaatacccttcaaactttgagagtttacatcagaaagaaaacagcaaatgacatgatccaaacttgataaaggacatgaaaaagagccagcacttagtatgttttctgaatgaataagtagccaacagcacatgaaaatgcgtgtaatccatttgtaagcagagaaatgcaaactaaaacagtaaagtgtcattttcatttcctggattggcaaagggttttatgtattttactgatagtgctcaatattagcagtaaacaacaaatggtgagtaaatatgagcttcggaacctcagggaaatgatctccttatttcaacctgtagattccttcctacaaccagtgtctacagagcacctactatgtgccaggcacagcctaagtcctgaaggtgtagtctccactgagaaggtgatatttgcacaaagacctgaaagacaggagtgaactgtgtggataactgtgggtacccctacaggcagaggagtagcaatgtgggtcccaaggtgggaccacatcagacatgttcgaggactagctgagggagagaggtgggaggtcagaggagatgggggccggctctgctggccgtcacgagcactctgggtgcagagggcgagaggtgggaggtcagaggagatgggggccggctttgctggccagcacgagcactctgggtgctgagggcgagaggtgggaggtcagaggagatgggggctggctctgctggccgtcacgagcactctgggtgctgagggcaagaggtggggaggaggtcagaggagatgggggctggctctgccggccaacacgagcactctgggttttcctccaaatgctatgagagcagaggagtaacctggtctgacttgggtgtgagcagatctctctggttgttgttctggaaaaaactgaggtgcccacgtgaaagcagagatcggttaggaggctgctgcagcaattcaggcaaaaatgggtggcgggcctcgggtgtagtggaggagaagcgatcggattttggatatttgtagctcccccaatacgatttcctggagaaggagatgacttcaatcttctggcctgagtagctgaaaggatgaagctgtccttcgtggaggtggggaatccacagagaagcgggtagggagagagtatcaggagctcagtgttagccatggatgttcgaggggaggtattgagcagctgatagagacacaagcctgtggtcccaggaaaaggtctgggggtcactagcccatggatggagtcacaggctgcatagaccgcaggaaagcgaaggtggagagagaagagcagagtaccaggatggaccattgagcaccctggtgttgagagcaagtggcctctagttagagttgggtcagggccactgtgagtgggctgcccccaacatgagtcggctgtctaggactagtttatctctgcttctcactttactggtattatggggcagctcctgctgtcctccaatttggtgtttgtaaaatgagacataaaaagcaggtgacaaggataccaggaagtgcacaggtctgagtggagtatggggctgtctccaggggagaggtggctgtttggagggaagggtgacaatggataatcagggtccatgggcatccctgcttgttttggagccatggacactcaaataatgtgattttatgaggctattggagaaaaaattggccacagggccaagagggctgggaggaccccagctctccgactggtgtttgcttctctgccatcagggtcgggaggccatgccaagcattgtgatttgcagagtccatgagacaggaacactcccaccacagtgacctgcctctgcacacagccagaatgtagctgactcctttcttctcccacttgcatgcttccaagccttcaaaacatactcatctccatgttctgtgaattagcaattttt

SEQ ID NO: 13701 - DNA, 2050 bp, Homo sapiens
  CDS (2)..(352)
gatgagggtctgcggggccgccaaaggagcccacggatctcacccacctgcggctgcagcagactggtctcctccacttccttcagcgccagcagcgcgtagccgaccgcgtgctcaaacagcacgtgcaacagcacctggaacgggagccggggcgcgagcgtcaacgcaacctcagcgtctgccggaacccgttcccagggcaggcgcaggcgcaggcgcaggcccaggcccaggcccaggccctgtctgcggcccgaacgcaggccgaaacccccaccgtcgcgtcgcccgcgccccgcaaccactcctcaccatggcgccagctcccgggttcggctcgcaatgcggctagcgcgctccggcgcgcggaaccaggctccagaggccacgcccccgcccccccgaccaatcggaggccggggacgacaccatctccggcctttggaggggccgcccagggtggtatcgcccggagcgcgggctgggtggtgccgagcgcgggcgagcgggccttttccggcctctgcagctgcgcgggcgggcgtggttgccggggacgcgcggcccccggtcgggcactgcaggcggcgaaacgacttgggaaggccctttcggggtaatagtccggttcctgatgttcttgtcatatgagttacgggcagcagagctgggtgaagtcggggcgggaggtccgcgtggggcgcggcgtccatcccagacagagaccgctgcctagccggcttcccgcttcgtccgtggcctcgggccccagaccctgcgccccacgtccccgggacccaggcgttcccgtcccctactcggggacgagcctccccggcgccgggtgggcggtgcatcctttcctcccacccgtaacgggagcggtgcctggcgcgctctggcgcagaccctgctgggaatgtagctcgcgcagttttcttcgtactattaatttatttcttttttttgtttttggtttttttttttttttttaaatgactgtagcaggcagtaacgtgcgaaagaaagacgctccagcgtcttcctaggccagtttcttgttgctgtgctgcacgggacccagctccttttgctgggccacgtgttgctcctccgcttgggcggccctgaattctgggcgctggtgatcgctgagtgaatcgcagctgcttccctgtccttgagggcgtcttttgggcactcaggcgactctttagaaatgagttttgctttaataattaatattaacgttataaatccaaaacctagttatacttaagtagcgtatcccctggtatgttttaaagagtcattcgaaggggatttttaaaaataatgtatagctataaactgcatttatacatttaattgttattttgttaagcgattgagttacttgacaaaatccaagtacatagttcactcacaaatctaatatgtcaaacctaaatgtggttggtaaatcttactctcataatttcaatatggtttacagatgtggttgaattctgttacacatgtctacttacgagtcagaatcgttattccatttaatattttaaaatggaattgccaagttaatccatacattagcatgttaaattattttaaccgtcgtgaatacatcaaaatagacgattccaaaatgtaatggaaaatactaatgctaatacttcaatttacttcattatttctgcccttaatcctgaatcttcctggagttacaggtgcttatccactaaaccaggggttttcaagcaagaagtcagaatgcattaatggacagcattttaaaaaaataggattgggtgggctataatccagcactttaggaggccgaggcaggcggatcacttaagatcaggagttcgagaccagcctggccaacatggtgaaaccccgtctctaccaaaaaataaaaaaattagctggacgtggtggagcatgtctgtaatcccagctactcgggaggctgaggaaggagaatcgcttgaacccgggaggcagaggctgcactctagcctgggcaacagagcaaggctctgtc

SEQ ID NO: 13702 - protein, 117 aa, Homo sapiens
MRVCGAAKGAHGSHPPAAAADWSPPLPSAPAARSRPRAQTARATAPGTGAGARASTQPQRLPEPVPRAGAGAGAGPGPGPGPVCGPNAGRNPHRRVARAPQPLLTMAPAPGFGSQCG

SEQ ID NO: 13703 - DNA, 1686 bp, Homo sapiens
cctgcacatgatcaaacagatcctcctaaaacacaccttttgaaatgttgaacataatagtgtatgttaattaacagctctatgaagaaaatccatttccatgactgaagcattggatataaatatggtgtcctgctttttttgtagaaaatgtaatttgaggatgaattttctgctttaaaggcatgtgtgtttttaaaattatgaatgtagatgtgtgattgtctgagtgagtgaaactacaagaggtaaaaaataatgggtggttgaaaaggggttaaaatgtatgtgccaagttctactagaattccatttgaaatagcaccttccttaggtttcatggacaaataatgggaacttctaattttgatcaatcccattaaaaaaaggctctttcctttagagaaactctattttgatgtcaatatagattactgtatgaagtagctttgtgtctgttacctgtccatgagcatacaacattgaatacaattgggtgtattctttcagttttacacaattaaagtatacacacagatgtagcttatctgtttttttcttaaattgttgccctgaaaaaatttcttgcatatgaattgtaaaatgtaaatacatttttataaccaatgttttgatcttattgaatgttactttgaaaatgtataactattgcctgcaatgtagatgagccttttagtagagctgatttattccagtaacttcttccatattttctcactaatctcccgttagccaaaatatgccagaaatgggaaagagaggagaaaaagtcattaacattaacacctatactgttctatactactcctacccgtgtgctaggaatgtgcactagctctttttaaattccatgctacactttgaggactgtcatcatgttctcgttttgtagttcagaaagtgaggctcaaagaatttatgtaaccttcccagagtcacagtgtaaagttagatgttgaaacccagtttatcttatacaaatgagcctctgcttgttctacaaaggtagtagaatcaatctcgacctatataaatagtagattttttatggtgaaactttcccacataaagtaaattttaggggtgaattagagtaaaacttacaggataagcattttgctctttttaagaacagcatgaaatttagaatatcaatgatagctatctttaagaatcagaattagtactagaaatttaaaaaaccctatagtttggagttagtatgagccttttgtgaaaataaatatattaaattattttgcctgatgtggtaggggaaatgtattgctctatattaagaaatattctggatattctgattgacatcttattaggccatagtgagctatgctctgcacaactgagaaattaggtatttagaaggcatgtagagatgttgtcataactaggtcttcaacgtgaaaattaattttattgtatcatgtcaagtatcagtttaccacatattatttttatattaattcaacatttgccttaagtgtgttgttaaatgaaagtacagacagcttcattgttgtattgttaataattgttacttactgctccaggcattttactaaattaattttttaaattattttccaccctacatcagtatattggttgtgctttatatttgccaaagtcctaactgactatacatag

SEQ ID NO: 13704 - DNA, 1585 bp, Homo sapiens
  CDS (35)..(1210)
gcggaagaggtgggctggtggaggcggggtcgagatggcggcgcctttgaggattcagagcgactgggcgcaagccctcaggaaggatgaaggggaggcctggctgagctgtcatcccccagggaaaccatctttgtatggcagcctgacttgtcaaggaattggcctagatggcatcccagaggttacagcttcagaaggatttactgtgaatgaaataaacaagaaaagcattcatatttcatgtccaaaggaaaatgcatcttctaagtttttggcaccatatactactttttccagaattcatacaaagagtataacatgcctggacatttccagcagaggaggtcttggtgtgtcttctagtactgacgggaccatgaaaatctggcaggcttccaatggagaactcaggagagtattggaaggacatgtgtttgatgtgaattgttgcaggtttttcccatcaggccttgtggtcctgagtgggggaatggatgcccagctgaagatatggtcagctgaagatgctagctgcgtggtgaccttcaaaggtcacaaaggaggtatcctggatacagccatcgttgatcgggggaggaatgtggtgtctgcttctcgagatgggacagcacgactttgggattgtgggcgctcagcctgcttgggagtccttgcagattgtggttcttctatcaatggagtggcggtgggtgctgctgacaactccataaaccttggctcccctgagcagatgcccagtgaacgggaggttggaacagaggccaaaatgctgctcttggcccgggaagataagaaacttcagtgcttgggactacagagcaggcagctggtgttcctctttattggctcagacgctttcaactgctgtacttttctctctggcttcttgctattggctgggactcaagatggaaacatttatcagctggatgtgaggagtccaagggctccggtacaagtcatccacagatcaggagcaccagttctatccctgctaagtgtcagagatggattcattgctagccaaggtgatggaagctgttttattgtccagcaagacttagactatgtcactgagctcactggggctgactgtgaccctgtgtacaaggtagccacatgggagaagcagatctacacatgctgtcgagacggtcttgtacgacgctaccagctttctgacctctgacttcttggaaagagcagtcccggttagtgaaaaggtttgaccctgatcaacaatgagcagaaacatcatcagtccttcccaaggaccatggcgtttaatgtcttgggcaccccttggaaatcacagaaagtcagctgtactggccgtgtggaactctcatcccaagacctactttgaactgagtaagaaggtcattgtgcccactgcatttgttccaacttctccttgtataaactcaccccagcaacacagggcaaggatatagatgcttttagtttgttcttaaaccagttttgttaaatgtttacaaggacctcagtactaaagcctgttctctggaggaaataaagaaaatatgtttggaggtgcctg

SEQ ID NO: 13705 - protein, 392 aa, Homo sapiens
MAAPLRIQSDWAQALRKDEGEAWLSCHPPGKPSLYGSLTCQGIGLDGIPEVTASEGFTVNEINKKSIHISCPKENASSKFLAPYTTFSRIHTKSITCLDISSRGGLGVSSSTDGTMKIWQASNGELRRVLEGHVFDVNCCRFFPSGLVVLSGGMDAQLKIWSAEDASCVVTFKGHKGGILDTAIVDRGRNVVSASRDGTARLWDCGRSACLGVLADCGSSINGVAVGAADNSINLGSPEQMPSEREVGTEAKMLLLAREDKKLQCLGLQSRQLVFLFIGSDAFNCCTFLSGFLLLAGTQDGNIYQLDVRSPRAPVQVIHRSGAPVLSLLSVRDGFIASQGDGSCFIVQQDLDYVTELTGADCDPVYKVATWEKQIYTCCRDGLVRRYQLSDL

SEQ ID NO: 13706 - DNA, 2928 bp, Homo sapiens
  CDS (462)..(830)
tcagagcttgtctccaggttgagaattacctgttttccactctgaggggattagaaagatactgttttaatgggttataaaacttgtgtgaagaagattggccttctccacctctcctgtgaaataaattgtttgaaaactctttgaagagaaatggcttcagtatattgttctatctctgctaccccaaagcccagagaacaaatattaagtataaattgctaggctaggtatgtcatatgtggcagctttgacatgtaaaccaaaagactgagccaagtctcaatcaatgtacaggttattttgccgaggttgaagacacactagggaaaagagacacaagctacagtatgatctatggcccctactttctccaaagaggattttgagggcttcagtatttaaaggggaaaagtaggcaggaggagaaaggaggaaagaacaaaaaaaagagggagagcatggtcacattcttaggaggctttgattcacactcactgaatccatgtgttgcacgtggcaaggaatgggtagaggaacagtcgattatgtatgtcccctgctcagtaaaactgcactttacaaaagataaacagaataggggaagaagtcaaatatgcatttatctcaggctgggcagtggggatggtttgtactctcctcttgtcccatacttggggaggccacctggggagacatggcctcttgtagctatctgtttaggaacaaaaggaaagacagtgttctgtgacccagcttccaagcttaacttttccctttggtatagtgagtttggggtcccaagatgttcttttcctttcacagatgtatgacacttcagcagaagggtgaaggctgtagaagggagagaaaaccctcttcctgtatggctattgattgactttgacttttaactgattatgtcatctgaggagtctgtgaaggtttatgaagaatgaattcaccatacaacctcccctcagatggaaatgtgtacataatgtagaagaataaggggctgtgagtttcgggggtaagaggaggggaataaagttaagactcctaatactgcttagcttctagccttgggtcttgccgcaacgcctgcccaacacctgtgtgtgtgtgctttgcaaggttagctgggacttaggtagaccccactttgtctgtcgctgacaggaaacctacacattctctgctctttctgctgtttccctgacctcgctctcccatggaattttagattcaattcagtggagttcaggttccagtgtgggttgatcaccagccgatgcaatccccctagcatatgggaaagcaaaggatcaggaggcatgagatcctagttcagtcctggcctttgcttcctggtttgcctaagtcagatgttggacatagtattggggtagggtgctgatgagtggtagttggtgaaggggccattttccacacaagtccccaagggagacagaccaattggcaaaacaatggaaagtatataatcttagctacttaaatcataagtagttctgggatactaggctctactgttctatttattccccacaacatttcctaacatttcctaggcatgaaagatgacgctgaagacatgagaaaaacaagcatcccctgacagccaggggctagcctgagacagccgccctctgatgttgtcaggaggcatcctggcgttcatcactgggctgtggtgtttcttgttccacgtaaatcgcacagaacaccaccctcagacaaggtcatgccgtgactgtgatgaagttagacaaaaaacaagaccacttaataattatcccagcatagacaaacacaaggtcactatgtaaaccacgaaatcacaaactcttcatccgagtgcctgctgcccttcaccagttcccattttagctttgctctcatctgtgctacatgagatttactaccatctcaatcagataatctcccccacttcctgacaacacccaatccaaagcacacccctattcgtggaacactcccacgaatgacctaagcaaggcctccatcctcaaagttcttctgacagctgcttactgagatgccccacagtcccccagtgtgtggtctcccaatgcactgagcatttgttcaaccacagttgttttcctaatggtctggctggaaagtgctagactgagaagtcatttcctgaggtctgctgttctcatgagggcaagggggaaaggagcgtcatacacacaaacaggatggctactggtgtgctggcacctcattgatctgcagcaactcgtcctgcccacggggttggtggttttggcccagacaccaaagaaggcttcttacaagtaactggagaaatctagacttcagtttttcctaacctgtaaaacaaggtcaaagcagttttgtaataaatagaaatgctggaaagcatgtagtgtgatggtgggcaagacatgctttgctcattgttcatagttcctggcacctccacacctccccttagagtccctcaggctcaggtgtgtctgtgtctcgagcccttgctttcctgagggatcagaacccctatttgaggcagggccttaaaccgaggagatgcggactgagctccctctgtatggagggttcaatcaatttcaggaattccaatttgctccagcagagaaggtccaagttctgtctggatcctgttatgtgtgctgaagagctttccagagtcatagggctggggtggggaggggtcatcctggtgtggacagggcatgtggcagtagagacgactgaagatgcagggacagggtccagtgccctctagtgggaagggccccccagacacctcctgattgtcctcaaaagagctgctgcacaagtcttgctcttactttgtttgcattacttgtctatgtgttttgtttttttttt

SEQ ID NO: 13707 - protein, 123 aa, Homo sapiens
MVTFLGGFDSHSLNPCVARGKEWVEEQSIMYVPCSVKLHFTKDKQNRGRSQICIYLRLGSGDGLYSPLVPYLGRPPGETWPLVAICLGTKGKTVFCDPASKLNFSLWYSEFGVPRCSFPFTDV

SEQ ID NO: 13708 - DNA, 1363 bp, Homo sapiens
ctaagaatagacgtccaaagccacacaaaggaaggtgttatagaaaaacagaggctgggcacagtggctcaagcctctaatcccagcactttgggaggccgaggtgggtggatcacgaggtcaggagatcgagaccatcctggctaacacggtgaaaccccgtttctactaaaaatacaaaaaattagccaggcgcagtggtgggcacctgtagtcccagctactggggaggctgaggcaggagaatggcgtgaacctgggaggcggagcttgcagtgagccgagatggagccaccgcactctagcctgggcgacagagagaaactctgtctcaacaaaaaaagaaaagaaaaacagagcaactgggtgattgtattgaaaggaagggtctttggaaccttgattgacaagttctaccagttgcagcgaaggaggctttccattgagttatgtgctcatgacattcttagtcatggactgacttaactttcttgatcttaaataagtaaatcctttctttcttttctccctgttgtgttttcttccccactcatttgcccttcctctctctttcttataggtttgatgggatggaaattttatattaccagagtacaaaagtgggcttatatcttttcacaaatagaaggcctatctcaatggtaaagctactggttggaggtagtgatacatggcgtactctattctgttaaggtctagaagtcttcataggaaggataagtccacatgaggttcgcatacttcagattcaatattgagcttggttccatgcagtagaagaaggctgatgtagtgaaaagagaacagggtttagggtcaagccagcctgagttcacaaatcatctctgtcattctttaattgtgtgactgaaatcacataattagccagtacaagataagccttagtttcttcatttgccaactgagatactaatacagaccttgtgaggattaagagcaggcatgggatgcaggtgagcacttactcattctacagacatttattgagtactgctctgttccaggcatatttcaggacaggacgttaaaatcaaatatgggctggacacagtggctcaagcctgtaatcccagcactttgggaggctgaggcaggaggatcacttgaggccaggaatttgagaccagcctgggcagcatggtaaaacctcgtctctattaaaaaatacaaaaattagccatgtgttttggctcatgcttgtaatcccatctactcaggaggctgagatatgagaactgcttgaacccaggaggtggagtttgcagtgagctgagattgctccactgtactccagcctgggtgacagaatgggactctgtct

SEQ ID NO: 13709 - DNA, 1577 bp, Homo sapiens
actactttaaatttcacatgagtcaaagaagaacccatgtagccaagacaatcctaagcaaaaagaacaaagctggagacattacaatacctgacttcaaactatgctacttccaagcctacagcaaccaaaacagcatggtactgataccaaaacagacatatagaccaatggaacagaacagagacttcagaaataacaccacacatctacaaccatctgatctttgacaaaactgacaaaaaaaggaatggggaaagaatcttctctgcagtaaatggtgctggctagccatatgcagaaaagtgaaactggaccccttccttacaccttatacaaaaattaaatcaagatggaaacaagacttaaatgtaaaacccaaaaccataaaaactctagaagaaaacctagacagtaccattcaggatataggcatgggcaaaggcttcatgacgaagatgccaaaagcaattgcaacaaaagccaaaattgacaaatggtatctaattaaactaaagagcttctgcacagcaaaagaaactatcattagaatgaacaggcaacctacagaatgggagaaaatgtttgtaatctacccatctgacaaaagtataatatccagaatttacaaggaagttaaacatatttacaagaaaaaaacaaccctgtcaaaaaatgggcaaaggatatgaacagacacttctcaaaagacattcatgcagccaacaaacatatgaaaaacagcccaacatcactgatcatcagagaaatgcaaatcaaaaccacaatgagataccatctaatgccagtcagaatggcaattattaaaaagtcaggaaacaatagttgctgatgagatatggagaaataggaatgcttttacactgctggtgggaatgtaagttagtttaaccattgtggaagacaggatggcaattcctcaaggatctacaaccagaaataccatttgacccagcaatctcattactgggtatatacccaaaggaatataaatcattctataaagatacatgcacatgtatgtttattgcagcactatttgtaatagcaaggctgtggaaccaacccaaatgcccatcaatgatacactggataaagaaaatgtggtaatgggtgcagcaaaccaccatggcacatatatacctatgtaacaaacctgcacattctgcacttgtatcccagaacttaaagtataataaaaaaggaaaagaaaatgtggtacatatacaccatggaatactatgcagccataaaaaggaatgagatcatgtcttttgcagggacatggatgaagctggaagccatcaccctcagcacacttacataggaagagaaaaccaaaccccacatgttctcactcataagtgggagttgaacattgagaatgcatgaacacagagagaggactaactcacaccagggcctgttggagggttgggggtgaggggagggaacttagaggaccactcaataggtacagcaaaccaccaaggcacatgtatacctgtgtgacaaacctgcacattctgtgtatgtaccccccttttgtttagaag

SEQ ID NO: 13710 - DNA, 2471 bp, Homo sapiens
ttaggaaatgcagttttagtaggattgtatggactgaagtagagaattaagtgaagaaatttttaactgaggagaatcccttaatgtggttttggtttggaatttttttcttaaatttttgtagatacatactaggtatatatatttatgaggtacacaagatattttgataacggcatgcaataaataatcacatcagggcaaatgtggtatccattacctcaagcattaatcctttaattgtattacataactaaaaaagtataaatggattgatttggggtttttttaccttatatttaaaaataacctttaaaaatcccacatactgaatgccacatgaactaaaagcatgaatttattaccaaaagttgtttgtaaatctaatatttcatatggaatcttactgaacagcattcaggagatttcttgttggctaattcctcttgagtctttttgcaaagtaattgtattctttattccatctatctattgtttacatttatgtattgagggagaacgtagagtttagttttgagcatttttgtttgagtcgttcattaaacatcaagtggagatcttgagtgacaattaagttgtatctggagttctggagaaaaaatgtatactggattagtcagggatagatgggaagtaaagttgtgagactggatgagaactctccaagagaatgagtataaatagacttgcaaaaatctgtgttagaattatcaacacagattatgacccagccaactgaaggaaaggaataagatcagctcaaaatattggcagaggacaagaactagtttaaaaaaaaaaaaatgaatgaatgagtgaatgaaaccctcgcagtacattgtatgctaatactattctcctatgtaaggggctttgagtatccgtggattttggtgtcttagggtgggaatgggagggtgattcctggaaccaatcccccatggatattgaggaactattgtaaatttactgctttctctctcgttatttttcagatttacctgtctactccagcatatcattgcagagtaccagatttaattttaacaattcataataaagtctaaaacatttttaaagctgatcaataaattttaaaaatttgttaatcccataaaatggggagagttggcaccaatataatattactctgataaacaattctggggcaggaatatttccatgcctctatgctaaataaaacttagaacaagcaaacatagttgtatgcttgctttaggaaaatctcactcttgatggtgaaacaactaaaatagcttatttatcaagactgatttcccaaaaagacttgcttcaggacttcccatttcatcattcttaccaatccaaaactattttgtcagttctaaccaggttctcaccttgaaaaatgctgattaaagtggtccagcccacccaaccctaaaaccttgtaaatatccttctctgtctttcctcttcttgttcttcctcactgaagtcagtctgctaaacttagctttgctagatgagtgaggtttttttaatgttgtttggagagttgacagtatataagctagttatgctgaataatatatggggaagaaatcaagaattcagaatcttaactttcttttcttattttttaactgtctgctagtttatctgtatggacatgcatgtctgaccaagctatgaaatctccattcttagattgaacttctttccttctcgcctccatttatttttctcatctacccccaccccaagtcatgggatagggagagttgtcctattccttttctgtctcctaaagtagtttacccttatagaagtcttgaaaccagattcatattttatctcattttagtaactagtatccaaatcccaccaagtttacataagaaatagcaaaacaaaaggaaccaactgggtatttatctaccaatgaagatactttaaatagcaatacatacaaggtaatgatctaactttgtatgttttgacatagaaaagtaaacaccgtgaaagtaggtgaaagagtatatatattacctcatttttaaatgctttcgtgcataaataaaatctgaaagtctgtgtgcctcaggaaagaagtagataatcactttatttttttcaaataaatatcttttattacctctgcaattaaaagtattacacatttttaaggatgaaacaatgagagacacaatgatgacatacatctgccaagtagatgctgattttagagaagacttttttcccagtttgttgaaaagtatgagtaggtaggtagttaactgaaggtaactgaaggtagttactgaaacttttaaaaaattaaattcttaaagtctttgtaccgtcttttcccagaatatggaatatgtctttctacttgaacttctgagattcctaaagcaatactgtttaaacacttacattgtcactaacaatggatttaagtg

SEQ ID NO: 13711 - DNA, 1830 bp, Homo sapiens
  CDS (449)..(1783)
atcttccggtcgtgggccatgccgggggcgggcccggaaccgccacgggtgagtcgggtcgtggctgctgccgggtcctgcgcgctccggactgaggtggcgtccctgggccggacggcggtgtcccggcgtggcgggaagccggcactggagcgggagcgcactgggcgcgggaccgggaggcgcagggaccggacggctcccgagtcgcccacctgacggtaccgagagggcggcgcccctccgagcagagccgtcccggccactcccctgggatctgacttggctcttgcggtcgcgggcaccgtgaagccctggggtgtgcgtggctcctcctgctagaagaagtcttcacttcccaggagagccaaagcgtgtctggccctaggtgggaaaagaactggctgtgacctttgccctgacctggaagggcccagccttgggctgaatggcagcacccacgcccgcccgtccggtgctgacccacctgctggtggctctcttcggcatgggctcctgggctgcggtcaatgggatctgggtggagctacctgtggtggtcaaagagcttccagagggttggagcctcccctcttacgtctctgtgcttgtggctctggggaacctgggtctgctggtggtgaccctctggaggaggctggccccaggaaaggacgagcaggtccccatccgggtggtgcaggtgctgggcatggtgggcacagccctgctggcctctctgtggcaccatgtggccccagtggcaggacagttgcattctgtggccttcttagcactggcctttgtgctggcactggcatgctgtgcctcgaatgtcactttcctgcccttcttgagccacctgccacctcgcttcttacggtcattcttcctgggtcaaggcctgagtgccctgctgccctgcgtgctggccctagtgcagggtgtgggccgcctcgagtgcccgccagcccccatcaacggcacccctggccccccgctcgacttccttgagcgttttcccgccagcaccttcttctgggcactgactgcccttctggtcgcttcagctgctgccttccagggtcttctgctgctgttgccgccaccaccatctgtacccacaggggagttaggatcaggcctccaggtgggagccccaggagcagaggaagaggtggaagagtcctcaccactgcaagagccaccaagccaggcagcaggcaccacccctggtccagaccctaaggcctatcagcttctatcagcccgcagtgcctgcctgctgggcctgttggccgccaccaacgcgctgaccaatggcgtgctgcctgccgtgcagagcttttcctgcttaccctacgggcgtctggcctaccacctggctgtggtgctgggcagtgctgccaatcccctggcctgcttcctggccatgggtgtgctgtgcaggtccttggcagggctgggcggcctctctctgctgggcgtgttctgtgggggctacctgatggcgctggcagtcctgagcccctgcccgcccctggtgggcacctcggcgggggtcgtcctcgtggtgctgtcgtgggtgctgtgtcttggcgtgttctcctacgtgaaggtggcagccagctccctgctgcatggcgggggccggccggcattgctggcagccggcgtggccatccaggtgggctctctgctcggcgctgttgctatgttccccccgaccagcatctatcacgtgttccacagcagaaaggactgtgcagacccctgtgactcctgagcctgggacctacatgtggtttgcgtaataaaacatttgtattt

SEQ ID NO: 13712 - protein, 445 aa, Homo sapiens
MAAPTPARPVLTHLLVALFGMGSWAAVNGIWVELPVVVKELPEGWSLPSYVSVLVALGNLGLLVVTLWRRLAPGKDEQVPIRVVQVLGMVGTALLASLWHHVAPVAGQLHSVAFLALAFVLALACCASNVTFLPFLSHLPPRFLRSFFLGQGLSALLPCVLALVQGVGRLECPPAPINGTPGPPLDFLERFPASTFFWALTALLVASAAAFQGLLLLLPPPPSVPTGELGSGLQVGAPGAEEEVEESSPLQEPPSQAAGTTPGPDPKAYQLLSARSACLLGLLAATNALTNGVLPAVQSFSCLPYGRLAYHLAVVLGSAANPLACFLAMGVLCRSLAGLGGLSLLGVFCGGYLMALAVLSPCPPLVGTSAGVVLVVLSWVLCLGVFSYVKVAASSLLHGGGRPALLAAGVAIQVGSLLGAVAMFPPTSIYHVFHSRKDCADPCDS

SEQ ID NO: 13713 - DNA, 2205 bp, Homo sapiens
  CDS (704)..(1099)
ttttggattacccggatgggccctaaactcgatgacaggtgtccttataaaaaatacacatagagggacacagacacaggggagaaggccatgcggagatggaggcagaatgatgcagccacagcatggaatgcctggggccaccgggagctggagaagacatggcaggattcttctcttgagccttcagaaggagcacagcccaacggacatcttgactttggacttctggcctccagaactgtgcaaggattaattgtctattgttttaagccgcccaatttatggtagtttgttacaacagctctagaaaatgagtatcatttctgagggcttcagccttaaaatgggcctagataggagaagtgcccactttactgagctttggggaggactagaagggatgcctgtaagatttgcccacacccagcacctggagagcacttgatgaaggttagccctcatacagagcatcatttattacccggcctttggctgctctgccctgaacccttgcagagcccacggaagccagcccttcacattgccatcttcttgtgtctgactcgttgccactgggacccctgagcccagcccagcgtgttcctggctcaggaatctcagaggaatcaaatctgactcccagacccaggctgcagaggcctctctgagccattattaccagggctgccagagcgagactatgaacatccacatgtggcgttttaatattttacccaagaagtcattttcttccacgattcagacacagaagactcgaagaattaaagtgagaaaggtactcagggcctgcatgatttccgccaatgggcgtggaggattttcctgtgtctgttcaggctctttctttcttatctgcgtcttacagcagacgggaagccagctgacgagagattgcatgttcataccaattattaaaaatatatggcaggcttctggaaatgcattcacatgccaaggaaatagaatgcagtcaccagcccaggcccctgcactgtgtgctttggaggaacagtgcggcatctgtaaacacaatgatacaaggttttggaccagattctgccacctcccagctgcgtgaccttgggtgagtgacttaacctctctgagccccagtgcccataggggaagttcattcctccctcacaggtttactgtgagcgtcattaactgagataacatgttcaagtacctagttctgagcctggcacatagaaggaggtcaatcagtctgatttgtttccactccctgccccagaatttcctgactccctaagaaaactgacataactaccctgccaacctcccaggtcctgaggtgcactgctgccaagagcaaacgtgcaggatagatttacaccttccagtgcacttccatggccatccactcatttgatcctgcagactctgctgcagagagtgttctgtttccattttgcaggggagcacctggagagctctgaatcacataggtagcaagtggggctcagtggtgagaagccaggcctgctaatccccaaagctaggctccttcataccccatgctgactgtcaaatgagctgatggatgggaaattgctccataggcaacagagctctatcccagcctgagggctggactgttgttatctccagcacctgtctgtgatcaaggctctttgctacctttttgtccatgtgtattgtcctcacttcccccttctaggcatgagcaggttggatcagtctcatttggctcattccaaggcagtctgtgaacttgccgcatgtgtggttaaaatgtatgcatgctcccactcccacttcccatgtgccttctcatgctccacgctctctgccccacccacactcactggctcgcacatccaggaggtgctcagcacagcctgtcctctgttatgaagaagacttcgtggagctcaggtgcaccatagagccactagagagacacgtgtcattcattcatctgccaaacccacatttactgggcacccactatgtgccagatgctggagccacaatgatgggttaggtgcagcccctgatctcaggactcccccagtccagggggacaagttaattgacaatggcagtgtaggtggcaagtgctagaatagctccgcccggggccctgtggaaacgcagaggaggtggctgctcatcctgccttgagaaatgtttcac

SEQ ID NO: 13714 - protein, 132 aa, Homo sapiens [sequence omitted]

SEQ ID NO: 13715 - DNA, 1469 bp, Homo sapiens
  CDS (66)..(770)
gaaccggaagatggtgtgagccacgggctgccgggggcctggggctcggcgtcggtccccgggggatgtggagagctggcagcatgtcggccgagctgggagtcgggtgcgcattgcgggcggtgaacgagcgcacttttggcgagaactacgttcaggaactgctagaaaaagcatcaaatcccaaaattctgtctttgtgtcctgagatcaaatggcacttcattggccacctacagaaacaaaatgtcaacaaattgatggctgtccccaatctcttcatgctggaaacagtggattctgtgaagttggcagacaaagtgaacagttcctggcagagaaaaggttctcctgaaaggttaaaggttatggtccagattaacaccagcggagaagagagtaaacatggccttccaccttcagagaccatagccatcgtggagcacataaacgccaagtgtcctaacctggagtttgtggggctgatgaccataggaagctttgggcatgatcttagtcaaggaccaaatccagacttccagctgttattgtccctccgggaggagctgtgtaaaaagctgaacatccctgctgaccaggttgagctgagcatgggcatgtccgcggatttccagcatgcggttgaagtaggatctacaaatgtccgaataggaagcacgatttttggagagcgggattactcaaagaaacccaccccggacaagtgcgcagcagacgtgaaggccccgctggaggtggcacaggagcactgagccagggaatactgagagcactaactatgcactaacctagattttcatttcgatattccctgtgtcccagcgcagtcctgctctcctgtgacctgtggagagcactaatgatcacgtgtgttgatggaaaccatctgtgcttagtctctgacataggaagcttgcttcaggcaatggctttggattgagtttgagaaattcaaacatttctgcagaacagataccaaatcaatagctaggaatcatgttcaatattgaattctgcccaggagcatgaactgatccatgaatgccttttccaggttaaaatttggtcactgatgcctataatcgtggaagtcagagggattcccctttttcatctcattttaataggaaaattccttatggttaacatctccctacaaactcctactacgtcgtctaaattgctgctctggaataaggtgatttctgcccccagattcttccctagccggtagatacgtgaagatattcccaactgtggaatggcagtgtaggtagcttcaggaaatggctcaggttaattctcaaaacacaaattgttgctggccaggcatggtgactcatgcctgtaatcccagcaatttgggagacagaggcggaaggatcacctgagcctaggagttcaagaccagcctcagcaacagcaggagccccaccccccgtctctac

SEQ ID NO: 13716 - protein, 235 aa, Homo sapiens
MWRAGSMSAELGVGCALRAVNERTFGENYVQELLEKASNPKILSLCPEIKWHFIGHLQKQNVNKLMAVPNLFMLETVDSVKLADKVNSSWQRKGSPERLKVMVQINTSGEESKHGLPPSETIAIVEHINAKCPNLEFVGLMTIGSFGHDLSQGPNPDFQLLLSLREELCKKLNIPADQVELSMGMSADFQHAVEVGSTNVRIGSTIFGERDYSKKPTPDKCAADVKAPLEVAQEH

SEQ ID NO: 13717 - DNA, 2322 bp, Homo sapiens
gtaatttcaggagcacagtaagtgtagccccacccaaccccattagttcatttatttcttccacaactggggaggcagtgaaatgctgcagttaaacacttgggctccagaattggactgcacgactttactctccagcttaccacttgccagccgtgtgacacgggtgagttactcgacccctctaagcctctattttctcatttgtaaaatggagctgataatattgtcttccttacagagaatcaaatgagataatatgcttggcatatgattgcccttgaagaggtttcactttattgaaggagaaagacaaatatttttttgtaattactgtatagtgagtatggtaggtgctatgaaagaagttgttgaaattttaaacttagagtttcatgtctttttcagggtataacataagtggttaaaatagcaaggactttgaagtcagacctgagtttaaatccaaattccaccagctaaatgaccttgggcaagctgcttcactttcgctaagtctcagtttcttatgggaatagagtaggatgatgattttatatagctactaggacacagtgagccttcaataaattgtgaccgttactattattgttattcctattattagtcaagtttgatacctgggtgatgcatgtggtttgtaaatatttatattttgttttgacacagtgaaggaagacaagggaggaattggtgaaggaggttaggaaagaatttcgaggccactagaaacaactgcacatctcccagaaagagctctgcctgtgggcagatcatacttatttcttgataccttttttacctgcaagtcctcactggactcagtgggtagacaggaggctcaggactggatagaagaggctcctaagttagcaggtgcagagtgtgcagtgagtacccaggaacaaggtttgcctgctgaagaagggtactgtgccaagtctgggtgggggacagcagggagcacactttgtgtgtgtgtattcttgccttctctgctctgtagtaggcacctgtccccctgcagccagcccggtcctgcctttcattgcctgaaggaactgctactgccacctggcacactcagatccatgtcacgggccagggaagtccaagaattttgaagaatattagacacatttgtgattgtgatttagggtagaggtggccctcaggacatctggccccaagaagggtttattgaggttatgttcatccacctaatacaagggctccttggctagaaaatcactctgaaagaggttctgctaattataggaaaacttggtgaacgtcagagcataaacaagacactgccacaacatcttgtggttctcaatgccaggatacaatgagacatcccagagtccagccctgaaggggttttcgcatcctctgagactggaatcagaaggtgtgaatagaaatggaagcagtggcctgtttcatccccttctctcccctcccctgtcccatcttttttcctcagggctctgccgacccattctgctgtttccgtattcccttcacagcagctcccatcctctactccttcccttgtctacctctccttgaaggaggagcctttccaatacacccttccctgtgactccaaccttggtaaagtcaccaaccagctggactcctccagacagctatacacttgcagcccaaggctgggagtagaacatggctctgtgccaagctgcagctgggaagagactggcaatgaaagggactgatttgggctgggaacaaaacagcctcaaatcaagggcactggacacagcacagacaatggcatttgctaagctgccaggggctcttggcaagagccacatttctttccactttattaactcccttgaggagggataagccagggctaggatcctgagcaacacatgccctggagaaggcccgagataggatacccagagcctgtgcagccccaccctagagccttccagcctcccaggcttcctaaacccattttcccaaccagtgcccgtaggcaggactatgttccatctgagccatggctgtcatctccctagtcactcatccactaggttccctagaagtgcaggctgcaaatgtctatcccaaatcctccctaccatagcaaagtaggatctccccttggtgaacgtcagctagagctgccctggaccatgccacactggctgtaaagggctttttcctggtctggattacatagaccaggaaaaagctactgcactctagcctggatgacagaaggagaccctgtctcaaaataaaaaataaaaaataaaaaat

SEQ ID NO: 13718 - DNA, 2029 bp, Homo sapiens
  CDS (60)..(1373)
ctcttttccgccgccgcctgggaggggacccgggctgccaggcgcccagctgtgcccagatggatgggacagagacccggcagcggaggctggacagctgtggcaagccaggggagctggggcttcctcaccccctcagcacaggaggactccctgtagcctcagaagatggagctctcagggcccctgagagccaaagcgtgacccccaagccactggagactgagcctagcagggagaccgcctggtccataggccttcaggtgaccatgcccttcatgtttgcaggcctgggactgtcctgggccggcatgcttctggactatttccagcactggcctgtgtttgtggaggtgaaagaccttttgacattggtgccgcccctggtgggcctgaaggggaacctggagatgacactggcatccagactctccacagctgccaacactggacaaattgatgacccccaggagcagcacagagtcatcagcagcaacctggccctcatccaggtgcaggccactgtcgtggggctcttggctgctgtggctgcgctgctgttgggcgtggtgtctcgagaggaagtggatgtcgccaaggtggagttgctgtgtgccagcagtgtcctcactgccttccttgcagcctttgccctgggggtgctgatggtctgtatagtgattggtgctcgaaagctcggggtcaacccagtgtgggtcctcattgccaagcagagcccacccatcgtgaagatcctgaagtttggctggttcccaatcatcctggccatggtcatcagcagtttcggaggactcatcttgagcaaaaccgtttctaaacagcagtacaaaggcatggcgatatttacccccgtcatatgtggtgttggtggcaatctggtggccattcagaccagccgaatctcaacctacctgcacatgtggagtgcacctggcgtcctgcccctccagatgaagaaattctggcccaacccgtgttctactttctgcacgtcagaaatcaattccatgtcagctcgagtcctgctcttgctggtggtcccaggccatccgattttcttctacatcatctacctggtggagggtcagtcagtcataaacagccagacctttgtggtgctctacctgctggcaggcctgatccaggtgacaatcctgctgtacctggcagaagtgatggttcggctgacttggcaccaggccctggatcctgacaaccactgcatcccctaccctacagggctgggggacctgctcggtactggcctcctggcactctgctttttcactgactggctactgaagagcaaggcagagctgggtggcatctcagaactggcatctggacctccctaactgggccccgctggtcccatttgctcattagaatttcctctcacatcagtgggatacagaattcagtttctcccttgccaggtccttgggatggttgacccctgcctctgcagtagccttttgtgagtctgctaaggtagctctcacacacctcggctctggggttgatacctgagcctgcaatagagccctgaaatcaagagcatggcttgagtgtgtgaatatgatgtgtgcacatgcttaatgagcgtgcaagtgtgcacacgtttgtggagaggagggtgttctggcctgagaaggtaaagaagaggcatgtccagtatgctttgcagggtgtgtttgctcttttccatgcccatgcaacccagattggggtggagcaggaaggagctcttttctgttcccaagcctcagaactcttgagctgtggcttacttgctgtcttcaccaggttcaagctccgtgggccacactgctgctgtgccaagaaggtgtacagcctccccaggatggggcctcatacaacccttcatctgcactcaacatttaatcgtgtccttgctgtctttttattttcctttttgtttgttagcaaaaacctctatttagatttcaataatcagagaagtgtaaaataaaacagattatattgt

SEQ ID NO: 13719 - protein, 438 aa, Homo sapiens [sequence omitted]

SEQ ID NO: 13720 - DNA, 1603 bp, Homo sapiens
  CDS (379)..(1383)
atacacaatacaatactatttggctattttaaaaaaggaaatggtcttattcacaacaacatggatgaacctggagaacatgatattaagtgaaataagccaagctcataaaaacaaatactgaatgattttacttgtatgtgggatctaaaaatgtccaattcacagaagcaaagactagactagtggttgccagaagctagagggttaagggattggggagatgttactgaaataacacaaaatttcatttagacaggaggaataactttaagagatctattgaacatcacagtgagaacaatatattgtatatactaaaattaccaaaagaataaattttaagtgctctcaacacaactgtctggcggcggcagcatggcggcgggggcggctgaggcagctgtagcggccgtggaggaggtcggctcagccgggcactttgaggagctgctgcgcctcaaagccaagtccctccttgtggtccatttctgggcaccatgggctccacagtgtgcacagatgaacgaagttatggcagagttagctaaagaactccctcaagtttcatttgtgaagttggaagctgaaggtgttcctgaagtatctgaaaaatatgaaattagctctgttcccacttttctgtttttcaagaattctcagaaaatcgaccgattggatggtgcacatgccccagagttgaccaaaaaagttcagcgacatgcatctagtggctccttcctatccagcgctaatgaacatcttaaagaagatctcaaccttcgcttgaagaaattgactcatgctgccccctgcatgctgtttatgaaaggaactcctcaagaaccacgctgtggtttcagcaagcagatggtggaaattcttcacaaacataatattcagtttagcagttttgatatcttctcagatgaagaggttcgacagggactcaaagcctattccagttggcctacctatcctcagctctatgtttctggagagctcacaggaggacttgatataattaaggagctagaagcatctgaagaactagatacaatttgtcccaaagctcccaaattagaggaaaggctcaaagtgctgacaaataaagcttctgtgatgctctttatgaaaggaaacaaacaggaagcaaaatgtggattcagcaaacaaattctggaaatactaaatagtactggtgttgaatatgaaacattcgatatattggaggatgaagaagttcggcaaggattaaaagcttactcaaattggccaacataccctcagctgtatgtgaaaggggagctggtgggaggattggatattgtgaaggaactgaaagaaaatggtgaattgctgcctatactgagaggggaaaattaataaatcttaaacttggtgcccaactattgtaagaaatatttaattacattgggagcagttcatgatttagtcctcagaaatggactaggaatagaaaattcctgctttctcagttacatgttttgtgtatttcacaatgtcgtgctaaataaatgtatgttacatttttttcccaccaaaaatagaatgcaataaacatcttcaaattattaacaat

SEQ ID NO: 13721 - protein, 335 aa, Homo sapiens [sequence omitted]

SEQ ID NO: 13722 - DNA, 1852 bp, Homo sapiens
  CDS (94)..(711)
agagctattggggctcggtggcggccgcagtggggtggagggggcagggcgtggtgaggtaaggtgagtgccgtagtggggttccctggagccatggcctgctccattgtccagttctgctacttccaggacctccaggccgcccgggacttcctctttcctcacctgcgggaggagatcctcagcggcgccttgcggagggaccccagtaaatcaacagactgggaagatgatggttggggagcatgggaagaaaatgaaccacaagaacctgaagaagaaggaaatacttgcaaaacacaaaaaacttcctggctccaagattgtgttttatccttatctccaaccaatgatcttatggtgatagctcgagagcaaaaagctgtatttctagtgccaaaatggaaatatagtgataaaggaaaggaagaaatgcaatttgctgttggctggagtggttccttaaatgtcgaagaaggggaatgtgtaaccagtgctctatgtatcccactagcaagccaaaagaggagttccactgggcgtcctgactggacctgcattgtggtgggttttacttcaggttatgtacgcttctacactgagaatggtgtgctcttgcttgcacagcttttgaatgaggacccagtacttcaacttaaatgcagaacctatgaaataccacgacatcccggcgtgactgagcaggtagtgtaaaaaattgtgttccaacagtaacagtggcattattttgaagcagtttctctcctcttttttaggtagaaacttaaaagagatctttgtcttgtggcacagttagttagttctgctatcatagtctagaaatataatctatttgtagctgagtaaagaataccagtcttgcttttacttatttaatgaaatattatatgtttcattctacaacaaagtaaaaccctttagttagaagccaagaaaatttcttatttttagaatttaataatggcaaggcaaaaatatgatattttataaccttatatcttgttttatttggatttaggtgccaaaattacccagagtaaaagaaaaaaaatttggccttgttactagtgatactaccttgtacttaactgtttctcagaaaaggggttactaagcttttgttcatagtggaaaatacatatattcattgaagatttcaactgagaaaataatgctgtttagtatccaaggctctaacttcttaggtgccttgtaacattttggttgtcttagtcaaaaaataattgtagggccatttaaaccaatatgcttttatttgttttgcggagtgcatagtcaaaactatgtaatatgccttccctttgttgtactacttggcctccaaaagatttcaagtgaacagatgtatatactgtatgcatttgttaatttaatttgcatgggagatggactggagctgtgaaagaatcttaactatctcgtaggagagactaggattaaaatctaataatatctatggatgaattaatcagtaatataaagcaatacctaatttattggtaatttatttggacagaatacagtctgtacaagcttagagaaagaggagttcaatttggaccaggaaaataagaaaatttcattgatgaggcgagatttgcattaaaccttgaataatgggtatagaatttaattaggtaatagaattagccatccttaaaagattttaatccaatactgaactgtttataaaatgctttctctattgtaatgtactgtaagtagtgaaattctgtatatactgctattttctgtctgttcattgttgtgaacttcttatgtatattagtgaaataaattttcagctttc

SEQ ID NO: 13723 - protein, 206 aa, Homo sapiens
MACSIVQFCYFQDLQAARDFLFPHLREEILSGALRRDPSKSTDWEDDGWGAWEENEPQEPEEEGNTCKTQKTSWLQDCVLSLSPTNDLMVIAREQKAVFLVPKWKYSDKGKEEMQFAVGWSGSLNVEEGECVTSALCIPLASQKRSSTGRPDWTCIVVGFTSGYVRFYTENGVLLLAQLLNEDPVLQLKCRTYEIPRHPGVTEQVV

SEQ ID NO: 13724 - DNA, 1728 bp, Homo sapiens
gaaaatatgtactaattaaaagagggaaaagagtaactttacagtggatgaagcctggcaatcatcactttaagcaagtggtcagagttaatattatcagtaatggtcaaatcaaaaccatatgcaagaagactctaaaatgcaagaagactcctgaagtacttcttaccaaagatgtagaacttaaattcagtcataacaatacatgagacaaacccaagttagagcacagtctgcaaaataactggcctgtaatcttcaaatgcatcaagatcatgaaagacaaggaaagagtgaagagctgctccagttggaagagacttaaaactaaatgcaatgtatgatcctagattggatctttttgctctaaggacattaatgggccagttagtgatatttgaaggggatccgagggttccattgtagtaatatatcagtgttaatttttaaatttttattaggttgggattattttggaaaataccattattcatagcgaatacaaagtagaatatttggggatgataatgcatgattacaacaaatgtttcaggagaaatatgatctttgtagtggtcttgcaacttttctgtaagtctgaaattgtttatgcataaaaggttaaaaaaaggttaaattttgtttttataactaataatggattagggtcatgtgaaagtactttagaggaaatgagacttttgagaacatcatccctgaagacgttgaaacactgagttacctcatggataatttaatagggtatgcagctgatttttctaccttaatttcttgtttgcagtatctacccatacttagaattgtctggtgttaaaatatgcccactgggactttcatgaaattcttttgattttctagaaaattcagtttcaaaggattttttaaatagatattttaagtttggtgtcaacttagataaaatctgtttggagtcccagtgtaagttttagtaatgtgtccaatctgtttattgaaatagtataactttagaatactttctttggagagatgaagattggtatgttatagttcaattcaaagttgttctttctattatgatctattttataattcataaaatctatcttatgattgtcatcataagtgcaatttgttttttgccccattctacctcagaaactaagtatctgggcatcaataacaattggtagtagtgtttgctgctaagccaagtttcaccagtacagtgtggaattattttattgttttttctgtgaacattgtatctgctgttactaggttattgtgaggtattgggccttcatagaaattgcctggaacccttgttcactaaagcctgttacactttttattctctgtgcgtgtaatcagagacttattgatactgacacattcaaggggcattattgatcatttagattgctctaagacctaaggagtcttggccggatgcggtgcctcacgcctgtaatcccagcactatgggaggccgaggcgggtggatcacctgaggtcaggagttcgagatcagcctggccaacatggtgaaaccccgtctctactaaaaatgcgaaaattagctgggcatggtggcgggcgcctgtgattccagctactcgggaggctgagacaggagaatcgcctgaacccgggaggcagaggttgcagtgagccaagactgtgccattgcattccggcctgggtaacagagcgagactccatctc

SEQ ID NO: 13725 - DNA, 1504 bp, Homo sapiens
  CDS (116)..(595)
attgccttatgttggttttctcgaacacattggccgaatattggatcttcagttggaggacaacaaatgggcctgcaattgtgacttattgcagttaaaaacttggttggagaacatgcctccacagtctataattggtgatgttgtctgcaacagccctccattttttaaaggaagtatactcagtagactaaagaaggaatctatttgccctactccaccagtgtatgaagaacatgaggatccttcaggatcattacatctggcagcaacatcttcaataaatgatagtcgcatgtcaactaagaccacgtccattctaaaactacccaccaaagcaccaggtttgataccttatattacaaagccatccactcaacttccaggaccttactgccctattccttgtaactgcaaagtcctatccccatcaggacttctaatacattgtcaggagcgcaacattgaaagcttatcagatctgagacctcctccgcaaaatcctagaaagctcattctagcgggaaatattattcacagtttaatgaagtccatcctttggtccaaagcatctggaagaggaagaagagaggaatgagaaagaaggaagtgatgcaaaacatctccaaagaagtcttttggaacaggaaaatcattcaccactcacagggtcaaatatgaaatacaaaaccacgaaccaatcaacagaatttttatccttccaagatgccagctcattgtacagaaacattttagaaaaagaaagggaacttcagcaactgggaatcacagaatacctaaggaaaaacattgctcagctccagcctgatatggaggcacattatcctggagcccacgaagagctgaagttaatggaaacattaatgtactcacgtccaaggaaggtattagtggaacagacaaaaaatgagtattttgaacttaaagctaatttacatgctgaacctgactatttagaagtcctggagcagcaaacatagatggagagtttgagggctttcgcagaaatgctgtgattctgttttaagtccataccttgtaaataagtgccttacgtgagtgtgtcatcaatcagaacctaagcacagcagtaaactatggggaaaaaaaaagaagaagaaaagaaactcagggatcactgggagaagccatggcattatcttcaggcaatttagtctgtcccaaataaaataaatccttgcatgtaaatcattcaagggttatagtaatatttcatatactgaaaagtgtctcataggagtcctcttgcacatctaaaaaggctgaacatttaagtatcccgaattttcttgaattgctttccctatagattaattacaattggatttcatcatttaaaaaccatacttgtatatgtagttataatatgtaaggaatacattgtttataaccagtatgtacttcaaaaatgtgtattgtcaaacatacctaactttcttgcaataaatgcaaaagaaactgg

SEQ ID NO: 13726 - protein, 160 aa, Homo sapiens
MPPQSIIGDVVCNSPPFFKGSILSRLKKESICPTPPVYEEHEDPSGSLHLAATSSINDSRMSTKTTSILKLPTKAPGLIPYITKPSTQLPGPYCPIPCNCKVLSPSGLLIHCQERNIESLSDLRPPPQNPRKLILAGNIIHSLMKSILWSKASGRGRREE

SEQ ID NO: 13727 - DNA, 1315 bp, Homo sapiens
caaatggagaaggagcagtagagtaaaaagagaggtaagggaaggcattgagatggtttacagggttagatgttttgagtcaatcccattataattaccaatgctatctacctatttagttaacgttttattgccctgctgttttctccaggataattggaacagcatgtattggttgggtggaaaagatagaacttgagcagggagattgccaaagagtgaagatgtggctgagtgattgatgatggtctgaactgggtattcagggaagagaactagaagccaaccatgtagaatctatgcaggtgctcttaagacattggtttgactggaattatcttcttgttaggtcttaggaatctccttccaggtaactttttctatgattagacaattgatttgttcagggtcacagagcaaagtccacatttaattccacatggccaataaaagtgaggggctacaaggtgagatccaggggccagagttatcaaagtgatacagcacttttaggaataggacagggaatggaggaattggaattccagtattactttcaaaagcagaactggccagaggaattggaattccagtattattttcaaaagcagaactggccagaggtgcttgtgattcctgggtggaaaccatggcagtggacagaagcagcatggaggaaaagagcactggaattcaggctgaggaactgtgaagccaagggtgttgtataggttgtccatttcaaattagggttgcttggttctgggatgatttgcatggaagaggggagagtgacttggagatgtgtgattgaggacagtgagcacagtgagttgatggtgttgctgggttataagcagcttcaaagagaaggcattttgaatgaaggtggaaacataatggccaggagaacaagcaaaggactaggaaacagtgaacttcatcttggcctcaagttcctgaggtgcatatgaataaacagtctctaacccagagggtttcaagaaaagcagagtcctcaaaatccaaaggtagagtttccccacattgatattatactaattacacgtataacagtactttggaaaagcacaggtctctggtcacctctaaaaggcaaggttggtaaggaggtcagggtgtcacctgttggtagtcttaactaaatggtctcttcaagggatctaaggatggaaaggggatatataatggttggattaaaggctcatcattgattagcaaattgtcccttttgtttcttaaacccaatttgtacagggaaagttatgccactgtaagatatttttaaatgggg

SEQ ID NO: 13728 - DNA, 1545 bp, Homo sapiens
ccctaaactggacctgggcttcaaggagggccagaccatcaagctcaacatcgcaaacatgaagaagaaggaaggagcagctgggaatccccgagtccggcctgccagcacaggagggctgagcctgcttccccctcccccaggggggaaaacctccaccctgatccctccccctggggagcagttggctgtggggggatccctcgtccagccagcagttgctcccagttcaggaggtgctcctgtaccctggccacagcccaatcctgccactgctgacatctggggagactttaccaaatctacaggatcaacttccagccagacccagccaggcacaggctgggtccagttctgacctgagcacggtttttcctcatgtgacttctgggaaggcgctccctcatctgggccaaaggaaggaggacgaagccctcctcagctggcctgtgtttggggcatgaatctctcctctcctccttgtctggctctgttgacaaaccgggcatgtttggcagtaaattggcaccgtgtcacactgtttcctgggattcaagtatgcaaccagaacacaggagaagaaaagctccaggatccctgtccccatctgtcctcttgatgtgagagagactctgagacttcttccatcgcaatgacctgtattaaacacaagccccccaagcaaaagaagaggttgagtttgctgccaggattcagatcagcccttcccagggtctgcaggtgtcacatgatcacagtttagcgggaggctttccgtacccacactggctgtagccacttcagtccatctgccctccagaggaggggtttcttcctgatttttagcaggtttagaggctgcagcttgagccacaatcaggagggaaattggaaggattagcagcttttaaaaatgtttaaatattttgctttgctaatgtgctgatccgcactaactcatctttgcaaaaggaactgctccctcggcgtgccccagctggggcctctgaagggattcctcactgtgggcagctgccctgagcttcaggcagcagtgttcatctctggccagttgtctggtttccatgtattctaggccaggtaggcaacacagagccaaggcgggtgctggaagccagacggaacagtgttggggcaggaaggtggatgctgttgtcatggagctgtgggagttggcactctgtctgctggtggccctctcggctcacatgttcacagtgcagctcctggcagacttgggttttctctttggtggtttctaaagtgccttatctgcaaacaacttcttttctccttcaggaactgtgaatggctagaagaaggagctcagtaaactagaagtccagggttgcttggtttactggtttataagaaatctgaaagcacctctgacattccttttattaactcacctctcagttgaaagatttcttctttgaaaggtcaagaccgtgaactgaaaaaagtgttggcctttttgcgggaccagatttttaagataaaataaatatttttacttctgtc

SEQ ID NO: 13729 - DNA, 1798 bp, Homo sapiens
  CDS (46)..(1542)
atcaccgcaggcgggcctcgcgggtccgggagcgcggcggagacgatgcctgagatcagagtcacgcccttgggggccggccaggacgtgggccgaagctgcatcctggtctccattgcgggcaagaatgtcatgctggactgtggaatgcacatgggcttcaatgacgacgtagatgatgagctggagatcaaggcctactatgcaggccacgtgctgggggcagccatgttccagattaaagtgggctcagagtctgtggtctacacgggtgattataacatgaccccagaccgacacttaggagctgcctggattgacaagtgccgccccaacctgctcatcacagagtccacgtacgccacgaccatccgtgactccaagcgctgccgggagcgagacttcctgaagaaagtccacgagaccgtggagcgtggtgggaaggtgctgatacctgtgttcgcgctgggccgcgcccaggagctctgcatcctcctgaagaccttctgggagcgcatgaacctgaaggtgcccatctacttctccacggggctgaccgagaaggccaaccactactacaagctgttcatcccctggaccaaccagaagatccgcaagactttcgtgcagaggaacatgtttgagttcaagcacatcaaggccttcgaccgggcttttgctgacaacccaggaccgatggttgtgtttgccacgccaggaatgctgcacgctgggcagtccctgcagatcttccggaaatgggccggaaacgaaaagaacatggtcatcatgcccggctactgcgtgcagggcaccgtcggccacaagatcctcagcgggcagcggaagctcgagatggaggggcggcaggtgctggaggtcaagatgcaggtggagtacatgtcattcagcgcacacgcggacgccaagggcatcatgcagctggtgggccaggcagagccggagagcgtgctgctggtgcatggcgaggccaagaagatggagttcctgaagcagaagatcgagcaggagctccgggtcaactgctacatgccggccaatggcgagacggtgacgctgcccacaagccccagcatccccgtaggcatctcgctggggctgctgaagcgggagatggcgcaggggctgctccctgaggccaagaagcctcggctcctgcacggcaccctgatcatgaaggacagcaacttccggctggtgtcctcagagcaagccctcaaagagctgggtctggctgagcaccagctgcgcttcacctgccgcgtgcacctgcatgacacacgcaaggagcaggagacggcattgcgcgtctacagccacctcaagagcgtcctgaaggaccactgtgtgcagcacctcccagacggctctgtgactgtggagtccgtcctcctccaggccgccgccccttctgaggacccaggcaccaaggtgctgctggtctcctggacctaccaggacgaggagctggggagcttcctcacatctctgctgaagaagggcctcccccaggcccccagctgaggccggcaactcacccagccgccacctctgccctctcccagctggacagaccctgggcctgcacttcaggactgtgggtgccctgggtgaacagaccctgcaggtcccatccctggggacagaggccttgtgtcacctgcctgcccaggcagctgtttgcagctgaagaaacaaactggtctccaggctgtcttgcctttattcctggttagggcaggtggtcctagacagcagtttccagtaaaagctgaac

SEQ ID NO: 13730 - protein, 499 aa, Homo sapiens [sequence omitted]

SEQ ID NO: 13731 - DNA, 1619 bp, Homo sapiens
gaccaaaaatattttgagatcaccgtaatgcctttggtttaccgggatgagtaaccaaccacaggcctctgttcacaagagcacgacgtggtccccgcctgctgctagtctgtctgccactgggggcctcccaacatccatagcacacttcagcggaaggaccccagaaactgttgtgtttgtgtgtgctgatgacctagtgtgtcatttcacctcgtcacccagccctgcgtccggatgaggggacttctgcacaaatgacagaatctcggctggtggacagatactacagctttctcctcctccttgtgttcgtgttcagtctctgtggagactttcttttccattcaaatgacagtgcgcacttatctggtttacacaatgataccattttgaaagttggaagcctcaaactgagacgacagtgcagaacaaaacaaaagtgagttagggtcgttaaaattgaagtgttcttcttagggcaaacatgttgactccgagtattgtgtatgaatgtgctacgagaaacttccaaagagcaccattcacaatttggcattttcaaagaatgttccagccctcaaaggggcaactctttaaagtccttgttggcttttatccaaaccttgtagaaattgggaaagctgatagaggtaaggaaggcgagtgaaaaggacaagaaggccaaacaccagccaaaaagaaactaggaaaaaaaagattttctttgctaatatagatgtaaaaataacatcagacatctttgaaaattagcctctaaactcttaatacatacgttctgtgtgtctctacctggcgtctttaagaatatcctctctgggctctgaaattttaggagtgattcttatccactccaagttgtaagtatttgtagaaatttgtgcaaacaaacaaaaactatcaaatgaaaagaaaatgtactcaacctaacttatagttagcagctggaattctcaactcttccctgccagcactataccacagtgtggaagaaattagtcaaatgcttgttttcctgtttctcttttcaactgttactgtgctttgtttggaagtagttttctctctcaaagccgttgcttatatcgttaagaatgaaggtttgtgtttaaaatttattgcattgcaaagggtagtttcactgaagtcatgcaccattaaataagatgaaatatttgtatttattgtcctacttcctaagccgtaacttcttttcctctgtgaatttgcattgagtcactcatgctacactacatcgctttagtatttgagatggcatttatgtttcctctcgtttatcatgaaatggggtcagattccatcagattccacctctgtcaggtggactcttgtctgccttccatgatgagattttttttctccttcccctttctttaagagaggctgacagatctaggtgtcaatcaattggaaaccagtctctgattttttttcattagttattttctatcattagtttcactgtgtaaattagatatcaactgcacttctttaaaaaaaaatacatctccctattacctccttgaaagatttacttctgtaggcctttttcaataggctcatgactgcagacaagg

SEQ ID NO: 13732 - DNA, 1588 bp, Homo sapiens
  CDS (22)..(777)
gttcgctttagtgccggcgccatggggtcggagctgatcgggcgcctagccccgcgcctgggcctcgccgagcccgacatgctgaggaaagcagaggagtacttgcgcctgtcccgggtgaagtgtgtcggcctctccgcacgcaccacggagaccagcagtgcagtcatgtgcctggaccttgcagcttcctggatgaagtgccccttggacagggcttatttaattaaactttctggtttgaacaaggagacatatcagagctgtcttaaatcttctgagtgtttactgggcctgaattcaaatattggaataagagacctagctgtacagtttagctgtatagaagcagtgaacatggcttcaaagatactaaaaagctatgagtccagtcttccccagacacagcaagtggatcttgacttatccaggccacttttcacttctgctgcactgctttcagcatgcaagattctaaagctgaaagtggataaaaacaaaatggtagccacatccggtgtaaaaaaagctatatttgatcgactgtgtaaacaactagagaagattggacagcaggtcgacagagaacctggagatgtagctactccaccacggaagagaaagaagatagtggttgaagccccagcaaaggaaatggagaaggtagaggagatgccacataaaccacagaaagatgaagatctgacacaggattatgaagaatggaaaagaaaaattttggaaaatgctgccagtgctcaaaaggctacagcagagtgatttcagcttccaaactggtatacattccaaactgatagtacattgccatctccaggaagacttgacggctttgggattttgtttaaacttttatagtaaggatcctaagactgttgcctttaaatagcaaagcagcctacctggaggctaagtctgggcagtgggctggcccctggtgtgagcattagaccagccacagtgcctgattggtatagccttatgtgctttcctacaaaatggaattggaggccgggcgcagtggctcacgcctgtaatcccagcactttgggaggccgaggtgggtggatcacctgaggtcaggagctcgagaccagcctggccaacatggtgaaaccccatctctactaaaaatacaaaaattggccaggtgtgatggtgcatgcctgtgatcccagctcctcggtaggctgggacaggagcatcgcttgagcgtgggaggcagaggttgcagtgagccgagattgcaccaccgcactccagcctgggtgacagagcgagacttatctcataaataaatagatagatactccagcctgggtgacagagcgagacttatagatagatagatagatagatggatagatagatagatagatagatagatagataaacggaattggagccattttgctttaagtgaatggcagtcccttgtcttattcagaatataaaattcagtctgaatggcatcttacagattttacttcaatttttgtgtacggtattttttatttgactaaatcaatatattgtacagcctaagttaataaatgttatttatatatgc

SEQ ID NO: 13733 - protein, 252 aa, Homo sapiens [sequence omitted]

SEQ ID NO: 13734 - DNA, 1383 bp, Homo sapiens
ttattagctctaatggactaagagactaatgggccttgtgtgcccggcgaaggtgctttgacctaccctgtgggtgatggggagcctctgaaggatttgaagcagggcagagacgtggacaaatctgccaaaagaaaacaaacaaacaaacaaaaacatcaacagcatgttatgttaatgtgcgattccatttaggcttttggaattttgaaaatagctcaaagacgccgttatgaccttgacagaggccaggttggaaatttctgaatccaatgattctttagctcccctctaagtctgacagtctaagattccataataaggaaggtacagctattgccaaaacgtataatgcatcacagtgtcagactttgggattatctgctgctgggggttttccacaccactgctccccttcattagtggggataattgagagttgactgcagtcgttactgctgttgtgatgggtatttgaagctaaattcgggcaagtaggagatgtgtgaatatttatctcagctgcagaaacttaatgcagtgtggcattaattaccctgtctgagcctgctgtcttcttctgtttttaggtgtcattttcagttggataaattagtttccaaaattagaatagagcaaattgtagggtgagatcaaggcagcctgacttcttggggcatccaaaaagaagaatgagctgagaacatctatccaggaaacattaatatgcgtgcttgaagcccagcacaggcaaaaggaaatatttttccccagtagttgtacttaactatttttgactccacctactgcacttgtagaacacaaacacacaataaagttacatgtttagccttacaacatgtatttgaaatagttcaagagactggaaaggaatagatttggtgtttaataaatcataatcttactatagattttgctacatttgattttgagagaataaagccaaattggagtgtatttaggacaaagggatcagaactgtgaggaaactagaaacagcattataatcattcagtaattcaacagactctcattgaggacctactgtgctaggttcatatttgtaaaatggcagaaggaggcctggcgcggtggctcacacctgtaatctcagcactttgggaggccgaggtgggcggatcacaaggtcaggaaattgagaccatcctggctgacacagtgaaaccctgtctgtactaaaaaatataaaaaattagccgggcgtggtggtgggcacctgtagtcccagctacacgggaggctgaggcaggagaatggtgtgaacctgggaggccaagcttgcagtgagccgacatcgcgccactgcactctagcctgggcgacagagtgagactccatctc

SEQ ID NO: 13735 - DNA, 1513 bp, Homo sapiens
atggaaaactgcacaagagcttgtgtgtcttgacattcccacatgtcaggatgccttcatttgctaatgacagaatacccaactcagactggattaaataaaaggggattttcttgcttatttaactctagattcagtggtaaatgggtttctgggttgattggtttggggcctaacaatgtcttcgagaacttggtttcttttcaacagtcagcttttgccttcctgtgagctagcattgtttcccatgggattgcaaggcagctgcatacaactcctgcagttcttccttttccatatccagagaggggacgtcctttcagacgctgattattttaggtgtaaattccatgtcccatcccaaaacaaacaaacaaacaaaaaaacatctagggcatgtcttatttgaggcgcttaacaaatgactggatcatctcccttgtatataacccagaaaacactgtgaagtagagcaaaattggaaagcccaagtcaaagaccatttgcaaatttcaagtagattccagtctgttgctcaaatcacaaaacataaaacggaggggtctcccttggagaccataaagtctgtgacatggtggccagttgggtcactggaaaacatggcaaaatattgaaaatgagggattaggtgagagtgtagcaactgaacactaaatgcttgatccaggtgccattccctggatactgacagggagacacattgtccaggtaatactggaaaaatactttctatagtgtaaaccacaaataaaattccaagcccctcaactatttgaatgcacccctcctctcagccagggtcagtccaaagttaacctgaaaaactggttcagaccatgatgggaagtaggggtcagataggcctcattataccctccttcctttggaattcaggcacaactgaccagcacatccgaccaggcacaactggcattacaacagagatcttaagactttttgtagcaataagacaccaaattccagcctgactctagtgtagcattacatgacagatagcaggccctgaaagaaataaaaatattttaccctaaaatatatttgttatcatattttgaaatgtccctacaaagttgtctcttgtggggaaagtctacatgctacagggaatccctttccaggtcttttccctaatctaggcacctttttaagtctgataagaaacatttacaatcaattctctctgaagcctgctacctggaggcttcatctgcataataagaacaaccccttaacacagagactgccttctatggattccaggtctttagataaactctttcaaccaattgccaaagtatcagaaaatgatggctggtaactatttaattatgcacatatattagtagaatttggggggtgggcacggtggctcatgcctgtaatcccagcactcctttaggaggctgacagattgcctgagtccaagagtttgagaccagcctgggtaacatggtgaaaccccatttctacc

SEQ ID NO: 13736 - DNA, 1964 bp, Homo sapiens
  CDS (145)..(1236)
ctttatgagtacaagtattgtactgatgtagacttaatatttcaagaaacttgttttcctgttcatcgtgccattttggcagcaaggtgtccattttttaaaacactgctttcttcctcaccagagtatggggcagagataataatggacatcaatacagctggtattgatatgcccatgttttctgctttgttacactacctttatacaggagagtttggaatggaggactcaaggtttcaaaatgtcgatatccttgttcagcttagtgaagaatttggaacaccaaattcccttgatgtagatatgcgtggactctttgattacatgtgttattatgatgtcgtccttagtttttcttcagactctgaactggttgaagcttttggtggaaatcagaactgtttagatgaagagctcaaagcccacaaggctgttatttctgcacggtccccattttttcgaaatttattacaaaggaggatacgaactggtgaagaaatcacagaccgaactttgaggactcccacaagagttatattagatgagtccattataccaaaaaaatatgcaacagtgatattacactgtatgtataccgacgtggtggacctctctgttttgcactgtagcccctctgtggggagtctcagtgaagttcaggctctcgtcgcagggaagccaaacatgaccagggcagaagaagccatggaactttaccacatagcactgttcttggaatttaacatgcttgcacaaggctgtgaggatatcattgctgagagcatctcattagataccttaattgccatcctcaagcggagttctcatccatatggctctaaatgggtgcaccgacaagctttacatttcctctgtgaggaattttcccaggtcatgacttcggatgttttttatgaactcagcaaagaccatctgcttactgctatccagtctgactacctacaggcaagtgaacaagatatccttaaatatctgattaaatggggagagcatcagttgatgaaaagaatagcagatagagagccaaacttactgagtggcactgcccatagtgtgaacaaaagaggtgtaaaaagacgggacctggacatggaagagctcagagagatcctttcttctctcctaccttttgtgcgaattgaacacatcttacctataaacagtgaagtcttaagtgatgcagtaagtgtttttctccatgtattcctttcatgaaaagaaaaatgccaggtgtatgtttttattcattgtaaataatttctgctactaatagagtattgtgaagctgtaattctgtgaggacagagacagatgtctattgtgtacgatgttgtatctcctgtgtcttccacataatacagttaaaatgttcagtgaatgagagttgagtgggtaaataggtcttactcatgcaagagcattatttctagcagagttaattctgtcatttaagtgtagatcaagtagacccttattcaaaaagggaaaggtagaaattacctttgaagagtcttcaagaacagcagtgaatcagagagtagtggagtggagggattggttgaatagaaaaagaatggatggacctgaaaattaatagagctcatcttgttactttcataattttttaaacagtgaattttttaaaaattaatataattggctgggcgcggtggctcactcctgtaatcccagcactttgggacgccaaggcaggtggatcacctgaggtcaggagtttgagaccagcctggccaacatggtagaaccccatctctactaaacatacaaaaattagccaggcgtggtggtgcatgcctataatcccagctactcgggaggctgaggcaggggaattgcttgaactggggaggtggaggttgcagtgagccgagatcgagccattgcactccagcctgggtgacagagcgagactccatctc

SEQ ID NO: 13737 - protein, 364 aa, Homo sapiens [sequence omitted]

SEQ ID NO: 13738 - DNA, 1876 bp, Homo sapiens
  CDS (506)..(832)
gttttttttttgtactttggtcactatttagaaagggtgatcagttagacacaggccacatgtttaaggtgatatttctgtgaaacattttcatcttaataattatttcatatttattatgatgaaaggcatttaaccctagagcatgtacaaagctgagtcgcaagtctcagaaatagtgtcctaaagtgatgtattggcctcagagggaattcgtatgtacttatacacaaattcaccataatgaatgcaccaaatcatacttttaaatgcccaaataattcatattcataaatttttcattttgagcccctagatattttttaatcaaaacccataccactatccattcatcttccattcaatcaaatggaaaagagccatatttttttcaaaaatagcaaaattatctaatttcccttctacttctcatgtccataggataagcaaaagaaaaaaaatctgaaacacctgagttggcactttaaaaatttttcccagaaacatgagatgggatggtcagaggtcatgcagttggtgtcatgggggcaccctgcctgttttcttctgtagctcataccggtcacgccttgttggtgctaatgacttcccaggtgcctggtaccaattcttcattagttgctgttgtcctagaaatctgtgtaggtcatggaacctattttctggaaaaccacttaatacttattttaatttctgtaaatgttgtctgtggaaaagaacatttccacattttgcttgccattgttctgaatctgactggcagataacacactttggcatctgtaatgaaattacattaatcgtctgtccttaactcttttcctggtaaaaggaatgggaaatctttgttcagatatgcaataacagtattttaaaattgttcaaattatatagaattctttgcagattatgttagagaattcattacaatttaaattcattttattatcaaaattattctttgttttttggtattacataatggtcttccttataatggagtgttttacttctatttatagaatatagagaatgttgtgtagtttgctgttttatttttttaaagaactatttttaacaaaaatttgattcaatgaaatgtaattctatttcctgaataaaacgtaaaataaaacataattttttaagaaaagctttaaaaaaacgtaatttttttaaaaagctttctgttattgagttgtattgagtatgatattttaatcaaaaatttgaatttaaaaataatcttttctaagattgagtttctcttaagtcataaaatattttactgcccccagatgagcaccataattttaatgtcacaataaattagaaaaaaaatggagaaattccaggttgcaaagccagatctgatacaaattttgcctgatgcctttatcattaccttacacttccacctagcctatgtgcctcaacaggatagacatgtgacatttttctttggaaatttgacttagtcttttcaatggtgtccctagtttaacacaacatggaggcaaaatgttttctagaaggatctcaacttacccagggatgcatttctcttttgcttctctgtttgtttgtgtatgcatgacataatgacctttttagaaaatagatgtttattataaaaatagcatctggtatcctctaacattttattgcataaagataaattagtttaattttatataatatattttaacttcttcccaatggtgatggccttcttcaatatttaataaggtaaaattagcatagtattacaataacaattgcgaataatcaaatatgccctaagcagtgtttttttcaatatcagggctttgtctctcttctcttgctcttttgt

SEQ ID NO: 13739 - protein, 109 aa, Homo sapiens
MRWDGQRSCSWCHGGTLPVFFCSSYRSRLVGANDFPGAWYQFFISCCCPRNLCRSWNLFSGKPLNTYFNFCKCCLWKRTFPHFACHCSESDWQITHFGICNEITLIVCP

SEQ ID NO: 13740 - DNA, 1519 bp, Homo sapiens
  CDS (83)..(610)
tgacctggaccacaggggcttcagtaacagctacctgcagaagttcgaccaccctctggccgctctctactccacttccaccatggagcagcaccacttctcccagactgtgtccatcctccagttggaagggcacaatatcttctccactctgagctccagtgaatatgagcaggtgcttgagatcatccgcaaagccatcattgccacagaccttgctttatactttggaaacaggaagcagttggaagagatgtaccagaccggatcactaaaccttaataatcaatcacatagagaccgtgtaattggtttgatgatgactgcctgtgacctttgttctgtgacaaaactgtggcccgttacaaaattgacggcaaatgatatatatgcagaattctgggctgagggtgatgaaatgaagaaattgggaatacagcctattcctatgatggacagagacaagaaggatgaagtcccccaaggccagcttgggttctacaatgccgtggccattccctgctatacaacccttacccagatcctccctcccacggagcctcttctgaaagcatgcagggataatctcagtcagtgggagaaggtgatttgaggggaggagactgcaacctggatttcatccccatccgtggctcagaaggcagctgcatctgaagattgagcactggtcaccctgacacgctgtcccacctacagatcctcatcttgcttctttgacattcttttcctttttttggggggggtggggggaacctgcacctggtaactggggtgcaaacctcttcaagaaggtaacatcaaataaataagtcaagcagaggacttcctgccaatctcttctgtgaggcatcatagacactgagcaaccaggaccacccccacgttcagaaatcagctggccaagtgactccatttgacttgcaaaccagccttttctaataggctaatattgctgaggccttaaaggaaatggacaaaaattatccagaaggggtacttttccattgtatctttctaataagggtttaaaatggtactattatggtattgtacttgggctttaacatcaatgttgctttgatgttgttggatataaataggaatttttacacattactattgtgaatggtgaatgttcatgtatgacctacttgtaattaacttgagttgtagtccacagcctcaggacaaatgtcgttgaggttacagagtaagaaatgatggcaaaacgtcaaactcttatttcagagcttcatgaatttagttagactaaacataattctttaagttcaacctaaagggctgagatcaataaatttaacactagacgaagtagacttcctgtctttttgagaagagatgaggtatatgttacaataaatctcagaacttcaagtagcagttcaaaagatgtcagtttttaaaattgtttttgttgttgtcttggcagttttactgaaccctttgcataaagaacaaaataaaagctcggcattgt

SEQ ID NO: 13741 - protein, 176 aa, Homo sapiens
MEQHHFSQTVSILQLEGHNIFSTLSSSEYEQVLEIIRKAIIATDLALYFGNRKQLEEMYQTGSLNLNNQSHRDRVIGLMMTACDLCSVTKLWPVTKLTANDIYAEFWAEGDEMKKLGIQPIPMMDRDKKDEVPQGQLGFYNAVAIPCYTTLTQILPPTEPLLKACRDNLSQWEKVI

SEQ ID NO: 13742 - DNA, 1567 bp, Homo sapiens
  CDS (207)..(731)
aaaatggatacatcccagtagcaacataggcaagtacttagccatgtgacccctcctctgggggctctgccagttgtgagctctgcccagaaggtttccttccatctcggttggaggaatcccttttctgctcacccaccctgacttcatgctcacctggggctcggcaggtcacaagatgcagggtccatctacagaaccaaggaatgggctcatcccccagatacatacatcacctccatcccacgctgcctgcaggtacctactgggtggatccaaaccttggctgctcctctgacaccatcgaggtctcctgcaacttcactcatggtggacagacgtgtctcaagcccatcacggcctccaaggtcgagtttgccatcagccgggtccagatgaatttcctgcacctgctaagctccgaggtgacccagcacatcaccatccactgccttaacatgaccgtgtggcaggagggcactgggcagaccccagccaagcaggccgtacgcttccgggcctggaatggacagatttttgaagctgggggtcagttccggcccgaggtgtccatggatggctgcaaggtccaagatggccgctggcatcagacactcttcaccttccggacccaagacccccaacagctgcccatcatcagtgtggacaacctccctcctgcctcatcagggaagcagtaccgcctggaagttggacctgcgtgcttcctctgacctctgacctcgtggccactctaggcctcacggaggagggaagaggaagaggcaaggggagggtactgaggggcagatggctccaggagaggcagctcccctgcccaagggtccttgggcagaccccagctgttgtctgcccagtagaagtgggtgggggtaggaggggatagggtgtccttgggaacaatggatcccagcttagccccaaagaccaaccaaagagccagccagagtaagctggacctgcaacctgcctgagccccgtggcctctcagctctgcggccaccccgttccctccccagcttcctgcccaaagagccccacattctagccaacttgagggaagggggcgtctcgtcagctggtccctgctagggagctattgatgtgcaatattagaaaggagacatgaaaaaaggagaaaaggaaagacagaagtgtatatatatattatttaaacaaacaaaaagaaggtgcgttactatttttttttcacccgggaaagaggtgagaggatgggaaggagcagccaggcgtgggaagcggcgagatcctcgggctgggggtgcccacgtttgctacctcccactgtgaaatcgctggtgctcacaattgtctctcacagtgtatgtgatttttttaaggaaaaaaaaaaatccctatttaagattctgaaggtgctaccattattttgccacagactttgaagaaacttttggatgtggggcatcatccgcatctttctctctcctccaaatgacaaagtttggggaatttttgaattttcctagcatcgcccttgtgctcatcaggtaatctgctaaggagg

SEQ ID NO: 13743 - protein, 175 aa, Homo sapiens
MGSSPRYIHHLHPTLPAGTYWVDPNLGCSSDTIEVSCNFTHGGQTCLKPITASKVEFAISRVQMNFLHLLSSEVTQHITIHCLNMTVWQEGTGQTPAKQAVRFRAWNGQIFEAGGQFRPEVSMDGCKVQDGRWHQTLFTFRTQDPQQLPIISVDNLPPASSGKQYRLEVGPACFL

SEQ ID NO: 13744 - DNA, 1701 bp, Homo sapiens
  CDS (195)..(1190)
ataatagtgatggaaagacagctgttgtgggttctaacttaagttccagaccagctagtccaaattcttcctcaggacaggcttctgtaggaaaccagactaatactgcttgtagtcctgaagagtcatgtgttttaaaaaaacctatcaaacgagtatataaaaaatttgatccagttggagagattttaaaaatgcaggatgagctcttaaagccaatttccagaaaagtaccagaattgcccttaatgaatttagaaaattctaaacagccttctgtttctgagcaattgtctggtccttcagactcctctagttggccgaaatctggatggccttctgcatttcagaagccaaaaggacgattgccatatgaacttcaggattatgttgaagatacatcggaatacctagctcctcaggaaggaaattttgtttataagttatttagcctgcaagacctgttgttactcgtacgctgcagtgtccagaggatagagacaagaccacgttctaaaaaacggaagaaaatcagaagacaatttccagtttatgtactaccaaaagtagagtatcaagcttgttacggagttgaagctctgactgaaagtgaactttgtcgcttatggactgaaagtttattgcattccaacagctcattttatgttgggcatatcgatgcatttacttcaaaactttttctactggaagaaattacctcagaagaattaaaagaaaagctttcagcactcaagatttccaatttatttaacatcctccaacacattctaaagaaactaagtagcttgcaggagggttcctacttgttatctcatgcagcagaagattcttcactcctgatttataaggcctctgatggaaaagttactaggacagcatacaatttgtataaaacacattgcggccttcctggtgtaccttccagtctctcagttccccgggtcccattagatcccagcctgttattaccatatcatatccatcatggaagaataccttgtacttttccaccgaaatcactggataccacaacacaacaaaagattggtggaacgagaatgcctacacgcagccacaggaatccagtttccatggaaaccaaaagcagttgcttgcctgctcagcaagttgaaactgaaggagtggctccacataaaagaaaaataacttgaggactgtaccatggaaaactaaatttaaaaaaccagttataacagtgtttaatttagataagtttgagggaaaataatcagtaggcaagaggaacatttttcctgtagtagctagagtgccttgaaaaaatgtgttggctatgtgaaggaatatttcaactaaaatggaatggtatgcttttcacccttaaagtttgaggaggatcttgatatgttttaacattatcatggcagggaaatatataaagaagaaaaatatttttacattaaaccttttctaaaaattgtaaatagaaaaataatttggttttttatcaagaacaacacttatcgttatgtattgtgttagttatattgccagtctgttgcgactgactcaaaaagttaaatgttgccactgctgaagatgattatgagcatcgcaaactttgtttctgacccattttgacagtttttatatactcctttaaaatgatgaatgttacaggttaataaagttaataccttt

SEQ ID NO: 13745 - protein, 332 aa, Homo sapiens [sequence omitted]

SEQ ID NO: 13746 - DNA, 2659 bp, Homo sapiens
  CDS (643)..(966)
aaaaatacatgattaggaagtgcatttggtgcattcgagccactgggctgcttctaaagtggttgctctggggaccagagagacttgttatgcctcatttgggtatcacatgaatcagcacacctcaaaaattattccacagtttggatgttagtattaggtattatataagaatttcccataatcaaataatattgagaaatgctgatttttgggaaggcacaacttttcccaaacttctactgtgctcctgtgcactgtgaatctgcagaattggcccttcccaaaccctttcaaccacagcatcctcctctggaggccagcatcttgcaagactacttattccttgaaatacactgtggaaaaaacactgatgtcaggggatattgaaataaactcactgcatgcggcatacccttcaaagacatttttcctccctttggaacagttgaaattcaaatgacatatcctagcatgatttgccacatgggttgtgttttgaaacccaaatctaacacaacaaatttcagatagagctttgtttagcccccaggccagtttttggtcccgtggataagggttggtatccagacctcttagagcttttctgcatcagctttccagggcttattcaaaccctccatgtgctggaagtccctcaccctttatgaggcacaggaggcgatacgcttgcatctcgatctctcagcctcggctcatgctgttctctcctttctcatcctgtgttccagccataggaattctgttcattgtgtggaaggctacgcacccccacatccccaaccttttgtacatgtgtttcctctatcgagaatattctctcctccaccttttactctcaacctgatgaccccatacttaatctttcaggacttggctccagggccacgtgcttccacagtattttctcacttgtttgctttatgcagtttatttattgagacataatttacatagggggaaatgctcagatactgtctactgtccagtcagttttgtgggaagaatatcaaggcacagagcactctgtcaccctagaaagttcccatatgcccctttccagtcaacccctccccttcaaagcagcgactcctctgcaatccatcaccatgggtgaatttcgctgattctagaatggaatggaatggaacactttgtgccttttggggcctagcttttttcactcagcatattatttttgagaggcaaccatgttgttgcatgagcccatagttggttcccttgtattgcgtttcattgatgaatattccaaagtttacttatcccttccttgttgatggacatctggcttatttctaatttttggccagtctgaataaagctgctataaacattcttgtacaggattttgtgaattatgtttatatttctcttggattaatacttaggagaattgctactaggataggtgtctgtttaactttcaagaaactgtgcaacagtttatactgtgaaatagtgattgtcctgactacaaacctccatggtgctgagaccaggttttgttcaacgtgattttcctggtgtccagcccagggcagggcacatgctagacattcagtgtttattgaagaatgaatgaataagaagttcaaatcagttttcattctgacatctctactactaactgagaaaaaatgaatgctctgtccatcaaggagatggaaattttattggctaaatgtgggctgattataggcaggcaaaaacaagagagacatagcttccttcttactgtgctcttggacttgcctctctcgtttcagggtggcagcatgtgcaggtaaaatcaggtgtgcaagttgacacaggccatagaagggtcctgatcaccagtatagctgagctcacctcctgcagttaaatctcccaacactcccattcaagaccctcccaaacctcctttttcatccccccctaccctttggttcacctgcacaaatacatgtttcagccaaacttgacaactctccctactttgtgacatcttgcattctctcccctttgcaatggccacagactccacccagaaggcctgccacatgcagccacagccatctctttctgtggacaccctgggcagctttcaaggctcagttcatgtgctttctcctctctgaagtgttccttggccaccacatctggaagcttgctctctttggagagtctttgagatggtgtccacctgtggacaatgttcattagccacttagcaggatattctgcttttattctacttgtctgtgtatttctgctctgtgaggtaataggcttcttaagggacacgtatgtagtggccctcagcagtctgataggagctgaggctgctggccactaagtagctgatgctagtcttcatgatccttgctcttgatggccgattccattaaagaggagttaattacatggtaatgccatagctccttcttaagaggaggctttagtacaaacttgggaattcatgtcacctggtggacaattgaaaggcagctgctttcttggccaggtgcagtggctcatgcctataacctcaacactttgggaggctgatgtggaaggattgcttgagcccaggagttcaagaccagcttgggcaacatagcgagagcccatcact

SEQ ID NO: 13747 - protein, 108 aa, Homo sapiens
MCWKSLTLYEAQEAIRLHLDLSASAHAVLSFLILCSSHRNSVHCVEGYAPPHPQPFVHVFPLSRIFSPPPFTLNLMTPYLIFQDLAPGPRASTVFSHLFALCSLFIET

SEQ ID NO: 13748 - DNA, 1460 bp, Homo sapiens
gaagttaaataaacataattactaggtccttaaggaatgaattttatttttgtgtttccagttcctgtaactatgtgcctagtacatagcatgtgctcagtgtttgttgaaaggaaaaggtctgaagttgattctatcgtcaaagaaaatatttcagtataaagcatgtagtttataccaagaagcctttttaaacttaaggtctcttttttcataacatgtacatataaattttaaaagaaaacttaaaaatacagtagctgcttctaaatgcagatattgtaacttagctattatttcagaattccacaaggcatatgcccagttggtcgatcttggcactcactaacaccagtttcttcagatcatctttttctctttggaggatttaccactgataaacagccactaagtaagtccttgaaaaatatgataatgaaatcatcatatatcatccatatctaatagctgaaaatgagtctattagagactgatgagacggcttatagggttggttggaaggtttgaaattaattttgatcctgtaacatagctgtaattgtactatatggcatacttctgttcaataaagaacctggagcacttaagagccctgctgaagggctacaacatgcaaagggcttacttggctaattgcaggtgggggaaaaaaaagaaaatatactctctgtatctgctcatgatctattacctttcttgccaaagctgtgccctttaaatgtcaatgtcatattgacagactaacatacttcatttctttgcttgaatcaggtgatgcctggacttactgcatcagtaaaaatgaatggatacaatttaatcatccatataccgaaaaaccaaggtatttaaaagcaattcatatactgaatatgcataagacataagaattgaggttttggctgcattatatccagcattcttatttataaaaatctcagcattcactaaggtttgaaatacttctcaaagaaaagaaaaccaatgttatcctagtatcaaatgatctcctttccgtcatctgtgcatgaagagtagggctggatttttatttttgcttcttccttctgttataaaattgacacatagttaaaatatacaatcaagcttttcacttcaatgagttgaactgcatctaagtttattaaaaatgagggtcggccaggcgtggtggctcatgccggtaatcccagcactttaggaggctgaggcaggtggatcacctgaggtcaggagttccagcctggccaacatggtgaaaccccgtctctagtaaaaatgcaaaattagctgggcgtggtggcgtatgcctgtataatcccagctacttgagaggctgaggcaggacaattgcctgaaccaggaaggcagaggttgcagtgagctgagatcgtaccattgcgctccagcttgggcaacaagagtgaaactctgtctcc

SEQ ID NO: 13749 - DNA, 1582 bp, Homo sapiens
ttttttactgggcccatgaagcaactttgacataattattcaggacatatcctaaacgccgtcatatcctggattttccaggtaaccaattgctaaactcacaggcatctttgccaatgtatttttaagaatgatatttgctaccctagagttcagagtgtttattgtgtattatttcatacaatacttgtagaagcccagtagaaggattatatccccatgcttacagatgaggacattgaggagacgggtgttggcgtccctgctttccttcagggagcacaggtcaggttgctccctgaagtcagtgatgggtccagcacgttccacacggcaaggggacaggccctctcccagggcggcccttctgccgcctttgctccttctttgagacttaggggcggggcatgggcaggagggagagtgctggattgtagctgaccctctcgggacttgtaaatactgtcaagtgattgggagtcctagacaaacacgagtggccgcctcggggccggcggcgtggccctgtgacagcaagaacttcaggaacaaatgctctctacacccactggccctccagggtcagacccttctagttcctgcctgccccttcagtagcgaagagagaagccgttgctcttagggcagggctgggtttggaaatgacagcatgtgttcaacaacctgaaaaccaagctgaatgtcgcctgagatgtttctttcttccctgaagaggaggcggtgtccatcacaaagagcctcttctgttgagttctgagccatgctgtatcttgacttgaacagctcttattttcacagttcacgtttttgggcctccagagagagacttggagttgaccttcaactgagggaagtgtctgaaggcactgttgtgatttctcttgggagtagaggtgccaggaaggacactggagattcccagaatttaaggctgccacttatttacatgaaatcaaatattttgactctactctggaccacaaaggcagtttgctggagtttaagaaccaacccattaacattaggaagtaagcagtgttgagatcagaataacttaggataggctttgaaattgcttttctggtacaaggttatggttgaaataggaaaacagcacagagaggacagtccatcacggtgagacttgggaaaggcacacagagagctagtcgtctctgttctggcctcgaacagtaatgattatggtctgatgattgccctgtgtatacataactgctctcagagcatttgaatcacctttcttcaaaaggaacccgggccgggcacagtggctcacgcctgtaatcccaacactttgagaggccgaggcgggcggatcacttgaggtcaggagttcaagaccagcctggccaacatggtgaaatcctgtctctattaaaaatacaaaaactagctgggcatggaggcaggggcctgtaatcccagctactcgggaggctgaggcaggagaatcgctggaacccaggaggcggaggttgcagtgagctgagatcacgccactgtactccagcctgagcaacaaagccagactccgtctcac

SEQ ID NO: 13750 - DNA, 2208 bp, Homo sapiens
aaaaaatagaagataaagagaacaaaacaacaaaaaattatagaaactaaatccttatataattccactacttggggatacaattgtcaatactttatggatgtccttccagatatattctttgtatatacacacaaatataaataaacacacttgtaagatatataaagacatcaaattttaaatgttcttctatagtttttatttcactcaacatgttactaaacttttgagttcagtagacatacatcataccgccatattaatgccttcgattttctcattatatgaatgcatcaaaattttttgactaatctgaaggctatttttaaaatttatttatttttaattttttttctgaagaaaaaatgatttttttctatacaatgatgctagaagaaactgatttaaaagttacagctttgaatgttaaatgatgaagggttttggagtcattccttttgacctactaattttacaattctcttgaacatcaagtgttttttagtggtcatcatgtgatatttatgtgcatattttgggcatcactgttctaattcccattgactgacgtgttggggacctcattcatttctttcagttcttaaacctatagattgatactaatctattaatgtacttaaaatgtaaaggaaccccaggtgtttagacaattaaccaataaaaattatttctctcagtttctaaacctatagattgatactattaaatttatttaaaatgtaaaggaactccaggtatttagacaattaaaccaataaaaattaggtcaaagaacatcaaacttttcttttaagctaatataaaaatatctaagaccttctgctgattgtcacatagtataagggtatgtgagtaaatggttgctaaactgcattttggcactaacatatgaccagatccatctgttgggatcccatgccgtggtcccatggcagtgagctattgtggaaaatgtattctactgagtggagggagatgaaggaagtgatcactaaggttggtgagcttgaggggaggtctcttagcccctctagagctcagattgttcatcttcaaaaccatggtgctaaagaatatagctctaaatttttctccagtgcaaatattctatgcttctgtgacagagaactctgaagtcacatggcctaagtcagggcagctgctacagacccgagtactacagatccttggctgcttggtgtacatccctggccactgacctcttctcacccactgttctttctctcttaattgattctgtcctgacccaggactcagatcttaactgtgtatctgaacacctttgtcttgcactttctttcctcaattctcaattatgacctgtttcttgcttgtgttctgggcagtttttcatgtctcactgggttaacccaactacttgggtttcccataacccttagggctacaccgtaaatgtgctgcctgtgaccatggcatccaaggctcgtcataagactggactgggtctgcaccaactccatacatctggaagaaaagaaaagcttcaacacctcattaccttggacacagtaattacttggaagatgttagtacagatacatgtatgacatgaataaacttgaaaacattctgctgggtgaaagaagccaaacacaaaaggtgacatattgtatgattccatttatatgaaataatcagaaataaaaagtaggctagtgattgccaggggctgaggggaagggaaagcaggagtgaatggttattggtacagggtttcttttggggctgaatacaatgttctggaattagagaatggtgatggttgcacaaccttatgaatatactaaaaaccactgaattatacactttaaacatgttggattttattatatgtaaattatatatcaataaaaaatggttaggatgggaacgatagctcacgcctgtaatcccagcactttgggaggccgaggcgggcggatcatgaggtcaggagtttgagaccagcctggccaacatagtgaaaccctgtctctactgaaaatacaaaaattagctgggcatggtggcacacacctgtagtcccagctacttgggaggctgaggcaggagaatctcttgaacctgggagcagaaattatggtcagccaagattgcaccattgcactccagcctgggcaacagagcgagactccgtctcac

SEQ ID NO: 13751 - DNA, 1842 bp, Homo sapiens
  CDS (146)..(451)
aaacacagagagaaattgttaagtggaagtgagagctcatccaaaaaaagacagagaaagaaaaaagaaaagaagaaatctggtaggtattcatcttcttcttcatcaagctctgattcttccagcagttcttctgattctgaagatgaggataagaaacaaggaaaacagagaaagaaaaagaagaaccgttactgaatcagacagtaaggatagtttaaaaaagaaaaagaagtcaaaagatggaactgagaaagaaaaggatattaaaggactcagcaaaaagagaaagatgtattctgaagataaacctttatcatctgagtccttgtcagaatcagagtatattgaggaggtgcaagcaaaaaaaaaaaaaaaaaaaaaaaccccacaaagtcaaaagacaagtttgaaaaatgtttacagctccacaaagatagacaaatttccttgatgtatgaaaaatgtcaacaaaccaataaaaagactaacaattcagtagaaaaatggacaaagaacaaatatggagattcatagaaatgagagataaatgtacatgatgagaaggtgaggtgctcacttgatttataagagaaatgaaaattaaaactacaccagatgccattttttaaaaacctattacattgtgaaaataaaaatttagcaaattgttagcctgaatggggagataggtacttgaattttgtgtgggaatgtaaattaggacagtctttatggaggataattttatagaatccatcagatttataaatgcacagacctatttgacccaacaatttaacatccagatttttatcttatgccaaactgaaatgaagaatggccaagttttattgaggcatcatttatagtagcaaaacactggaaacaagctaaatgttcattatagaagactggttaaataaaaatttgtccatcgaagatggagtagcatgtagttattaaaaaagaataaggaaaatactgatagaggatgatgtagatattaaatggggaaaaaagtaaaactccacaagatgtagaacagtatatgtgttttgctgccgtttgaggagaaaggagaaaatacagaaatatttatatgttgcttatgtatgcatacaacatttgtggatggattcacaagaaaatggtagccttaatttaccttgagacaaactgagggacaaggacaccctttaatacctttcagatatttttttttttttgagacagggttttgctcttgttgcccagcctggagtgcaatagcgtgatctcagctcaccacaacctccgcctcccaggttcaatcggttttcctgcctcagcctcccaagtaggtgggattacaggcatgcgccaccacgcctggctaattttgtatttttttagtagagatggggtttctcatattggtcaggctggtcttgaactcctgacctcaggtgatctgcccacctcggcctcccaaactgctgggattgcaggcgtgagccaccacacctggctaccctttcagttttaagccataataaaaattacatgaaattgggctgggcacgatggctcactcctgttatcccagtgctttaggaggctgaggcaagaggatcacttgaggccaggagttccagaccagcctgggtaatgtagcgagaccctgtctctacaagaagataaaaaaattagctgggtgtcgtggtgcgtgcctgtaatcctagctactcaggtggcggaggtgagaggattgcccgaacccaggagtcaaaagctgcagtgagctactgtgatcatgcctctctactccagcctgggcaatagggtaagatcctgtctctg

SEQ ID NO: 13752 - protein, 102 aa, Homo sapiens
MRIRNKENRERKRRTVTESDSKDSLKKKKKSKDGTEKEKDIKGLSKKRKMYSEDKPLSSESLSESEYIEEVQAKKKKKKKTPQSQKTSLKNVYSSTKIDKFP

SEQ ID NO: 13753 - DNA, 2134 bp, Homo sapiens
cagagatcatgtgacttgcatgtggcctagagataaaattcaaatctggttctgtagactccagggacatattcaccatgccatgggtggtggctattaaaccttgataaatttgtgtttatggttaacaaatgtgaaagctattaaacattgctggtttgaattttttacagtgcagaaatgtaaaatgaaaaaggatatttcctttcacagtgttaccgagaagtcatgataatttcgtttgttcttccagatttaggcatatacttatttaatcaataatgtgttaacagctgacacctgtggttgctgtgacaggcactatttgaagtgctttatcatggattaactcttaatcctcagctaccgtataaagtaggacataaccccatttcacatgcactacactgagacttgcctcctctccccccacattgaagatgttctttttttcataactatatactattccattgcatgaatattctgtaatttatttaatcccctatggattgataattaggttcattatagatagaagtgtaattaacattcctgtacatgtattttgctacttgtgtgggtatttctgtaggatgaataactagaaatttattggatcaggtttcacatttgcagttttgaaaactactaccaaaaagatttcaccaatttacaactccatcattagtaagaatgcctgtttgcctatagtctgccaaccctgaatccttaaaaatttttgccaatctggtaggcaaaatttctttcttttctttgaatattaatgaggaggaacatcttttcatgtttcttggccatttgcatttcctattatgaattgcttttgcccattttcctttttttaattatgaaagtctaatgactaccttctcattgtataaaaaacacagttctttgaatagagagacccttttctccaatgctaccaatcacattccacttaccacagtttaacatacatcctctagtcacctttccgtacgaatatacatacacataaaaacactttttacataaataggatctcatattctgtagctttttaaaattttggtctcaaaaaaagataacaggtctttaaatttctttaatggttgaatatgattaaatactatgaaaatgccattatttattcccttaatttttttcctctcgctattacattgccaaagtaaacatcctattcagatgtctttgtgcatgtgtgtgaatatttctttagtctggagtccagtaaggtggatttttggatcaaagggtttgttctctgtccaccttcagtcttcccaaaggccttcataactgtattttcaccaagtgtatggagaatgttcatttccccatataaccatacctacacttgatagtttttatctgttgggcgaaaaagaaccttttcttattttgcatttccctgattataaaaaaaaatggtgagattggggttattttcatgtttattggccatttatagtttactgtggattgtttgtatcccttacctgctttctattgggttatgtgtggatatattgtttttatttgttcagcatctccttccccatcttctggtaacacaacctttatttatttgtggggaacctattccctgtggcttaggtgagcatgtgaccaggcctggcctcctgagtcccacagcttcctagccacagtgataaaagaatgggtatataacttaagccaggctaaggaaagcccttaacagaacttctgctggaactactggaaagaaggctttatggagatcccaggaaccaaggaccatgtaagcctgaatttgtgccatgtggagagagtctgtctgaggagaaactcggatgctagcagaaatggaaagagaactaagttctgatgtcatttttctggaggccctagatccagctgtgcctaaagcctgccctacctccggactttaaagttttgtgagccaataaagtccctttcttgtttaagataattgaattgagtttctgttctgattaatataggttatttgtattttcttattgatttgtagaaaacctttgtaattttaaattctagactttatgcactatataagttaataaaattagcatggccttccatg

SEQ ID NO: 13754 - DNA, 2250 bp, Homo sapiens
aattgatggcatcttaatcttggtgtcagccaagcagtagttgtaacacagtcttcattgcttgtgctgtgcatcatatgtcttgcagttaacccatagggattaagtggtagtgtttagggggtgtggcaggaggtgagtttaacataaacctccaagcaggagtcaaaagtagacaagctctatataattacacccctgacttaagaatctagcatcaagtagcttttgtttcttttatggatagttttaagaaacgctgcatcaccaactcccttgatggcactgaaccttttgtgggaaaaccagacaatgacactgaaattaaaagtgattcaccagagtcagactctgaaagtgaagaactatcagaactaactactttatttcacttatattttccttttttgaatgctcaagtgttgtatgatctcatttaaagtgcttctaataaatatataaaatttataagtgaccaagcgttatgttagttaaacagaagtatttttcttagtatggggaaaaaatggctatacaatctggccagacgtggtggctcagtctataatcccagcactttgggaggccgaggcgggcggatcacgaggtcaggagatcgagaccatcctggctaacacggtgaaaccctgtctctactaaaaaatacaaaaaatacagaaaaaattagctgggcattgtggcaggcacctgtagtcccaggtactcgggaggctgaggtaggagagtggtgtgatcccaggaggcggaggttgcagtgagccgagatcacgccactgcactccagtaaaacagaagtatttttcttagtatggggaaaaaatgactatacaatctgatgtcttggattcagcaaaatatggtacttggccaagcgcggtggttcatgcctgtaatccctgcactttgggaggctgaagtgggcggatcacatgagctcaaaagttggagaacagcctggacaacacagtgaaaccctgtctctacaaaaataataatacaaaaattaactgggtgtggtcgcatgcacttgtagtcccagctacttgggaggctgtggtgggaggatcacctgagccccaggagattgaggctatggtgagccgtgatggcaccactgcactccattgttggcaatatatcaagactctgtctcaaaaaaaatgtgtgtgcagttggtcggggtaggggggtggtatttgtgacaaaggctgtttattagaaatcaatagttttattggtaaaattcatcatacttttccattaaaatcagatataggatataggtacttatacacattatttttgaaggttctagtttgctaacacaaaaagatgatagttgggttgaaccttattcaggttggacacctctaatttgagtatctgaaatgctctaaaatctaactttttgagcaccgactcaacactcaaaggaaatgtttattttaagcattttggatttcagattttgggattagagatgccaaattggtaagtataatgcagattttctaaaattccaaaaaatccaaaatgcttctggtcccatgcatttcagataagggatgctcatcctgtagttgtatacctaggaaaggagattctaagttttttaaaaataccagaatttaaaagttggtaaggttgatatattcaagataatatagataaaaattatcttcgtactaacactaaccgctttgacatgcaaatagagtaaaataacctcttgtcattataacagaaccacagtttgaggaacaaatttaataataaactttgagaaataaatttaataatctttttgaagaaaactaatttttttttcaatcctgtcttatggggttgaaggaagacttaatttcttcttgaaagacagaaccgtgatattcaacgtaatggcataatgtttctgggtataaaaagtcttaatataggtcaggcacggtggctcacgcctataatcctaacactttgggaggctgaggcaggcagatcatctgagttcaggagttcaagaccagactggccaaaatggtgaaaccctgtctctaatttaaaaaaaaaagccaggtgtagtggcacacgcctgtagtcccagctactcggggcggggctaaggtaggagaattgcttgaaaccaggaggtggtggttgcagtgagccaagattgtgccattgcactccagcctgggcgacaaggctggagcctgggcgaaactccatctc

SEQ ID NO: 13755 - DNA, 1867 bp, Homo sapiens
gtgtgtgtgtgtgtgtgtgtaaatgggatcttgctgtgctgcccaggttggctggtcttgagttcaggtgatccacccacctcggcctctcaaagtgctgggattacaggtgtgagccaccattccgggccctaaaacagtttttttagctcgtcagctatcgttaatgttaatgtattttatgtgtggcccaagacaagacaattcttcttccaatgtggcccagggaagcccaaaggttggacacccctgaaaattacatatcttctccaacagagtgttttgttacaacagccagaagcctgatgaaagatttatactgcttgggacaagttttaatgattgttaatttttactttgaacaaatagtgaatgaaataatagatttgacattttttaagataacaagtgctaggaaatatgaagtgtgagtaaataaaaaggttcatatgttattagaactaatcattttgatgttatgcatagtgattactagaataattcccagagtttctttgacagagacgtcacattagtttaacttaccaaaacagacagaagaaatagaaaacttgagtagtcctattaaggaaataaaataattgaatcttttctacaaagaatattccagacctagatggcttcaatggtaaattctgtgaaacatttaagaaaaacaaaaaacaaacaaagaaaagaagttggagaagctttttcagagaatagagaagaaataaatacgtagacttattttatgatctcagcataacattgatcacattacatgccaagggcattataagtaagggaaacaataatttagtgtaattttattacattaaaattgaaaacttctgtctgggtgtggtggctcacacctgtaatcctagcactttgggaggccgaggtggagggatcacttgagctcaggagtttgagaccggcctgggcaacatggcaaaaccctgtctctactaaaaatactaaaataagctgggcatggtggcacatgcctgtagtcccagatacttgggaggctgaggcacaagaattgcttgaacctgggaggtggaggttgtagtgagccaagattacaccagtgcactccagcctgtgtgacagcgagactctgtctcaaaaaacaaaaaaagaaggaaaacttctgttcatcatgaacattcatgcaaaaatactgagcaaaattatagcaaaccaaagccaatgatatatgcaaaatggtaatacatcatgactaatttagatttttttctaggaatgcaaggttggtttaaattttaaaaatcagtcaatatgattaacaaaataaagtaaaacctctgttaaagtaaaaccattaacagaataaagtaatagctgcagcaacaattttgataaaatttagcactataaatgattaaaaaaaacttttggcaaaggaggaatagaatagaacttccttaatctgtccaaaggttatcaacagaacactccacagccaatattacgtaatagtgaagtattgaaaactttcctcttgatatcaagaatgagattaagatgatcattatgggccaggcacaatggctcatgcttgtaatagtagtactttgggagtccaaggcaggcagatcacttgacgacaggagttcgagaccagcccagccttcacggcaaaacctagtctgtactaaaaatacaaaaattagtagggtgtggtgatgcgctcctataatcccaactactcgggaggttgaggtgggagaattgttggaacccaggaggcagaagttgcagtgaatggaggttgtgatgagctgggattgcaccattgtactccagcctgagcagcagagcaagactctgtctc

SEQ ID NO: 13756 - DNA, 1820 bp, Homo sapiens
aaaaaatgatgaatatataaccagaaggagcccaggtactataaaagctaagtaacgaggaaacaaaaaaatgatgagtatataaccagaaggaacactcagtttgattcccatatcaggaagttcttgggttcagtgcaagacttgaaacctgacatggtttcattagattgtagaaaacgcttttttttttttttctggacaacagatggaaccatgttgtcggttgttcaaagatggacaggagacagaaatctatcaacctgaagtcagctccaactgcagctgtctgttctcctgaggactgtgctagtggtccacagaggtcaccttgcttatcacatgatattttcttgatgttagttgaagcacatcaccttaggtgacacatgagggccaaaggcctctttctcagggatgtatgtgaaagtgtggtgggttggggaccagctaaggaaaaaaagacatgaaggagaatgcaagcatcttacagtcatcattcagtaagaaatctttatgactggacaaaggaaaacataaacgccctttaacctagaatgcaaatttctagtgatttttacttttttagtgtatcagaagtcactgagcaaggtaagtaccagcacttacagagacggagtcataaaggctgctctctaaaagtagaggatgtgcaaaacctgtagtaccatttaacagatttttgaccttgttaattatgtcattttgaaactggaataaatatgtaatccgaaggttgatttttctgaacaaaagtaagtcaagtcaaagttttctcagagtctactgtttgattcttgagggtattcagaattcaagattgatgtgcatttcaacatttcagtttctgcctaagtgaagcgtcacttaaagccttcgaaattacagatgtaaaatgaggttgcacgtgatgtcagtagctataattcctactctggaggtagctcgatgtgtctgaaggctgagtgagctgcggcaggatgaatgaatctttgacttcaggagatgctgttctagtctgtaaccttgtcgtgtggaatcagcccatctgatgctgaacactaacttgaaatggctggccgaatgcagagtaacacatcagagcactagaccggtggaaagaacctagattgcaagtccagtgaattatctgcatcttcattttgttaggtgtagatttacttttgttattggttgcaattgcaatattttaaaatcatgattatgcgttaactccatctatttctaaaacattggtatttgtgtcatttttaatgtagcttgatttttgttttcttctttctggtacaaaaacgagtttctccctccaacccctgccatgtatatctgtatcatgtatatctgtatctacattcctgtctactatcaatgcctactatttacaaggtagttcagttcgtttcagatcaactagaatttattgagtaccctgtatgctaatccctgtaccaggggcttgggatataacagtgaataagttcctggggcttacatcagtcaatatagggttactgtctattgaacaagattatttttgggtttctatctatttggggatatgataatgcatgtatttattcctaaccatcacacaataatattatgaaacaatgttagtaggaggaaggtgagagccttcattttaactgggaggacttggttctgtctaagatgttgcttttgttatgggttagtgcctattagataacattctgtttctgtgactgattatttctttttgaccttctgagttttagtttgtccactgagttttaggt

SEQ ID NO: 13757 - DNA, 2306 bp, Homo sapiens
  CDS (103)..(999)
agaagcactccgggcgtgctgccggcggcggtaggtggcgcgcgggtccggcgggcggttggcttgagcgggaccggagctgaggcaggaagagccggcgccatggtggagaaggaggaggctggcggcggcattagcgaggaggaggcggcacagtatgaccggcagatccgcctgtggggactggaggcccagaaacggctgcgggcctctcgggtgcttcttgtcggcttgaaaggacttggggctgaaattgccaagaatctcatcttggcaggagtgaaaggactgaccatgctggatcacgaacaggtaactccagaagatcccggagctcagttcttgattcgtactgggtctgttggccgaaatagggctgaagcctctttggagcgagctcagaatctcaaccccatggtggatgtgaaggtggacactgaggatatggagaagaaaccagagtcatttttcactcaattcgatgctgtgtgtctgacttgctgctccagggatgtcatagttaaagttgaccagatctgtcacaaaaatagcatcaagttctttacaggagatgtttttggctaccatggatacacatttgccaatctaggagagcatgagtttgtagaggagaaaactaaagttgccaaagttagccaaggagtagaagatgggcccgacaccaagagagcaaaacttgattcttctgagacaacgatggtcaaaaagaaggtggtcttctgccctgttaaagaagccctggaggtggactggagcagtgagaaagcaaaggctgctctgaagcgcacgacctccgactactttctccttcaaggccctgtctcagcgggaccctcctcacaacaacttcttcttcttcgatggcatgaaggggaatgggattgtggagtgccttggccccaagtgaactcaagatttggcagccccagagatgccaactgcagcatgcccacctgtatcccctgtccccttccttcatgaaggcatctccaggcaaggaaaactgaagtcattggcccgatacaaaacatttcctgcaacgaaggaggtggtgccgacgtgctgcttcccatcaccagcagctgctcgacaaggggcgcagggtggctgtctttgttccagcactgttcaggctgcctgtcatcccgggcctgccagctcccctgagtgatgagcacttccaagcacccctctgccctttctctgtccttatgctgtcccggcctcgccagccctctggggcattgtgggagatgcctgccaggaatgagcaagctctgttgctcgggagcctcttgtcaccttcttggacttattccccacctgataccttatagagaaaagtgtgaattcaggtggagagtaggcccaggccccatgaggcaccagtggaagcacagctccaagttcagacaggtgcccttagagaggaaaaccatgacaggcaaatgcatttcctctggagtttgagaccctgacaaacaacaggtggcatctggtgtgctgttcttgagttttcgtttaggattagttgagttccagctgggttttgggagaaaggagatgctaccaagtcttggatgttagggcgagaccctgcaagttgagtattagagagcttgtctttcaaggcaggttcctggggcttcagggctaggagggaggagcctgcccttttaacagaaccccagtcacatgcggctcaagtcactcagaggctgttgcatttcagggctatgttggtcctttgtttacctcctaaaccacagctgtttgtgtttcacatatgttgtgaattttccttggttctttttaaaggaatgataataaagttacttgctttaggatttgcttgtttttcttccacttcagaagcttctgagagggaatgggatgatcctaccagttgccttttcagacctgaggctctaactcaagagattcctcctctccctcaccattcctgccaccattttttctgggtgatgcagcaagagttaaattgttcacattctagaatgtgtagaagcttctggctccagttgtctaatggataattcagctaaatagtggctattttcagtggcaagaattataataataaagggaagtcaaaagtgatgcttcatatgccccaagtgccacagccgctacgggtcagagcttttattggaagaccaggtttgccttgatgcagccaaagtgcgttccagttcaccccactcttgcttgtgtttcttctttatgtaaattgtgtgatgtttcaataaatcggtctctttcct

SEQ ID NO: 13758 - protein, 299 aa, Homo sapiens [sequence omitted]

SEQ ID NO: 13759 - DNA, 1373 bp, Homo sapiens
ctaagacccctaccacacacctcaaagtaacttgaaatacattatgctcccagtgtggttgtaatattatcatcttattatcaccaattcccttgcatggtggctttgctgagcagctgtttcacagacaagccaatttcttttaagtattgctctatcagactctgaaaccagttctaccagaagggttcttggtaatgaatgttaatgagcagacaagtatcctttctctgacagaggctcactaatcctttgagtaagtatgggtgaattacaggagaaattttatttaagttaaattgatctgctactaagtagagaaaacttattttcttattttaatgaaaatcaagaaaaaatatttaatggggatgtaaattacagctccctggaaacatttttgtcttctgactggagaacacagtagctcagtagactggttcaactgcatagtgtgcttaacactagcaaactcatgatctccagtgaggcctgatcttcagtgggacagtgggaaatggagtagaaaccactcactctctctgggatttggtaccagcagattctttatgttccttagtgataagtaatagggataaaaaattattctttcttcttccactgagccagtgtaagagttcctttttttttccaaaacaaataagatagtaaagccataagaacagcacttgtatgctttttgtattctaagaatatgagaaaaataatttcagtgaacctttatctgaaaggatataaccatgtcctgatggaatactgcgatgggcaggtagaagggaatgagatgggccaggcgcagtggcttacgcctgtaatcccagcactttaggaggccgaggctggcagatcagaaggccaggagttcaagaccagcctggcccgcatggtgaaaccccgtctctactaaaaaaaatacaaaaaattagctgggcacgggggcatgcgcctgtaatcccagctactcgggaggctgaggcaggagaatcgcttgtacccaggaggcagaggttgcagtgagctgagattgtgccattgcactccagcctgggtgacaaagcgagactccatctcaaaaaaaaaaaaaaaaaaaaaggagaggaatgagatgggcagaaagatgatcattgttgaagctggttgatgagtctttagggagttcatagactattctgggttgtgtatagtttctgaatttccataataaagagattaaaagagagagagaaagagagttggccagcacagtgcctcgtgcctgtaatcccacactttgggatgctgaggtgggcggatcacctgaggtcaggagtttgagaccagcctggacaacatggtaaaactccgtctctact

SEQ ID NO: 13760 - DNA, 1655 bp, Homo sapiens
ttttttgtggatttggttgtagttgttaaaagttctctacgttttggatggattgccttaattgtatttatacaaatgagtttggtttatattacgctacttatttagaaggacactctgctcacaaattatactagtttggtagtttcataaactagcttgaatcaaaataaaatggtgctaaaatggatgttattttcaactgtgcactcagtaattgcaaatagttgtactatatacctgggggtgaacacaaaggaagtagttgcatcatctctgtataaaacacagatttatctttcgtgtagttgtgcattacgtagaatatggtaaggcaacatctgagttgtagaagtgctactggagtaacagaggtgaggaatcggttctgctcaagggagaggactggagaagagacctagaggggagagtggaccttgaagaactgattggatttctcctgttggggaatgtgaatcataaagctgaggtagggggaacaagtatgaggctggcaagtagtcggtttggcaggagcacagagtgcctgcagggagggccatgggagatcaagctgggaatgtagaaaggaattttaacttgataaattttgactaggtaacaggttcttttatcaaggagtgacattttatgtcacaaaaatttttaaaccatttctgtctcttggaaaacccaaaggtagcagtggcatgtgaaaaattcttgttttaaaagattcaaacaataaagaaacatgtagaatattttgtgtccgtacattctatgtttaggagttgaatattaatttgtaattaatagaatggagaaaagcaatcagttaattagaattcactttataggaatgaaatctaggcttaaagtgtgagaataatctgtcttgctttgttgaaagtgaccttggtattcgaagacagagctgctcactactgtcagtaagacgtatatcttaaattgattaaggctaggtaatcagtttgtgaggattcattcttaacgcttgtgccattggcaggcatattttaggtgctgtctcttgggccataaattagtgacactgagtgctgtggatttacccaaataacctctttaatatttgctactgttaggtgtaattagaagatacatgaaagaggcagggtgtggtggcttatgcttgtaatcctagcactttgggaggctgaggcaggtggatcaacatggcgaaatcccatctctaccaaaaatacaaaaaattagccaggcgtggtggcacccgctgcacctgtatcagctattcaggaggccaaggtgggaggatcacttgagccctggaggcagagattgcagtaagccaggatctcaggatcgtgccactgcactccagccttggagacagagagagactccatctcggggtggggggaaaaaaaaagagaaaaagtgagagagcctggacaacataacaagagcctgtctctacaaaaataaaattaaaaaaaaattagccaggtgtgatgccacatgcctgtagtcctagctacttgcaagcctaaggtgggaggatccattgagcccaggagttcaaggctgcagtgagctgtgatgttgccgctacactccaggtgacagagcaagaccctaagaccttatctctt

SEQ ID NO: 13761 - DNA, 2088 bp, Homo sapiens
cctctgggctgccatttgcagggaatttcatgtacatattcagacatgcagacttgcacaactgcttattatagaaatattctttgttactaagtgtctaacagacttaaacatacagggtttccgtatatggagaaaagtgattccacccactccatgccctggcacgtcatgatgccagcccttagatttatttggcttccagaatttaaatagacagtgatgtaaatcagaagttagtgtttcacctactggcactaagtaactaaatcatcacattggtgatgaggaaggtaaatccttttcagtttggctacagaatggaaataacatttattacaatatgatctaagttatattgacaacagaatgatttatttctatgttataaaagatgaagaaggagaggagaatacagagaagttaaatggtttggcagtgatcacacaacaagccgaaagtagaatccaagtctctctggagtcccttctctgatcaaagtttcatcttattgaatgtcacagcattataaagtgagataaatgtatctcaccacacatgtgcttagtgaattattctcagtagatagcttcttctatttttaaacattttgttctgagattttaaaatttcaattctattctcttatgttttaaaaccgtgttcacagatttgagctaaaatgggaatcgaagagtgactttggcatttttccatgactattcttgtattgatcttaaactggcatcacacgtgttccaggagggcacttgttttgcacaacagttttacaaactagctgtctataagaggcagttcattaaaatttaatgtttttaaatgatctttagatgtatagaattttttaaagactacatattagagaaagcatgcatacaaaatatttttttttttgcccagtagtggtgataatagctaacatttattgaactcttactctgtaatagccactgttccagtgattaactctttattttaattttttttaattttatttttattatatattgacaaattacagttacatatttatggggtgcaaagtggtgttaagattttttaatacaatgtggaaagattaagttaagctagttagcatatccatcacctcgatatttaacattttttgtgacgagaacattagagatttactgttagtgatattgaaatgtatataacaattatattcaccatgctgtgcaattgatctaaaaaaggatcaaacttattcttcctgcctaactggggctttgtaccctttgactgtaatctccttttccccgctacccccttggccgctggtaaccaccattctactgtctacttctatgagtttagtcgtttttcaatgcaatctctataaaaattccaatgccatttctcatacatatagaaaaataatcctaaaatttatataaaaccacagagaaacccaagtagccaaggcaattgtaagcaaaaaagaacaaagctggagcattacactactagatttcaaactactgtattctataaaatgatagtaattagaacacattgtacagtataaaaaaagacacattgaccagtggaacagggtagagagcccagaagagaacccatgcaactgtggtcaattgatcttcaacaaatgtatcaagaatatacagtaggaaaggacagtgtcttcaataaatggtgtttggaaaattggatatccatatgcaaaagagggaaatcgaacccttacctcacaccacctacaaaatcaaatcaaattggattaacatcttcagcataagacctgaaactgttaaactactggaagaaaacataggagaaaagctaaatgacattgtgtctggacaatgatatttatagttattaaatatttttatttaaatcctcaaaacaactctatgagatattattattcccattttatggataaggaaactgatgtacagagtgattaaatgacttgctagaggctaggtgcagtggcccatgcctgtaatcccagcactctgggtggaaggatcgcttgaggccaggagttcaagaccagcttaggcaagactctgtctc

SEQ ID NO: 13762 - DNA, 1873 bp, Homo sapiens
caagaagatgtgaaaatagtattgtccaaactcaagaaaaaaaaagacaaaattatctcagtggaagactgaattccaaggtgaacaacaggacaatagactcaactgaaaatgtaataagggacattaaggagggaaataaaaagccaagagaataaaaataaatattagaaaaggttaaaaagtatctcaaaggaactgttagatatagaagataatgaacaaaaatccaatatgtatatgtacacgatatgtatatgtatgtataactgaaaacccaaaagaagataaacaaaacaatggaacagaattaacacttaaataagaaaactttccaaaaattaaagcagacctttacctttgtatttataggacctacttttgattcagattggtcaactctaagacatattttagtaaaactattgtattctaagaaaatttcttctaaacttctggcaaaaaaaaagccaagtcttttacaaggtaaagaaagtcaagtttgcagctgtttttcaggtattgaggttatactgaaatcgttttcagcatgcagaactcagggaatattataaccccaagcccattctgaggaattaattagagaaagctcttcatcaaagcaagagatgatcaatttaagacaaaaacaaagcaagggacaagggtagaatagtgtatgtgtgtatcaggctcagtccagtgaagagagaaacaacacagtaatttgaacatagaaagtttaatataattgttaactataacagaggattggagtaatgagggatcagttagtaaaggaaagataactctaaagaaattatatgagtagcaaacataaagaaaagccagactctgaggctgagataaagtgcccaaggaagagcctctcctcccccatcctgagggctgaggtatagggctgtgttctctcaatgacagagaaatcactgtggtgctatgttggtggaacttgctaggaactcccctctatggtgctcaggaaagctgttcgttgagagatatctctctacagtaactctactatgaaaccacccaaggtgagggtaaggatgctgctgcttagaaagagatgcagacaaatgtactaatgaaggctcaacacagctctttcaaggcaagacaggtcaagaggacaaaaagtaaaagtatgaaaggctttaagaaatcaggtagatcgtaggtgtatgtgtgtgtgtgtgtgcatatgtatgcatgtcaaactttagatccttataaatgatctgccttgaaatttaaaaatctaaatagctcttagttgaacaggggagatataaacaaagtttgcaaaattcctaaaacacgatgataataaacatcatacatcagaattttgagatataattaaagcagtacttagaagaaaatgtatagccttaaatatttaacatcagtaaaaatgaaaggatgaaaattgggatttaaattcccaactcaaagagctagaaaaagaattacaaagcaagaagaaaaaaaagataaaggaaattaatgaggcagaaaacagaaaagcaataattcaaagttaattcaaagtgctggtcctggccgggcatggtaattcatgcctgtaatctcagaactttgcgtggccaaggcaagaggatcactttgaggctaggagttcaagaccagcctgggtaacatagcaagaccctgtctcaacaaaaatgtttttaaaaattagcccagcatggtggcatatgcctgttgtcctggcttttaggaggctgaagcagaaggattgcttgcacccaggagtttgaggttacagtgagttatggtcataccactgcactgcaacctaggccacagggtgagatactgtctc

SEQ ID NO: 13763 - DNA, 2037 bp, Homo sapiens
ggcctttttttttttttttttcacttttcgctaaagtcacattccggcagcaattttatgctgtcaaaatgttctcaacaaggggagatttgactggcttctctgagaaccagtcataggaagcttgggctctgcttcttattgagttcttttttaaaattttgctgggggtccggggaaagaaggaaaaaaagcaacaacaataacgagaaacaagtcacccaggcatcttgtggagggtggctgctcttttcaggccggcggccagtccccgggcgtacagcgtgcggtgcaacctgcagctgcgggacgggtgcattcacgaggggggtgtgtgcgcctgggggtcacccctgctgtctctctgggtaggggtgcaggtgaagctcacatgtgccactctgtgagtgtcaccgcgagggaaaccctcccaggggcccgggcccagggtggccacggtgaggaggaggaggaccacatgcgcagggaagggcatggggcacagcatgtgtgtggcccacacaagggcggtctgctctcactcccctcgctgctctgtaattaagctcggctgcgcccactcaggcttccagacctttccctgagccctccgccccccgggcccactccccgttctcccagccttgctggctacttccactccccaaagagccttcaggggccttcttgtcgttgatcaaaacaacagggccaccagctcctcaagagtccaagctatagtttggcccaaatgtcccggccagggtggctctgtgtcaaaggccctgcagctcctccctcctgtttctctgggccctctctttggggttctggttcccgattaaaccttgacctctctagcacatgccttttgccacctcccccactggtcctggctcttccttccccgctgaaatgagttgaggctgagacctgggaagccgcaaggtgctgggatcccagacgagtccctcctgaaagggcgaaactcagtcattcagggagaaagggaccacagccaacccaccacacaggtggagcccatggacaaggtctcattccagtggcccggtgtcacagcgtgtcctcatttgcagctaggatgaatgccaattaccaccaccccataggaaagctgcccccctggccagcaccagcccaggcgcctgttaggttttagttcactcactcctctctgcaaccccataggatacgagttaccgattctatgtcacaaattggaagagtgaggctcagagaggcaaggccacttgcccaatgtctcacagtggctcagtgtcgaggcaaggcctgtgtatcttccccattcccagaacctgctggaagtcaagggcagcacttcaggccccagctctgccccgttccagtgaggaacctgaagccagcacagcccctcccactaatccatgcgccccagcccgggcttcagctccacatctgtataatgggagagtgaggtcctggggatctatggctccttctggcttatgcctgtgtaacagatgggagagaaatgaagatagggctgagggtccccccaagccagggctttgaggcagtgtctccccagggcagccacaccatggtggagaccctgaaggcaacaggctgggaggccaagcagagctcagaagaggtgggagagaagggtctagaagcaggaggtggaggaagagaaactgcaaattgcgggtaggaagtgcttagtaaaatcagaaaaatttcagggcacaatcgctcatgcctgtaatccccgcactttgggatgccaaggcgggtggattgcttgaggccaggagttcaagaccagcctgggcaatacagtgagaccctgtgtctccacaaaaaaaatttttttttaaaattagctggttgcggtggcgcacacctgtagttctggctccttgggaggctaaagtgggaggattacttgagcccaggaggtggaggctgcagtgagctatgatcgcttcactgcactccagcctgggcgacagggtgagaccctgtctggac

SEQ ID NO: 13764 - DNA, 1950 bp, Homo sapiens
gaaagtttgtcaatttgttttcactataaggcatcaatggcagaaactacatatgagtaattttcaaaatagaccattgcttaaatgtttaaatgaagctaaaacaagtatgaacccattggttagagtgcagtggcttctttcaggcagacagcagatgctctcagatttggtggtgagttttggccttggcatggttggcatggagtcagcacaggaagccgggaggtatgaaggggcatccacctgggtgaaactgtcttgccaagccaaagccccgaggcctgccctgaagcagctgtagtggaggagaggcctgggattccttagagtcacctttttacgaatgtaccgccactctgttagctcacaaggaaaataaggaaaagccaggcctcccacctcttgactcttgtgagagtgaagacaacatggggcatttagaaaatatatttttagtgtatgataatgtgggctggcccacacagcaatgagcccaaagaccccctcgctttgggaattattcatggccctgctcatcacagcctctgatatgcatgactgtaacctaggctgagccaagaatggagctcatgccagaaatggtcctaagcatgcacatggccccctggaatatcaaaatcctggggagaaagaaatcatctttgccttgggcagtgaagctggaatggcacatatctatctgttgccacatctcctgcctagtggagaagccttggaaggcaacagacactgagcaagcagcagggaggagaatgtcctggaagggcaggactctacccaagtccctaacatccccagactcttctcttccataaactctctaattactctgctgtttaaatcctggttttggtcaagccagtcaggttgcataaagaatatgaatacagtatgcatcaaagttgcttcccagaacaggaagcaaaacaaacaaacaaacaaacaaaatactgatatcagtacccagggtgcccaattaggtcacacccagtggctgcattgcagcccctgagctcctgctgcaccgtgtgtcctgctgcccgagtgggccccaccctgggttctgaagatgcccttcttaatggagagctcccgatggagggctccaggactgatgctctccctaaggaagggaggcctcagatttggagagggacaccaacaggaccagaggaggactgaggggcactggcaccaataagtggaagggaacagcgtggtaacaaaaaagagccatgccacttgcatgctggagggagtctttttgtgtcagcctaaagcttaggctggtgtccatgtggaacatgacatctttccagtatccctgatccaggaaactgcagtgagacccaggtgacccagctctgtgtcatttggagcccattaaaaagtgaggcagccacatggcggggacattgaccccactccagaccacactcccatctccatacataggatagaaactgttcatcaggaaggaaaaccaaacagaaatttgtggtctaggggaggggtctgcattcagcatggccatgctgggctggagtggctgtggggtgtccagatagatgggcatgtagactagtgctttctcaacctttaatgcatgcacaaatcatcgagatcttgttaaaatgtagatcctgggtgggcacgatggctcacgcctgtaatcccagcactttgggaggctgaggcgggcggatcatgaggtcaggagatcgagaccatcctggctaacacggtgaaaccctgtctctactaaaaatacaaaaaattagccaggcatggtggtgggtgcctgtagtcccagctactcgggaggctgaggcaggagaatggcatgaacccgggaggcggagcttgcagtgagccgagatcatgctgctgcactccagcctgggcaatagagtgagattccgtctc

SEQ ID NO: 13765 - DNA, 1587 bp, Homo sapiens
acaatagacactaggggctactagtagggggagaatagaaggaggctgaaggttgaaaaactgcctattgggaactatgctcactacctgggggacagaatcatttgtacaccacctctcagtgacatgccgtttacccatgtaacaaacctacacaatgtaccctctgaatctaaaataaaatttttaaaaaagaaaagatgtatttaattcgtcttcaaatttggtatgtaacttgtatgaaagaaattttaatccaagcagattttgtaatgagataatgaagaaattaaaactacaggtgacactgtgctgttgctctctgacccagtggaagtctacatatgtgtgaaaatgaatacaccttctctctccaggttgcaatggttcagttcactgatgatcccagaacagaatttaaactaaatgcttacaaaaccaaagagactcttcttgatgcaattaaacacatttcatacaaaggaggaaatacaaaaacaggtatgaccaaaagaagcccagctaaggctcaaagtaattcattatttgtaactactgaaatgaccttttattttaaggcatagtaattttttaaagattttttttttcattaatttaagaactttgttcccaccctttcttctccagaaaaacaaaaatgggagggagtgaaatcaaactgttgcctttctttgtttcaggaaaagcaattaagtatgttcgagataccttgttcactgcagagtcaggtacaagaaggggcatcccaaaggttatcgtggttataactgatggaagatcacaagatgatgtgaacaaaatctccagggagatgcaattagatggtaagatatataaacaatagtggctaccaaatatgatgttagaattgttattttctaaatacaaatttataggctatatcagcattacttaaatgttttaaaatatttcttcatattaactagacagtgtaatttttaaaatactttctggtatacaaatctgtaattgtactgctttgttagagaaaataggttattttctctaacacttttgttacatacaggatgccctttatatggaactctagcaattaagtactgtaagaaaaggaccagggaaagaatcttattacagaaactcctcagcctcttaatcatacccaaatgtccatcgatgacagactggataaagaaaatgtggcacatataagccatggaatactatgcagccataaaaaagaatgagttcatgtcctttgcagggaaatggatgaagctggaaaccatcatcctcagcaaactaacacaggaacagaaaactaaacaccacatgttctcactcataagtgggagctgaacaatgagaacacatggacacagggaggggaacatcacacacgggggcctgtcgggggtggggggcaagggagggagagcattaagacaaatacctaatgcatgcagggcttaaaacctagatgacaggttgataggtgcagtaaaccaccatggcacacgtatacctatgtaaaaaacctgcatcttcagcacgtgtatcccagaatttaaagtaaaattgtgt

SEQ ID NO: 13766 - DNA, 2277 bp, Homo sapiens
tcactgacatgagcagagtgctgaaatatttgagtgtctggcacacatgtacgttctcagctgagttccaacaaggtggtgctctgccttcttgcttctgctctcatactgaaaacgtgtcctttttgtggctaatagtaccatgtttttcacacttttatgttttttattggtgattttgctatttaaaatgcccctcaagcattgtgctgatctgctgtctatgtttctcaatgctaggcagttgtgttgtgctttacaggaaaaatacatgtgttaaataagttttgttcaggcctgggctgtagtgctgttggctgtgacttcaatgttagtgaatcaacaatatttattaaataaggagtcttgaaacagaaacacacataaaacaagcttatgtattgattggttgacaaaaatgttgtagccagaggttcacaggaacctaatcctgtatttcccctaggagcaatagttcagtatttgctacttcactgtgtgtggcaactttatggaacataatcactacaaataatgagaatggactgtatcctgaatgttatttattatatttgtttatataactttgtagttatataattgtgaatagtatctgtttttatgctatattttctaatttggttttaactgatgtgcagagtattggttttggtatgctgatgttatgtcccagctctgtcattttactagctgtgtgacccatgacaagtttgttagtttcctagatttgtcataacaaagtgccacaaactgggtgactttaaacaacagaaatgtattgtctcacagttctggatgctagaagtctgaaattaaggtgtcagcaaggccatctccctctgaaaactgtaggaaacccctcctttttttcttcctagcttctggtgattgccagcaatctttggtttcccttggcttgtagctgcataactccaatttctgcctttgttgtcacatgatgttctcctgtgtgtgtctgtgcctaaatttcccttcttttacaaggacatcagtcatattatactagggcataccctaaaatgaccttatcttaaattgattatatctgcaaagacctgatatttgataaggcaatgggggttacctttaaaatgtcttttttgaggagcacaattcaacctataacagcaagttgcttaaccttcctgtgcttcagttttctctgacataattgtatcactctgataataactgtatcatttttaagggctgttgtattagattagttaatattattagtcaaaaatatatggaaaatccttagaactatgcctggtccacagtaagaattcaatgtgtaatctagtcaggtgacttttatttagcaattttgccgaactcctattggtttcaatagtttgtagactatcctgaatatactgtttagataatcacattgtatagaaaaggtaatgttgtcttttctaatttttatatattttatttcagtttcttaccttattattgtagggtaagccttgttattgttgtaagactttcagtataatgttgaatagaagcagtgatagtaagataatgagcaccttgttttgcttgtaatttaaatgaaaactattctataattttgtcattaaatgtgatgattgctacaggctagggtgatatcatttctcaggttaagaaaagttatttctagtcataattttagtgagttttaaaattaaatttcgaatgagtactaaatacttttttttgcatctgttaagatacttatatgttattttccaatatcaagctggaaaggataggaatggagcagcaaatgaaagttcaggctatgggttaggagttgagtggaaacttgtttggaactagcctgggttgagggcaaagcaagaaacaaacaaacaaaaaaacacaggaatgactgtttgcctttactgtttggcaggtgaaaatatatggatgtaagaactagcttaaaggtggtattaatagtaataataacatgatcaataatagttaacgtcaacattcctcaccagatccctcaaaaacaatagaaataaaagggaatatatttcattttgtagcatacagagcatagttattctgtgcttttaagtgaaacaccagcataggaaaaaacaaaaaacaaaaactggagcccaggaggtcaaggctgcagtgagatgtgatcacaccactgcattccagttggggtgatttagtgagaccctgtctcaaaaacaacaacgacaaataaaaacaaac

SEQ ID NO: 13767 - DNA, 3385 bp, Homo sapiens
  CDS (56)..(3256)
ccacctctccagccactcatctctgcccagctgctgccctccccaggaggcctccatggcttcacctacctccaccaacccagcgcatgcccactttgagagcttcctgcaggcccagctgtgccaggacgtgctgagcagcttccaggagctgtgtggggccctggggctggaacccggtggggggctgccccagtaccacaagatcaaggaccagctcaactactggagcgccaagtcactgtggaccaagctggacaagcgagcaggccagcctgtctaccagcagggccgggcctgcaccagcaccaagtgcctggtggtgggtgctggaccttgcgggctgcgggtcgctgtggagctggcgctgctgggggcccgagtggtgctggtggaaaagcgcaccaagttctctcgccacaacgtgctccacctctggcccttcaccatccacgacctgcgggcactcggtgctaagaagttctacgggcgcttctgcaccggcaccctggaccacatcagcatcaggcagctccagctgcttctgctgaaggtagcattgctgctgggggtggaaattcactggggtgtcactttcactggcctccagccccctcctaggaaggggagtggctggcgtgcccagctccaacccaacccccctgcccagctggccaactatgaatttgacgtccttatctcggctgcaggaggtaaattcgtccctgaaggcttcaaagttcgagaaatgcgaggcaaactggccattggcatcacagccaactttgtgaatggacgcaccgtggaggagacacaggtgccggagatcagtggtgtagccaggatctacaaccagagcttcttccagagccttctcaaagccacaggcattgatctggagaacattgtgtactacaaggacgacacccactactttgtgatgacagccaagaagcagtgcctgctgcggctgggggtgctgcgccaggactggccagacaccaatcggctgctgggcagtgccaatgtggtgcccgaggctctgcagcgctttacccgggcagctgctgactttgccacccatggcaagctcgggaaactagagtttgcccaggatgcccatgggcagcctgatgtctctgcctttgacttcacgagcatgatgcgggcagagagttctgctcgtgtgcaagagaagcatggcgcccgcctgctgctgggactggtgggggactgcctggtggagcccttctggcccctgggcactggagtggcacggggcttcctggcagcctttgatgcagcctggatggtgaagcggtgggcagagggcgctgagtccctagaggtgttggctgagcgtgagagcctgtaccagcttctgtcacagacatccccagaaaacatgcatcgcaatgtggcccagtatgggctggacccagccacccgctaccccaacctgaacctccgggcagtgacccccaatcaggtacgagacctgtatgatgtgctagccaaggagcctgtgcagaggaacaacgacaagacagatacagggatgccagccaccgggtcggcaggcacccaggaggagctgctacgctggtgccaggagcagacagctgggtacccgggagtccacgtctccgatttgtcttcctcctgggctgatgggctagctctgtgtgccctggtgtaccggctgcagcctggcctgctggaaccctcagagctgcaggggctgggagctctggaagcaactgcttgggcactaaaggtggcagagaatgagctgggcatcacaccggtggtgtctgcacaggccgtggtagcagggagtgacccactgggcctcattgcctacctcagccacttccacagtgccttcaagagcatggcccacagcccaggccctgtcagccaggcctccccagggacctccagtgctgtattattccttagtaaacttcagaggaccctgcagcgatcccgggccaaggaaaatgcagaggatgctggtggcaagaagctgcgcttggagatggaggccgagaccccaagtactgaggtgccacctgacccagagcctggtgtacccctgacacccccatcccaacaccaggaggccggtgctggggacctgtgtgcactttgtggggaacacctctatgtcctggaacgcctctgtgtcaacggccatttcttccaccggagctgcttccgctgccatacctgtgaggccacactgtggccaggtggctacgagcagcacccaggagatggacatttctactgcctccagcacctgccccagacagaccacaaagcggaaggcagcgatagaggccctgagagtccggagctccccacaccaagtgagaatagcatgccaccaggcctctcaactcccacagcctcgcaggagggggccggtcctgttccagatcccagccagcccacccgtcggcagatccgcctctccagcccggagcgccagcggttgtcctcccttaaccttacccctgacccggaaatggagcctccacccaagcctccccgcagctgctccgccttggcccgccacgccctggagagcagctttgtgggctggggcctgccagtccagagccctcaagctcttgtggccatggagaaggaggaaaaagagagtcccttctccagtgaagaggaagaagaagatgtgcctttggactcagatgtggaacaggccctgcagacctttgccaagacctcaggcaccatgaataactacccaacatggcgtcggactctgctgcgccgtgcgaaggaggaggagatgaagaggttctgcaaggcccagaccatccaacggcgactaaatgagattgaggctgccttgagggagctagaggccgagggcgtgaagctggagctggccttgaggcgccagagcagttccccagaacagcaaaagaaactatgggtaggacagctgctacagctcgttgacaagaacaacagcctggtggctgaggaggccgagctcatgatcacggtgcaggaattgaatctggaggagaaacagtggcagctggaccaggagctacgaggctacatgaaccgggaagaaaacctaaagacagctgctgatcggcaggctgaggaccaggtcctgaggaagctggtggatttggtcaaccagagagatgccctcatccgcttccaggaggagcgcaggctcagcgagctggccttggggacaggggcccagggctagacgagggtgggccgtctgctttcgttcccacaaagaaagcacctcaccccagcacagtgccacccctgttcatctgggctgcctggcagagagccttgctgtttacaattaaaatgtttctgccac

SEQ ID NO: 13768 - protein, 1067 aa, Homo sapiens [sequence omitted]

SEQ ID NO: 13769 - DNA, 1815 bp, Homo sapiens
ctgttgttctttttccaaatatcctagagtactttgatatagttgagtatattcatctatgcaatgtccttgtgatgttggtagggagaacttctaaccttttgtgcaatgacgagaaggttatataatggcccagccaggtttcatccttgatatcctggcaactgtagtttatattaatgacatctccattgataaagggtctctgaggtttccagaagaaagttttttagatattcatgagtgtactaatatcatcaatttacctgtaactttgattaagcaaagaaagcaaacccatacacacacacaaacaaacaaaaaaaaccacttttctcaggactttccatttgttcccagcttagtttgaggtcctgcttcattggcttagatctggccaggtctgtttgtcatctggcatctgtctcttctttctcatgctccagatccagagccagagagcagccactgctttgctctgaggttggctctattttctccctttggcatatgggatggcagtagccctgtgcccttttggtactgcagaagagatggattccacttggcccatcccacccccatctctggttcacctgggcatgaaggtttccttggcttctgcctgcagccatatttgggctgcttccaggagaagagaagaatgtagtgacactgcagcagaggcagcttagccgacaaacccccaaccccaacaccagaagagcagggagtgctgctgctgattagtgagggagcagcagaaatgcctaggatgggaatgttctgtccaactactatgaggcttccattaagagctctgtctaaactgctcacagcggcactccccagcctcctcccaatagttccaatgaaaacgagttggtgaaatctctttagaggtttttgacaagtgcctctgccaaagaataaaaatgatacccttcaggaaatatattttagagtccaagatgtatattgttttaatattaagtacaatagcaactaattaaaagattttttcaagaggcactgtctctgtcacccaggctggagttcagtggcatgatgatagctcactgtaacctcaagctccctagctcaaaggatcctgccacctcagcttcccaggtagcttggactacaggcacacaccaccattcccagctaatgttgttttttatttttcctttttgtagaaatgggatcttactatgttgcccaggctgatcttgaattcatgacctcagtgacgctctggccttggcctctcaaagcactgttattacaggtgtaagccaccgtgcctgacctatttctaatttgacttacccaagtaattttaaaagatttaaagcaccatccataaggtatagttttctgctaggtaggatttttgatgttatctcctttgtttccagcaacattggtaacctagaactgagtcaatgatgagcattgactacactatgaagcctctctgtttaagatacaggagaaacttagctcctttaaaaaaaaaaaaaaaaaaaaagggtgtggtggctcatgcctgtaatcccagcactttgggagggaggctgagactggcagatcacgaggtccggagttcaagaccagcctggtcaatatggtgaaactccatctctactaaaaacacataaattagctgggtgtggtggcaggcacctgtaatcccagttactcaggaagctcaggcaggagaaccgcttgaaaccagaaggtggagcttgcagtaagctgagatcatgccactacactccagcctgggcaacaagagtgaaactccatctc

SEQ ID NO: 13770 - DNA, 2228 bp, Homo sapiens
  CDS (503)..(1105)
gaaatggaaaagaaaaaaaaagacaaaaaaaaaaaaaaagaaaagaaaaaaatctcatcacttgaagccaccgggagcctgcggcccgggccagcccgggctttctccggagcagagcagcgctgctggcctggcagccaggacttctccgtgtacgtgcatccccagtccccgccggggcgggcgggccgccagagcagctgtttacaatccagagacagaaaacaaaatctagatgcaacagcgaaacaaagaacccatttccttcctggcacccgtttctgtcccctcctttcctgctccgcctgcccggcatcatcagcccttctggggcgtgtacctctcactgcctgccccaggaccagaggcctgtctcccccttccctccccaccggcccgggggagacctcttcacacccaaagatgctttgtcaagatggctgcgctgtccctttgagttcctgcttcttgtatattgctctggggactctcgccggggaagatggggctgatttcccacctagagaggttgatggcagaaggaaaatggggaggcactggggttgtggagggcatgggtatggctgaggagggtgctgggaacggcaaggcggtctgggggatggggaggggcaaaggtgagagatcaccttccctatcctccaccttcccgcagggaagacgaagccaggtgccagggctggggtcgggacacccatgttctgggcggcttgaccccaaatcccagaccccggaagctccaggctcgggatgtgtcctgagcacctgtcccggccccctcctctccagcctgtcaggccagcctccccagcccccttccctcaactctaggggcagcatagccccaggccaccctagcccagcccctgcattgccgtttccccagaggtggcccctccacctctgctctgacctctccccatctctctgcccctccttttctcacaagtgccatgagttttcaaacatcttcgggtctcagcctgctgctgccatgaactttgttgggttaagggggaggggctctaggaaggaactggggggaaggggacaggtaggtggctggagggaccctttttgctgctagaaagcccctcccttctcccggggagctggggctggcttgtccccatcaattaggggagaaggggtcagaccaaagatggtggtttgtcccgtgtaagggaacaggtgtggggaagaggtggggttgggttccaactctggctttttctggtagaaaggcctaacccattacaccagaagaccatgggtgaagtctagatggggaggagaagtgaggccagggacagtcttgccagacgactctgaggagggcaagggacagttccatggcccttcccggactgcactaggctgggagctctgttgtgtggaggggtggtcagaggtctgtgaagagcgggcaggaggcatgagcaggcgaggagctggcctgtcccgggaagcagcccagcctgtggctgcccccgacaccaggaggagggccaggagagttccagggggctgaggcacacagagaggccaacttcctccctgcccagccttccttgtatctctccagactcggacaatcaaagggagagagggtgtatcgggtcctgttccagccggcatcgccgggtggcttccaggcctcagagctgtgtggcagggccccctgctggggctggacatcactgcagtccagtgcaaagccgcccccagagcccaggtgtccccccaacctaaccagacctggtgccttgacgcccccaccccagctgggacggtacagagaagggtcttggtttcctctcctactcccttccttaggctcctgaactcgtttgctcctaaatcttgttaattctttttctctggattttggtttcttttggctttcccttgccttcccctttctctgtctccaacactctttccccatgtctttctggctgtctctatgttcctcttctcttatcctcaactttctgtccattcgggcctcctccccacctcccacgccccagcccctccctccttggtctccttttcgatatgccaaaccaattttgggtcgagtgcatttaacgagaacaaaacaaaaggctcataacaacaagaacgtttcagaaaaaaacaaaaagttttaaaaaaattgttgagtcaaaaagtcaaacaataaagaaattaagatttcttgg

SEQ ID NO: 13771 - protein, 201 aa, Homo sapiens
MGLISHLERLMAEGKWGGTGVVEGMGMAEEGAGNGKAVWGMGRGKGERSPSLSSTFPQGRRSQVPGLGSGHPCSGRLDPKSQTPEAPGSGCVLSTCPGPLLSSLSGQPPQPPSLNSRGSIAPGHPSPAPALPFPQRWPLHLCSDLSPSLCPSFSHKCHEFSNIFGSQPAAAMNFVGLRGRGSRKELGGRGQVGGWRDPFCC

SEQ ID NO: 13772 - DNA, 1514 bp, Homo sapiens
  CDS (159)..(632)
aggaggtggggcctggtgggcggggcctcagcgtaggccttaggtctcaggggagcagcacgcctgagcaccccaggacctgcgctcagggctcccacaaacggtttatcggtttatcgctgggggacagcctgcaggcttcaggaggggacacaagcatggagcggctttggggtctattccagagagcgcaacaactgtccccaagatcctctcagaccgtctaccagcgtgtggaaggcccccggaaagggcacctggaggaggaagaggaagacggggaggagggggcggagacattggcccacttctgccccatggagctgaggggccctgagcccctgggctctagacccaggcagccaaacctcattccctgggcggcagcaggacggagggctgccccctacctggtcctgacggccctgctgatcttcactggggccttcctactgggctacgtcgccttccgagggtcctgccaggcgtgcggagactctgtgttggtggtcagtgaggatgtcaactatgagcctgacctggatttccaccagggcagactctactggagcgacctccaggccatgttcctgcagttcctgggggaggggcgcctggaggacaccatcaggtagggatggccctgccccatcctgttctcgagtgtccctcccctcatccgctcagactgggcctccctgcctcctggcccaggcctctggtgtctgggtccccctcctgagtcctcccatctgccttcctggcccccctgttcagcggtcctgggaaggatggcaggcattcggagctgaggttccaggggactgaggctctgagggtggcatatttgggaggtgagggagctgactgtctgagatcagaggggtgcagcatccagtatcagactggacagacccagaaaagccttgaatgcctcacccaggcgcctagatttggagcagggagcgctgaggggttctgagaagccgcattctagggaatcagaaaaccaagcaagcaagcctgggcaatacgatgaaaccccgtctctaccaaagaaaacacaaaaattggctggggatgatggcgagtgcctgtagtcccagttacttgggagctcgacgggggaggattgcctgagccggggaggcggaggttgcagtgagccgagattatgccactgcactccagcctgggagacagagcgagaccctgtttcaaaaacaaaataacggcagggtgcggtggctcaggcctgtagtcccggcactttgggaggcggaggcgggcagatcactaggtcaggatatcgagaccatcttggctaacacggtgaaaccccgtctgtactaaaaacacaaaatattggccgggcatggtggcgggcgcctctagtcccagctattcgggaggctgaggcaggagaatggcttgaacccaggaggtggagcatgcattgggccgagatcgcgccactgcacttcagcctgggcaacagagcgagactccatctc

SEQ ID NO: 13773 - protein, 158 aa, Homo sapiens
MERLWGLFQRAQQLSPRSSQTVYQRVEGPRKGHLEEEEEDGEEGAETLAHFCPMELRGPEPLGSRPRQPNLIPWAAAGRRAAPYLVLTALLIFTGAFLLGYVAFRGSCQACGDSVLVVSEDVNYEPDLDFHQGRLYWSDLQAMFLQFLGEGRLEDTIR

SEQ ID NO: 13774 - DNA, 1723 bp, Homo sapiens
ttttttttttttttttttttttttgagacggagtcttgctctgtcgcccaggctggagtgcagtggcacgatctcggctcactgcatgctccgcctcccgggttcacaacattctcctgcctcagcctcctgagtagttcggactacgactacaggcgcctgccaccacgtccggccaactttttgtatttttagtagagacggggtttcactgtgttggccaggatggtctccatctcctgacctcgtgatccgcccgcctcggcctcccaaagtgctgggattacaggcatgggtcaccacgcctggccagtgaaaatatatttataatgacttccctacctattccctatcttcttccaccattcttagacacagtgatagtttaataatcgattaggatgtaactgtaatttccttatgaagaaaactaaagctatgatgtactataaaacatatagcatttcaaggcagccaattatccaaaacatattaactggtaaattaaatatacctgttggttatcttgtttggaacaggagggaggctattattaggtagagagtaagcaccatgtcactttacatagtccatttatatccacatgatggcagactgctctttgacaatgaagaagcatagaatttatttgttttactttggtaaactgactttggctatcaacagacttaatgtccaagtcttataacatttttcaaatatgtttaaaatttagtttttccaaaaaatcaaagcactgtacactaaaaatagaatataaggcagtgaaatcaaatcctggctcacttgaagaaataacagtctgtgggcaactggttgtttctcaggtcacctcaggggacagatggtccctgaggtgcaaaagaatgaactggtgctgatatatgactgataagtttctgtaacgggccactgaccatttcaattcccaaggaacataaattaccttttagcctgtgtatttacacacaaatatgcaacctgcaaacttcttctgaggacagatgtcaactactttttcattttttttttttttacagtcaaagtagtaaacttgcagatatatctaaaaccaattttcaaaccagcttcataacatatgctgtaagtaaataaataccaaaacctgataacactagcatggagaaaagaaaagctgaattaaaaagacattcctttacacaacttagtcaagacaaaatacacattactatgtgatgttacactaattattccaataattatttacttaagaagagggacaaaacagttttgttacattaaatctttctcttatttgccatccccacctttctactccattactgcctcctaatactttcccttcccaaggagattggagattaagaaatagcctctgcccctcaatctagaattaacttaccttttatttttacatacaaacactggatttcccagagtcgtcttttaaaggagttaagattctagctctggcaggaaagtcaagtgatttaatcacaaccatagttgtttctctactggtgtttaacatgtaccacataaactaactactaacatagccaattctaaggtcatttatgtgagatattaagactgaaaatacacttttaatttctgcctttttctccaatatataatccctttttaaagtctcttaactaaattagatgctggaattgatccagccaagtaacacctt

SEQ ID NO: 13775 - DNA, 3876 bp, Homo sapiens
  CDS (10)..(1815)
agactcgagatgcgcccgaggaggttgggccggtgctgcgcggggagccggctcggacccggggacccagcagcactcacctgtgcaccttcgccctcagccagtcccgctccggagccctctgcgcagccgcaggcacggggcactggacagagagtaggatcccgagccacctctggaacccagttcctctcggaagcccgcaccggagctcgcccggcctcggaggctggagccaaggcaggagcccggcgcccgtccgcattctcggccatccaaggggatgtccggtctatgcccgacaattcggacgcgccgtggacccgcttcgtattccaagggccgtttggttcccgggccactggccgggggactggaaaggcagcgggcatctggaagacgccagccgcctacgttggccggcgacccggggtgtccggccctgagcgcgccgcctttattcgggagctggaggaagcactgtgtcctaacctacctccgccagtcaaaaagatcacccaggaagacgtcaaagtgatgttatatttgctggaggaggtgtgtactgccttcctgatccagcttctcccacctgtctgggagagcgttacctatgggatggtcctgcagagagagagggacctgaacactgcagctcgcatcggccagtccctggtgaaacagaacagtgttttgatggaggagaacagcaagctggaagccctgctgggctcagccaaggaggagattttatacctcagacaccaggtgaacttgcgggatgaactcctccagctctactcagattctgatgaggaggatgaggatgaagaagaggaggaggaagaaaaggaggcagaagaggaacaggaagaagaagaagcagaggaagacctgcagtgtgctcatccctgtgatgcccctaagctgatttcgcaggaggcattgctgcaccagcaccactgcccacagctggaagccttgcaggagaagctgaggctgctggaggaggagaatcatcagctgagagaagaggcctctcaactcgacactcttgaggatgaggaacagatgctcattctggagtgtgtggagcagtttttggaggccagccaacagatggctgagctgtcggaggtgctggtgctcaggctggaaaactatgaacggcagcagcaggaggtcgctcggctgcaggcccaggtgctgaagctgcagcagcgctgccggatggagactcttcctggtttccaggagacgctggctgaggagctcagaatgtctctaaggaggatgatctcagaccctgtgtattttatggagaggaattatgagatgcccagaggggacacatccagcctaaggtatgattttcgctacagtgaggatcgagagcaggtgcgggggtttgaggctgaggaagggttgatgctggcagcggatatcatgcggggggaagatttcacgcctgcggaggagttggtgccccaggaggagctgggggctgccaagaaggtgctggctgaggaaggggtgatggaagaggcagagctggtgtcagaggagaccgagggctgggaggaggtggaactggagctggatgaggcaacgcggatgaacgtggtgacatcagccctggaggccagcggcttgggcccttcacacctggacatgaattatgtcctccagcagctggccaactggcaagatgcccattacaggcggcagctgaggtggaagatgctccagaaaggtgagtgcccccacggggccctccctgccgccagccggacaagctgcagatcgtcgtgccgatgaaaagagagggtggataagctccccgagtgctcacctgccccagcctggctctacctgctgtgcttatttgcatggactttgcatatcatttgcatagacacctctgatccccttcagtgggaaccgtagtgtcagtgctcatttatgtggcatttgcttaggattccagatctccatccacttttctcctgggggctgggctgggggttagggctgggactgtgcccccacactgcgcctcagcttcccatctctgcccgcttgcttcccctacccccaacccctgcctcctctataccccaggctctccaactctgcagcagtggcagcagcagtcaaaacaaacacggggggcggtgggtgggatggtggagcagcctgggggctgacccaggctggaggacaggaccagccaccctcccacggcctgggaggaagagaggccttctgggactgcccaggctatggggacaaaggccttcaccagcaagggccacagttggaacagtcccctgggtgtcagaaggtgggctagggcctcctgcagggttgtggggtggaacagggtctcctctccccagccagaaaccccaaagtctgggagctgcacctgccgagtgcaggccatgtgagccctgcctctttaaggagccgcaggacatgaaagatgaccttgtgacactcatgcacagcagccattgcacgtgcatcagctcccatcagcctcattccgtggcaggtgatgtgtccccattggttaggtgaggagggtgaggctcagagagctaaggacacttgtttggggccacacagccggggtagatctgagcccgtcctctctactcctgtgctgtagcaccttcactggcccatccctcccctctagtgctgtcctggtacccgtcccagcctgtccccattctcatggccctttggtcactgccgggtggaatagcactggcttcagcaggcgtgtcatgtaagcttgtgcaggttataaactgaaccatgacctttatggcgcatgcagggggcaacctgcataattatcaatggcgactttccgtgtccttctgatacagttgatcagacccctgcccaccgcccaggccaggcctgtggtcatcaatgccccagttcacatccacctgcttctcttccaggctttgctgttccccagcagcctgcagaggccccacagacagcttgaggcccctcctgctgcctggccaagccccacacccgcagaccctccttcccatcctctgaaatgggaccctgtgtctgtcaccagcccaccctctgtgttcatgaacctgggctggagcttggggacccctccctgcccctggcttcctcttccatgttctgccctttcccacatgttggaggcttttccaacgtcttcagggacaggcggtaggaaccccggccctcgctctgcagctggtgcaaaagctgtggctgccaggcctgggccacatggcagcccagggggcaggagaagcccgggagaggcccgctggctaccagactcagccctgagcagggaacagggcccagcttccaccggcagggagttgtgagcgccttcccaacaatgtgcccctcaccccttgatgcccatgctaatggtagccaccctggttcttgttgacttgagggacctggctgtcttccctgttcttcatcctttcttctcagtccctacctactgtttgtaaccacaagtgtctctgtgtgtgggtgggtgagggcccctctgcccagtggtgtgtctcctctccctccctccctcttctgccagtggcctgggggtgtccaggctcccatccatggcccagcccctctcccctctgtcttgatccccccctccctgcccctggcttcctcttccatgttctgccctttcccacacctttgttcctcaatagctgggggctgggactgaggcctcctgcaggtacctgccccccttcacacagcacctctcaatctcctattgcttgtcagcctgtgtgcgtgtggtgcaggaaataaaggatctataccctcctg

SEQ ID NO: 13776 - protein, 602 aa, Homo sapiens [sequence omitted]

SEQ ID NO: 13777 - DNA, 1768 bp, Homo sapiens
ctttacttctctgagcctctgttagctcatctgtaaatggggactttcttctgccccagattatggtgaggattagatggcacaatctatgtgaaattgtgagagcacgtagtacagtgcctggcacacaacagattctcagtctatatgccatgtcattcctgcctatcattgttcttggcaagtgtagagtgaaagcctgtggccatacatcttcatgagccatcagcatccccatagccaccgtctctgcttatctcaggccccaaagactctggctttttccctaagagaaacctctttacctatttctcaacctcagtgtaaaatataagaatgcaaaaaaggttagctattagatgatagaactcaaacgatggtaatactaaactgttaagggttcacacagaggtttaaatgcacataccattgggtacagctgtttcgcttcagagaacttatcctgtaggtatagttagacatgcatgcaaagacccacataaaaggatgttcattgaaacataattataatagcaaaaagttaggggagagaaacagtaactgcctatcagtaggagactagttaactcaattatggtctatccacatagaggaatattacgcaacttgggaaaacttgagatagatccaagctatattgttcagttaaaactcagagagcaaaattatgtgtgtaatatgcaaagattttcaacaaattccctgttggggagagatcctgtagtaggagacaagagagcccggctttaggttatatgtccacttgtattctttgaattttctagtctatttaagagcatgttacgaataagttaaatgagcattatgccagaatatagcactaaatgacgtatgatgaaattaaagttcaaatgcagcatgttgaaggtgaataggcctcaggtgtgtgatacccagtgtagagtggtcagctataaaagagggcaggggaagggtttagaggcctacactccagggtttagaggcctacactccaaggttccttcccattttcacaacaggtgattctccataatgtatatcatatgtattgtgattctaagtaaatgtttattttctagatgctttgtttacatattggaacaaggcttcaacatctgaacttatggatttttttacaatatctgagtaagtagctttctctttgatcactgcctcttgattttttcctggatcattaagaggcttgaagaatactatgtagttgaaccagaggagtagtgtatgtcacatcctcacttactccttaagccctttctcatggtcttggccctaaaacatattttcagggcttgtgacccagtgatcagtggtcacccttaaagtattacagatacgtgcctgttttacatgagaggtaactgtttatgtgtataagtcatcttaataaaataacatgaaatttattagctgaattgggtagatactgcttttctaagttgaacctaacttaagctgatgcagaaactgagtcagaaaagttgctataattttaaaatataagaagtaaaagtgaaatcttatgtagcatctttatctcattttggtttgtcagtataagtttctgatttcctttaagctctttacttttagaaacgtgaatttacaatcccttatccaaaactgctggggccagatgattttccaaattcagaactttttggatttctgaaaaatttacatatagactgtatcccattacatcccagcagcatctctctataat

SEQ ID NO: 13778 - DNA, 2007 bp, Homo sapiens
gaagaatgtgataaaggacatgatgattagagaaaaatgttgtttcaatgttaaatgtgctgaagctgataatactgtggttttataagagaataaccatattcttaggaaataatctaagaagtgtttaagaataaaggaccatgattctactgtgtattggttcaaaaaaagattgtgtgtgtgtgtgtgtgtgtgtgtgtagaaagaggtaataaaagcaaacagtaaaatggtatcagtaggtgaataggtaaatctgggtaaaagtatatggtgtattctttgtactattcttgtgactgttgtgtaaggtttaaattatttccaaataaaaattttaaacaatttttaaagtttaaaaagttaaaatatagcacatctcaagaattttcttagtcaaccaattataacagaccatactctaggatcatcagttttggattatttcctttgatttgttgatgaagcactaaactgaaagcaataggaaattttctttatagctgtagtttctacctattgaaggccattagcttctattaggagattgtattgaattggatacatttatttttcacaaacaaaacaaagtctctaattttcacttgtacttctagctagatgaaagagagaaagtggccatgtgcggtggctcacacctgtaatcccagcactttgggaggccaaggtgggtggatcacctgaggtccggagttccatgccagcctggctaccaaggtgaaaccccatctctactaaaaatacaaaaattagccgggcatggtggcgcatgcctgtaatcccagctacttgggaggctgaggcagaagaatcacttgaacccaggaagcagagattgcagtgagccgagattgcaccactgccctctagcctgggcaacagagactccgtctcaaaaagaaaaagaaagagagaaagtgaatttgttcatacatatcctcaaagatctttacagctgccttacatttcagattgttacctaggtcttagtttagtttactataaccttttgacccaaaagtaggaatattgccagctaggaatcagtaatgctattgcaataaaaagggaaagtgttttaagtaaagcgctctaatttggaagcattaactcaatttatatattttgttcttgagacaaaaaaattgagtgaagttaaagttggcaaacaagatcagttttggcttttgcactaacctcaagaaaaataactactgtaatatcaaatgtcagacatttagtctgcaattgctaggtgtttaaccaaaataaaaataattttatttgttgaagtttaaagaaagaaaatataaaaatcagaaacagaacttttgctcatggccatataacaataaatagaaagtttggtgatggtgagttttttctcctttaaaatttttcattatggcagggcacagtggctcatgcctgtaatcccagcactttgggatcgcttgatcccaggagtttgagaccagtctgggcaacatggagaaaccccatctgtaccaaaaatacaaaaattagctgggcatagtggcgcacacctgtgatccctgctactcgggaggctgaggcaggagaatggcgtgaacccgggaagcggagcttgcagtgagccgagattgcgccactgcagtccgcagtccggcctgggcgacagagcgagactccgtctcaaaaaaaaaaaaaaaaaaaaagaaagtaaggaaagagcctgtaatcccagcactttggcaggccaaggcaagaggactgcttgatcccagaatttcacaaccagcctgggcaacatagaccttatctcaaaaaaaaattaaaaagtagccaggtgtggcacacgcctgtagtcccagctacttgagaggctgaggtgggaggatcacttgaacttgggaagtcaaggctgcattgagctgtgatcaggcccctgtactccagcctgggtgacagtgagaccctgtctcaaaaacaaaacaaagc

SEQ ID NO: 13779 - DNA, 1320 bp, Homo sapiens
ttaatagattgaagatattattaaatacattctgcattaatattatatgtcctctttgaatccaagtggcaatacaatagaatttcattttataaataacacctttcaagcgaacaccacagggcacagtacataagaatcaaaatagaacacaaatgctgtaatcaaatgcagaccccaggaaggctgattaaaaaggcatgttgctactaagaacagccgacaggttaagtatagtgggtcatagcagaaaagccagcagaacagaagggcaaactaaaataaaatggacttgcctgcctgaatcacacggacttatgacattcctttgtcttcatctctttttgaactcaggaattgcaggggagaggggggtgtgcatgtgtgttggaggagagaactaaacatagggtcattaaatttatcctcagtactcacgcatagcacaaacaaaaggaaatcataaggataaccacctgcagctggcagagatgcctacagtgtgattgtgagacaacccaacatggcttgctttgctggataccactggctttaagaaaacacaactgtgaggtaacaagtagaccccttccataatagtgagaacagatagtgctgatggccagacataggtaaaaacggatgaatggtgagaaagatgttctgtggtcctgacctcagtatagtctactctctacaggactctcctcacccaattagcttttctgctctcagcctctcacaaccacgctccttgctaatgtcaggtgtttgtggttttaaactctacctgtaattatacagcaaaagcacctgttcccttcttaagggaattaggcaaaagtaggggaggtattttggaatatactctctccccatatgtaaaactagttctaacaatgatcacagtatcatagtttaccaaattggtcatttattgatgcttctctatttaatattaagagtagaacaatataggaccagaatcataagaaaaaatttctaaatatgtatttttctgaaaaacagtaacctatattttgctgggcacgtggctcatgcctgtaatcccagcactttgggaggccgaggcaggcggatcacgaggtcaggagttcaagaccagcctgaccaatatggtgaaaccctgtctctactaaaaatacaaaaattagctgggtgtggtggcacatgtctgtaatcccagctactcaagaggctgaggcaggagaattgcttgaacccggaaggcagaggttgcagtgagccaagattgcaccactgcactccagcctgggcaacagagcaagacgccatctc

SEQ ID NO: 13780 - DNA, 1459 bp, Homo sapiens
  CDS (325)..(1200)
cattattgcagccctagcagcactccacctcctattcttgcacgaaacgggatcaaacaaccccctaggaatcacctcccattccgataaaatcaccttccacccttactacacaatcaaagacgccctcggcttacttctcttccttctctccttaatgacattaacagccatcacagcacgcctatcggatgtgagaggagaagtcccgctgctcgggcactgtctatatacgcctaacacctacatatattttaaaaacattaaatataattaacaatcaaaagaaagaggagaaaggaagggaagcattactgggttactatgcacttgcgactgatttcttggctttttatcattttgaactttatggaatacatcggcagccaaaacgcctcccggggaaggcgccagcgaagaatgcatcctaacgttagtcaaggccgccaaggaggctgtgcaacatgctcagattacaatggatgtttgtcatgtaagcccagactattttttgctctggaaagaattggcatgaagcagattggagtatgtctctcttcatgtccaagtggatattatggaactcgatatccagatataaataagtgtacaaaatgcaaagctgactgtgatacctgtttcaacaaaaatttctgcacaaaatgtaaaagtggattttacttacaccttggaaagtgccttgacaattgcccagaagggttggaagccaacaaccatactatggagtgtgtcagtattgtgcactgtgaggtcagtgaatggaatccttggagtccatgcacgaagaagggaaaaacatgtggcttcaaaatagggactgaaacacgggtccgagaaataatacagcatccttcagcaaagggtaacctgtgtcccccaacaaatgagacaagaaagtgtacagtgcaaaggaagaagtgtcagaagggagaacgaggaaaaaaaggaagggagaggaaaagaaaaaaacctaataaaggagaaagtaaagaagcaatacctgacagcaaaagtctggaatccagcaaagaaatcccagagcaacgagaaaacaaacagcagcagaagaagcgaaaagtccaagataaacagaaatcggggattgaagtcaccctagctgaaggcctcaccagtgtttcacagaggacacagcccaccccttgcaggaggaggtatctctgagtgtgcagcacagaatcgcatgacccaccttaaccttcctgttgtcatggaaggatgcacggctgctctgtccactgtgattcctagccctctcaagatcactgctttctgaagaatttgcaatgactctggcttctggctgcttatctctggacacccgttctccaccagttgtacagttcatgtaatctacttggcttaattgattttccacttctctcttcctcttctaagatataaacattttaaatgattt

SEQ ID NO: 13781 - protein, 292 aa, Homo sapiens
MHLRLISWLFIILNFMEYIGSQNASRGRRQRRMHPNVSQGRQGGCATCSDYNGCLSCKPRLFFALERIGMKQIGVCLSSCPSGYYGTRYPDINKCTKCKADCDTCFNKNFCTKCKSGFYLHLGKCLDNCPEGLEANNHTMECVSIVHCEVSEWNPWSPCTKKGKTCGFKIGTETRVREIIQHPSAKGNLCPPTNETRKCTVQRKKCQKGERGKKGRERKRKKPNKGESKEAIPDSKSLESSKEIPEQRENKQQQKKRKVQDKQKSGIEVTLAEGLTSVSQRTQPTPCRRRYL

SEQ ID NO: 13782 - DNA, 1990 bp, Homo sapiens
gtgttaggtgcttttgcccaactttagactaatttaagtgttctgatcacatttaaggtaggctaggctaagctatgacgtttagtagtagatattttcaactcatgatgggtttgtcaggatgtaaccccatcataagtcaaagagcatctgtaaagacaaagtactttagaaaaaaatacagtgataggatgacaagatcagaaaagagattaagcataggtaggtttgctgtagtgctgttgaaatctaaccttctaaaaacggtctgccaaacctgcatctgctcctccttgtaaaagaagtgaaaggtaatataatattatcaagaatataaaattaaacagacgggaactcttgtaactcagtacacaaaatttctaaaacatggccttaaaggctaagcatgtctgtatttttcctttctgtcttgacagaaaaaatctaacctttctataggtcagactaagcaagttctattaattagcccaaacttcaataggacagattatctgagaatgttcttacttgtagggcactttaattgaaataagactaattctgactcctgattttacgggtgagaaagttgagatccaacaaaattaattaccataaagaacaaaaatctgattgccatttttgttcctttttcaatatacttagtagcccttcctcaaagaaagttttagcacaaaatgtattctcttacttggaattacttctgctgtttgtttctgtatgtaatctgaataaatataatgttaacactggaaaagttcctagaaattagctgttcttcatcttttttggatcaaagatcattttgagaattggataaaatgtgtttgctatgccctgtccatagactactgacttagatatgtaataatttctgacataggtggaaaaacccaagaccaggagatggtaattgtttgaagattcaaaagcaggtcaatgttagaagaaattagaatggtctactcatgcattacccataatagttaagttcttcatattataataatgagatagttttctttcctgtttgccttcccctcctctacactttacaatactagtatcagttttctgagttaatctgcatgttctctgctatatggagacttcttcagtgtatcctcatcatagttagaacttgatttttactcttatttacacatttagttttgccttaatgactgcattgttttccattttatgaaagtcccatttgtttaacctgtctccaatatagaagcttaaatttaaaatatatatgtatgttacattcagtactatggtaaacattctggtacataactgttctgcaagtatatgtgccagaaattcctagaaataaaattgctgggtgaaagaggaagcacaaaaaaaaatttctatgaattactgtttgccttccaaaaagattgaaccaatttgtacctaaccagcaaaacatacagttcatgtttctgtgtaacctcgccatttttaacccttcttttgtgatctttgcaagtctggtaactggaggtatcttacttttatttaatctgtatgtcattaagtattagtgcaattgagctcaatattgttaagatgtcagtttgccccagtgtgacatatatattcagtgtaatcatgatcaaaatcccagcatattttttgtagatattgacaagctaattctaaaacttatgtggaaaggcaagtgaactagaagagcccccaaaatttgaaatggaaaaagaggaacaaagttgagaattcacactacccaattttaatataaggctacataagtcaaaccagtggggtcctggccaaaggataaacatataattcagtgagacagaatagagagctcagaaatagacccacacaaatattatcaactgactgttggcagaagctaaaaagaaattccacaggaaaagggtagttttttcaataaatggtactggaacaatgaacagctttatgc

SEQ ID NO: 13783 - DNA, 3529 bp, Homo sapiens
  CDS (312)..(1865)
tccggatgctgagacaggagaatctcttgaacctggagggtggaagttgtagtgagccgagatcatgccactgcactccagcctgggtgacagaacaagactctgtctcaagaaaaaaaaaaagaaaaaaaaaagccaggtttggtggtgcacacctgtagtcccagctactctggaggctgaaatgggaggatcacttgagcccaggagtttgaggctgcagtgagctattattgcactactgcattccagcctgggtgacatatcaagacctgtttgggagaaaaaaaaaaaaagaaaatgcagacagaatgtgggactgggcaccaacaacatctctacaagaggtgaacaagacggtcctggtctttgccctcacgcagcacacggaccagggtggtagaccagagtgtgccctcagtgttatttccactaataacgacgtttcctcctctgtccttcgcagaaccaaatctgtttcttccatgtctgagtttgaaagcttgctcgactgttccccttaccttgctggcggagatgcccggggcaagaagctgcctaacaaccctgcctttggctttgtgagctccgagccaggggatccagagaaagacaccaaggagaagcctgggctctcgtcgagggactgcaaccacctgggtgccctggcctgccaggaccccccagggaggcagatgcagcgcagctacacggctcctgacaagacgggcatccgagtctactatagtcccccggtggcccggcgcctcggagtccctgtggttcatgacaaagagggcaagatcattatcgagcccggcttcctcttcaccacagccaagcccaaagagtcggccgaggctgatgggctggctgagagctcctatggtcggtggctctgcaacttctcacggcagcgcctggacggaggctcagcgggcagcccctcggcggccgggcctggcttcccagcggccctgcatgactttgagatgtcaggcaacatgagtgatgacatgaaggagatcaccaactgtgtgcgccaggccatgcgctccggctcactggagaggaaagtgaagagcacatccagccagacggtgggcctggccagtgtgggcacacagaccatccgcacggtcagcgtgggcctgcagaccgacccaccccgcagcagcctccatggcaaggcctggtcaccccgcagctcttcgctcgtgtctgtgcgcagcaagcagatctcctcctccctggacaaggtccattcgcgcatcgagcggccctgctgctcccccaagtatggctcaccaaagctccagaggcggtctgtgtccaagctggacagcagcaaggaccgcagcctgtggaacctgcaccagggcaagcagaacggctcggcctgggcccgctccaccaccacgcgggacagccctgtattgagaaacatcaacgatggactctccagcctcttcagtgtggtggagcactcagggagcacggagtctgtctggaaactaggcatgtctgagacgcgggccaagcccgagcctcccaagtacggcattgtgcaggaattcttccgtaatgtgtgtggccgggcaccgagccccacctcatcagcaggagaggagggcaccaagaagccagagcccctctccccagccagctaccatcagccagagggtgtggccaggatcctgaacaagaaggcagccaagttgggcagcagtgaggaggtcagactcaccatgctcccccaggtggggaaggatggtgtcctccgggacggagatggagccgtggtccttcccaatgaggtaggtgggtgggatctgtcctttctcttagtaggtggagttagtatataaggtccaagctcttttggtttttaagttcagagatatgggccgaggtgggtggatcgcctgagatcgggagttcaagaccatgttggccaggctggtctcgaactcccgacctcaagtgatccgcccaccttggcctcccaaagtgttaggattacaggcgtgagccaccgcgcctggccacatctctgtgtttaacatcaccttggtaccttgagattggccacagtgggaggatttacagcataaaaattggtaaacactacaaatcggggctcctcctatcactcctggaaaactaattgttaaacattagcgggcataccacttctccaccccatcaagacttcacacctaagtgctcacatttcctctgagaatctttcacaccccactcctgctatcagtttcttataagttaattagtaaaccttatttgaatgttagtgagcattatttgaatgtgttagaatgtgcataagttaactttgcagaaagggaaggaaatgtatttgaaggatggcatgttttataaaacccaagagtaggaacctgacaacctcagcagcttctccctgtcttcctctcctctctttaagcttcaccctctctgatatcatattcctcctttttctctgtttctctctctgttgcatttgcacaaggactgggtgggctgtcccagctctgactttacaacatcttccagttcaagcccctaggagagactgacacaaatccctgtctcccaattccacatttctgaaagaaggaaactctgattggtgcagctagaggcgagtgtaccccttggtccagtctatggctgggagtggtaccatgtggtctgctgtggggcacagagacatgagaagggctgtgtgtggaatgggctgtgatagactcaaacattctacttttctattattgtacgtttaggtggtttctagtttgtccctactgcaaataatgctgtggtgaacatcttggtgcaaaatcatttttttacatttcagactatttccttaggtataagttgcagaaatgagccactgtgcctggcagcagcacttttgatcattatttctgtttattggtaatagtaaaaaattagaaactacccagatgtacataaaaagtgaattggggccaggcacagtggctcacacctgcgatcccaccactttggaaggccgaggcgggcagatcactagaggtcaggagtttgagcctgaccaacatgctaaaatcccctctctactaaaaatacaaaaattagctaggcatggtggcacacgcttgtaatcttagctacttgggaggctgaggcacaagaatcacttgaatccgtgaggtggaggttgtagtgagtcaagatcgtgccactgcactccagcctggggaacagagcaagattctgtctaaaaaataaaaaaataaaaaaagcgaattgggtatataaatcagttatttctatctagtgaaatggtacagagacactaaaaaagaaggcgatcagccaggcatggtggctcatgcctttgggaggcatgagcacccaaaggtgctaattccagcagtttgggaggctgaggcaggaggatcgcttgagcccaggagttcaagaccagcctgagcaacatagtgagaccctgtctcaaacg

SEQ ID NO: 13784 - protein, 518 aa, Homo sapiens
MWDWAPTTSLQEVNKTVLVFALTQHTDQGGRPECALSVISTNNDVSSSVLRRTKSVSSMSEFESLLDCSPYLAGGDARGKKLPNNPAFGFVSSEPGDPEKDTKEKPGLSSRDCNHLGALACQDPPGRQMQRSYTAPDKTGIRVYYSPPVARRLGVPVVHDKEGKIIIEPGFLFTTAKPKESAEADGLAESSYGRWLCNFSRQRLDGGSAGSPSAAGPGFPAALHDFEMSGNMSDDMKEITNCVRQAMRSGSLERKVKSTSSQTVGLASVGTQTIRTVSVGLQTDPPRSSLHGKAWSPRSSSLVSVRSKQISSSLDKVHSRIERPCCSPKYGSPKLQRRSVSKLDSSKDRSLWNLHQGKQNGSAWARSTTTRDSPVLRNINDGLSSLFSVVEHSGSTESVWKLGMSETRAKPEPPKYGIVQEFFRNVCGRAPSPTSSAGEEGTKKPEPLSPASYHQPEGVARILNKKAAKLGSSEEVRLTMLPQVGKDGVLRDGDGAVVLPNEVGGWDLSFLLVGGVSI

SEQ ID NO: 13785 - DNA, 1621 bp, Homo sapiens
aatcatggactggctgtgcttcaggcactttggcggctcactataatttattattcatagagttatctttctgagactgtcagttttaagctattttaaaacagcattacctttactttagcaatacttcatttcttcttgtattccctagcttataaagaatttaatttcatttttaaaataagttattccgtaggatgatgttgaaatacatctgcattagcaacaccggcatactgcacaatagagtttaatttatatcatgatgactacatatttgaatcagactcgagaaacatagctaatgaccataaatctaatggaatatgtatcaatgtgttttcttccttaggtagatacaatcagtttaaatgctgcaagcacactgttagtttccggcaccaaagaaggcacagtgaatatttgggacctcacaacggccaccttaatgcaccagattccatgccattcagggattgtatgtgacactgcttttagcccaggtagatattatcctttttaaaacagataatactaggtaaattggaattttgaaataaacaatattgttaattttgaaataaacaataaaacttacaaagaaaaacactatttgctgataaaagaggttttgccaatggctaacactgctttatgccagggtacagtatacttgtggcatttgtatcaggtagaaaagccggactgggtatttttaattcctcattagagaaattaatttaagataaaaatgaactcataatcaaagggtcatctcatccttacatcttggaaagggctagaaccatttcaaggagaggatagtcattgcttcagtacaaggattttgaagaaaacgaatgtggagattaggccactggactcagaaataaaatccagaataacgtaaaccacattctgaagctgtcactcatatctgagtctcaccttgtgttgcagatagtcgccatgtcctcagcacaggaacagatggctgtcttaatgtcattgatgtgcagacaggaatgctcatctcctccatgacatcagatgagccccagaggtatagtttgtgagttactgggggcgaagacatttacagacatgttcatgatcacttcatttgggcttacattggccagttcaacatatccttccttcatgatgaagaaaggactatttctaaatcattcttgcaggtgctttgtctgggatggaaattccgttttatctggcagtcagtctggtgaactgctcgtttgggacctccttagagcaaaaatcagtgagagaatacagggccacacaggtaagcagctactgcagttgtcttgatctttgttctcaagataatgaactcaagcctgccttttccatcagggaacatactctttttgggcaaaaaacacccatggtttttccatgtcgtaaacatgtccctggagcctcttgattggccaggtgatctgcatctcgtaggttactcaggatttagatttatgttaacagccattggactccaaaaaggaagtctttaactttcatatggagaattaaaaaccatcgtaaagctattatttttcttaaaggtaatagcatgatcttaaatttttagaatagt

SEQ ID NO: 13786 - DNA, 1334 bp, Homo sapiens
  CDS (257)..(958)
tgctggtttgattgtgctgctgttagatgagctgctacagaagggttacggcttggggtctgggatttccctctttattgccaccaacatctgtgagaccattgtctggaaggcctttagtcccactaccattaacactggcagaggtactgagtttgagggtgcagtcatagctctgttccatttgttggccaccaggacggacaaagtccgagctttacgggaggctttttatcggcagaacttacccaatctcatgaacctcattgctacagtttttgtgtttgctgttgttatatatttccaaggatttcgcgttgatctgcccattaagtcggcccgttaccgaggacagtacagcagctaccccatcaaactcttctacacctccaacatccccatcatcctccagtcggccctggtgtccaacctgtatgttatttcccagatgctgtctgttcgatttagtggcaactttttagtaaatttactaggacagtgggccgatgtcagtgggggaggacccgcacgttcttacccagttggaggcctttgttactatctttctcctcctgagtccatgggcgccatctttgaggatcctgtccatgtcgttgtttatatcatcttcatgttggggtcatgtgcattcttctctaagacatggattgaagtgtctggttcctcagccaaagatgtagctaaacagctgaaagaacagcagatggtaatgaggggccaccgagatacctctatggttcatgagcttaataggtacatccccaccgcagctgcgtttggcggtttgtgcattggcgccctgtcagtgctggctgacttcctgggggccattggatctggcactggaattctgctagcagtcactattatttaccagtattttgaaatatttgttaaagaacaggccgaagttggtgggatgggtgctttgtttttctaaatgttcaaatatttcattttgtgcgtgtgaaagggaaaacactttgacggatcgtttttgtcagatgacactggtggctccccttttctcccctcacagtttcctgtttcgagtgctgactgacccgtttctgaaatgggcaccgagctaagtctgtgtgcagcattagtacccgctgccttaaaactcaagtttacattattcattaaaaaaagtacatctagtgttgcctgtaatgctggaaaccagtgtatctaccttgctgtgttaaatcatgacagtgagacggtgagatggattcgttttgcacacaacattcaaaacacttcatattgcccccacttgttgaaaaataaatgtagttcaaattgcc

SEQ ID NO: 13787 - protein, 234 aa, Homo sapiens; identical to SEQ ID NO: 11655

SEQ ID NO: 13788 - DNA, 2029 bp, Homo sapiens
aactgattcaggtagtttataatggtaatatactctcagatatcccaatatccaacactgattgcatgcacattatgataaacaattatttattcattaggcaaataaatattaatataatttctaatcttgaaaagcattattttaaaaataaaactattcataaacataagttgcatgtgaattatgaataaattataatttatttttgtaacccacaccttattttccaggaacataaatgtgtaagacaaaagcacagtatcagtggaatttctttccttttttaaaaattgatgcttaactttgtaaaactatatcccacattctgaatcctggagtaacttcagctctttagttggagaggctattaaaacattaagaaaagtaatgttgaaaggattctttaatgaaacccttagtgaatatgacagtgagtagtgaaaaataagtttattaagctacttcgcatcctagagtttcatgaaaccctatgaagttttaaataaaacatttatttactattaagtgtagttagtttttaaaatgttaatgaataaagaacttactctctcagtttatcttttacaatctttgaccagttaaaggggaaacaatttttacttaataaaatatttagaagtctgtagagtaggaatctttgaattggatgaaatttagtatttatctaattcatatactcaaacagccatcagatataagattcaggtcttactttctaaattatattattgtatgtatatatgaaatttcaaaaacaatttggtctctttccacttgagaatagtgcatgaagaaaataagtaattcaaatatatggatgtttagtccaaatttagaaatttccaccattttgtaaaattagttcattctacctgatgttaatatctcttttcttaaaaacttattcgagtatgtttttccttttatttttggtttatattataatacctatatacttatgaatctttgcaagtaaacacatagaatttaaactgaaaatgacaggagatagaaattgtactgtctatatattatgttagtgttttataaatagttgtgatgatgaagataatatgataataccagtgattcattagtctgaaaactagaaatgtcactttttcaggcatagcataagtcagatttagttgcagatttgtttggtatatgtaatttcatgtatacactgccctacattaatagaatggtactactatggtaaaaatattaaacatggtcatatttgaatttcaatctaatgactttttagaattcaactttatacagctaaatgcaaaactgaagatgattttaaagttggaacaattatagtttacatattatgctcatcatatgctcaccacaagaagagcatatagactcataattcagattttataatttcagcatagcagagtgagtatatgaattgatttggggatgacaaaaatccgattttgaatcccagcatatagcttaatattcaaccttctctatataattactctatatcagtttcaaatgggaaatataacagaatcttcctcataaggatttatagaaaaaaaatgagctgatgtatgtacagtctttaagatactagtataaatatatatatatatatatacaaacacatatgtaatataaatgtggttgtatgttgttaacttaattatccattaatgtgtagttttacaaacattattattacttctttttcttatgattttacaaccatgacatttcaacttttgatatgggcaactaacagtgacccatctgtcagtcagaagtcctcgtgggtccctctgtctgtctgctaaaagtcctcatgggtccgtctgtctgtgttctaaatgaagtacttcttttctggcctactgcaattttacaaattaccttgtagagattagatacatttgtcccctctagacagaggtaacacctgagtacagaccttaataaatggagtgtggtctgattgaatgaatatttccatgcaggc

SEQ ID NO: 13789 - DNA, 1670 bp, Homo sapiens
  CDS (258)..(1457)
gacacactcctctacaacaccagagactcccaaacacaaggccttatattgactcatttcagctcacatcctggcgactctcaagagagaaacctcagagtgactaaaatctccataatgagaagacatgtacattcagtatctattttggcattttccccaatacatctctgctcatctgactcttatcttggcatctgcttcctggtggatctgaactgacccataagccacgcttactggtgattttccagaagatgaatccggcctcggcgccccctccgctcccgccgcctgggcagcaagtgatccacgtcacgcaggacctagacacagacctcgaagccctcttcaactctgtcatgaatccgaagcctagctcgtggcggaagaagatcctgccggagtctttctttaaggagcctgattcgggctcgcactcgcgccagtccagcaccgactcgtcgggcggccacccggggcctcgactggctgggggtgcccagcatgtccgctcgcactcgtcgcccgcgtccctgcagctgggcaccggcgcgggtgctgcgggtagccccgcgcagcagcacgcgcacctccgccagcagtcctacgacgtgaccgacgagctgccactgcccccgggctgggagatgaccttcacggccactggccagaggtacttcctcaatcacatagaaaaaatcaccacatggcaagaccctaggaaggcgatgaatcagcctctgaatcatatgaacctccaccctgccgtcagttccacaccagtgcctcagaggtccatggcagtatcccagccaaatctcgtgatgaatcaccaacaccagcagcagatggcccccagtaccctgagccagcagaaccaccccactcagaacccacccgcagggctcatgagtatgcccaatgcgctgaccactcagcagcagcagcagcagaaactgcggcttcagagaatccagatggagagagaaaggattcgaatgcgccaagaggagctcatgaggcaggaagctgccctctgtcgacagctccccatggaagctgagactcttgccccagttcaggctgctgtcaacccacccacgatgaccccagacatgagatccatcactaataatagctcagatcctttcctcaatggagggccatatcattcgagggagcagagcactgacagtggcctggggttagggtgctacagtgtccccacaactccggaggacttcctcagcaatgtggatgagatggatacaggagaaaacgcaggacaaacacccatgaacatcaatccccaacagacccgtttccctgatttccttgactgtcttccaggaacaaacgttgacttaggaactttggaatctgaagacctgatccccctcttcaatgatgtagagtctgctctgaacaaaagtgagccctttctaacctggctgtaatcactaccattgtaacttggatgtagccatgaccttacatttcctgggcctcttggaaaaagtgatggagcagagcaagtctgcaggtgcaccacttcccgcctccatgactcgtgctccctcctttttatgttgccagtttaatcattgcctggttttgattgagagtaacttaagttaaacataaataaatattctattttcattttc

SEQ ID NO: 13790 - protein, 400 aa, Homo sapiens
MNPASAPPPLPPPGQQVIHVTQDLDTDLEALFNSVMNPKPSSWRKKILPESFFKEPDSGSHSRQSSTDSSGGHPGPRLAGGAQHVRSHSSPASLQLGTGAGAAGSPAQQHAHLRQQSYDVTDELPLPPGWEMTFTATGQRYFLNHIEKITTWQDPRKAMNQPLNHMNLHPAVSSTPVPQRSMAVSQPNLVMNHQHQQQMAPSTLSQQNHPTQNPPAGLMSMPNALTTQQQQQQKLRLQRIQMERERIRMRQEELMRQEAALCRQLPMEAETLAPVQAAVNPPTMTPDMRSITNNSSDPFLNGGPYHSREQSTDSGLGLGCYSVPTTPEDFLSNVDEMDTGENAGQTPMNINPQQTRFPDFLDCLPGTNVDLGTLESEDLIPLFNDVESALNKSEPFLTWL

SEQ ID NO: 13791 - DNA, 1736 bp, Homo sapiens
  CDS (267)..(1571)
aatcatttattttggaccaagaagatctggataacccagtgcttaaaacaacatcagagatattcttatcaagtactgcagaaggagcagacttacgcactgtggatccagagacacaggcacgactagaagcattgctagaagcagcaggaattggcaaattgtcaactgctgatggtaaagcttttgcagatcctgaggtactccggagactgacatcctcagttagttgtgcactggatgaagctgctgctgcactgacacggatgaaagcagaaaacagccacaatgcaggacaagtggacactcgcagtctagcagaagcttgttcagatggggatgttaatgctgttcgtaaattgctagatgaaggcagaagtgtaaatgaacatacagaagaaggagaaagcctgctgtgtttggcttgttcagcagggtattatgaattagcacaagtattgcttgctatgcatgctaatgttgaagatcgagggaataaaggagacataactcccctgatggcagcttccagtggaggttacttagatattgtgaaattattacttcttcatgatgctgatgtcaactcccagtctgcaacaggaaacactgcgctaacttatgcatgtgctggaggatttgttgacattgttaaagtgctccttaatgaaggtgcaaatatagaagatcataatgaaaatggacatactcccttaatggaagcagccagtgcaggtcatgtggaagttgcaagagttcttttagatcatggtgcaggcatcaacactcattctaatgaattcaaagaaagtgctctaacacttgcctgctacaaaggccatttggatatggttcgctttctacttgaagctggtgcagatcaagagcacaagacagatgagatgcacactgccttaatggaggcctgcatggatggacatgtagaggtggcacgtttgcttttggatagtggtgctcaagtgaacatgcctgcagattcatttgaatctccattgacgctagctgcctgtggaggacatgttgaattggcagctctacttattgaaaggggagcaaatcttgaagaagttaatgatgaaggatacactcccttgatggaagctgcccgggaaggacatgaagaaatggtggcactactcttagcacaaggagcaaatataaatgcccagacagaagaaactcaagaaactgctcttactttggcttgctgtggaggattttctgaagttgcagactttcttattaaggcaggggctgatatagaacttggctgctccacacctctgatggaggcatctcaggagggacacctggaattggttaaatatttgctggcttctggcgctaatgtgcatgctacaacagcaacaggagacacagccttaacctatgcttgtgaaaatggacatacggatgttgcagatgttttacttcaagcaggggctgatttagacaagcaggaggacatgaagactattttggagggcatagatccggccaagcatcaggtgagggtggcctttgatgcttgtaagctactacgtaaagaatagatgttgtaggtaaccagaactctggatatctgaattccagccaagaagttccaggaccctgctgggtgacaaaggaaatcctcttcaattgaaaaagattatgaagtcccaataaaaagagatttgtattgctggtaaaaaaaaaaaaaaaaaaaaaaaaac

SEQ ID NO: 13792 - protein, 435 aa, Homo sapiens
MKAENSHNAGQVDTRSLAEACSDGDVNAVRKLLDEGRSVNEHTEEGESLLCLACSAGYYELAQVLLAMHANVEDRGNKGDITPLMAASSGGYLDIVKLLLLHDADVNSQSATGNTALTYACAGGFVDIVKVLLNEGANIEDHNENGHTPLMEAASAGHVEVARVLLDHGAGINTHSNEFKESALTLACYKGHLDMVRFLLEAGADQEHKTDEMHTALMEACMDGHVEVARLLLDSGAQVNMPADSFESPLTLAACGGHVELAALLIERGANLEEVNDEGYTPLMEAAREGHEEMVALLLAQGANINAQTEETQETALTLACCGGFSEVADFLIKAGADIELGCSTPLMEASQEGHLELVKYLLASGANVHATTATGDTALTYACENGHTDVADVLLQAGADLDKQEDMKTILEGIDPAKHQVRVAFDACKLLRKE

SEQ ID NO: 13793 - DNA, 1405 bp, Homo sapiens
  CDS (746)..(1249)
tctacagtctgtggagacaggtgagcgacgaacttctgagacaggtgtgggtgcgagggtcgggagggtcatgggattgggaccgaggtgtgaggagggaatctgcaattccttgctacacagagcgctggcaacttctgacaggctgtttctggggtatgggctgcctcgggttgttgctgttacaaggaaagaaaagagttcccctgcccaccgcctcccagccactgggctacctcctggcaggaaatttgcaaactgagtttaacaagttaggatcagcagagggtagaggagggccctggcagatgtggggtctagaagaggacaggagttatcagggcctccggccattgtgctgggcctttgcctgtacaattgtttctcaagcagttgtgtccctgtggctttggtgcgcctgtgtgcactttctccctccacctggagcatgggctaacaccggaggaaaggaaaagacagagtcagacagggtaagtggggctccctcccctcttctctctaacggggctggattgagggcctctggctggggaggtgggggtggagatccagtaggagcaataacagaggaagggcagggcctgccccatcacctgaattccagagatgccagtgtgcactgaagccccaggcagggcgtgcccaggaccggatcctggatggtggtaagggacaaagctggaagggagactacagggaaggagaaaggaaagaaggcagagccatgacacagtcaacttacagaatggctgggagtcaaagctcctgggctggtttcctggctattccacacactccaagacatagagagaatttcggaactggaggggactctacagatgatttatttgagattgaagaacctagaaaccaaacaaagaaatatcatatggttactttggtatctgacacagccatgacaccaattgctagtgtagacacaatagctgtgtgtctttttgcaggagcctggggaggggccatggtgccaatgcacttactggggagactggagaagccgcttctcctcctgtgctgcgcctccttcctactggggctggctttgctgggcataaagacggacatcacccccgttgcttatttctttctcacattgggtggcttcttcttgtttgcctatctcctggtccggtttctggaatgggggcttcggtcccagctccaatcaatgcagactgagagcccagggccctcaggcaatgcacggtgagttaagggtgggcatcgtaagaggaatacaccttgggcccatcctccctctctccctgtagtctctgaggcagagagtctctggtttcctgtcattggcatcagcgggaggaggggtcagaggccaacagaggatcttttgcccacagcagac

SEQ ID NO: 13794 - protein, 168 aa, Homo sapiens [sequence omitted]

SEQ ID NO: 13795 - DNA, 1737 bp, Homo sapiens
catgggtcttctgggtctgttagaataattaccaagtatttggatagttaaaagttgcaacgctagggtcttttatacttgctctaggacatagttgtcaggtatgaaaaatttaccatggcaagatccatttgttgtattaatcactacctttcccttagagttgatttatggttcagagggatattctggaaaatgcttagatcaaacaagaccacattcattcatggagaaagagtggaatgcaggttcgtagtaaagaaaaataatttccagggctcctgggaaaaagctttggtcacttaaatgcccttgggctttctgtaagtaaacatctgcagtcctctctattggttttctagcatatttcacacaaaagcaggggagcagagtagtgttaattaccctgagccaagtcagtattaatctcaggtctccattgttgtttaagattgatggataaagatgtgactgcccagaactacctttgttctcttactggaaagatgtggacttggaggggcaatctggagttaatagtcagaactagattgtatcctccttactgggatgtgagctctgtcacctgagtaaccaatttctttgtaaagggatgtaatctcaaatcttagctttcaagctgccaggcttggtttgcttttatatccccaaatggaaccggaaccttctttattccaatggtacattgtggtagactgtattcggcaaccttttgtatgaaagggttaacatagatctgtctcatcagtgtctttctgtttaaggatagcataaaagtgctgattgttaacttcacttggtcctatgcttattctttatttttactgtaggatttactttttcttttcctgtgtctttctctctccaaaaaaaaaaaaaaaataaaatctaccttgatgtgtcaaagagataaagaagatgttataaacatcaaacaaaagttcacgtttctgtttctttgtgcccccggtcccccttttaaaaataggcctcacagcatcaggcatttgccagtgcagcagttttgaagcataggatttttccccttcctgatgtataaatgccagctctcttcccccctttgcagacacaggcattttcctcttttgagttttagttttatgatagcacattacaaagagtttgacagatcctttaagatgaagatctgttgatgtatttcctgtttatggtggctcccagcttcactggtgatgaggacacaggcgcctgaaacccagaggcagggtggatctgcaccacttctctgaccctgccagggctgaccttcatcattctaagggaactttttttctttttttccccccctaagcagtggttctcaatttggggctattttactccagaaggggcttttggcaatgtttggagacatttttggttgttacagcaagacttggagctaccagcctctagtgggtagaggccaaggatgctgctgaacattctacaatgcactggactgtccccacaaaagaatgttctgtcctgaattgttgatagtgccaaggttaagaaaccctcccataagggatgttttctaggcttaaacagtggcctgtatgtgtctttctccttatttctttatttcaagaaaagaaaaacgctgccaaagcaaaagccatgcagtatgttcataataaattaccttttaaaacaaatcccaggcctactcttcccgaaaatgggaaagac

SEQ ID NO: 13796 - DNA, 2199 bp, Homo sapiens
ggcctttttttttttttttttcaaatgcccctttcattatgaaactcttttttaacttttaatttaagttcaggggtatgtgtgcagatttgttacataggtaaacttgtgtcatggggctttgttgtacaggttgtttcatcacccaggtattattttattttcattttagttttttaaatttctttttagaggcggggtctcactgtgttttgcccaggctggtctcgaactcctcctggtctcaagcaatcctctcgcctctgcctccccaagtgttgggattataggcatgagctactgcactcagcccaccatttgttttaaaaagggtggatcctatttgtataaaaagccatgtgcattttctgtgtacttgtctacacattaatttccaggctgggcgtggtggctcacgcttgtaatcccagcactttgggaggccaaggggaggcagatcatgaggttaggagatcgaaaccatcctggctaacacggtgaaaccccgtctctactaaaaatacaaaaacaaaattagcagggtgttgtggcgggcgcctgtagtcccagctactcaggaggctgaggcaggagaatggcatgaacccgggaggtggagcttgcagtgagctgagattgcgccactgccctccagcctggacaacagagtgaggctccgtcttaaaggaaaaaaatttctggaatgatgtccaataaatcagagagagggactagaagactaatgaggacagaagcttttattcttaacacctatattttgctaccatttatattgtcatcatatgcatataacattttaacatttaaaaactagtttaaacagaaatggttgccctggaatgtggcctgtgttctttcaagggaggccagcagtttctacagtggctgagatggtaccttcatctcacacacctacgcaggcgtgcatttgtgctttgatgtggttgtcccttgaagaaggaagcagttctctttttcttttttcccttttccattataggatcagtcacttcttggggcattagtagtctcatttccagtggcatcttcccttggcaaaaggaatcccagataggacctcatctttctaaacaaatgctgttttgggtcctaaccatcccatgtttgctttgaatatgtttaagttgcctggaattatcaacaaaagaattaaatttattgtaggtcagggcatcttttgactcattgtataaaacattcactttaaatgtataccgaaatgtcctttaggctgggattacaggcatgagccatgacacccggcctgtaattttctttaaagactgccactgggtggaacccactgggcccagtgagaactacggaaaagagacccattcttgccctcattgttagtgtccacatccggatttacctaaaccccacccaggtggcatttgcatagtaatgaaaaaccggtattttctagctgtgaatcacacttcaaatcctgagcggctgactgtcaggggtgcgtcaggcctgcttgctgggagaatggacgagctggttgtggagcgggcgggtcccgccacccgtgggctcagcactggactgctcccagaacattaaaggtctggctgatgttccatgccacatctggacatgaagacccatgtctgcccttctgtagaagggccaaagaagaaaggaggcatcacatgtttctgctgtggggggcccttccgagcagcagacaggagcaaggtacaggagtggcctgattctggggtttccctgccccccctggggtccctaaactgctgtgtgatatgtttctaactatctggacagctcacccaagagtcagttgttcccagtcgcttcttgctgaggataagccaaaagagggccgggggccaatctggtttctttcaagtgaaattatgcttctcaagcagagaatgattgcccacagcagttaaaccttgtttaatggtaattaaattgcttttcttcactttgaaaaatctcttaattttctgtacaaaggcaggaagcatttttctttgattctacaggatgtttctaagtatggtgtaatcagttcatcttaccttgccgggctctgaaagaatgagtgtgtgggatcagatttagaaatgcctcaaaggttagaaagccgagtgctgccgattaactcaagctcagatgacc

SEQ ID NO: 13797 - DNA, 2131 bp, Homo sapiens
tctgtttgttacagcttagatacactactctcttctaccagtcattacttccttggccatgttccgttggaactcagggctcctgcttacctcaattcttcacttctgctgaactctgtgttactgctgcctagaaaagggtgtatgtggttaggagtaataggtgagggtgaattcctgggggacatactgagttagctgcgggatcctgatatttggctgagagtctaagaaattgtttcctaggtaacttggtataattactctttggtcatgctaattttaaatgtcagatgaacaaatcaagagtaaattgggaaagttccataggaagcctaagcactcatcttaaccttacttagtcttctcttaactggacttttctagcccaggaagaggttaggatagttgttcttcagagtttggtctacctttaagttttcatgattcaatactcttaagatactttgttttaaaattactgaaagcctgattaaaaggagatgtgagaagaaagaatatttgtagaatggtgtttccagcagtgagtcagaatctaaaatatgcagagaagggaaatcagatgcatcttcaaaatactggatttgatgtgaaagattttctgtttgggtttgttctacagttatccgtttgcaaagaacttcagctgccacctagtgatttccactggagtgccgacttagtggctctttcttactcttctccctcaggtgaagcacattctactcaggtaggtgacttaaaagcttatttaaataaactttttacaacaaggacatcctaaagttagaggaatcatcctctttgattttgagatataactataaacctatagaaatcaagatattgtggtattggcaaagagagctacacacataggtcagtgtaacagaatagagaatacagttatagatccacataaaggcacccatttggtctttgatgaaggtgcaaaagcaattcagaaaggatggtttttgacgatgatttttctctgtatcaatgcatagtgtaggaacatttgtaattttaaaattacaaatgaccaatttgtattgtattgtattgaattttcccttaaacctcataccttgttacaaagattaatttgaaatgggtcatagatctaaatgtaaaacagtaaaacttttagaagaaaacagaagaaaatcatcatgacctgagattagacagagttcttggaaatcaccaaaagcatgatccataaaagaaaagtttgataaaattaataataaaattaaaataaaataaaaatttaaagcgttgctttgccaaagacaagaaaatgaagagacaagttacagagtaagaagaatttgcaaatcatgtatccagcaaaggacttgtatccagaatattttttaaaattctaaacttgataagaaaacaatgcagtttaaaaacaggggctaggacttgaacagacacttagtgaggatataaggatggcacataagcacatgaagagatgttcagcatcattagccattagaaaaatgcaaaccaaaacactggtgagttcttatttctgatttttcttgatcaaatagtaaattgtcctgtttctttgtatcattgccatcagactgctggtttttgggttcctcttttattgtgattgctgattgttgtgatcttgttttgaggctgttgctgtcatggttgccaccagagaaggatctatccgctattggccaagccttgctggtgaagatacctacacagaggcttttgtagattcgggaggtgataagacttacagtttcctaacagcagtgcaggttcacaaagaaacaaaatctggctgagcatggtggctcatgcgtgcagtctcaccactttgaatggtcttgaactcctggtctcaagcagtcttcccgcttcggcctcccaaagtgctgagattatagacatgagccactgctccggccaggtctggtggactcttaagcacctaaagctagatgagcttaaatctcatctaagccaatatttataaaatgtatttgaccacaacatatggtaaaagctgatgttttatattctgtctttcaaaaatgttgagatctgcaaaatgacccgctgtttg

SEQ ID NO: 13798 - DNA, 3314 bp, Homo sapiens
aaaaaaaaatgtatttgaggcctgcatgatctcaactggctgtaaatacctttcagatttcctgggttattgcttagtcttctactgttcctttccgtctttatctgaccaattcagagtcctgcttcacaaatgccaaaccattttagtttctgtataatggaggcatttttttcctctttaggtcacatgtctttcacagagatttttgtcatagatgtcttgaaataggaactgtaaaagacattatttttgaacgtttgaacattgctttttattttctcaaaggagtttgcacatgatcaacagatatattcatcaaacccacctacgagatgagaaacccagactcaaaagttgaggggaggagaagtgctctactttgagaagaaacaacagaaattaagctcaaatgtcttataaaatgaatcctgaataatccttttacattcaaacattttgacagtttttgggcatgagaggaggagtgaggagtttatttggagcctaaattatctccaaattgtttgtttgctattaaagggctgaaagagaagtaagcaaaacaaaaataaaattccactggctctccactatggatgagaagttgcacaaaggcctagctgtttcgttggtggagagctacatggctgcccaagttttgcaatagaacttagagaatggccttatatgggaattaaggatgggaagcaaaatgtgtttttgaggacttaaacagacactccaggtggtgcagacaggtgcagacagcattgacataatgtcacctgcatatgtacatggcttaggccttttaaagcccatttacctgtgctattgtgttgaattttagctctaaaataggttgtgatttgatcttgttaccaattcaaaaaatcagttaggcatacctagtaggtcatcttgtctctgcttgaaagtttccagtgatggagagctttctgttggccaggtaatgtattttgtggctggacagcttttattgtttggaaattattctgtgtatagagttcaaatatattttattgaaacttctatctactggtttcattgtaactgctacataataatttttcttcctcatccacacaataacttcaaccatttgaaagcagttatcagaactcccttaaatcttcacatctccaagctaaacacctctcattttctcaaccaagcctttattaatatggtcttcatctcctcctagctctgttcaccttctcctagaatagatttctggcatctccatgaccctaagcaatcaaatcttctggtagctccatgactttaataacagtatattaaatgtttcctgaccaatatagggtgattgttagcagcctctattgagattttttatttcaattactgccatctaggattatgatgactattttagcaaccattgttagctcaaaaaaagcttgtggtcaaatgacattaacagtcccttttccataacaactgtgactcatttctcctcatttaattccttctcatcttcttaagaacgagcaacctacatgaaaaatttcaagggttagaacagatcctgtcacctcaatttaaagtagtactagataacatttactggccactgactaaaggccagtcattagaactgttctgagtaattttcctacaataactcactaaatgctcataataacccttgggggtaggttctatgaatgctccatttgaaagatgtgcaaatggaagcgtggagatgtttggtaacttgcttaaattcacacaatttgtaactgagagaggtgagatgcaaacacaggctcttcagcccatacccttcaccctgctttctagctggtgcacatagttagtagtcaacaggaattgaacctcggtctcctggctgatagatcaatgttctctcctcaccccggtgtggccttcctgaagtggtaacaagtctttcacttttgaactttatataagctgttttgttttgcttttatacaaactgagattcatgacccattatgaattcaatttagtgggtcaatacaagcaagagaaaggaaaaaagaaaagagggagggagagagagaaatatcaaaagacatcatacagagtaagtgcaaattttgtttctttaaactcttattttaacatgtgtaaaatgcacacaaaaatacctatttgtgtgtgtgtgtacagaatatgacgaaaagtgtatttcttatctctctcatacggtcaaaacagtttgagagttgctgcctatctattgtatataccaaactttgtccatttctttatgctaaggttaaacagggattggaggggacactttagttttaaaactccactcttgatctgcagccagtaagagcacaacttgcaactaagcagaaagttcaagcaaagaaccttagagtgaaaagagatgactgagggctgaaataaaaaacaaaaagctattccaatttcatttgagtttccattcagcagcctcatagattcctaactcatcacctcaagcaggtcacttcccctctctccaagttgttcgccagaaccagccaaagaatgcaggaaatggtactctctttttctgagtgaatcttggcaaaatgacttcaatttagccagcagtgcaggaagcgattgtaaatataaatttgttttatatgctcctcccaaaggagacttgcagtttgcctccctagtaaacagggatgtgtattcctgatcatcttacttggatcattttttttttcacccttctatgtagcaatgtccttaattgaggtagtaatattgggcttgttggattgtcatgaagtttaatttgaatgttaaaggacccccttggtgctcagataaaaatcattatataaggaggaaaagaaaattatgttgactaattataggtatatagaattcccattcattatgtccacaatgatatgtatctgaatatgatatgttgtagactgaaaatagtaactctccctggttatttccacagtcactttaggcacttgggaaaatgcattctcccattttattcaattaaagtatgtgtaggaatgaggcaagtacagtacaaaaatctccaggaatcaacaaaggaccaccaagagaatttaaatggatttcagccattgtaaacagaagacaatttaagtccaattcactgttgaaaacttaattgaggctgggcaccgtggctgctttgggaggctgactcaggaggattgctcaaggccaggagttcaaaagcagcctgagcaacatagcgagaccctatctctgcaaaactt

SEQ ID NO: 13799 - DNA, 2225 bp, Homo sapiens
attcagccttcaaagggagtgaaattctgatacatgctacaacatggatgaaccttgagaatattacatgaaataagccaggagcaggacacatattttatgattccacatatactagggtacccagaatggtcaaattcatacagacagaaactggaatagtagttaccagggactgtttggtggtgttcggggtgggagtgggtgttaagtttctgtttgggaagatgaaaatgttctggagacgtatagtggtgatagttgcacagaaatgtggatgtacttaaagacactgcattatacttgtaaaatggttaaaatagtaagtttgatgctgcgtatactttaccagggtaaaaacaatgcaagagaaagattgccagtgcatgctgaaaattaagattactaggaggatatttttcactcttgagactaatgacaacaattgaatgttgggaagcacagtatgtgggagtgtgtaagtgggtcttgctagtaggggatgtcactttagcaaaatctgttggaagttgcttatcttttgtgtgtattaacatgaagattttctcagttgaataaaacaagttaaagaatactttctttgttgtaaaacagcatatttatatacatttataaatgcattaagttctagaaggatacatgagtaaaaatatgaatttaaaaattaaagtcacagatttaggtgttgtcacctacctaccttatggttttttcctactacacttacatacctcttcataatctgctctatgtttcccatgtaacaccactattacaaaatagataaagcaggctgcctttgtagcagtaatttgagtttcatgtgtccccatgtcctgctcagtattacagcaactgtcaaaacacaacaggaaagtaatgattagaagtgcacttattaccagtatcattttagatcttctgtatattgaaaaggatttgagataccagaaaaatataggtaagaaataaagtttgactttagtttatgctctttacagtagtttgcaagggtacctataacaagagttgaagtgataatattttaaaccctagaaagaggttatagcaacagatttttatgcgtctagtctttggtaggctgccctgccccagcagaatttggaaatacaagtgaataatttataattataaagcattaagaagttttgtctcttaaatacatagaatttaaaatcaaagggtgatatttacagcacatatcaaataattggtcagatatacaagtcgcagaaatgtcaaatgggagagtgaaggaaagtttaaaatagcttaggaagagatcacaaaatatcctttgaaagatcataggcacacacaagtcaacactagagctaaaaccagatattattccattactaaagagtgattttgaaagaccatttaaagtaggagtatccaatcttttggcttccctgggccacattggaagaagaagaattgtcttggtccacacgtaaaataaactaatgatagctgatgagcttttaaaaaaattgcatgttttaagaaaatttacaaatttgtgtcgagccacattcaaagctgtcctaggcttcatgtggcccgtggcccatgggttggacgagcttgatctatagtagtctaggtttccttaatgcttggaaaagtttgcattgaagcagtgagagtagggctgatatattcttcaagcgcagaagaaagcattgaactgactttttaatgaaaaacactacattctctcacgtaaattcattctttgtgtttagctcttttcaaagatgtggattttctgtttatgttcagtttgttgcaaacatgtaaaacatgttattaagcatattagcctcatatcctaacaaattagacaaaaaggtttcagacaaatgaagttgttaattaaaattatgtatttgtaggccaggtgcggtagctcacgcctgtaatcccagcactttgggagactgaagcaggtggatccacgaggtcaggagatcgagaccatcctggctagcacggtgaaaaccccatctctactaaaaatacaaaaaattagccggtcgaggtggcaggcgcctgtagtcccagctactcgggaggctgaggcaggagaatggcgtgaacccgggaggcagatcttgcagttagctgagattgcaccactgcgctccagcctgggtgacagagcaagactccgtctc

SEQ ID NO: 13800 - DNA, 1713 bp, Homo sapiens
  CDS (822)..(1175)
ggcctttttttttttttttttttctggagacggactctcgctctgttgccaggctgaagtgcagtcatgtgatctcagctcactgcaacctccgcctcccgggttcaagcaattctcctgcctcagcctcttgagtaactgggattacaggcgtgcgccaccacgcccggctaattgttttatttttagtagagatggggtttcaccatgttggccaggatggtctcaaactcctgaccttgtgatccgcccacctcggcctcccaaagtgctgggattacaggcgtgagccaccgtgcctggcctctccaccttttttgcatctgtcaatgcccctagctctctagcagcagctgtgcaaacaccaggagggcccaaaggggtcttggtaagacacttttcagggcactgcggcagtgctatggtcccgtggtcaggagacctgcagcctgtcagtaactgacagtgtgaccttgagcaagatcaactctatggcttgcctcctcttatcaaatggcacaactatttcagcttagaaggttgttgtgaggttacaatgaaaaagcataatgactttttaaaaaatgactcaacttgataaaaatacaaaatactgcctttattcaaaatgaggcagagatgaataaggagggaattttgtcccagttaaatatttattccatttaaactactcaaagtccagttgccccaataattaataattttcacttccccaaaccaccaagcaaggtgcactgtcattctcacctgcgggacctatgtttcccattccgatgcctttattcaggtgattggcatcaatgggttgccctcctggtcctaaccccatgccaataccaccaaggccatctggaaagaaaagagaaagaagcttagttttcccctatttagcaaaccttgaccctcaaaggaaaagagtgtttagtgagttgcagctatccacttcagcctacccacccccacccaccagtgacctcagggcccaatgcaaaattcaacatcggcacacttggaaacagagccttgttccggcgtttgggatatgtgtgtatacaacaaaggcggctgaaaaccaacacgggaaagttaacaacccccacactaagattcttgagagcctatttgtttcactaacccatggactgagaactgtctgatcaaaaaaggtgactcaagacatcaggtggcaagcagcacaaatgtgcccaatccctagtagcccaaaggatgtttctcatgaaaaaacacgttacaaaccagccaatcaacatcctgggtgtccactactctctgaatctgggtggttttagtaacaatgaagctaatgtatgtattcaaagaacctatcttccttcccccaaagcttcccaacccacaactggatacccagcccacactcaactccatgccctaccaacacagacagggacacagaaatacaggctggtctctggaaacagccaaaagagctgacacttgcaatatctggggtaaccaccatctgaggcttaaactacaaccaggtaagcttttaaaaatcgtaacaagggcaggcgcagtggctcacgcctgaaatcccagctacttgggaggctgaggcacaagaatggcttgaacctgggagtcaggcattgcagggagccgagatcgcaccagtgcactccagcctgggcaagagtgagactttgtctc

SEQ ID NO: 13801 - protein, 118 aa, Homo sapiens
MGCPPGPNPMPIPPRPSGKKRERSLVFPYLANLDPQRKRVFSELQLSTSAYPPPPTSDLRAQCKIQHRHTWKQSLVPAFGICVYTTKAAENQHGKVNNPHTKILESLFVSLTHGLRTV

SEQ ID NO: 13802 - DNA, 1427 bp, Homo sapiens
agccaccgctcccctcccccgcccgacccctgtgcgacccccgcggggcgcggggtctgagccttgcgggcctccgatcccctcctcagcgttcgcgcggccgagcctgcagaaacagagctggggagaaagcgctctggaggccgctgtgcaccccttcctgcagggctcagactggcggtgtgatgtgggtttattgccttggcctgaggcaggtggcggctgcttctctcggagttttcaaagacagggaaagtgatgccgagtggctgaaggtcactgaggacagtgccgggagatacgtgaagattccttcccagggaaggaatctggaattcccacgcatgagtagagggctctagagagacccgcgcgctggcccttcccgaaaccccttggctccagtgcaccatgtgagtccctggccgcgctcggtgtctctccttcggcccagatttggggatgggaattcctaatggagaaatcgctcatttgcatagtcagtaccctcacgcctcctaagtgtagcctcattatcgacacagacgcctgcagagtcgtttctctataatgcaaattttgcaggatatttttgaacaacgtttttgagttatcatagtaaatgaaaaggcaattactagttatttaggaagaaggaaatggtttgaagtagagataacttttttacctctggggggaaaaaaaggcgaatgacttcagattccatggcaggtcaaaatcagaactggtaagatttctgcatatctggtgagtatccacataaataatcattttcctgaaaattacactctccttatttaatctgtatttttgcataaaaatgtgagattatacctgggtcataaatgcactgctgtccatttatttctgaagtttattgcatagccatggataatttgagttttatattcaatagcagaaactatttttctaaccacgtaagcagtcagaattgatttcagaagaaatgcgcagcaataaaagttaaggcttatttaataacagtttggggccaatttggtccccctggaaactatctttgacattgacaatccgaagagcaaaagtttaagaaaggatctaatacttcaaaatttagcttgtgggccggacgcggtggttcacgtctgtaatcccagcactttgggaggctgaggcgggcggatcacctgaggtcgagagttccagaccagcctgaccaacatggagaaacactgtctctactaaaaatacaaaattagccgggcgtggtggtgcatgcctgtaatcccagctactcgggaggctaaggcaggagaatggcttgaacctgggaggcggaggttgcagagagccgagattgcgccattgcactccagcctgggcaacaagagcaaaactctgcctcagaaaaaaaaaaaaaaaag

SEQ ID NO: 13803 - DNA, 1646 bp, Homo sapiens
agatggtactacgtgtgcatgtgccaccatgcctggctaatttatttttaagatggagtcttgctatgttgcccaggctggttttgagctcctggcctcaagcaatcttcctgagacaggaatcccaaagtgctgggattacaggtgtgagccactgtgcccagccaaatattagaacttttaaattcatttagtatgtaagcttactgccaagcatgaaagaatcactttgaaggccagtaatgttttaaaggtctggaagattctcttgagggctaggaagcattatgtgctaggttcttgaaccaggagaaaaggggtatcactaagaagaagggaaggaatcctggtatgcaaaatagcttgggcgctatccttgcacatttgacaagtttagtgaagtactattgaactgttcagtaaagtatctgttgcctatagataaaatgtcttttgtagatacttatatatctacctacctatagatatctatatatctgtatctatatatcccttaaagctaagctaatttccttaaccttttctctgttgatatttgtttggtagcctttatctgattctagttaataactcgtaccctgtcatttttttaaaaataccctttgtttttgtaatgtgttctttcattcttcttcccaattcagttttggtacgttcctgttacgtaaatctaatctggtgagcagagactttcttaggattatgccacttggtgaggcaatcacagggtcttagccctgaaggcgcccatactgactttatcagtttattctagggagatcaggtttggggcactaacttaatactaacaaactcctaagattaatttaattttatttatttgtttgagacggagtcacccagggtggagtgcagtggcgtgatcttggctcactgcaacctctgcctccctggttcaaacgattcttgtgcctcagcctcctgaggctgggactacaggcgcatgtcaccacgtctggcttatttttgtagttttagtagagacaaggtttcaccatgttggccgggctggtcttgaactacctcaggtcccaccttggcctcctaaaatgctagaattacacagacgggagctaccatgcctagccaaaactcctaagatttacttacttacttactttatttatttatttgagacggagtctcgctctgtcccctaggctggaatgcagtggtgtaatctcagctcactgcaacatctgcctcctgggttcacctgtctctgcctctcagatagctgggattgcaggtgcatgccaccatgcccgactaatttttgtatttttagtagagatggggtttcaccatgttggccaggctggtctcgcactcctgacctcaagtgatccacccgcctcggccccccagaatgctgggattacaggtgtgagccactgtgcccggccctaagattaattttcaaacaatgtgcatcagtatgttagaaatacctagtgttagccgggtgtggttgtgtgtgcctatagtcccaactactctggaggctgacttgggaggattgcttgaggccaggagttcaggggcgcagtgaactatgattacaccactgccccaacctgggtgacagtgggagaccctgtctt

SEQ ID NO: 13804 - DNA, 1998 bp, Homo sapiens
ttgcagatggcgtctccctcgctggagcggccagaaaaaggcgctggaaaaagtgaatttcgtaaccagaagccgaagccggagaaccaaggtgatgttatgtgggaaccgaagcctggggtttgtgtacgttgagttgcgatgtttttttctttcgttcctcgtggacttataaaaccacctggagcctgtactgtgtagttgagtacctgaataatcgctgataagattttggctgggcccacaggaacggctggccgatatggtgccacccaggtgttcctaattcattgcttttgctaaagggtccccaaagcgaagctgttgcggattacgtcttttgtaaaaggatgagtattaagaaaatgcctagggcgacgcagaaccttgtaagcctgcgggtggctgaaagtcactgacggaatgaggaatagggtgaggtgggaataggtagtcatgatatacaagagtggaccctgataatggggtgaggtatggggaaaggagctatccgacatgtccttagctctagtctgtcagtaaagatattttgaaagattatcaattcctgtttgtcagatgctaaaatattagacgacacagcccttactgtttaggttgtgttaccttttaattgttaactcctgcgttgtagtctggttttacccgttttcttcagtgtgaatgatagagaagtcataaatagcctggggatctgttcaaccaggcttataggaagtgttaaaaacattgaactctcaatttagatgcattgggaaagtattcaaagtttctttgttgttgctcattaaatgattatgtaacgtacatagcaggggatacaacttatatagagtttaataaaaccatgcgggaaactagcattcagactaagtaaaatagagcattaccatacccctcaaacccttacgtgcacctctcagatcatattctcttttcctgtatcagacgtaaccaccctgaattgtgttgcattctgttcctcttcttgtagtcatgaagtggcttaatttagcctgttttttaattttatatacatgaaagtggaccgtatgcatttttctgtgtcttcttagatttagctttttgtttttcaaacagggtgatacttgcgggtgtagttttagtcttttcactgttatgtggtgtttccttgtatgaatataccccaatttattttttcattttactatcggtggacatttggattgttcccaattgcttgcaattataaacaatactgctaaaacatctttgtacgtgtcttctggttaacatgttcaagggtttctctaggttgtgaacataggattggaatcactgaagtgtagggtgtgtgtaagtaatgctaacttttttccaaagtgctagtgtcagttttgttcccactaggagtggacgaaagttgtcattgccttacattagtatgaatacatgttatctgaattttgaatttctgtcattttggtagttatgaaatggtatttggttgcagttttagtttgcattttctgatcacctatgaggttgcatatcttttcacatgttttgaggcttccttaattgtgaaactcctgagtatttcttttgtcagtttttttcctgaggttgtagtggggattttaaaaaaaattatccatagcctttgaagtgtttaaattggatagggacttcgtcaggtaagcattgtaagtaactagttgcagtgactcacacctgtaatcccagcactttggcaagctgaggaggggggattgcttgagcccaggagaccagtctggtcaacatggcaaaaccctttccctacaaaaaaaaaaaaaaaattagccggacatgatggcacatgcctgtagtaccagctacttgtgaggctgaggcaagagaatagatcgcttgagtccaggaggtccaggctgcagtgagctgggatggagccattgcactccagcctgggtgacagagcgaggccctgtcttt

SEQ ID NO: 13805 - DNA, 1495 bp, Homo sapiens
taacgatgttgtgctcagggtagtaattgagaggtattttacaccagatttaagcctgtgcttttatcttcaaagatatgctacttaaaattgggggaaagtgtacagaatggaactgtatggatatggatttttagaatagtgcacacacctcaagtgtgtatttatttcattaatttcccccaaactgagtacctcctatgtgttaggcactggacaaaacagtaaacaaaatagtaaacaaaagaataaaaatccctgccatcatgaagttccactttggggatggggtgagaagacattgatacaaaaattaaggtacagtctttcctgtccctcggcatctgtgggagattggttccaggacctcccttggataccaaagtcctcaaatgctcaagtccctgatataaaatggtgtagtgtttgcagataacctatgcacatcctcctatctttagttcaactctgcattatttataatgcgcaatacaacttaaatgctgtataaatagttgttatggtgtattgtttagggaataatgacaaaaaagagtctatacatgttcagtactgacttttttttccttccccgaatattttttcatccatgattggttgaatacaaggacgaagaacccatgggtaggaagggccaactgtgtacgtcaagtggcggaaagtgctagagaaaaaaaccaaagcagtgcaggggtatagggaatgccaagagatgggagtggtggccatagaaaagatgatattaacttggaggcctacgggtgataaagaagggtgccacttggaaggagctgccactgaagccctgaagcaggcgcatactagctagtttgactggaaaataatgaacaagagggaaagaagtagtggatacttaggtggaaatggggccaagtcatttaggagcatgtgggaatttataagaaccttaatttgtactttgaatgagttgggttttgagtaagcagtgagttgatctaacttgtgttttaaaagatctgattgctatgttgactgtatgcagcaggtgcagaaataagagttgttagtaggccattgactgcatttatccaggttaaaggtcgaggtgacttgaatcagggtagtaatagtggcggtagtgcgaaatgaccagattctagacttttgagagcagtcaggtagaagaagggtcaaggacgactccaagggttacggactgagcaactaaagaatataacttggccgggcgtgatggctcatgcttgtaataccatctttgagagaatccccagcctgggcgacataacgagaccctgtctctacaaaaaaataaaaaattagctgggcatagtggcatgagcctgtagtcctggctacttgggaagctgagatgggaggggaggatcacttgacccccttgagctcaaggttacagtgacccatgatccttcactgtagtccatcctgggtgacagcaagaccctgtctcttt

SEQ ID NO: 13806 - DNA, 3156 bp, Homo sapiens
  CDS (465)..(875)
tgaagatatgtgtcatatttctttcaatggataattttaagtgatattaaattatgtcaatagtttgaatagcaatagcaaccattgagctaaaattatgcaacaaatagttgcttgttaacctaagatatttcaacatttttgaaagattagtaataaaacatgccatatttaaaaagccttaatgtgaatcttctctccactgtagttcaggggacactcaggatgctagagtaatgctataaaaaaagccactcagacaggtgcagtggctcacacatgtaatcccacctactcagaagactgaggccggaggatcacttgaagccaggagctcaagaacagcctgggcaaaatagcaataccctcctctctaaatatatataaatatatatatatagataattagttgggcatggtaatgtgccggtagccccagctactcgggaggctgaggtggaaagatggcccaggaatttgaggctacagtaaactatctcactgcactccagcctgagcgacagaatgagactccatcttttaaaaaaaaaggcactgaaatgaccccatcaaatccaaccagctatgccaggctctatttccatcctatttctgaggagtttttgtccttgctgggtttcctttggcttcatacccagattctgcttgccctatataacatggatggtctgtctgtcctttgttcagtacctgctcaagatgccacttgcccagagctagagcccacgaggcaaggggcatctcttctctcactggtcaaaggtaggtggttggaagtggatattctggattcatctctccaggcccttacttctaggaaaacaaacaaacaaaaacaagcagtttctctaaattaatatgttaatataattctaaaaattagcacagaaaaattacccatttaatttataatggttttttaagacatttggaaggaaatatttctttcataatactcaaacacttaaaggttgaacattataaagaagcatcagtattatcagagatttttcaagattctgttaaattctaaacatcatctagaaagttcttgtcttatatctaatacctaaccttaatgtcccctcctttgttaaaacttttcttgactctctctcttcccgtgcctgtacaaagacatgcatgtgcatgggaacacacacacacatacacaaacacacacacacactagtaatcacagcctcccttttgccagcatgtatataacataatttttagcattttcccacattaaagaaataattgaaagcttatatatttattccccaaagtagatatctaattatttaaaagaaaggcttatatttaatgcatctatgttttcagggcttgaataaaagtctgtttagcaaggttttctttgatggaattatttgattcatactggaatctctggttcatttttctgtttacagaagtaagttcagattgtagtatattgcacagattgtccaggtaaacctggttaagactttcaggggaacttatttttgctgctattgtgatgtggaaatgctgttactacttcagtaacactgatataatgtatgtacttattaacaagaaatgtgtagatagtagctccagtacttgaagcatcattaaatttgaatgaattttctatttgtaaatatactctgtcataaataccattgaatatatttcactatgtaataaattttaaaatcaaggaagtaataaatcataacatttaattttaagattaagaatattggcaaagatttgtttatttttacctgtctttattcaaatgttctaatatacattagttccaagttctctattacttctaaatagaatatacatgatcaaaagagtatgcctctttctaaatgagaaaaactttatattataaatccagtgatacggatactatccatcattttgttttgtatggcctaatgtatatcagtaaactaaatagacttaaatgtggctggattttgactgggaatatgggaagaacaaagcaggtgagatcatgtatgtgactaaatatagcgttgatgcttaacgatggcctctgagcatgttagtgtaacttatattttgcagccaaaaactgtatgtatcaagctccaaccatctataataaagtttatggttcagttctaagattgctaaccaagtgatttttttttcagagacgttaaagaaaaagtaccttcaaccaataaattcttaaacatttcatcaaatagttattgaacagcactgtgctaggcacgtgggatgtgaaaatcaaagaacacatgaccctacccatagcaactcagtgataacaatgataaaggactatgctagattccacatcgtacctggagtgggggcagaagtggtacataatccagttagggggtgaagtggaaaatccagggcaagtttcgtggaggaagtgatgcctgaaatgtatctcaaataagttagcagagctaaagaaaaaaaaaaaaaaagaaaaaaagagtagaagttaaagggaataaatggaaccgggtgtagaagggtattcagaacagaagaaattatataagcaaagacaaagaagcaagaaatagtatgcatgtttgggttcaggagaagatggtttgactagaaagtttaacattagaaataaaattattcctttacaaaaaaagaaatacttaaaagaatatgttggttttcaaaacagatatagtgatttttgcttagttgcttatacatcttgaaaccaaaactggagttcagctatttattgtgttcattttagcataagcattacaaagtccttctctagttaatcaggttcacactttgcaactaagaaaatagaagtgggccaggcacggtggctcacgcctgtaatcctagcactttgggaggccgaggcaggcggatcatgaggtcggaagatcgagaccatcctggctaacacctcatctctactaaaaatacaaaaaattagccgggcatggtggcaggcgcctatagtcccagctactcaggaggccgaggcaggagaattgcttgaacctgggaggcagaggttgcagtgagccgagatcgtgccactgcgctccagcctgggtggcagagagagactctgtctcaaac

SEQ ID NO: 13807 - protein, 137 aa, Homo sapiens
MAQEFEATVNYLTALQPERQNETPSFKKKGTEMTPSNPTSYARLYFHPISEEFLSLLGFLWLHTQILLALYNMDGLSVLCSVPAQDATCPELEPTRQGASLLSLVKGRWLEVDILDSSLQALTSRKTNKQKQAVSLN

SEQ ID NO: 13808 - DNA, 2403 bp, Homo sapiens
acactgaaatgacattaggatctaaaataatttgctgtcaattgtacatttgcatgagtacgtatgtttggctcattactggtttaccccttgagtgaatgcctgtttatgatgactgagagcatattcatgtgtgatctgcgtgtttctggaatatgctttatacgtaatgaaatctgtttgctgggaattcctgattcttgttatataagaagaacaacctatttcgctcccagaaaaaaaagatcaaagagctttcagaaactttgagaacttggctatttagaaaaagtgataatgggtcagtttctcagactgtagccattgaaaattagatgcagagaattcagagatttcttcttaatggaagtaataagctgtaagaattgagagatcacaatggagtgttaaaactgactgtgtctaagttgggtgtaagggtttcctgggtttttttatatacatgctctccccagaatacagtaaaccacagttttagaactaaacacatctgtaaaactaaatatagcatggaaaatccaatttgaataagtcatgctttcctagaatttaaaaataaaaaagtcttcctctggaaagagaagtcacacagacaatcatgtgccctataaaagtgagtgtttataggactaaaaaacttttaacaactttttaaggaaatatttttgttcttatacaaaaacatgtaaatattgctttattactttcattttctgaccctgctgtaaactactgcaaccctcacatcctcaaagggacttttatgtcaaactcttctgtttctccaaatataaggaaaaaagactaaagcaagagatctggcagttgaaaattgtgggaaagagaatttgtatgggcactgtatctatgaaatacctcataacttacgtttacatgttttcctaactttttgtatttttcttgtatagccacctagagaattcttcatagattaagaactacagttttcaccacttaacataagtaaaacaaagtccttcataatttaaccattagcatctttggccaaaccaaaataaagaaaagcatcttctcctagttgtgtgtgggcaacagaaacaagttaaggaaacaaaaatacttatatatacacagaacaaaaataatgttctttttatgcaaatcccctgtgaaaataaaattttcaatgtttttttggtcttaacgcttcattttaacttagtaaacccaaatttaggatttacattggcaaatttttcagtgatttttaacgtgttacatttagtaaaccatagattttttaaaaactacattttgtaaggccacacataagtgaaaatacggaaggctttggaaacccccagatgaacttctatacatgtgaaaacacaagtctttgagtgtgcactaaaagtgtcacactcccaaaaaactcacaaaacattttgctaaaaagatatgactgcttgaaatagtctctctcccatggaggaccacatttctctttctgccatacttgctactgctactgattttggaggaaatttttctagaagaacaaaggtcatatttgaggcaagctaaaaacttaattatacatggctactttactgtgtctgtagctaaagaaaaattattttacaaaaattacttcatgaaatatagtttgtaccccagtagttgagaaatgtgaccttttaggcaaagaacaggcagtccatctctcttagctttagtttatctctctgcctgaagacaggaaacaggcccaagtgcatactcgggttctttccaactcagaatcatctctgattccacaaaagtgagtttagtttcctatctgaattaacaactttaaaggagactataatagttaaaagtggaagaatagaaataaataaatttaaaatgaaattaattaaagtagaagagaagggttctgttccatgtacgattaatgtgccccttttggagataagctttccaaaatatgcgtatgagtaaaattagagaattccaccactaagcaacagtagattttatatgtgtgtgtggatatatatacacacacacacagaaagatgaatatatatatatatatatctgtataaatagacacacatataatatatatagatatataatccctatatatcttgaatctacaaatatctttatatgtatataatttgaatatatacatgtatgtatatacagatgtgtgtgtatatatatatatacatacacatatacataaattttcagctatttctgttcccctgaactaatttgagattagacccaaacatgcttttaaatgtctcatgccaaggcactgaattaagacttcttaatgttgaaatattttaagtgatttcatattaaattttctatatactg

SEQ ID NO: 13809 - DNA, 2400 bp, Homo sapiens
caaacatgcacacattgtcaaaaaacttctgaaaaggtggactaatgatggatattaaaacataatgcaaagatataataaataagatcgtttgatactctaagaactgatgtataaacagagtctagaaatgaactcagaatacaaaaagaaatgtagtctgtgctaaaggtgataggaaatgaagaaaaaatatttttaaggccaggcacagtggcttacgcctgtaattccagcactttgggaggcgggggcaggcagatcacgaggtcaggagttcgagaccagcctggccaacatagtgaaagcccgtctcaaaaaaaaaaaaagaaaaatatgctggttgtcaatgcacttttattgtagaaataatgccaatctgttatttaaattgaaaacagtacagaagcatatttaagagcaaggcgaaagtcatcttttctccttcctatatcatttctgcctccatccccctctgcatagatgacctctatcaacaggtaatgtgtctccttccagacccttttggtatactttcagggatgtacatctatgcctggccaggaaagaattttttaacagcacatatcagcactactttatcagtcttctatataacacctcactgaagcataaatgtccatcaaacagggaagaaacgctctcattatattgaatgatcagagaatgatctttgtaaccactcaagtattttaagtggctgcaaatgacatgtttggtatccccttgtccactcctgatacctgacccagatgagaaggactcattagtgcagtggatagggcctggggacatctgggagatggagtcagggcctagatttgagttctggctctgccactcacttggctgaatagctgtgtgatttggaacaagtgccttaacatttctgaatctcgatttcctcatcgatgaaatgggggcttaaaatagaaccgccatcacgggggtgctttgtaaactgtgacttgctcctgaaatgcagggatcatcatccgcattgcctcacttgtgaccttgcttgctggctttctttgtccctagcggatgaccaccaggctctcatctgggacatccagcaaatgccccgagccattgaggaccctatcctggcctgcactccagcctggtgacagggcatgctctgtctcaaaaaaaaagaaaaacaaatgtcagctctctctagtctgttacttgattaaagaggtgaattgtgggtggggagaatgcattggttgtccttggtttggtggcgctagcacctcagattctgctttggctgggctctcattccattcatctgagatgcatagaattcttaccacatgcacctgctgggacccaggattacccagactcctgttgtctgtttctgcatctcccctatcagtctaaaggcccagtgttgctcaagatagagactatcaactacccgtgtcctttgtcttcttttccctcaatcctatggaaatcctgtctctagttctttaaatccacaaatgaaaaattatgcctaaaaagatttttgcatgtggatagtattttttgtttttttctatgaaactctgatgatcccaggccttttacttgttatttccgcaggtggtgattctagatgtccgggtcccctgcacacctgtcgccaggttaaacaaccatcgagcatgtgtcaatggcattgcttgggccccacattcatcctgccacatctgcactgcaggtaatcatggtggggagaaagaaatctgggaaggatggaggaaatctgttctcttggctccttagaattgtagttgttactgttttctaagcacagtcttgagagatttatacaaaatgactagttggagcctctccacacttgtgaaattcaatcagtacaaatttttagacgatcttgtaccctcatggacatcagaacatcttccatatatgatttacatcatgtgtcagttatagggctgtgccttgtactgtgcccctgaaatctggatggcacagaggactcaattccaggaatatggggaaagggaggcatccctcatggatataacagaatctttgggactgtgaagatcaacatctccatgggacctttcaggtttcactataacaaacccacagtgtgctctggatgcatcggagggccccacagaactttgcctggttgtggtttgtgacttgtggttttcatttcactgtttcccagaccaaagctagcaccccttacgggctgggtgcagtggcacgcacctgtagtccaagctacttaggaggctgaggcaggagaagcacttcaacccaggaggtggaggttgcattgaccagagattatgccactgccctccagccagggcaacagagcaagactctgtctcc

SEQ ID NO: 13810 - DNA, 1955 bp, Homo sapiens
  CDS (457)..(774)
atcgcttctcggccttttggctaagatcaagtgtagtatctgttcttatcagtttaatatctgatacgtcctctatccgaggacaatatattaaatggatttttggaaataggagatggaataggagcttgctccgtccactccacgcatcgacctggtattgcagtacttccaggaacggtgcaccccaaagtacagtacgggtggctggcaagatggccgaataggaagagctccagtctacagctcccgcagagatcaacgcagaaggtgggtgatttctgcatttccagctgaggtatctggctcatctcatcgggactggttagacagggggtgcagcccatagagggcaagccaaggcagggtggggcattgtttcaccagggaagtgccagggattggggaactccctcccctagccaggggaagccaagaggaactgtgccctgaggaatggtgcactctagcctagatacgatgcttttcccatggtcttcacaacccacagacccggagatttcctcaggtgcctaccccaccagggccctgggtttcaagcacaaaacaggaagccatttgtgcagacaccaagttagctgcaggagtttttttcataccccagtggtgcctggaatgccagtggacagatctgttcattcccctggaaagggggctgaagccagggagccaagtggtctagctcaacggatcccaccacctacagagcccagtaagctaacattcattggcttgaaattcttgctgctagcatagcagtctgaagtcgccctgggacgcactagcttggtagggggaggggcgtccaccattactgaggcttgagtagctggttttcccctcacagtgtaaacaaagccccagggaagttccaactgggcgaagcccacaacagctcagcaaagcctctgtaaacagactgcctccctagattcctcctctctaggcagggcatctctggaaaaaaaggcagcagccccagtcaggggcttatagatcaaactcccatctccctgggacagaacacctggggaaaggggaggctgtgggctcagcttcagcagacttaaatgtacctgcctgccagctctgaagagagcagaggatctctcagcacaccactcgagctctggtaagagacagactgcctcctcaagtggatccctgacacctgtgtctcctgactgggagacaactcccagcaggggcggatggacacctcatacaggacaattccagctggcatctgccaggtgccctctgggacaaagcttccagaggaagtaacaggcagcaaactttgctgttctgcagcctctgctggtgatacccaggcaaacagggtctggagtggacctcaggcaaactccagcagacctgcactgcagcagaggagcctgactttcagaaggaaaactaacgaacagaaaggaatagcatcaacatcaacgaaaaggacatccagacagaaaccccatctgaaggtcaccaacatcaaagaccaaaggtaggtaaatccatgcagatgaggaaaaaccagcgcaaaaaggctgaaaattcccaaaaccagaacacttctcctccaacagatcacactccttgccagcaagggaacagaactggacggagaatgagtttgatgaattgacggaagtaggcttcagaaggtggataataaactcctccaagctaagggagcatgttctaacccaatgcaaggaagctaaaaatcttaaaaaaaagattatagaaattgctaactagaataaccagtttagagaagaacataaatgacctgatggagctaaaaaacacagcatgagaacttcgtgaagcatacacaagtatcaatagctgaatcaatctagcagaaaaaaggatatcagaggtagaagattgacttaatgaaatgaagtgtcaagacaagattagag

SEQ ID NO: 13811 - protein, 106 aa, Homo sapiens
MVHSSLDTMLFPWSSQPTDPEISSGAYPTRALGFKHKTGSHLCRHQVSCRSFFHTPVVPGMPVDRSVHSPGKGAEAREPSGLAQRIPPPTEPSKLTFIGLKFLLLA

SEQ ID NO: 13812 - DNA, 1774 bp, Homo sapiens
  CDS (281)..(1462)
agcagagtccggctgcctggggcgggcggcgcgtgtctgcagctgctccgggtagcccgctaggcgcgccgtccccagccccgccgccggccctcggtgcgcccggccgcctgcacccccaggagcagctgctgtgaataaacacagaagtggagctgggggactgattagaagcctcattcagtgcacctgggccccagcaggcccagccaggcgtggaggaagaggcattgaggactttccttacctgtttttccagctcacccactgccagcagagaatgctgtccagtttcaacgagtggttttggcaggacaggttctggttaccacccaatgtcacgtggacagagctagaagaccgggatggccgtgtctacccccacccccaggacttgttggcagccctgcccctggcgctggtcctcctggccatgcgccttgcctttgagagattcattggcctgcccctgagccggtggctgggtgtgagggatcagaccaggaggcaagtgaagcccaacgccacgctggagaaacacttcctcacggaagggcacaggcccaaggagccccagctgtctctcctggccgcccagtgtggcctcacgctgcagcagacccagcgatggttccggagacgccggaaccaggatcgaccccagctgaccaagaagttctgtgaggccagctggaggtttctcttctacctgtcctccttcgtgggcggcctctcggtcctgtaccacgagtcatggctgtgggcaccagtaatgtgctgggacaggtacccaaaccagactctgaagccatccctgtactggtggtacctcttggagctgggtttctacctctcactgctaatcaggctgccctttgatgtcaagcgcaaggatttcaaggagcaggtgatacaccacttcgtggcggtcatcctgatgaccttctcctacagtgccaacctgctgcgcattggctctctggtgctgctgttacatgattcctctgactacctgctggaggcctgtaagatggtcaactacatgcagtatcagcaagtgtgcgacgctctcttcctcatcttctcctttgtcttcttctacacccgactggtcctctttcccacccagatcctctacaccacatactacgagtccatcagcaacaggggccccttcttcggctactacttcttcaacgggcttctgatgttgctgcagctgctgcacgtgttctggtcttgcctcattctgcgcatgctctatagcttcatgaagaagggccagatggagaaggacattcgtagtgatgtagaagaatcagactccagtgaggaggtggcggcggcccaggaacctctgcagctaaagaacggggcagctggagggcccaggccagcccccactgatggccctcagagccgggtggccgggcgtctgaccaacaggcacacaacagccacatagccgggtggggctggctgtaaggggttgcccccccgccagtgccttggatatttctggggtggctagactggcgcccctgggccacctttctggagacagggagggccccacccggggtgggtgggaaggctgatgatctgtctccagccccttccttctgcccacccgcccttcttccctctgggcaactggacagatctgggagccagcagctggatgctgtggctggccagagacacctccaggccgtagcctgggggctggggggagccccaggctgaaaagggtccaattaaaacaaatggagcc

SEQ ID NO: 13813 - protein, 394 aa, Homo sapiens
MLSSFNEWFWQDRFWLPPNVTWTELEDRDGRVYPHPQDLLAALPLALVLLAMRLAFERFIGLPLSRWLGVRDQTRRQVKPNATLEKHFLTEGHRPKEPQLSLLAAQCGLTLQQTQRWFRRRRNQDRPQLTKKFCEASWRFLFYLSSFVGGLSVLYHESWLWAPVMCWDRYPNQTLKPSLYWWYLLELGFYLSLLIRLPFDVKRKDFKEQVIHHFVAVILMTFSYSANLLRIGSLVLLLHDSSDYLLEACKMVNYMQYQQVCDALFLIFSFVFFYTRLVLFPTQILYTTYYESISNRGPFFGYYFFNGLLMLLQLLHVFWSCLILRMLYSFMKKGQMEKDIRSDVEESDSSEEVAAAQEPLQLKNGAAGGPRPAPTDGPQSRVAGRLTNRHTTAT

SEQ ID NO: 13814 - DNA, 1988 bp, Homo sapiens
  CDS (160)..(876)
gtttccgctggcggcggcggcggcggcggtgccggagcgcgagcagagcggagacccccaggtcttgcgggcgcggaatatcctggaaccttcttttgtttgtcagcagccaaggtgtttccaggaagttcagagagaacagaatttaagaagtgcaacatggccaggggctgcctctgctgcttgaagtacatgatgttcctcttcaatttgatattctggctctgtggctgtgggctgctgggagtgggcatctggctctccgtgtcccaaggcaactttgccaccttctcccccagcttcccttcgttgtctgcagccaacctggtcattgccataggcaccattgtcatggtgacgggcttcctcggctgcctgggggccatcaaggaaaacaagtgcctcctcctcagctttttcatcgtcctgttggtcatcctcctagcagagctgatcttactcatcctcttctttgtctacatggacaaggtgaacgagaacgccaagaaggacctgaaggaaggcctgctgctgtaccacaccgagaacaacgtggggctgaagaacgcctggaacatcatccaggctgagatgcgatgctgtggtgtcactgactacacagactggtacccagtgctgggggagaacacggttcccgaccgctgctgcatggagaactcccagggctgcgggcgcaacgccaccacgcctttgtggagaacgggctgctatgaaaaggtgaagatgtggttcgatgacaataagcacgtgctgggcacggtggggatgtgcatcctcatcatgcagatcctgggcatggccttctccatgaccctcttccagcacatccaccggactggtaagaagtacgacgcatgagcgggctggccgggagtgcccaccccgccctgctgccctgtggagggaagaggattgagctttgtgtcacctgcctgcgctctccagatatgacccctgcacccaccccccacagcctgccctaccccacctaccctgcctcagcctcagacttctcagtgggtggagtgccagggaggaggaggcacacggagacctggggctcggggcccctggattcctgcatctgcatgtgcgtatttgccaaagacgacagggtgggctggggtgcgctccggaggaacccccggcactgttgggcttctgcccctgcccttcctcacactgacactttgtccccacatggggtggggagcagagtgcccgccccgtggagataccgccccagcgggggctgcgacatctatggccaccatggggcacctggcggggcgggggtctgccggcctctgggcaaggcccctggagcatctcgcccaggctttttataccttacaatgtaacttttttattttattttactctatgattattcaggaatattatctctcagataagtttagggttagatttctgatttgtaactttttactgtgttgatttctttaatggtttgactttttttccctgagggtgagggatgggtgggaagagaggacatctgtcccctcctctccagcccctgcccacccactggtggaggtgctaactagcagggacgtggcataggatgggagctgggcgtgaggtgcttggggtccattctttgtccctcagcttctcagagtccggccagcccttgtgttcccgtgccccacactttcctcctccccactgcagtgagtcaatagtccagggtggggcctggcctccctgccctgattggggactcaggaggtgaggcctggggggcttcctgccccctccttgcccacctgcctgcccccgggcagcacgggagggagagcagggtgagcacgcttgttggtttcagatgcactttctgcttgcattgccgtatctgtgcgttccttcatcctggtcctggctttatggaacaccatgtttttagcatgtttttaaataaaaacggataaagtgtcaaaagc

SEQ ID NO: 13815 - protein, 239 aa, Homo sapiens
MARGCLCCLKYMMFLFNLIFWLCGCGLLGVGIWLSVSQGNFATFSPSFPSLSAANLVIAIGTIVMVTGFLGCLGAIKENKCLLLSFFIVLLVILLAELILLILFFVYMDKVNENAKKDLKEGLLLYHTENNVGLKNAWNIIQAEMRCCGVTDYTDWYPVLGENTVPDRCCMENSQGCGRNATTPLWRTGCYEKVKMWFDDNKHVLGTVGMCILIMQILGMAFSMTLFQHIHRTGKKYDA

SEQ ID NO: 13816 - DNA, 2278 bp, Homo sapiens
  CDS (233)..(667)
agttttgctccgaaagacttaccgaggagggagcttgcggtgcgttctgggaaagttgctgggccagctcctttgtttccagtctgagcgttgcgttcggtttcccgagggtcttctgaggcaccgcggctgcgggcttctgagttcccggctctccgcagggaagcctcctcttcgtacctcgttttttggctcgtggggggtcctcccaccgctggccgacgcagccagcatgtccggggtgcgcgcagtgcggatcagcatcgaatcggcctgcgagaagcaggtccatggggtgggcctggatggcaccgagacgtacctgcccccgctgtccatgtcgcagaatctggcgcgtctggcccagcggatagacttcagccagggttcgggctccgaggagggggaggcggcggggaccgagggggacgcgcaggactggccgggcgccgggtccagcgcagaccaggacgacgaggaaggagtggtaaaatttcagccttccctttggccttgggactcagtgaggaacaatttgagaagtgccctgacagagatgtgtgttctctatgatgttctcagtattgttagggataaaaaatttatgactcttgatcctgtctctcaggatgcacttcctccaaaacaggtatttgtggactttaattgaataataaaattttatttattaaatcccaggacccttttttggctttgtgcttgttgttccattttcctttcttgcaaaattaagtccagatgaagatttaaagactaactggtctaaaacaaagccatacaactgcatttcctttatttttttattatatacctatgatccttggaagagttaagtttcattaagaatgtaatacctttaaggccaggcgtggtggctcacgcctgtaatcccagcactttgggaggccaaggcgggcagatcacgaggtcaggagatcgagaccatcctggctaatgctgtgaaaccttgtctctattaaaaataacaaaaataagccaggcgtggtggtgggcacctgtagtcccagctactcagaaggctgaggcaggagaattgcttgagcctgggaggcgggggttgcagtgagctgagatcgcgccactgcactccagcctgggcgacagagcgagattccatcccaaaaaaaaaaaaaaaaagaatgtaatactttaaaggttaccaaatcttaacaaattcttatagcctgggtccttggtctgtgatatattacacaaaaatgtgatgatataatggctttggaatcaggtagacctggattcgaatcctgcctctgccttcattaactgtgtgaccttaaattaagcaagttattttctcttaagtccctgtttttccatctaatccttccttccctttttttttaagggatggattagaaaagttaggcgaaattatggagcatattgagagctgggtagaattgctgctatttcataaacagtgtattcaatttttgaacatttgaagatgaaagagaagtagcaggaagatgagttggtgaatagtctgaaatcattgaggctacttgggtccttaaggaaaacaagtgtcaagaccataaccaaattagtcatggagaagaagtaatgactgttagaacccatttgtaaataaaattaattgagtagaattactcacatagtaatagtttcaggatctagaaacattgtgctgggggactaatagagttccctaaatctgcattcttcattttatagagagaaaactaaagcttaaagagatttgtaatatgttcaagttgctgtcaagccagtagttagggagccaagactagaactccagcacctaactcatagccccactgccttttctactattctgtgcttttcccagaagggagtctccaggaatttcttaatatctccaggaactcttttatttacgttccctaatgcaatcaaaagattattttgatatgtttatgaagctttttatgtgatttttgactctcatacagccagaaaactgtattaaactggttagtaaaatacacaaattatggtgattgtggatatttatatatgcatatgtgatacatagatagtgtcttctgatcagttttccaaaaaattaggattcagtgaagtacatttaatattaacaatggcagggcacggtggcttatgcctgtaattccaacactttggggaaccaaagcaggaagccaggagtttgagactttcccaggcaacatagcaagaccctgtctctacc

SEQ ID NO: 13817 - protein, 145 aa, Homo sapiens [sequence omitted]

SEQ ID NO: 13818 - DNA, 1893 bp, Homo sapiens
gatcaagatgatggatatgccaattacccctatctgattactatacattatatgtattgaaacattattatgtaccccataaatatgtagagagcagtcaagggagctggcgagtacttttcccactggttattgtatatactgtgtctctaaaagctgactggtctctcccaccagctcactttctacttgagacataccatattgcagtgaggctagaatactgggaaggggaatgacagtcctttagaaaagagggtggaaccagtgtaaggaaatgtggaggaggcagaatttcactttggactcttcactcctccttttcttcattatttatcttcttccttagacaggtaattcttactcagctgtggtctaaggccctgtgtacactgagtttatagagcttctggactggtttgttattctccccatcccactccttgcttcaaatatcattccattaaaagcaggtcatctgattaaatcctgaattgtcttgttatttttttcttactcagtttagaaaagtagcaagcacaatctggtttgtcagaaaagagagggttgagagctaaagttaagtatcaggaaacgtgtgaaaaagtaagtttcatcctaggatttataaaggatgaagatcaagagctggttaggaagagttaacattgtaaacaatcatttgaagtcaattcaagcttctggtgcagaggagttattattaaatatagttgtgtaaaggaggcatggatattcacacctttagtgccatacggtataaatatacagtaggctttattaggggaaaatcctagctgagaaaaagctgatcctaactaactcttggaacttttattccacagagaggtatgcttaggtggggcatagctggattggatgcacgatggcctaccttccaatggacaggaatcctgctctgtaatagtctatatatagtatgggacaggagaacatctctaagactgtgtagtaatgggaggtctatgaatagggaataggccttgttagaaaaccgtgcctctagctcagtggctggtgtgtcagtctcttcttccattgagctaaatcacgtccatctgagctaccaaaaggagggaggaaaagaacctccagagtctgtgaatttgattctcatcaactattgagtgctaggagagcttggactaaaattaaagaacaactgtcaataatctttgaagaatcactgaagaaaaaggtcccagaaaaccaagaaaaggcagatattttttgagacataaaggtggaggaagcgtatatagtccataaatattagactggtaaacttgatgtaagtgttctgtcaatttctgcagtaggtgcttgaccacatggttgtgagcagttacaaagggaagggtaatgaccattggcaccatggatcacacagcacaagtcatacatggtcacctttagggaatgccagaagtccacgtctatcgtgatgtttgcaagagatttgatgaactgtatcataatgtctttcatagatagtaagacagggaagtgtttactgaaattgactatccaaaaaatgttgactaactggttttatttgactttgggggtaaattattcctagcaatctctgaattttgggttccaaagagccctggagacgagtggcagttgtgtgctcagtattataggttatttaaagtaaccgaaccaaaacttgcatatgcacagcacataacagtggttggcacgtagtgggttgtgtgtgcgtctgtagtcccagctacttgggaggctgaggcgggaggatcacttgagcctgggaggtggaggttgcaatgagccaggattgcaccactgcactctagcctgggcgacagattgacacccagtctc

SEQ ID NO: 13819 - DNA, 1602 bp, Homo sapiens
  CDS (393)..(710)
tttctctgacactggacatggtcatataaaatcaggtatagaaccttttcaaagacttcaaatggattaatctcagaaaatttaggtggaatttttggatttcagattatttacttccttgtagttataattgacttggattagtaggtgcacacaatgatttttatctgttaaggtaaaagataatttttaatgtgacaaaattttctttaaaaattttaattggaaagtaaaacatttcctttaatctacatgacatacttcatccttaagctccttgagagcagagagaccctatcttatcatctctccattggtaccacataacccacaccattcctatttattgataccaataatcctttcaatgtaactagtaggcttttgagtatatgcacaaaactgtaactctactaataagctcttctgcctatgagacattatcgctttggatcatccttatttccataacagtttgttccattctgccattacaatgccaggatgtaaagctccaggggtgcaggaatctttcttttttgtttactactctatctccagcatctagaacattgtctggcacaggtaaccactcagtatttgttgaatgtatgaatacattttttttaagacacaatgacaaaatggctgcagagactgcttttgttgtatgggatgaagacctcagatttagtgtcagaaaatctcaatgactgtcccaagcttgctatgaatttactgtgtcatcttaggtgtgccacttaatctctctgtgcttttcttatatatgaaatgattatgttagatctgaggcatgataaacttccatcaacctttaaaggtacgtaattctctgcttcatgattagcagcatgcattttccaagtggctgtctgggaacagagttacattttgtggcagtggaaccagcattgccaactggcatacacaggctcggaagtaagattttggtctctttggcagctaaaaatttggctctaacaaatgaactagtcaccaacctgattttttaaaaaataaggctcttctatactttggcatagaaaatttatttataagaacagggaaaacttatgttcattgcagcactattcacaatagcagggacatggaatcaacccaaatgctcatcaatggtagactggataaagaaaatgtggtacatatataccatggaatactatgcagccatgaaaagaaatgagatcatgtcctttgcagggacatggatagagctggaaggcattatcctcagcaaactaatgcaggaacataaaaccaaacgccacatgttttcattcataagtgggagttgaacaatgagaacacatggacacgtggggttggtcggggaaacaacacacactggtgtctgtcctggggaaaggtggggggagggagagcatcaggaagaatagctaatggatactgggcttactacctaggtagtgggttgatctgtgcagcaaagcaccatggcacatgtttatctatgtaacaaacctgcacatcctgcacatgtaccccggaacttaaaagttgaagaaaaaaataaactgtggaatgtattgttcagccatt

SEQ ID NO: 13820 - protein, 106 aa, Homo sapiens
MHKTVTLLISSSAYETLSLWIILISITVCSILPLQCQDVKLQGCRNLSFLFTTLSPASRTLSGTGNHSVFVECMNTFFLRHNDKMAAETAFVVWDEDLRFSVRKSQ

SEQ ID NO: 13821 - DNA, 2996 bp, Homo sapiens
  CDS (39)..(1649)
aaataaagaagaaaaagaaaaagaaacaccgagaagacatgcgaggaagacgccttaaaatgtacaataaggaagtacaaaccgtctgtgctggcctgacccgcatcagtaaagaaattctcacccaaggacaaataaatagcacttcaggacttaataaggagtccttcaggtatctgaaagatgaacagctgtgccgattaaatttgggtatgcaagaatatcgggtaccccagggagtacaaacaccttttatgactcaccaggaacattctattcgtagaaatttcttaaaaacaggtactaaatttagcaactttattcatgaggaacaccagtccaatggtggtgctcttgtccttcatgcttacatggatgaactctcatttttgtctccaatggagatggagagattttctgaggagtttcttgctttgacattcagtgaaaatgagaaaaatgctgcttactatgctttagcaatagtgcatggagcggctgcttatctcccagacttcttggactactttgcttttaatttccccaacactccagtgaaaatggaaattctgggcaagaaagatattgaaacaaccaccatttcaaattttcacactcaggtcaacaggacatactgctgtggcacctaccgagcaggtcctatgcggcagataagtctcgttggagcagtagatgaagaagttggtgattatttcccagagttccttgatatgttagaagaatcaccatttctgaaaatgactttgccctggggtacactttctagcctccgactccagtgtaggtcccagagtgatgatgggcctataatgtgggtaaggccaggagaacagatgatccctacagcagatatgccaaagtcacccttcaaaagacgacgatcaatgaatgaaataaaaaatctccagtacctacctcggaccagtgaaccccgcgaagttctctttgaagataggactagagctcatgctgatcatgtcggtcaggggtttgactggcagagtacggctgctgttggagttttgaaagctgtacaatttggtgaatggagtgaccaacctcgcataaccaaagatgtgatttgttttcatgctgaggattttactgatgttgtacaaagacttcagttagatcttcatgaacctccagtttcccagtgcgtacagtgggtagatgaagctaaactaaaccaaatgaggcgggaaggcattcgttatgctagaattcagctttgcgacaatgatatctacttcatccctagaaatgtcattcatcagttcaaaacagtttcggcggtgtgcagcttagcctggcatataaggcttaaacagtaccaccctgttgtggaagccactcaaaacacagaaagcaattctaacatggactgtggtttaactggaaagcgagaattagaagttgactcccaatgtgtgaggataaaaactgaatctgaagaagcatgcacagagattcagctgttaacaactgcttcatcatctttcccacctgcatcagaacttaatctacagcaagatcagaagactcagcctattccagttttaaaagtggaaagtagactggactctgaccagcaacacaatctgcaagaacattcaaccacttctgtgtgatatgtacatattcaaacacattttttaacttttttaaattttgatgtgaagttatagttttataactggcttaagttaagttttattggagaaatcttgcctataattctataaagagaaatgacattccacaaatgtcaagcatatcttttttacacagattatgcaaagttaagagttgtatcttatcccgttagtacagtatgtaatagtgggtctgctgctactttctgttttaaggtgtgaggtaacaattcaatctcttcttcaaatcaaaatgagaattctctggaataacagattcttgtttggtaaattattcacttcccttaattttatcttgccttgtctcttgccatatttgctgtttttatggataaataagatttatggtttagtacttgtgtctttatggcacaggttcaatttctacagtgaaaatggcataggttgcaggaaagaatttctgcatctggtacatgggcaagtaagttatttagttctaaccacaaataacaagtagtttccaaggaaatttcagtggctctctggtttcttaacaaaagagaaagcacagcactttctgatccaaactgtcttttttttgtatctgttatttaaagcccagtggatatttcaattaaaaaaaaaatctaaagatgaatagtccttggtcattcattatccatggctcattaatctcttctagaatatatgctaactgttgaagatattttgggtaaaagagataatgttgacatgatactctattgttctgcttcctggcatcctcacattttgtggggataattttgcttcctaaactgatcacaactattaaacttagagaataataatagtctttctgatgaggctgccatattttgagcatcaatcttatgataaactattcttgtcacttggcatcaacctcttcatgataaatatctactactgagacacttcaattcacagttttaactggtgaatacctgggtttatttactattactctgtgttgctattttctaagaaagaatacagcactagacttcatcctagagtttcaggtaggctaatgcttagtgcctgagtatttaaattttcaaacaggcacagttcacattgctagtatggtcctaactttctgttattttagaatgttaacatgattcacattatactttctcttagttaataatacagtaggccttttgtttattaatggaagagtactccccacacctaagaccagattcttatatctccctggttacagtgcaatttggagattttttttttttcctggatggtaagatttgaaatatttacattaacataggc

SEQ ID NO: 13822 - protein, 537 aa, Homo sapiens
MRGRRLKMYNKEVQTVCAGLTRISKEILTQGQINSTSGLNKESFRYLKDEQLCRLNLGMQEYRVPQGVQTPFMTHQEHSIRRNFLKTGTKFSNFIHEEHQSNGGALVLHAYMDELSFLSPMEMERFSEEFLALTFSENEKNAAYYALAIVHGAAAYLPDFLDYFAFNFPNTPVKMEILGKKDIETTTISNFHTQVNRTYCCGTYRAGPMRQISLVGAVDEEVGDYFPEFLDMLEESPFLKMTLPWGTLSSLRLQCRSQSDDGPIMWVRPGEQMIPTADMPKSPFKRRRSMNEIKNLQYLPRTSEPREVLFEDRTRAHADHVGQGFDWQSTAAVGVLKAVQFGEWSDQPRITKDVICFHAEDFTDVVQRLQLDLHEPPVSQCVQWVDEAKLNQMRREGIRYARIQLCDNDIYFIPRNVIHQFKTVSAVCSLAWHIRLKQYHPVVEATQNTESNSNMDCGLTGKRELEVDSQCVRIKTESEEACTEIQLLTTASSSFPPASELNLQQDQKTQPIPVLKVESRLDSDQQHNLQEHSTTSV

SEQ ID NO: 13823 - DNA, 2037 bp, Homo sapiens
agccaatttttctcagcattgtttctggacctttctgagggtgggatctgggcatcttcaatggcttaacaagtatcacagatgaggaaacagacttggagaggttaagtgacatgctcaagacaacactgctggaccgcagctgaatgcacagctagaaggttggctttcacaagtacagtctacaaaaagacctgctagagccattattgccccccatgcaggatatacgtactgtgggtcttgtgctgcccatgcttataaacaagtggatccgtctattacccggagaattttcatccttgggccttctcatcatgtgcccctctctcgatgtgcactttccagtgtggatatatataagacacctctgtatgaccttcgtattgaccaaaagatttacggagaactgtggaagacaggaatgtttgaacgcatgtctctgcagacagatgaagatgaacacagtattgaaatgcatttgccttatacagctaaagccatggaaagccataaggatgagtttaccattattcctgtactggttggagctctgagtgagtcaaaagaacaggaattcggaaaactcttcagtaaatatctagcggatcctagtaatctctttgtggtttcttctgatttctgccattgggggtatgagtattatagaacaattagaccctgtatcttttagcaattacttgaagaaataccataatactatatgtggaagacatcccattggggtgttattaaatgctatcacagagctccagaagaatggaatgaatatgagtttttcgtttttgaattatgcccagtcgagccagtgtagaaactggcaagacagttcagtgagttatgcagctggagcactcacggtccactgaagctctgaatcctcagggatgccacctgcacattctcatactctgtccggggtcccagcctagcctttaccacgatactggtcctggtttggggggattctgaaacctcaaactaatagaactttcttctctttttttctagtaggtgtagtccttccttaatttcaactcattaaaaaatgctttatagtttagggcagtggaaggaaggctggcatcaaaatattttgatcaaaaaagatgacaatgtaaaggctcagttgtggcagacagttttttgaaagtaacttgtaaagcatttaccatatcctaaatttgcactctttgcagacttgtgcacatatattccgctttcagaatagttttgcaaattgtacacaaacaaacaaaaaggtggaagctttttaataaagaaattgcatttataaatgatctgtattagaatataataaatctccagttatagtcaattactacccatgttgtacaacagataccttctattttagttgctaataaagggctacacaactcaaaatagtctgatttaaacttattgctctgtggtatatatgaaaattgttttttattaattccatctcagaatttttgttaaaaatggtaaacctcagctcttatgtaaaaatatattaggatgtattttatattttatatatttgtatgatttttttaaatcagaaattagaatcatatgatcttaaagttaactttttaaattacatgcagtttgcctttttgtctgtgacatccctttgtgtcattactatattgtaacagaatatatattcaagattggtaaaagaacgtagatgtaatccttgacttcaaagatcatgtttgatagtctgcaaatgaggaaacattgaagagtgttcttagtgtttttcaaatcattgcagaccttacactgctgtgcttttttaatgctttaagcagtttgactcttttacttgaatttttagccagagatcattaacatcatcaacaacaacaagccactggattttcttatggttacacaattttttttgtcatgatttttggtgcggctcttccaactaaaataatggtatgatgttgtatttctttctttctttagcatagaccaattctagtcactttcgcc

SEQ ID NO: 13824 - DNA, 2134 bp, Homo sapiens
  CDS (1254)..(1565)
atactcaggaatatgccacttctccctgtgaaagccccaatccaggccaatcccacccatcctcttttgtttaatcctcttaaaaaagaggaatgggaggcataacctacagacccaggaaaaaaattaatcatagctaccatttgttaagcccttattatgggcgggcactatgcagatggaacctactttcttatttacgttcctaagtagggaaagcggggagtagaagagggtcaacacatagacggtgagtctcagaggttctggacagtcacagggacagagagcattttcattcctgctgtgggagagtgtcctgggccagttgggctacctggcgctggcatcctctggagcctctccaaggctgtggcccgggagcacactctagtcctccagtagcacctactccagcagtgtcttgaagatctggggcatgagttgggggcagtataattacagtgacttgtgagataggaaaaggctgggtgtgggactgaatagatgaatgaaagatttagtagagtctaaaggacagagaaacaactgctcatcatagcacaccccgttaaaaagcagatgaaaggtcaggcttcttaccagctccttgtggtttccccagaggtgagaaaatcaaaagagttaaaaggaaagggagtgggggaatggggatgagggagggaaaaaaaagacaaaattgttattagcaaattgtcacatgcactacatgacagtcttccaacacactgcaccacagggccccaggggagcctagcgaaatttaggggccaagaaatttcagctggggtcaccatataccccaagagaaagaagagcatgagacccttttccctctggtggtgaggatgtcatgaagctttgccattaacagcagcagtttaggatcatctgaaaactaggagttagatgttaccagccagtggcatggaataagaaactggggagagaaggctgaggtggtggggaagctattagaaatggtagaagatgaagcagaagttagaaattcttagacttgtagctgatagagggtcaataattctcaggagaggagttccccttcttagttcatggcccttgtcttcctatctcttagtttctctagctgtgaaaaattagacatttggatggcagaatcagtcacaatgagagtgatcaggtaggaagtctgatatgactttaggtgagacaaaacaaaatatgtcaggtacagatggtgagttaaaggaatgatgaagtacctaagtatagccccgttctcatttcctcctgcaagggaagaggcagagctgctcctggtcccttgtgcagcctggcatgtttgcctccaccttgagtggctggtaactcaccctgcagctccgaaggatctagagcaattctgccatgatgtacttacacagagggtccaggggacatcaagattcacaggtactagcacatgtgcagaacatgtttcttcaaccctctgttcacaagattcacaggggttggagggtaaacaaaggggaagggtgagagtatttccaagaggccttatttgagtctgggccacatagataaggctcccacttccgggcaaggctggtttagaactgccagaaggggatatccagtggtatgtcctgcctttctaggagctctgctgatgggcagatggttgaggatggttgtatgcatatgaaaaaccatggtgggattaaaaacaagtgcttcctttcaccaagatttcatccagatacctcttaatcacaacctctctgttccctagacgatgctagggtcccagccaagattcctctttccaccaggcacggtgtctcacatctgtaatcccagcactttgggagggcgaggtgggtggatcacttgaggtcaggagttcgagaccagcctggccaccatggtgaaaccccatctctactaaaaatacaaaattagccaggcatggtggtggacgcctgtaatcccagctactcgggaggctgaggcaggagaatcatttgaacccgggaggtggaggttgcagttgaacccggcaggcggaggttgcagtgagctgagatcatgccactgcactccagcctgggtgacagagtgagactgtctc

SEQ ID NO: 13825 - protein, 104 aa, Homo sapiens [sequence omitted]

SEQ ID NO: 13826 - DNA, 1843 bp, Homo sapiens
  CDS (600)..(1457)
aagttaaaagtggatgcagaagcgagcacagacggggctaggggtttcagagaaagtaattgagagtgctggcaacagcagctgaaatatagagaagttgtaggattagctttttcgcccaaagcagcttcagcccacgttttattcccatcgagggagggagaatgggtgccgctgagtgggcgggggagtggtccctgaaaggaggtggagtgctacagcccctccccgttggctctcgctgtttgtccgttgttggtttatactaatttgacaacagccgcctgttgagtctcctccagatcgcagctgaaggatctgttgagcgcttcaggaaaggcggtgagatccggtaccgcagcagagcactctcagctctgggtcttgcaggcgcagggctcccccatgccagcagaaagatttcctctggtgaagaggaccgtcgaatctgtcctcctcaagacacctcttgtacagaatttattcgaatgccacggccaaggtcttccttgaaaaatgttaaccgatgtgtgctttttgtcttttgtcatcctttctttaggacaggcgacactaacaggtgaagatctcgggagaccatgactaagaaaagaattgctgtgattgggggaggagtgagcgggctctcttccatcaagtgctgcgtagaagaaggcttggaacctgtctgctttgaaaggactgatgacatcggagggctctggaggttccaggaaaatcctgaagaaggaagggccagtatttacaaatcagtgatcatcaatacttctaaagagatgatgtgcttcagtgactatccaatcccagatcattatcccaacttcatgcataatgcccaggtcctggagtatttcaggatgtatgccaaagaatttgaccttctaaagtatattcgatttaagaccactgtgtgcagtgtgaagaagcagcctgattttgccacttcaggccaatgggaagtggtcactgaatctgaggggaaaaaggagatgaatgtctttgatggagtcatggtttgcactggccatcacaccaatgctcatctacctctggaaagcttccctggaattgagaagttcaaagggcagtacttccacagtcgagactataagaacccagagggattcactggaaagagagtcattataattggcattgggaattctggaggggatctggctgtagagattagccaaacagccaagcaggttttcctcagcaccaggagaggggcttggatcctgaatcgtgtaggggactacggatatcctgctgatgtgttgttctcttctcgacttacacattttatatggaagatctgtggccaatcattagcaaacaaatatttggaaaaaaagataaaccaaaggtttgaccatgaaatgtttggcctgaagcctaaacacaggtatgttcccaggatgggagtgcagggatagtggccaaagcacaagaataaggactcttcacactggctaatagtaaagccacctctacccatacattaagaaaacccacagtggctgggcatggtggctcacgcctgtaatcccagcactctgggaggcggaggcgggtggatcacctgagctcaggagtttgagaccatcctggccaacacggtgaaaccccatctctactaaaaacacaaaattagccaggtgtggtggcacctgtctgtagtcccagctattcaggaggctgaggcaggagaatcacctgagccctggaggcagaggttgcagtgagctgagattgcaccactgcactccagcctgggcaacagactctgtctcaaaaagaaaaaaaaaaaaaaaaaaag

SEQ ID NO: 13827 - protein, 286 aa, Homo sapiens
MTKKRIAVIGGGVSGLSSIKCCVEEGLEPVCFERTDDIGGLWRFQENPEEGRASIYKSVIINTSKEMMCFSDYPIPDHYPNFMHNAQVLEYFRMYAKEFDLLKYIRFKTTVCSVKKQPDFATSGQWEVVTESEGKKEMNVFDGVMVCTGHHTNAHLPLESFPGIEKFKGQYFHSRDYKNPEGFTGKRVIIIGIGNSGGDLAVEISQTAKQVFLSTRRGAWILNRVGDYGYPADVLFSSRLTHFIWKICGQSLANKYLEKKINQRFDHEMFGLKPKHRYVPRMGVQG

SEQ ID NO: 13828 - DNA, 1929 bp, Homo sapiens
cagtttgcaaagggacagaattcgtctcacttattcactgcttattgtgtgcctctcgtgttttttcttcttgtgggtcggtgtatttgatgctggttagtagagacaaagaagaaggacaaacaggataaaggtggatctttggtgtggaccctctgcactgcgaaagaagccacatcaccgccaatgtggaaaatatgcaaagtgccgttaggaagaaggaaggatatgtgtgcagcatatgaagtgccttgaatacgattaacttcccttcatgagtagtaaatagtagataactctgatcaaaaaagggattcatgtgatttatcaagctgagcaactgcgcgtctgcagagaagctggaggtcaatcttgaaatctagggcaagaggagcactaggcaattgccaggactaagaagttaatcatacccttggactgcttccatctgtctcagagtgacagcgctgctctcagcgagcaggcatgctttatagcagcagatcaggaattaatattttctgtgaaacctcaagcatcatttgcagtaacttgggttttataaaaatggaacataattttatatgaataaatcacgttcagctagaaatacgagaggctgcaaaaaattatgcttgacttaaaaaaaaagagagaggaacgagcaaaaaagccaacatgaaaacagttgttgaagcgatggcacttggagggcacagatagccatgtggttaaattgtgcatataatcatctgaaatgtcagcctgcgactccagcaacggctacatttttatagccttggagatgcatcaccagactgtaacctgtctgcccatctggcagtatctcaggcccaagatccatttatattgaaatccaaacaactgccattgatttattcatttatttcacaaatatttactgaacgcatccagcatgctctgtggggtgctgtgctggggctgggggtgccaggatgagaaacagccgtgtggctgtgctcttggcttcaccagccagacgagtgttgcctttgcaaggagaaaggactcacaaggcttacacatttgctgccctcagttttgccctttctcaaataaatctcacacatccaatctccttgttgcccattagggagtatataatgaaattaagtaaatgaggaattgcctaaaactaagggagtttcacctccatgtaggtagaagaatgtgaaatggtctgtgtccagaagccagatcagaaatggtccatagcaaggtggggagggcagcgggtacccacctggcagtgtagggggttggattcagcttcatcttcctgaccccttgtcaagtggacgagctccagccaaacaaaggaagtgtgttggagtggccaccagcacagaagtgtacctttctgggtaatgtgtcacccagtcccctggccatgtgagaggacaggcacagttgccacacagtactaatagttggtctcttctttaagggtcaaaaaaaaggaggtggagcacttttaagaaagtgttaaggttccatgaagatgttatggtggcgtgctggcaggtgcatatcaaccctgccctgaggccctcagcagccttcggtctccccaaagcaatatggctccttataaagaagtcttttagggctgggctcggtagctcatgcctgtaatcccagcactttgggaggccaaggcgggcggatcacaaggtcaggagttcaagaccagcatgatcaatatggtgaaatcccatctttactaaaaattcaaaaattagctgggcgtggtggcgtgcacctgtaatcccagctactcaggaggctgaggcaggagaatcgcttgaacccaggaggcgggggttgcagtgagccgagatcacaccattgcactccagcctggatgacagagcgagactctgtctc

SEQ ID NO: 13829 - DNA, 1733 bp, Homo sapiens
  CDS (115)..(1209)
acagagctccctcccaggcccgcgaacttggccattcagccgccgctgtccccgccgcgcgccctcgcgcctctgcctgagaagccaggcgctgttcccccaccccagaagaggatggcaaaggtggctaaggacctcaacccaggagttaaaaagatgtccctgggccagctgcagtcagcaagaggtgtggcatgtttgggatgcaaggggacgtgttcgggcttcgagccacattcatggaggaaaatatgcaagtcttgcaaatgcagccaagaggaccactgcctaacatctgacctagaagacgatcggaaaattggccgcttgctgatggactccaagtattccaccctcactgctcgggtgaaaggcggggacggcatccggatttacaagaggaaccggatgatcatgaccaaccctattgctactgggaaagatcccacttttgacaccatcacctacgagtgggctccccctggagtcacccagaaactgggactgcagtacatggagctcatccccaaggagaagcagccagtgacaggcacagagggtgccttttaccgccgccgccagctcatgcaccagctccccatctatgaccaggatccctcgcgctgccgtggacttttggagaatgagttgaaactgatggaagaatttgtcaagcaatataagagcgaggccctcggcgtgggagaagtggccctcccggggcagggtggcttgcccaaggaggaggggaagcagcaggaaaagccagagggggcagagaccactgctgctaccaccaacggcagtctcagtgacccgtccaaagaagtggaatacgtctgcgagctctgcaagggagcggcccctcctgacagccccgtggtctactcggacagggcaggctacaacaagcagtggcaccccacctgctttgtgtgtgccaagtgctccgagccgctggtggacctcatctacttctggaaggatggtgcaccctggtgcggccgccattactgcgagagtctgcggccccggtgctccggctgcgatgagataatattcgctgaggactaccagcgtgtggaagatctggcctggcaccgaaagcactttgtctgtgagggttgtgagcagctgctgagcggccgggcgtacatcgtcaccaagggtcagcttctgtgcccaacttgcagcaagtccaaacgctcctgaagggctgcccacccacagccagaatccacaggatcccaccgagaaggagagccaggtgtgccgagaccatcctaagggtccgatgtgacagcaagcaagtgaaataaacaatgatttgcttttcagtgagaatatatatatgagatatatatagatatatattctaggttgggtggtggtagatccttgagggtcagtagtttcaaaaccaaaaatattctaagaagtcttaggatggagttccttttctttctgttgttgtttcccagctacaaccaactaaagacacaaatggcgttctgcaaggggactctgggaggagttttccaaaatgcaattccgagtgagcaaatcgcatagctgtagaatgtgcgtgcttttttgtggacacaggagctcctccaggagcaggctgggatcccaactatcgcttgttgcctctttttcaagtggaatttgaattttaaataaacaactttttttggcatgataaacagatcaataaaagttttgtgaattcc

SEQ ID NO: 13830 - protein, 365 aa, Homo sapiens
MAKVAKDLNPGVKKMSLGQLQSARGVACLGCKGTCSGFEPHSWRKICKSCKCSQEDHCLTSDLEDDRKIGRLLMDSKYSTLTARVKGGDGIRIYKRNRMIMTNPIATGKDPTFDTITYEWAPPGVTQKLGLQYMELIPKEKQPVTGTEGAFYRRRQLMHQLPIYDQDPSRCRGLLENELKLMEEFVKQYKSEALGVGEVALPGQGGLPKEEGKQQEKPEGAETTAATTNGSLSDPSKEVEYVCELCKGAAPPDSPVVYSDRAGYNKQWHPTCFVCAKCSEPLVDLIYFWKDGAPWCGRHYCESLRPRCSGCDEIIFAEDYQRVEDLAWHRKHFVCEGCEQLLSGRAYIVTKGQLLCPTCSKSKRS

SEQ ID NO: 13831 - DNA, 2176 bp, Homo sapiens
  CDS (33)..(1490)
tctctctgtcacctcacccttccctgtgccacatgggccctctctctcctgccaggacgctgcggctctggggacctcggagcctgggggtggctctgggagtcttcatgaccattggctttgcactccagctcttgggagggcccttccagaggaggctacctgggctacagctccgacagccctcggccccatccctacgaccagcccttccgtcctgcccaccccggcagcgactggtgttcctgaagacacataaatccgggagcagctctgtgctgagcctgcttcaccgctatggggaccagcacgggctgcgcttcgccctccctgcccgctaccagtttggctacccaaagctcttccaggcctctagggtaaaaggctaccgcccacagggtggaggcacccagctccccttccacatcctctgtcaccacttgaggttcaacctgaaagaggtacttcaggtcatgccttctgacagcttctttttttccattgtccgagacccagcggctctggctcgctctgccttctcctactataaatccacctcatcagccttccgcaagtcaccatctttggctgccttcctggccaatcctcgaggcttctacaggcctggggcccgtggggaccactacgctcgcaacttactatggtttgactttggcctgccctttcccccagagaagagggccaagagagggaatattcatccccccagagaccccaaccccccacagctgcaggtcttgccttctggtgctggccctcgagcccaaaccctcaatcccaatgccctcatccatcctgtttccactgttactgatcatcgcagccagatatcaagccctgcctctttcgatttggggtcttcatccttcatccagtggggtctggcatggctggactctgtctttgacctggtcatggtggctgagtacttcgatgagtcattggttctgctggcagatgccctgtgctggggtctagatgacgtggtgggcttcatgcacaatgcccaggctggacataagcagggcctcagcactgtcagcaacagtggactgactgcggaggaccggcagctgactgcacgggcccgagcctggaacaacctggactgggctctctatgtccacttcaaccgcagtctctgggcacggatagagaaatacggccagggccggctgcagacagctgtggccgagctccgggctcgccgagaggccctagcgaaacattgtctggtagggggtgaggcttctgaccccaaatacatcactgatcgccggttccgccccttccagtttgggtcagctaaggttttgggctatatacttcggagaggattgagcccccaagaccaagaggaatgtgagcgcctagctacccctgagctccagtacaaggacaagctggatgccaagcagttcccccctaccgtctcactgcccctcaagacttcaaggccactctccccataaacatcagactacagatttaggtggaagagcagccatgtttgaagggcacatgtgatgagtggggggcagcaagatgccatttctgcatctcccagaagggatgagtctttgtcccgatgcaagccccctcttcgctgggctcccagcagtgcttccctcctccaccctccactcattttgttctttccccccaactttttttttttttgaaacggagtcttgctctgtcccccaggctggagtgcagtggcatgatctcggctcactgcaacctctgcctcccaggttcaagcgattctcctgcctcagcctccagagtagctaggattacagatacgtgccaccatacccggctaatttttatatttttagagacagggattcaacatgttggttaggctggtcttgaactcctcacctcaggtgatccacatgactctgcctcccaaagtgctgccattacaggcgtgagccactaggcctgacctccccttcccctttcctgccccaaggcagatccacatcaccgaagctccctagaggggcaaaagatggagtgagccacaggaagtttggggcgtggtgagttggaatgatacgtccatttctctatgaaatatttgctactagactgttcatttctctctgacatgtttgttgaatgaataaataatttgaaactt

SEQ ID NO: 13832 - protein, 486 aa, Homo sapiens
MGPLSPARTLRLWGPRSLGVALGVFMTIGFALQLLGGPFQRRLPGLQLRQPSAPSLRPALPSCPPRQRLVFLKTHKSGSSSVLSLLHRYGDQHGLRFALPARYQFGYPKLFQASRVKGYRPQGGGTQLPFHILCHHLRFNLKEVLQVMPSDSFFFSIVRDPAALARSAFSYYKSTSSAFRKSPSLAAFLANPRGFYRPGARGDHYARNLLWFDFGLPFPPEKRAKRGNIHPPRDPNPPQLQVLPSGAGPRAQTLNPNALIHPVSTVTDHRSQISSPASFDLGSSSFIQWGLAWLDSVFDLVMVAEYFDESLVLLADALCWGLDDVVGFMHNAQAGHKQGLSTVSNSGLTAEDRQLTARARAWNNLDWALYVHFNRSLWARIEKYGQGRLQTAVAELRARREALAKHCLVGGEASDPKYITDRRFRPFQFGSAKVLGYILRRGLSPQDQEECERLATPELQYKDKLDAKQFPPTVSLPLKTSRPLSP

SEQ ID NO: 13833 - DNA, 2123 bp, Homo sapiens
gtgtaatggatttaaatttttaggtatctttgtctactttttcataaaatgaaagaacctggctgggcgcggtgactcatgcctgtaatcccagcacttctgggaggccgagacaggtggatcacgaggtcaggagttcaagactagcctggccaagatgctgaaaccccgtctctactgaaaatacaaaaattagccaggcatggtgtcatgcacctgtcatcccagctacttgggaggctgaggcaggagaatcgcatgaacccgggcagcagagattgcagtgagccaagatcgcaccactgtactccagcctgggcgacagagcaagactccatctcaaaaaattaaaaaaaaaaaaaaaagaacccaaatggcattttccttgatgtagtcacattttttgtgatgataatgtacaggatatctagcaattatgctggacatataagcacataagatttatgaaatgattttggataatgtataaggtactggaatctggcactttatttgctacttattttcagcactttatttgctattttctgtctctgatgagtagatccccatttgtaccacagtattaatttttaatttttcttgattatcattataaacagaatcagaggcagcactgagttttcaaattactcttgctttgcttcacagttccgtagagatatctcaggggtgcctgtgagcagatgctgagtgaaccctgccccagtcttgtccctacctctaccccacctctgtatcatagaaagagaaccagatgttttaggttcaagtcctgtctcttatatttattaactgtgaaaccctatttcacttctttgagctttgattttcatctttaatgataattatttcagtagatgatgatgatgatgatgatgatgatgtaatgttttaaagtgctaactatgtgccaggcactgaattaagtgtattacaaaatttaatcctcataaaagcccttgtgaattatatggactgttactactattttatagatgaggaaattgagacttagattctgtaactatttttctaaaaactgttctgtgtcggaaatgaaattcaaattccgggcagccaaataccaaagcttgaattcttagccatgagctttatacctcctctgcagaatttttgtgaggattgcatttgctactatatgtggaaggacttcataaaatatgaaactctgtactagggatgccaattcagttgcattcccagtaacatcttaatctattggtaactactgtatagaaagcactgtgatgagaaaagttttttgtgtccacctcaggcgggaatgagaactgagatcagttagtagtatctgctgtgggtatgctttgtccttattgtgttacacatagtattattattattagactattttgcgtagatttattgaattgcttttatttctagctctttccattttctgagcattttttcctttggaattgaattcaggcttacaagtacattgaaaattttaagaaaacaattataaggaaactaaaccatttccccattgtagtaaagtgtccttaaaaataattacttgaattattaagctagagtgcctcagaaatatatttgcttatactttaatttttcttcttgaaagtaatgcgtcagaatgtgaagcgagcaacatttgatgaagtcttagaactcatggccacaggatttctgcgtggagggtcaggtttcttaaagagcggtggagaaatgttaaaagttggagggtccgttaatcgtgaagtgagagttggagttacgcaggtttgtaacacgtatgtgtgaaagaattttggccaggcacggtcgctcacgcctgtaatcccagcatttttggaggccaaggcgggcagattgcctgaggtcaggagtttgagaccagcctgactaacatggtgaaaccccatgtctactaaaaacaccaaaaaattagccaggtgtggtggcgcatgcctgtagtcccagcttctcaggaggctgaggcaggagaatcgcttcaactagggaggtggaggttgcagttagccaagattgcgccactgcactccaacctgggtgacagagcgagactccatctc

SEQ ID NO: 13834 - DNA, 1829 bp, Homo sapiens
  CDS (459)..(812)
gagtggggacttttgtccctttttgtcagtgggaggctgggctgggagaggaggcaaggaacagcacactgtagaaatggagagtgaggaatgggagaggcccagagctcagtatgcaagctgtgtacagcggaggttgccggactgtctctgatgggctgctagtggggtggtgctggggaaggttgactcgctaaaagaaaggctgctgcagtcacatgttatagggtacatctgtgagaattagggaaaggaaattgctccgtgtcaatgcagtcttacccagggcacatggcttggggatgatgtatgaagtggactttagttccctgggtttagttcccttgttgtgcagtgcacggcttggacaaatacatgggtggccttgactaaaaggctttggttcaaccaggtgcttttctcatcgcagcttaactcctggcttcctaacactccccatgcgaggcagccccaattcacctctaaccctgggaggtgccaggaaacagagttggagccgcatctactgcttgacttctcaatgcaaacttaactattttaaagtgtacagttcagtggcattcaataaattcgcaatgtcgtgcagccaccacctctgtctagttccaatacgttttgttattgcctcaaaggaaaccccgtacccacgaggcagtcactccccattcctcctcctccagcacctggaaactactaatttgttttcttttcctataagtttgcctattccgaacattttgtataaacagaatcagaccagatgtgacctgttgcatcttgtttctcccgcttagcatagtggtggaagattcacccatggtgtagcatgcatcagtacttgactcctttttatggccttaggacaggccagggcatatgtatcccacattttaccacattttgtttatccatttatctgttgatggacccctgtgctgttcccatcctttggctgttgtgaatagtgctgctataaatatgcatttacaagtttttgtttgaacacctattttcagtcctttggggatacagagccaggagtggaactgctgagttacacagtaattcaacatttaactttttggaaaactgccaaactgttttccacgacatctgcaccattttacgttcctgtcaacaatgtgcaaaggtttccatttctccacctgtgtcaacacttgttattttccattttaaaacattatagccacccttgttagagtgaagtagaatctcattgtggtttttgatttgcatttccctgatgacaagtgacattatacatattttcatgtgctcattggccacttgtgtgtcttcttcaaagaaatgtctattcaagtcctttgcccatttttaaattggttgtttgtctttttttgttgagttgtaagtgctctttatatattctggaggctgactgacttttattcttctaagtcaaaggtgctttagcccaagtcctgtcactcaaaaagaaggctgggtgcagtggctcttgcctgtaatcccagcactttgataggctgagtcaggaggatgacttgagcccaggagtttgagaccatcctgggcaacagggtgagaccttatctctataaaaaatgtttaaaaaattagccagggacggtggcatactcctgtagtcccagctactccagagattgaggcatgaggattgcttgagcttggaaggtcgaagctgtggtgagctgttgattgcaccactgcactctagcctgcgtgacacaaccacactgtagcctgtctcaaagaaagaaagaaagaaaagaaagaaagagagagag

SEQ ID NO: 13835 - protein, 118 aa, Homo sapiens [sequence omitted]

SEQ ID NO: 13836 - DNA, 2571 bp, Homo sapiens
  CDS (44)..(1789)
agcttcgcgctagtgctgtttttttttttttttttttttagcaatggcggttcccggcgtggggctcttgacccgtttgaacctgtgtgcccggagaagaactcgagtccagcggcctatcgtcaggcttttgagttgcccaggaactgtggccaaagaccttaggagagacgagcagccttcagggagcgtggagacaggctttgaagacaagattcccaaaaggagattctctgagatgcaaaatgaaagacgagaacaggcacagcggactgttttaatacattgcccagagaaaatcagtgaaaacaagtttcttaaatatttatcccaatttggacctattaataatcatttcttctatgaaagctttggtctctatgctgtcgtagaattttgccaaaaggaaagcataggttcactgcagaatgggactcatactccaagcacggccatggagactgcaattccattcagatcacgtttcttcaatctgaagttgaaaaaccagacttctgaacggtcacgcgtacggtcaagtaatcagttgccacgttcaaacaagcagctttttgaattactttgttatgcagaaagtatagacgatcagctgaacactctcttgaaggagttccagctaacagaggagaacactaagctccgatatctcacctgttctcttattgaagacatggccgccgcgtattttccagactgcatagtcagaccctttggctcctcagtcaacacttttgggaagttaggatgtgatttggacatgtttttggatctagatgaaaccagaaacctcagcgctcacaagatctcaggaaattttctgatggaatttcaagtgaaaaatgttccttcagaaagaattgcaactcagaagatcctgtctgtgttaggagagtgccttgaccactttggccctggctgtgtgggtgtgcaaaaaatattaaatgcccggtgtccgctcgtgaggttctcacaccaggcctccggatttcagtgtgatttgactacgaacaataggattgccttgacaagttccgaactcctttatatatatggtgccctagactcaagagtgagagccttggtgttcagtgtacggtgctgggctcgagcacattcactaacaagtagtattcctggtgcatggattacaaatttctcccttacaatgatggtcatcttttttctccagagaagatcaccccctattcttccaacactagattccttaaaaaccctagcagatgcagaagataaatgtgtaatagaaggcaacaactgcacatttgttcgtgacttgagtagaattaaaccttcacagaacacagaaacattagaattactactgaaggaattttttgagtattttggcaattttgctttcgataaaaattccataaatattcgacagggaagggagcaaaacaaacctgattcttctcctctgtacattcagaatccatttgaaacttctctcaacataagcaaaaatgtaagtcaaagccagctgcaaaaatttgtagatttggcccgagaaagtgccttgattttacaacaggaagatacagatcgaccttccatatcaagtaatcggccctgggggctggtatccctattgctaccatctgctccaaacagaaagtcctttaccaagaagaaaagcaataagtttgcaattgaaacagccaaaaacttgctagaatctttaaaaggtaacagaacagaaaatttcacaaaaaccagtgggaagagaacaattagtactcagacatgatggctgctacattgtgtaaagaactgggcttagcctatcaaatggtctgtggacttacttggaaaaactgatttgaaactttcacagatctcagctttcatctgatgtcacttttcatgatcttctcattggcccccttaacctggtctgaagttctgggatgttttcagtttgatcagtctgatactcagtggcactttattaaaacatcagctgtggagtgtggcggtgcacacctgtagtcccagctgctcaggaggctgaggcaggaggatctcttgagcccaggattttgaatccatcgtggacaacatagcaagattccatctctaaaaaaaatgaaaataaacataagccacaaggaatgggtgaaagattattgtaatgtgctttaactaaataggtaaatatactaaacaaatgctaaaactcagttttaggatgaaaccattgttgatatccacatcagtccctgtttagaaaacatttaaaatgacttttagttatgtacagtacgttggcaatgaatacattaagcttcaaaatttggtagtgctctcgaatatgtatatttgtatttttcaagcgaagttctcttattcacatataaattaaagtgggttggtactgatatcaaaaaatgtttatgtttttagaacagacatttcagtcactgcattcttaggtattccaaaccaaatatgatgacatcaatagattgcattttaaaaatattgtttgatttttctattttcaaaaataaaattctgtttctaact

SEQ ID NO: 13837 - protein, 582 aa, Homo sapiens
MAVPGVGLLTRLNLCARRRTRVQRPIVRLLSCPGTVAKDLRRDEQPSGSVETGFEDKIPKRRFSEMQNERREQAQRTVLIHCPEKISENKFLKYLSQFGPINNHFFYESFGLYAVVEFCQKESIGSLQNGTHTPSTAMETAIPFRSRFFNLKLKNQTSERSRVRSSNQLPRSNKQLFELLCYAESIDDQLNTLLKEFQLTEENTKLRYLTCSLIEDMAAAYFPDCIVRPFGSSVNTFGKLGCDLDMFLDLDETRNLSAHKISGNFLMEFQVKNVPSERIATQKILSVLGECLDHFGPGCVGVQKILNARCPLVRFSHQASGFQCDLTTNNRIALTSSELLYIYGALDSRVRALVFSVRCWARAHSLTSSIPGAWITNFSLTMMVIFFLQRRSPPILPTLDSLKTLADAEDKCVIEGNNCTFVRDLSRIKPSQNTETLELLLKEFFEYFGNFAFDKNSINIRQGREQNKPDSSPLYIQNPFETSLNISKNVSQSQLQKFVDLARESALILQQEDTDRPSISSNRPWGLVSLLLPSAPNRKSFTKKKSNKFAIETAKNLLESLKGNRTENFTKTSGKRTISTQT

SEQ ID NO: 13838 - DNA, 2142 bp, Homo sapiens
cttagatgcctacctggtgttctgttgtattgtggctgagctggcactcaaattacaagacacagtcctttccactcttccctcccctttccttctagttctttcactcactgactttataaaaaggagaatatgtccaacacattgtttcattacctagtatagttcctttaatgacacataacaaacatcttttaacataaccgttacgtgtttcttctgtaaccgtaattttaaacatctacacaggatttcattgaacagtaactttagtccctgcttcctgaacaccgaggtgctcaataacttacatacattacctccctgaggtctcttggaggtaggtatggttgctgccatcttgtagatggggaagctgaggctgagacatgcaaagccacagcctgggttcacacagctggtcagagacaggatcaggattcaagcccaggtgtgtttaccaccaaagccaaaggacttccattgcggaggaaggctggctgccccagaggaggctacagcatgtaataggaggtcttctcctgtagctctgtgaacactgtgagccagctcaggcaagaatctgccccccaaaaagatacccaaatggccaataggacatatgaaaaggcagtcagccacactagcagtctagacaatgcaaattagaaccacaaggtgatggataccactacccacccacaagaatggctaaaaggaaaaagacaggtaatatgaagtattggagatgctcacataccactggtgcaagtgtcaattggcacaaccactttggaaaactgcttggcagtatctattaaagttgcacatgtgtataacttaccaccccagaaatgcacatttatgtactccaaaatgcatgtttgtggcattaaaatgttcatggcagcaccatttgtcataaccccaaattggaaactactcagatgtccattagcaataggattgggtaaatcctcattgcatgaatatactaggcagcagtgagaatgaactattgttgaatgcaacaatatgaatgaatctcaaaatatattgagtgagagaatctagacttaaaagacacatagtgtatgattttattatatggagtctaagaacaggcaaaagtcgtatgtggtgctagaagtcaggatggttggctcttgttccttgatctggatgctggttacatgggtgcattcatttcatggcaattcatcaagctgtaggttcgtatgtttttgattgaagcattacctacacttttttgagtggggctctgcaattagcaggtagcaaaaccagccaggcctgtgtccttccctgcagggtggtgtacacttttttgagtgtaggtaatgcttcaatcaaaatttacattaggccagttgcggtggctcacgcctgtaagcccagcactttgggaggccaagacaggcagatcacttgagcccaggtgtttgagaccaacctggccaccatagtgaaaccccatccctactaaaaatacaaaaattagctgggcacagtgatgcacacctatagtcccagctacttgggaggctgaggcatgagaatcacttgaacccaggaggcacaggttgcagtgagccaagatcaagccagtgcactccagcctgggtgacaaagcgagactctgtctcaaaaaaaaaaaaattacattagaagttgggtatggtagtgtgcacctgtagttccagctacttggcaggctgaagccggagggtcacttgagtccaggaattcaaggccagcctggaatagcaagaccttgccactttaaaaaaatcacagaggggctgggcgcaatggctcatgcctgtaacccagcactttgggaggccgaggcgggtggatcacctgaggtcaggagttcaagaccagcctgtccaacatggaacagttggcccaacatgggccaataaatatcccatgtatatttttagtctctactaaaaatacaaacaattagctaggcgtggtggcagacgcctgtgatcccagctactcggggggctgaggcaggagaattgcttgaacccaggaggcggaggttgcagtgagccaggattgtgccattgcactccagcatgggctacaagagcgaaactccgcctc

SEQ ID NO: 13839 - DNA, 2068 bp, Homo sapiens
  CDS (28)..(1344)
agcggcgcggagactgcggggcgggccatggcggcgaacctgagccggaacgggccagcgctgcaagaggcctacgtgcgggtggtcaccgagaagtccccgaccgactgggctctctttacctatgaaggcaacagcaatgacatccgcgtggctggcacaggggagggtggcctggaggagatggtggaggagctcaacagcgggaaggtgatgtacgccttctgcagagtgaaggaccccaactctggactgcccaaatttgtcctcatcaactggacaggcgagggcgtgaacgatgtgcggaagggagcctgtgccagccacgtcagcaccatggccagcttcctgaagggggcccatgtgaccatcaacgcacgggccgaggaggatgtggagcctgagtgcatcatggagaaggtggccaaggcttcaggtgccaactacagcttccacaaggagagtggccgcttccaggacgtgggaccccaggccccagtgggctctgtgtaccagaagaccaatgccgtgtctgagattaaaagggttggtaaagacagcttctgggccaaagcagagaaggaggaggagaaccgtcggctggaggaaaagcggcgggccgaggaggcacagcggcagctggagcaggagcgccgggagcgtgagctgcgtgaggctgcacgccgggagcagcgctatcaggagcagggtggcgaggccagcccccagagcaggacgtgggagcagcagcaagaagtggtttcaaggaaccgaaatgagcaggggtcaacatgtgcttccctccaggagtctgccgtgcacccgagggagattttcaagcagaaggagagggccatgtccaccacctccatctccagtcctcagcctggcaagctgaggagccccttcctgcagaagcagctcacccaaccagagacccactttggcagagagccagctgctgccatctcaaggcccagggcagatctccctgctgaggagccggcgcccagcactcctccatgtctggtgcaggcagaagaggaggctgtgtatgaggaacctccagagcaggagaccttctacgagcagcccccactggtgcagcagcaaggtgctggctctgagcacattgaccaccacatccagggccaggggctcagtgggcaagggctctgtgcccgtgccctgtacgactaccaggcagccgacgacacagagatctcctttgaccccgagaacctcatcacgggcatcgaggtgatcgacgaaggctggtggcgtggctatgggccggatggccattttggcatgttccctgccaactacgtggagctcattgagtgaggctgagggcacatcttgcccttcccctctcagacatggcttccttattgctggaagaggaggcctgggagttgacattcagcactcttccaggaataggacccccagtgaggatgaggcctcagggctccctccggcttggcagactcagcctgtcaccccaaatgcagcaatggcctggtgattcccacacatccttcctgcatcccccgaccctcccagacagcttggctcttgcccctgacaggatactgagccaagccctgcctgtggccaagccctgagtggccactgccaagctgcggggaagggtcctgagcaggggcatctgggaggctctggctgccttctgcatttatttgccttttttctttttctcttgcttctaaggggtggtggccaccactgtttagaatgacccttgggaacagtgaacgtagagaattgtttttagcagagtttgtgaccaaagtcagagtggatcatggtggtttggcagcagggaatttgtcttgttggagcctgctctgtgctccccactccatttctctgtccctctgcctgggctatgggaagtggggatgcagatggccaagctcccaccctgggtattcaaaaacggcagacacaacatgttcctccacgcggctcactcgatgcctgcaggccccagtgtgtgcctcaaccgattctgacttcaggaaaagtaacacagagtggc

SEQ ID NO: 13840 - protein, 439 aa, Homo sapiens
MAANLSRNGPALQEAYVRVVTEKSPTDWALFTYEGNSNDIRVAGTGEGGLEEMVEELNSGKVMYAFCRVKDPNSGLPKFVLINWTGEGVNDVRKGACASHVSTMASFLKGAHVTINARAEEDVEPECIMEKVAKASGANYSFHKESGRFQDVGPQAPVGSVYQKTNAVSEIKRVGKDSFWAKAEKEEENRRLEEKRRAEEAQRQLEQERRERELREAARREQRYQEQGGEASPQSRTWEQQQEVVSRNRNEQGSTCASLQESAVHPREIFKQKERAMSTTSISSPQPGKLRSPFLQKQLTQPETHFGREPAAAISRPRADLPAEEPAPSTPPCLVQAEEEAVYEEPPEQETFYEQPPLVQQQGAGSEHIDHHIQGQGLSGQGLCARALYDYQAADDTEISFDPENLITGIEVIDEGWWRGYGPDGHFGMFPANYVELIE

SEQ ID NO: 13841 - DNA, 2178 bp, Homo sapiens
  CDS (76)..(540)
agacggcggcggcgtggccgcacgcgcggcccggcttctgtcctcgcggcgctccggctcctggccccccacgccatgcagccgtccccgccgcccaccgagctggtgccgtcggagcgcgccgtggtgctgctgtcgtgcgcactctccgcgctcggctcgggcctgctggtggccacgcacgccctgtggccggacctgcgcagccgggcacggcgcctgctgctcttcctgtcgctggccgacctgctctcggccgcctcctacttctacggagtgctgcaggacttcgcgggcccgtcgtgggactgcgtgctgcagggcgcgctgtccaccttcgccaacaccagctccttcttctggaccgtggccattgcgctctacttgtacctcagcatcgtccgcgccgcgcgcgggcctcgcacagatcgcctgctttgggccttccatgtcgtcaggtgggtggcggtggcgctgcttttccaggagcccccgacacaggccgacccctcccggtcttgccctcccagaggccgcgtctaggttggacaccccctacccacagcaagcagtgcctgctggcgcccccgaggctgtcctgggccagcgggaggaggccagccttgcccgagattcgctccctcccgaaggagccccgctgtgcctgccccagggcacagccccttggggtagtggggacagagttcgcccccagagccgggccctgtttccttggacggggctggggaggacactctgagccccttgtgacctgcttcactgtgtcctggctgtctctgctgcccatggggaaacaggctgggagacgagttaggtaactgtcccgggctggagagccggcaactgccagtcccacgccaccaccccaccccaagccacagtgagcttggtgcactccgccactcccgagctgccgtgtctctgctgtacagtttacaaaggactgtgctttttattctgtctttggtcgtttctagcctcaggccccagccccttgtatttctgttctagatgatcttgactttccagagttcagcaattctgagattgagggcaggggcggagggctggtctgggagtctcggagtcctcctggagtctctctgagagtggggaaaagccaagaccttactttgcgattcaagcgtctttcaagtaagcctcgctgaagagggtcggcccttccctggggaatgtcaggttttgaaaatctcatggcgtcctgtgctgtgctgaactgagggcaggaatcctaggggctgttttccttttctccttctcccagatcagagcatcagatactgccctaattataggtcctttctattaaaaacttaagtgcattccaaggactgcgagcacagtcagcactttggcagagacaggtcacctgggtgtcacacggcaaggctacagggctgtaagagtcgcttgaccttcagttgtgcactgaggccggctggtccttgagaaactaagtgacctgcttctcagctgtacaagtaaaaaatctttgcaacacatcatccaaaccgaggctcagatgctgcagatggaatagggccctgccttgccttgccttcccggcagcatcccatctgaccctgtctgggtcccgtgatggctggctgggtgtgggccccgagtacacgggagatcgtgtgtacttggaaggagtcgaggctgtacctctctttgcaagaacctgttctctttcccttcttgtctttaaaaatattgaatacagtatttttttaatggtaacagaacctggtccagcttctgtggaaaagaaggattgcccagcaaacctgagttgggggtttttctgttcggttctcattacggaccctctaggggggtttctgtgttgttcaggaagggcttctttgataaagaagtaggcccagtgtggtggcttgtacccgtaatcccagcactttgggaggccgaggcgggagcatcgcttgagcccaggagttcaactggccaacacggtgaggctttgtctctactaaaaatttaaaaattggctgggcatggtggcgcatgcctgtagttccagctacttgtgaggctgaggtgggaggatcgcttgagcctgggaggtcgaggctgtagtgagctatgactgcagacagagcaacaccctctctc

SEQ ID NO: 13842 - protein, 155 aa, Homo sapiens
MQPSPPPTELVPSERAVVLLSCALSALGSGLLVATHALWPDLRSRARRLLLFLSLADLLSAASYFYGVLQDFAGPSWDCVLQGALSTFANTSSFFWTVAIALYLYLSIVRAARGPRTDRLLWAFHVVRWVAVALLFQEPPTQADPSRSCPPRGRV

SEQ ID NO: 13843 - DNA, 1849 bp, Homo sapiens
  CDS (507)..(1475)
gctctgcctggtggcgccgggaggctgtttttccactcactggcgcgcagactccatcccactgttttcttctctcttttctggagttagattagtctgaagccgccaccagccccaggcccccgtgcagaagaaaagcgggagggaacggcggaggccgccgctgccctgcaccgccctcctggaggccacttggagagtccggccccgaggaggccatggccacaagtgcccacagctggccccaggcggggtggagcggagctgctgggaggctgctggataggagaggggtcacggctgcggaagaggaggttcttcgggacacccgtggatggacacggcaaggaaacaccaggccaaccacagctggggataaaatagcacaaccacaccctgccgtccagcgcctcccagcctgtgccccttcctagtaccaccagcaaccatcaatcccgtctcctcctgcctcctctcctgcaatccaccccgccacgactatcgccatggcagccctgatcgcagagaacttccgcttcctgtcacttttcttcaagagcaaggatgtgatgattttcaacggcctggtggcactgggcacggtgggcagccaggagctgttctctgtggtggccttccactgcccctgctcgccggcccggaactacctgtacgggctggcggccatcggcgtgcccgccctggtgctcttcatcattggcatcatcctcaacaaccacacctggaacctcgtggccgagtgccagcaccggaggaccaagaactgctccgccgcccccaccttcctccttctaagctccatcctgggacgtgcggctgtggcccctgtcacctggtctgtcatctccctgctgcgtggtgaggcttatgtctgtgctctcagtgagttcgtggacccttcctcactcacggccagggaagagcacttcccatcagcccacgccactgaaatcctggccaggttcccctgcaaggagaaccctgacaacctgtcagacttccgggaggaggtcagccgcaggctcaggtatgagtcccagctctttggatggctgctcatcggcgttgtggccatcctggtgttcctgaccaagtgcctcaagcattactgctcaccactcagctaccgccaggaggcctactgggcgcagtaccgcgccaatgaggaccagctgttccagcgcacggccgaggtgcactctcgggtgctcgctgccaacaatgtgcgccgcttctttggctttgtggcgctcaacaaggatgatgaggaactgattgccaacttcccagtggaaggcacgcagccacggccacagtggaatgccatcaccggcgtctacttgtaccgtgagaaccagggcctcccactctacagccgcctgcacaagtgggcccagggtctggcaggcaacggcgcggcccctgacaacgtggagatggccctgctcccctcctaaggaggtgcttcccatgctctttgtaaatggcactacttggtcccaaactgaaccccactgcttgctcacatccatatcagaaggggatttttaaaaaactgttatcttcttggccaggggaaaggaccacaaggcaatctggggtgtggacagacccagtagacaatggaagccccagccagcagggccaggtgacagtgaagctcaccagtgggctcctttatggtactctatgcagttaacatgtatctagctgcatagggacacccagcgcagcagtgcaccactgggaagtggcctccagtgcagcctctggccttattttatatatttaaatttttgataaagtttttcttactaaaaggaaaaac

SEQ ID NO: 13844 - protein, 323 aa, Homo sapiens
MAALIAENFRFLSLFFKSKDVMIFNGLVALGTVGSQELFSVVAFHCPCSPARNYLYGLAAIGVPALVLFIIGIILNNHTWNLVAECQHRRTKNCSAAPTFLLLSSILGRAAVAPVTWSVISLLRGEAYVCALSEFVDPSSLTAREEHFPSAHATEILARFPCKENPDNLSDFREEVSRRLRYESQLFGWLLIGVVAILVFLTKCLKHYCSPLSYRQEAYWAQYRANEDQLFQRTAEVHSRVLAANNVRRFFGFVALNKDDEELIANFPVEGTQPRPQWNAITGVYLYRENQGLPLYSRLHKWAQGLAGNGAAPDNVEMALLPS

SEQ ID NO: 13845 - DNA, 1900 bp, Homo sapiens
  CDS (128)..(1195)
tatattccgtgggagtgacattaaagaccttactgtttgtgagccaccaaaaccacagtgttctttgcctcaagacccagctattgttcagtcctcactaggctcatcgacttcttcattccagtccatgggttcttatggacctttcggcaggatgcccacatacagtcagttcagtccgagttccttagttgggcagcagtttggtgctgttggtgttgctggaagctctttgacatcctttggaacagaaacatcaaacagtggtaccttaccccaaagtagtgcggttggttctgcctttacacaggatacaagatctctaaaaacacagttatctcaaggtcgctcaagccctcagttagaccctttgagaaaaagcccaaccatggaacaagcagtgcagaccgcctcagcccacttacctgctccagcagctgttgggagaaggagtcctgtatcaaccaggcctttgccatctgccagccaaaaggcaggagagaatcaggagcacaggcgagctgaagtacacaaagtttcaaggccagaaaatgagcaactcagaaatgataacaagagacaagtagctccaggtgctccttcagctccaaggagagggcgtgggggtcatcggggtggcaggggaagatttggtattcggcgagatgggccaatgaaatttgagaaagactttgactttgaaagtgcaaatgcacaattcaacaaggaagagattgacagagagtttcataataaacttaaattaaaagaagataaacttgagaaacaggagaagcctgtaaatggtgaagataaaggagactcaggagttgatacccaaaacagtgaaggaaatgccgatgaagaagatccacttggacctaattgctattatgacaaaactaaatccttctttgataatatttcttgtgatgacaatagagaacggagaccaacctgggctgaagaaagaagattaaatgctgaaacatttggaatcccacttcgtccaaaccgtggccgtgggggatacagaggcagaggaggtcttggtttccgtggtggcagagggcgtggtggtggcagaggtggtaccttcactgcccctcgaggatttcgcggtggattcagaggaggtcgtgggggccgggagtttgcggattttgaatataggaaagacaacaaagttgctgcatagtctacaaacaagtctctgaaaataggtgaatttctagctcttcatggtcctgaacattgatttcagtctttgcaaagaatgaagaagtgaattcgctgtacatttgtcaccagcactgggtttttgttttttgtttgtttttccgcttaatttcaaagataaaatgcagttacttttgggggtggaaggctcatcttaaaacatgagcattaaatatatttggaatagcagaaggttaagtaatttcttatgtatagttaaactaaagcagtacttcagtgggacttaacaagtattttttcatcactgaaaggttttttttttttatcactaaattgtatttggcaattgcaagttgcctgcagatagggccgtgatactgtgttttgagccacagaaggttgtgtgtgtgtgtgtgtgtgtgtgtgtgtgtgtgtgtgtatgtgtgtgtctttttcctcctttcttttggggaatcctgtaatatgaggtagcttatttcgtcaattaattagggtgctggatggtagagaattttgtcagtcaactatgtacacacagtaaatactgtttcttaggcaaaggtaacttttttatatagttgtaaaattccattatattccattgccaaagaaacattaagaactttgtatagctgtataaaaagcaactaattttttaaagaataaacattttaaagtc

SEQ ID NO: 13846 - protein, 356 aa, Homo sapiens
MGSYGPFGRMPTYSQFSPSSLVGQQFGAVGVAGSSLTSFGTETSNSGTLPQSSAVGSAFTQDTRSLKTQLSQGRSSPQLDPLRKSPTMEQAVQTASAHLPAPAAVGRRSPVSTRPLPSASQKAGENQEHRRAEVHKVSRPENEQLRNDNKRQVAPGAPSAPRRGRGGHRGGRGRFGIRRDGPMKFEKDFDFESANAQFNKEEIDREFHNKLKLKEDKLEKQEKPVNGEDKGDSGVDTQNSEGNADEEDPLGPNCYYDKTKSFFDNISCDDNRERRPTWAEERRLNAETFGIPLRPNRGRGGYRGRGGLGFRGGRGRGGGRGGTFTAPRGFRGGFRGGRGGREFADFEYRKDNKVAA

SEQ ID NO: 13847 - DNA, 3471 bp, Homo sapiens
  CDS (70)..(3144)
tttgctgaggggcaggcacaggagtcctggctgagctcatggcctgaggctgcctagcggccacggggaatggttgcaatggcggaggcagaggcaggggtggcagtggaggtccgtggactgccccctgccgtgcccgacgagctgctcactctctactttgaaaaccgccgacgctctggagggggacctgtgttgagctggcagagactgggctgtgggggcgtcctcaccttcagagagcctgcagacgccgagagggtcttggcccaggcagatcatgaactacatggtgcccagctgagcctgcggccagctccaccacgagcccctgcacgcctgctgctccaaggactgccccctggcaccacgccccagcgcttggagcagcatgtccaggccttgctgcgggcctcggggctcccagtacagccttgctgtgccttggccagcccccggccagaccgggctctggtccagttgcccaagcccctttctgaggcagatgtccgtgtcctggaggagcaggcccagaatctgggcctggaggggaccttggtgtccctggcccgggttccccaggcccgagcggtgcgtgtggtgggggatggtgcctctgtggacctgctgttgctggagttgtacctggagaatgagcgccgcagtggtggggggcccctggaggacctgcaacgcctacccgggcccctgggcactgttgcctccttccagcagtggcaagtggcagaacgagtgttgcagcaggagcaccggttgcagggctcagagctgagccttgtcccccactacgacgtcctggagcccgaggagctggctgagaacaccagtggaggggaccacccgtccacccaggggcctagggctaccaagcatgctctcctgaggaccggagggttggtgacggctctgcagggtgcagggactgtgacaatgggctctggcgaggaaccagggcagtcaggggcctctctgaggacaggtcccatagtgcagggtagagggattatgacaacaggctctggccaggaaccagggcagtcagggacctctctgaggacaggtcccatggggtctctgggacaggcagagcaagtcagctcgatgcccatggggtctctggaacatgaggggctggtaagcctgaggcctgtggggttgcaggaacaggaggggcccatgagcctggggcctgtggggtctgcaggcccagtggagacctctaaggggttgccggggcaggagggcctggtggaaattgccatggactcaccagagcaagaggggctggtgggtcccatggagatcaccatggggtctctggagaaggcagggcctgtgagcccaggatgtgtgaagctggcagggcaggagggcctggtggagatggtgctattgatggagccaggggcgatgcgcttcctgcagctctaccatgaggaccttcttgcgggcctgggagacgtcgctctcttgccacttgaaggaccggatatgactggctttcggctctgtggagcccaggcttcctgccaggcggctgaggagtttctgcggagcctgctgggcagcattagctgccatgtgttgtgcctggagcactcgggcagcgccaggtttctcctgggcccagaagggcagcaccttctccaggggctggaggctcagttccagtgtgtctttgggacagagcgcctggccacagccacgttggacacaggccttgaagaggtggaccctaccgaggccctcccagtgctccctggcaacgcccacaccctgtggaccccagacagtacaggtggtgaccaggaggacgtgagcctggaggaggtccgagaactgctggccaccctggagggcctagacctagacggggaggactggctgcctcgggagctggaggaggaagggcctcaggagcagccagaggaggaggcgaccccagggcatgaggaggaggagcctgtggcccccagcactgtggcacccaggtggctggaggaggaggccgctctgcagctggccctccaccggtcactggagcctcaaggtcaggtggctgagcaggaggaggctgctgccctgcggcaagccctaaccctctccctgctggagcagcccccgttggaggcagaagagcccccagatggggggactgatggcaaggcccagctggtggtgcactcggcctttgagcaggatgtggaggagctggaccgggcgctcagggctgccttggaggtccacgtccaggaggagacggtggggccctggcgccgcacactgcctgcagagctgcgtgctcgcctggagcggtgccatggtgtgagtgttgccctgcgtggtgactgcaccatcctccgtggcttcggggcccaccctgcccgtgctgcccgccacttggtggcacttctggctggcccctgggatcagagtttggcctttcccttggcagcttcaggccctaccttggcggggcagacgctgaaggggccctggaacaacctggagcgtctggcagagaacaccggggagttccaggaggtggtgcgggccttctacgacaccctggacgctgcccgcagcagcatccgcgtcgttcgtgtggagcgcgtgtcgcacccgctgctgcagcagcagtatgagctgtaccgggagcgcctgctgcagcgatgcgagcggcgcccggtggagcaggtgctgtaccacggcacgacggcaccggcagtgcctgacatctgcgcccacggcttcaaccgcagcttctgcggccgcaacgccacggtctacgggaagggcgtgtatttcgccaagcgcgcctccctgtcggtgcaggaccgctactcgccccccaacgccgatggccataaggcggtgttcgtggcacgggtgctgactggcgactacgggcagggccgccgcggtctgcgggcgccccctctgcggggtcctggccacgtgctcctgcgctacgacagcgccgtggactgcatctgccagcccagcatcttcgtcatcttccacgacacccaggcgctgcccacccacctcatcacctgcgagcacgtgccccgcgcttcccccgacgacccctctgggctcccgggccgctccccagacacttaaccgaaggggccaccctctggcctcctgcttcccaggctcccagctccgcacaggctgatgctccccgcccccaactgtggccgcctgagctgtccccggggacgcccctgcctccctctgcgggctccagaaggcggtgtgggggatggcggtcagcagcggccgagaggggctgggctaggtcccagcctgggccgaccccaccaccaggggtcagcagagcccaggaggcgacactgcccgcccgccgctcccagacctcgcccgagtcggctctgttgtttgaataaacgtgaacgtgaacccaggcggaagggacccggg

SEQ ID NO: 13848 - protein, 1025 aa, Homo sapiens
MVAMAEAEAGVAVEVRGLPPAVPDELLTLYFENRRRSGGGPVLSWQRLGCGGVLTFREPADAERVLAQADHELHGAQLSLRPAPPRAPARLLLQGLPPGTTPQRLEQHVQALLRASGLPVQPCCALASPRPDRALVQLPKPLSEADVRVLEEQAQNLGLEGTLVSLARVPQARAVRVVGDGASVDLLLLELYLENERRSGGGPLEDLQRLPGPLGTVASFQQWQVAERVLQQEHRLQGSELSLVPHYDVLEPEELAENTSGGDHPSTQGPRATKHALLRTGGLVTALQGAGTVTMGSGEEPGQSGASLRTGPIVQGRGIMTTGSGQEPGQSGTSLRTGPMGSLGQAEQVSSMPMGSLEHEGLVSLRPVGLQEQEGPMSLGPVGSAGPVETSKGLPGQEGLVEIAMDSPEQEGLVGPMEITMGSLEKAGPVSPGCVKLAGQEGLVEMVLLMEPGAMRFLQLYHEDLLAGLGDVALLPLEGPDMTGFRLCGAQASCQAAEEFLRSLLGSISCHVLCLEHSGSARFLLGPEGQHLLQGLEAQFQCVFGTERLATATLDTGLEEVDPTEALPVLPGNAHTLWTPDSTGGDQEDVSLEEVRELLATLEGLDLDGEDWLPRELEEEGPQEQPEEEATPGHEEEEPVAPSTVAPRWLEEEAALQLALHRSLEPQGQVAEQEEAAALRQALTLSLLEQPPLEAEEPPDGGTDGKAQLVVHSAFEQDVEELDRALRAALEVHVQEETVGPWRRTLPAELRARLERCHGVSVALRGDCTILRGFGAHPARAARHLVALLAGPWDQSLAFPLAASGPTLAGQTLKGPWNNLERLAENTGEFQEVVRAFYDTLDAARSSIRVVRVERVSHPLLQQQYELYRERLLQRCERRPVEQVLYHGTTAPAVPDICAHGFNRSFCGRNATVYGKGVYFAKRASLSVQDRYSPPNADGHKAVFVARVLTGDYGQGRRGLRAPPLRGPGHVLLRYDSAVDCICQPSIFVIFHDTQALPTHLITCEHVPRASPDDPSGLPGRSPDT

SEQ ID NO: 13849 - DNA, 1905 bp, Homo sapiens
gatgaaatatgcgaaaaatgggttctaaaatatttcaaagggaaaatgaagtgaaggaaacatcatgaaaggggaaaggaatgaggtaaacaagtcttaggaagagagttaagaaaaaattccgctggacttggccaaagaaagaaggggatctagtatctctatgaaggaaaaaagagtaaagccctcagtgtgaacccagtgagaacactgacaaatttgggaaaagttaaatactgatttcatccaaataaagcctctaatcttaagcataccaatactttggcataccagaagacaccttagaaatcaggatagcctttgcattcattttggtaagaaaactgatgctgagaggataaattacctaaaaatcttaaaacccaggcaagttagtcaaagaatcaagattagaattcaggtttccagagacagggctcattctaatgcctcaggtcactggcccgaacaaatctgcttcacagaattccttagaaagagatacacaattctttgctgggattgggtccctggaggacaaccatactatattcttgttaatatgttttttctttttttaaatttaaacttttgttcagttgagatgattgtgaaactaggtatctttcattctgactcctagtttaacatttaattttgactcccaatgagttacgtaaaagcaaaactataactaagaatgggaaaaagaactatttctgcacatttgtaacatatttaagatgttttcttcatataattgaaaactgcagatgagtaagagaatgactaggaaatgagatacagttatatgacacataatgatgttttagtcaacaatgaaccacatatttgacattggtcccaaaagattatattaataatatggtatctttagtgtgcttttctatgtttagacacacaaatactcaccatgatgttacaatagcctacagtgttcaatacagtaacatgcacaagtttgtaacctaggagcaacagggattccatatagcctaggtgtgtagtaggctacctacaccatctaggtttgtgtaagtacactctgatattcacacaatgatgaaattgcctaatgacacatttctcagaatgtatttgtgttattaaatgatgcatgactctaattcttttcaaaacagagccatatggggcaagggggatggggggacgcaagtcagttgtcaaaagactaattgagttactgacaaactgaacatgctaggtgcctcatgtaattcttcatgtaactaaaaaatgttgagaggtttttttcccccgggtatataggctctctttttatccgaaaatagtttccacaaagaagtcaactctgttctgaaaaaaaatgaattgcattttgaatacacttatctttgggtatatcaactaaaggaagttggatttttttccttaacagaaacttctgcagtcctctcagttcacatcctttctgactttaccctgacaaacttattatataaagctatatttaaatctatattgtcaatataacaaaggattgtttttgaacatcacaaatttgttcttggatagaattttatacattgcttttcatcatatatttgctcagttactctaagaagcaaggaactgatcactagttgggaatctatatgggcctaaacttgaatgtattgatttattattacatctactaccaacattttcttaagcatagccttctaaattttttcaggagattagaataaaggtatacatgctactcggtcttctggtaattctagtgataaacctttggatgagacaggtcctaatcagcactgaattcttcaataggaggctgtgttacaggagctacagatttttccctggattagcttaggtcattgcctttacttt

SEQ ID NO: 13850 - DNA, 1760 bp, Homo sapiens
gacaggaaaggggttctatccatgatcttacaattcctaaacagcaacagcatcatggacgtatttgttcctggcgtcataagcctgcatacggtaggcattcagttaataggtactgattggtctaacagaggaagctgggcttgattataaaataaactaggctatgaaatcatgcctcctaaaagctcattaaaggcagcaacacgggatggggactgtaaggaagttgtctcccacctgcctccctcctcagacacacatcattccgcagatgtgaaaacgacccagactctgcccgcatgtggcctcccggaccgggcagtagggccttgcccctaccctcatgaagactgtcggctgtgttacagaactgctgctctgtctctgactcccctcactcccatgctttgttggaaactcaagttgtgaaaccacaaaacacagaaaggaagtggtcaactactgcacatactcaagctatgtagtctcagtttattccattcttgcaggatcattgtaggaaggcataagagtcctgcttactggtgagccactgaacacaaactcccttctcacctctgccttggatcccgccatgcctgaggtctagggctagaagcgttgtttcatccacattaattccggtcttgggcaacgtggctattttctgacctgtctgtcttcccaccctagtggtgaattctctttctgggatctcaactccttctcctgtcacccagctttttccgagcaaccccagtccatctggcatatcattagaatgttaaacctaaaacggtaagccattctgtgaatacctttaagtaacaggatattaaaatgagacttttcctgttttctcagtgctagctgacatctttgagctgagaaaaaaaaatattgttaaaaatgctcatctattctcaggagatgtcatctgctaaggagtgaccaaaaaaatggtccaataaccctgaaaccatcgctcaaatcttagctacgcaaggggagacttgtaaattaatgaggacggcaaggatttcatgagacagagctttcaggctgctaaaatgcttcctcctcccttctcatgtgttttcccctcatcttacgcaaataagagggggccttcagagaattacttggagagctgacctaggacccctaggctttggggaacatagaatgtattagtgtctattgctgctgaaacaaattagcacacatttaacagcttaaaaatagcaaaattactacctcacagttctgtaggttagaagtccagtgggcgcggctggtgtgtgggcttcaagcctcacagggctgaaatcaaggtgttggccaggctgtactccctcctagaggctctaatgaagcatctgtttccaggcctctgcgccttgttggcggaattcagttcaatttgcctgatggactgaggtccctgcttccctgcgggctgtcggcgggaactgccactggctccttgcagcctctctctgattcttgcacaagggcacctacatctcagagccagcgagagtgtgagtgtgtggaatccttctcacgaggcctcatctctctgactttcgtcgggaaatgttctctgcttttaaaggatcatgtaattattttgagcctacccgataatccaggataatcccctcatctaaaaatctgttaccttaaccacatctgcaaagtccctgttgccgtgtaaagagagaaaaaaaaaaaaaaataaaaataaagagatc

SEQ ID NO: 13851 - DNA, 1645 bp, Homo sapiens
atgaaatgcttaggtttccaggccagtctacagaggaacatttatctcttatggtagttaaactgtagtactgtggactctggccacaatgtaaatcaatcttcatgggaatatgcctttgctataggacctcctctccccttcagagctgcagtagcatttgtgactctgatctgcagaccctgtagtgactctaaaccaggagcaactaccactactgtggcatggagtggggaaaaaggtaattggaaaagggtggagatggggaaggacctaccaaatgcctttgttgacacagtagagaagtcatcagacataacattgaatggaggcaataagagagttcctatggccctatcaagcttattagtaggtgttttaacaagaaatatgtaaaaattattacttgtcggccgggcgtggtggctcatgcctgtaatcccagcactctgggaggccgaggcgggtggctcactaggtcaggagttcaagacaagcctggccaagatggtgaaaccccacctctactaaaaatacaaaaattagctaggcgtggtggtgggcgcctgtaatcccagctactcaggaggctgaggcaggagactcacttgaacccgggaggtggaggttgcagtgagccgagatcgtgccactgcactgcagcctgggcgacagagcaagactccgtctccaaaaaaaaaaaaaaaaaaaaaattgtttgcctgcataccctagcacagagtactgtaccttgaaatattcactttgtaacctcaagaaaagacgttgagggagctgtggaattagcaaagagaatgcagtgccacccataaacggagtgatgttttgaggagcagaggaactttgagggaggaaagtgcaacaggaaaaataactgcaggtgtggaaaaacaaatataaatatcttctcaattccaatcacctcctaccttcctataccaggcctcagaaggcagcaggctatgataataaatttgattttatatggcattgaacccaggattttattttataacatatacacttactgttattcctggtcttcaagagttcttgtcatcctcaaaaagacaaaaaaggtaccaaaacaaaaaattaactacagtattttatagatgtgagagaagtgggcagaaataatacggctttaggctaaaaaaggaaatgaggttatttcttgggggagccaatattggcgatttctgagggagcgatccttacgtgaatataaaaaattgtgacagccaccattcctcctgctaactgatctaaatccatccccttgggaaacgcccctgaggtatctatcaggtgtagttcagccagagggagtaaacccaccgggccctcgtcctttcctagcaccaccatttaaagggatgtttgaggggtagggcagcggagcattccagacacggagttaaacccgccccaccccgctggcccacgtccagcccgatcaagaattggaggagagaggagcagggcgtggtggcgcgggcctggagtcccagctacccgggaggctggggcgggaggatcgcttgaggctgcagtgagccgtgattgcgccactgcactccagtctgggcgacaaagcgagaccctgcctcaaaaaaaagtg

SEQ ID NO: 13852 - DNA, 1917 bp, Homo sapiens
  CDS (150)..(1055)
ttcctttttagttgactgaaacaaaacaaaacaaaagggccactggatgtctgccttcttggggggtgagccagacagactgacaaacaaacagccccaactgtgttcgggggagggtttcgcctcccgttttgcccggcagcagcagcatggacgtgttggctagttatagtatattccaggagctacaacttgtccacgacaccggctacttctcagctttaccatccctggaggagacctggcagcagacatgccttgaattggaacgctacctacagacggagccccggaggatctcagagacctttggtgaggacttggactgtttcctccacgcttcccctcccccgtgcattgaggaaagcttccgtcgcttagaccccctgctgctccccgtggaagcggccatctgtgagaagagctcggcagtggacatcttgctctctcgggacaagttgctatctgagacctgcctcagcctccagccggccagctcttctctagacagctacacagccgtcaaccaggcccagctcaacgcagtgacctcattaacgcccccatcgtcccctgagctcagccgccatctggtcaaaacctcacaaactctctctgccatggatggcacggtgacgttgaaactggtggccaagaaggctgctctcagctccgtaaaggtgggaggggtcgcaacagctgcagcagccgtgacggctgcgggggccgttaagagtggacagagcgacagtgaccaaggagggctaggggctgaagcatgtcccgaaaacaagaagagggttcaccgctgtcagtttaacgggtgccggaaagtttatacaaaaagctcccacttaaaggcccaccagaggactcacacaggtgagaagccttataagtgctcatgggagggatgtgagtggcgttttgcacgaagcgatgagctcacgaggcactacaggaaacacacaggtgcaaagcccttcaaatgcaaccactgcgacaggtgtttttccaggtccgaccatcttgccctccacatgaagagacatatctaaaaaaccgaaaggccagagttgccatggcatcggctagtgtctaaaggaaacgccatgaggcagggggctggacttcaggcggggacccattgcctcgcagaagaaagttctcacttataaacctctgtacacacacacacacacacacacatatacacacactcacagacccacacacatacacactgtcatgcactcaactatatttaaaatatatacgtctattctttatgccttgccctagccagatggaagaagatgaagaaggaaaccaggtgaactcagcaaggcagactggctgcttacttcagcactattggaattatttcccgctgttgccaatggaaatcaaagaaaatggatgtgacgtctgtgcaggtggacggcagtccgaggggcttatttcacttgcttctcagtgcaacttgataggagaatccagcatcttaaagttgcatatgtgtagcactaatgtttctttttaaatagttgggggaaaatgacctagaaaaccaaattgcagtttggtagccaaaattaactcttggtttatttgtcctttgtgtgtgaaaagtcctactattccgtgcgtcagacttcctcacagaactgttgactggttttggttcttagtactattgagatctttcgcgtcgatcccaacggccttagcggcggcagactggaataacaccttacacctttctggcctgcatttctgtagacttcactctcaagggaggagttttcttttcttacgttttgacttttgcacaccatatgcactagggattctggaaacttctagcatgactgcaaagtggccaagagaataaagtccttgatgataaatcacagt

SEQ ID NO: 13853 - protein, 302 aa, Homo sapiens [sequence omitted]

SEQ ID NO: 13854 - DNA, 2323 bp, Homo sapiens
  CDS (212)..(1927)
agttgcccgcctgccccggagagccaggcgctaaccagccgctctgcgccccgcgccctgcttgcccccattatccagccttgccccggcgccctgacctgacgccctggcctgacgccctgcttcgtcgcctcctttctctcccaggtgctggaccagggactgagcgtcccccggagagggtccggtgtgaccccgacaagaagcagaaatggggaagaaactggatctttccaagctcactgatgaagaggcccagcatgtcttggaagttgttcaacgagattttgacctccgaaggaaagaagaggaacggctagaggcgttgaagggcaagattaagaaggaaagctccaagagggagctgctttccgacactgcccatctgaacgagacccactgcgcccgctgcctgcagccctaccagctgcttgtgaatagcaaaaggcagtgcctggaatgtggcctcttcacctgcaaaagctgtggccgcgtccacccggaggagcagggctggatctgtgacccctgccatccggccagagtcgtgaagatcggctcactggagtggtactatgagcatgtgaaagcccgcttcaagaggttcggaagtgccaaggtcatccggtccctccacgggcggctgcagggtggagctgggcctgaactgatatctgaagagagaagtggagacagcgaccagacagatgaggatggagaacctggctcagaggcccaggcccaggcccagccctttggcagcaaaaaaaagcgcctcctctccgtccacgacttcgacttcgagggagactcagatgactccactcagcctcaaggtcactccctgcacctgtcctcagtccctgaggccagggacagcccacagtcccttacagatgagtcctgctcagagaaggcagcccctcacaaggctgagggcctggaggaggctgatactggggcctctgggtgccactcccatccggaagagcagccgaccagcatctcaccttccagacacggcgccctggctgagctctgcccgcctggaggctcccacaggatggccctggggactgctgctgcactcgggtcgaatgtcatcaggaatgagcagctgcccctgcagtacttggccgatgtggacacctctgatgaggaaagcatccgggctcacgtgatggcctcccaccattccaagcggagaggccgggcgtcttctgagagtcagggtctaggtgctggagcgcgcacggaggccgacgtagaggaggaggccctgaggaggaagctggaggagctgaccagcaacgtcagtgaccaggagacctcgtccgaggaggaggaggccaaggacgaaaaggcagagcccaacagggacaaatcagttgggcctctcccccaggcggacccggaggtgggcacggctgcccatcaaaccaacagacaggaaaaaagcccccaggaccctggggaccccgtccagtacaacaggaccacagatgaggagctgtcagagctggaggacagagtggcagtgacggcctcagaagtccagcaggcagagagcgaggtttcagacattgaatccaggattgcagccctgagggccgcagggctcacggtgaagccctcgggaaagccccggaggaagtcaaacctcccgatatttctccctcgagtggctgggaaacttggcaagagaccagaggacccaaatgcagacccttcaagtgaggccaaggcaatggctgtgccctatcttctgagaagaaagttcagtaattccctgaaaagtcaaggtaaagatgatgattcttttgatcggaaatcagtgtaccgaggctcgctgacacggagaaaccccaacgcgaggaaaggaatggccagccacaccttcgcgaaacctgtggtggcccaccagtcctaacgggacaggacagagagacagagcagccctgcactgtcttccctccaccacagccatcctgtccctcattggctctgtgctttccactatacacagtcaccgtcccaatgagaaacaagaaggagcaccctccacatggactcccacctgcaagtggacagcgacattcagtcctgcactgctcacctgggtttactgatgactcctggctgccccaccatcctctctgatctgtgagaaacagctaagctgctgtgacttccctttaggacaatgttgtgtaaatctttgaaggacacaccgaagacctttatactgtgatcttttacccctttcactcttggctttcttatgttgctttcatgaatggaatggaaaaaagatgactcagtt

SEQ ID NO: 13855 - protein, 572 aa, Homo sapiens [sequence omitted]

SEQ ID NO: 13856 - DNA, 2784 bp, Homo sapiens
  CDS (7)..(726)
gctgtcatggcgggtgtgctgaagaagaccactggccttgtgggattggctgtgtgcaatactcctcacgaggtatgtacctttgttctttcttcgttcttgaattcccaaggaagactaaattcctgtcactttgcttattgcagggttaacgggatacagatgtttcaagcccttaattacaagccgcgtgagctcttgagacacgggcgctgtccacctacttcgttgatccgatgtcacatttttatttattttcgccatgacctctttattaagccagttttcttgttgactttttccttgacattttcatggcttcacttgtgcttgcttctgtcagcgccatctcaaatttatatctccgttttccatcttttctccttgccttaccgtttctgcttaggtgcgttggattacatatatttaggcttactaaaggtactgcccccttttccttctgttaggtcttttccatctgtattcacgaatgttttcatcaaaaaaacccacaaaattttttttattcttcttgtcccttctataatcacaccatttctttgcttcactttacagataactcaaaagagttatctctattttctccaatttctttcttattcacccttgaatgcactcagtcacccttggcgtttttcaagttcaccaattatctccatgctgccaaatccaatggtcagctcatatttctcaccttcattgacctaatagcagcgtttttttgacacatttgacactttttccatcacgctcttttcaagttcaccagttatctccatgttgccaaatccaatggtcagcttatgtttctcaccttcattgacctaatagcagcgtttttttttttttgacacatttgacactttttccatcatgcgctttctttactgggcttcaggactcccccagtctcctgattttttccccctactctttggctttctctttttctggttatttctcttatgcccacttttaaaatttgagttagtcaggatttagttcttggaccttttcttttggacctgtactctgtcaccaagagagagcaaatccaaatagagaacggttttaaataccacctatacactgacaacagatttccatgtaaagcactgacctcttcctttataaaagtcctgaatatttaattgcttagtgggcatctctatttgtatgtgtcagacaaggcaacccaaacttaacatgtccaaaatggggttcctgatcttctgcctaaaacctgctcttctctcagtcttgctcatctcaattaatggcagctcaattattttgactcaggtcagaaacttgaaatcatctttgattccttcctttctcttacactccacatttgttatttcagtaaaccctctaggttccaccttcaaaatatatcttgattttgacaacatctcactacctcctctgctactaccctcttcctcagtcaccatcatcactgatgtggataattgcattcacttcttaactgcctctcaatgcttgtcacagcctccatttggtctttttttccagccaggctactagagttagtctgttaaaatatgaggtaggtcagatctctcctttccttaaaactaatggctttccatctcactctaaataaagacaagtttcttactgtgaccctctggttcactattctactgatttattttgttatgtctctactagaatgtaggtttcatgaaggcaggaatttgtgattgtttcactgctagaactctgtcacatagtatgtgctcagtaaatagtgttagttgaatgagtgtcttgcacttcctatgatttcataataactttattgtcattgatgtaaagaactgaactcatggtttttcccttctaaatatatttcttcctctgtgggctgtatttttcttgatagtttcagatctttctactccctaggctgggaatttggacatcatagttggtatttctcttatacttgtactctcatattcattccaatgatgatttttatttttattttttttgctgatccttttctataacagctctccagtctgacttctgtttactatttctattgttactaccatagttcaggtccttgttcttgtttagagaattgcaacaacctccttactggcctttctgccttgtttctccttcagtccttttaactcactacaatgaagctaattttcctaatctaatcatatgattttcctaaatcttttaattgtccacaggataaagcccgaatgctttaacttggaatgcagaaccacttataatgtgacattttctctaactttatctcctatgcatttccttatgtgtcctgtacagcagtatattccaaaatccccagtggatgtctgaaaaccacatatagtaccaaactgtatatatgctatgttttgtttcatacatacctataataaagtttaatttatgaattaggcacaataagagataagcaggctggacgtgctggctcacgcctgtaatcccagcactttgggaggctgaggcgggtggattgctttagcccaggagtttaagaccagcctggccaacatggcaaaaccccgtctctataaaaaatgtggaaattaatcaggtgtggtggtgtgcacctagtcccagctactcgggaggcagaggcagcaggattgcttgagccccagaggttgaggctgcagtgagctgtgatgatgccattacactctagcctgggtgatggagtgagaccctgtctcaaaaaag

SEQ ID NO: 13857 - protein, 240 aa, Homo sapiens [sequence omitted]

SEQ ID NO: 13858 - DNA, 1877 bp, Homo sapiens
  CDS (127)..(840)
agcaccaccagcggcagccgccggagccgccgccgcagcggggacggggagcccccgggggccccgccaccgccgccgtccgccgtcacctacccggactggatcggccagagttactccgaggtgatgagcctcaacgagcactccatgcaggcgctgtcctggcgcaagctctacttgagccgcgccaagcttaaagcctccagccggacctcggctctgctctccggcttcgccatggtggcaatggtggaggtgcagctggacgctgaccacgactacccaccggggctgctcatcgccttcagtgcctgcaccacagtgctggtggctgtgcacctgtttgcgctcatgatcagcacctgcatcctgcccaacatcgaggcggtgagcaacgtgcacaatctcaactcggtcaaggagtccccccatgagcgcatgcaccgccacatcgagctggcctgggccttctccaccgtcatcggcacgctgctcttcctagctgaggtggtgctgctctgctgggtcaagttcttgcccctcaagaagcagccaggccagccaaggcccaccagcaagccccccgccggtggcgcagcagccaacgtcagcaccagcggcatcaccccgggccaggcagccgccatcgcctcgaccaccatcatggtgcccttcggcctgatctttatcgtcttcgccttccacttctaccgctcactggtcagccataagaccgaccgacagttccaggagctcaacgagctggcggagtttgcccgcttacaggaccagctggaccacagaggggaccaccccctgacgcccggcagccactatgcctaggcccatgtggtctgggcccttccagtgctttggccttacgcccttccccatgaccttgtcctgccccagcctcacggacagcctgtgcagggggctgggcttcagcaaggggcagagcgtggagggaagaggatttttataagagaaatttctgcactttgaaactgtcctctaagagaataagcatttcctgttctcccagctccaggtccacctcctgctgggaggcggtggggggccaaagtggggccacacactcgctgtgtcccctctcctcccctgtgccagtgccacctgggtgcctcctcctgtcctgtccgtctcaacctccctcccgtccagcattgagtgtgtacatgtgtgtgtgacacataaatatactcataaggacacctccttcccgtgtcttgtatttgttgggcctgggctactgctcaccctggttaggtgagcctctaggaaaacttaaaacgaattttaagccaggtatggtggcacatacctgtggtctcagctattcaggaggccaaggcaggaggatctcttgagcccaggagtttgagaccccatctcaaacaaaaaatacaaaaattagccagccacggggcctgcacttccagctcctttgagagactgaggcaggaagattgcctaagcccaggaggccaagtctgcagtgagctatggtaacaccactgcactccaacctgggcaacagagggagactctgtctctaaaaaaatagaaaaatttgccctgcatggtggctcacgcctgtaatcctagccctttggaaggccaaggcgggcagatcacttgaggtcgggagttcgagaccagcctgaccaacatggagaaaccccatctgtactaaaaatacaaaattagctgggtttggtggcgcatgcttgtaatcccagctactcgggaggctgaggcaggagaatcgcttgaacccaggaggcggaggttgcagtgagctgagatcgcgccattgcactccagcctgggcaacaacagtgaaactccgtctc

SEQ ID NO: 13859 - protein, 238 aa, Homo sapiens
MSLNEHSMQALSWRKLYLSRAKLKASSRTSALLSGFAMVAMVEVQLDADHDYPPGLLIAFSACTTVLVAVHLFALMISTCILPNIEAVSNVHNLNSVKESPHERMHRHIELAWAFSTVIGTLLFLAEVVLLCWVKFLPLKKQPGQPRPTSKPPAGGAAANVSTSGITPGQAAAIASTTIMVPFGLIFIVFAFHFYRSLVSHKTDRQFQELNELAEFARLQDQLDHRGDHPLTPGSHYA

SEQ ID NO: 13860 - DNA, 1771 bp, Homo sapiens
ttgtgatggaagatttctttccatagattagtataatttacgtgggctgtttgaagagattaccttcttagtggttcccttaaagctctttgttatgtatatcctgaagcccagtcacttcttcccacttgtttttgagtgtttgatctagacaatgtaaaggcacttttaagataaaaattattgtatttgggggactttgggagactcacttcccaatcattttgtttagaagcaaaaatgattaaacagtactttatgtcagatctgcctgtttaagggatttgagcacacctggtagcaaagaggtttaacctagtttctcagatgaaaactagaggtggaggaaggacgaggaagcagtccagggtgagctgaggagctggttacctttagcctacttctgggatgatgcacattgtcgtctaggtcagtcagcctcctcagcccatgcattaagattcctggttgcagctgggcacagtggctcacacctgtaatctcagcactttgggaagctgaggtgggcaggtaacctgagttcaggagttcaagactggcctggccaacatggtgaaacctcatctctactagaaatacaaaaattagccagatgtggtggcggacgcctgtaatcccagctacttgggaggctgaggcaggagaatcactcgaacctgggtgttggaggttgcagtgagccaggattgtgccactgcattacagcctgggtgacaaagtgagattctgtctcaaaaaaaaaaaaaaaaaaaaaaaaaattcctggttgttagtaacagaaactcacatagtctagctgaagcaaaaggggtttttttttttgcttacttaactagatttcaggaagagctggaatgaggtgggttttaaggacattcataaccagggacttgaaacacagctgtgtgccctatgtggctccgtgctctcctcaccttttatctcttagtgttgcgttaatttttgtcttgctgctggtgggcttcctctacatggaaggggatatgactgtggtcattgcccatctatagacatctttattgctgtgatctgagagaaaacaggcttcttttcccccagcttaagtttgacaaatcccagggaagaatggtcactggcctagcctaggtcatgtgtttgtgacagttctaaggggtgcgtgataggctcagcttgtgtcacatgcccagggaggtcacacagatgataccctgagggaactgctgtaaacagttaagatacagcagttttcatgcatttttagtccatatggaactcagctcaaacaactagttaagattctttccttgattcattgaaaatcttttacagtctttgttgatgctggtgcctgtaatcccggctactcaagaggctgaggcgggaggatcgaatattcgcagtggcctgtgaatagacacttcactccagcctaggcaacatagtgagaccctgtctcaaaaaaaatagaatgaggctgggcacagtggctcacacctgtaatcccagcactttgggaggcaaaggcaggcagatcgcctgaggtcaggagtttgagaccagcctgggcaacatggtgaacaccctgtctctactaaaaataccaaaattagctgggtgtggtggcagtgcctgtaatcccagctactcgggaggctgaggcagaattactttgagcccgggaggtggaggctgcagcgagctgagatcgcgccactgcgctccagcctgggcagagtgagactctatc

SEQ ID NO: 13861 - DNA, 1718 bp, Homo sapiens
  CDS (109)..(1560)
agtttcacttttagctctgggcacctccagctcctgctcgccggacggctcccagggagagcagacgcgccagacgcgccaccctcggggcgccgacggtcacggagcatggggtcggcctttgagcgggtagtccggagagtggtccaggagctggaccatggtggggagttcatccctgtgaccagcctgcagagctccactggcttccagccctactgcctggtggttaggaagccctcaagctcatggttctggaaaccccgttataagtgtgtcaacctgtctatcaaggacatcctggagccggatgccgcggaaccagacgtgcagcgtggcaggagcttccacttctacgatgccatggatgggcagatacagggcagcgtggagctggcagccccaggacaggcaaagatcgcaggcggggccgcggtgtctgacagctccagcacctcaatgaatgtgtactcgctgagtgtggaccctaacacctggcagactctgctccatgagaggcacctgcggcagccagaacacaaagtcctgcagcagctgcgcagccgcggggacaacgtgtacgtggtgactgaggtgctgcagacacagaaggaggtggaagtcacgcgcacccacaagcgggagggctcgggccggttttccctgcccggagccacgtgcttgcagggtgagggccagggccatctgagccagaagaagacggtcaccatcccctcaggcagcaccctcgcattccgggtggcccagctggttattgactctgacttggacgtccttctcttcccggataagaagcagaggaccttccagccacccgcgacaggccacaagcgttccacgagcgaaggcgcctggccacagctgccctctggcctctccatgatgaggtgcctccacaacttcctgacagatggggtccctgcggagggggcgttcactgaagacttccagggcctacgggcagaggtggagaccatctccaaggaactggagcttttggacagagagctgtgccagctgctgctggagggcctggagggggtgctgcgggaccagctggccctgcgagccttggaggaggcgctggagcagggccagagccttgggccagtggagcccctggacggtccagcaggtgctgtcctggagtgcctggtgttgtcctccggaatgctggtgccggaactcgctatccctgttgtctacctgctgggggcactgaccatgctgagtgaaacgcagcacaagctgctggcggaggcgctggagtcgcagaccctgttggggccgctcgagctggtgggcagcctcttggagcagagtgccccgtggcaggagcgcagcaccatgtccctgccccccgggctcctggggaacagctggggcgaaggagcaccggcctgggtcttgctggacgagtgtggcctagagctgggggaggacactccccacgtgtgctgggagccgcaggcccagggccgcatgtgtgcactctacgcctccctggcactgctatcaggactgagccaggagccccactagcctgtgcccgggcatggcctggcagctctccagcagggcagagtgtttgcccaccagctgctagccctaggaaggccaggagcccagtagccatgtggccagtctaccatggggcccaggagttggggaaacacaataaaggtggcatacgaagg

SEQ ID NO: 13862 - protein, 484 aa, Homo sapiens
MGSAFERVVRRVVQELDHGGEFIPVTSLQSSTGFQPYCLVVRKPSSSWFWKPRYKCVNLSIKDILEPDAAEPDVQRGRSFHFYDAMDGQIQGSVELAAPGQAKIAGGAAVSDSSSTSMNVYSLSVDPNTWQTLLHERHLRQPEHKVLQQLRSRGDNVYVVTEVLQTQKEVEVTRTHKREGSGRFSLPGATCLQGEGQGHLSQKKTVTIPSGSTLAFRVAQLVIDSDLDVLLFPDKKQRTFQPPATGHKRSTSEGAWPQLPSGLSMMRCLHNFLTDGVPAEGAFTEDFQGLRAEVETISKELELLDRELCQLLLEGLEGVLRDQLALRALEEALEQGQSLGPVEPLDGPAGAVLECLVLSSGMLVPELAIPVVYLLGALTMLSETQHKLLAEALESQTLLGPLELVGSLLEQSAPWQERSTMSLPPGLLGNSWGEGAPAWVLLDECGLELGEDTPHVCWEPQAQGRMCALYASLALLSGLSQEPH

SEQ ID NO: 13863 - DNA, 2352 bp, Homo sapiens
  CDS (423)..(2036)
ctttttgcacacacacgaatacaaagagccatacgaccttcggatgccggaaggtccttctgaatcccttccctgttccttaggttgcactagtcgggggttccatgctggggggcagaaggaatgctctctaccgtctgaaaccgttcatcaggaaggccttgatttgtgatgtgctaggagagcacaggatctgcaaatagaaggcacctgtctcccttctgcaggccgaggagaggccgccatggactgtgtgcttcttcatggcttgtttactcttctttcacagaccctacagcttggggcctgggctcctctgaccatcctcattgagaaaggaaagtgagtccagagaagttgatgcttcctacctgttggagcggcccagcagtgtaagcgtggttgttactgccccatccgccatgtccttcagtgccaccattctcttctcccctcccagtggcagcgaggccagatgctgctgctgcgcctgtaagagtgagactaatggaggcaacacaggctcccagggtgggaatcctcctcccagcacccccatcacagtgactggacatggcttggctgttcagagctcagagcagctcctgcatgttatctaccagcgggtcgataaggcagtgggtttggctgaagctgctctgggtcttgccagggccaacaatgagttgttaaaacgtctccaggaggaagtgggtgacctgaggcaagggaaagtgtccatccctgatgaagatggggaaagccgggcacatagttccccacctgaggagcctgggcctctcaaggaaagtcccggggaagcctttaaggctctgtctgccgtggaagaggagtgtgacagcgtgggcagcggcgtgcaggtggtgattgaggagctgcggcagctgggagcagcctcagtggggcctgggcctttgggcttcccagcaactcagagggacatgcggctcccagggtgcacgctggctgccagcgaggcggcccccctgctcaatcctctggtggatgattacgtggcctctgagggtgcagtacagcgagttctggtccctgcttatgccaagcaactctcaccagccacacaactggcaatccagcgggcaaccccagagacaggaccagaaaatggaaccaagctgccaccaccccgccctgaggacatgctcaatgccgctgctgcgctggacagtgccttggaagagtcaggccctgggagcactggggagctgagacactctctagggctgaccgtttccccatgcaggaccagaggaagtgggcagaagaactccaggcgcaagcgggatcttgtactctctaaactggtccacaatgtgcataaccacatcaccaatgacaagagattcaatgggtctgaaagcatcaagtcctcttggaatatttcagtagtgaagtttcttctggaaaagctcaagcaagagctggtgaccagtccccacaattacactgataaggagctaaaaggagcctgtgtggcctacttccttactaagaggcgtgagtaccgcaactccctgaacccctttaaaggcctgaaggaaaaagaggagaagaaacttcgaagtcgccgatatcggctttttgccaaccgatccagtatcatgaggcattttggacctgaggaccaacgtctgtggaatgatgtgacagaggaactgatgtcagatgaagaggacagtcttaacgagccaagtgtgtgggtggcccgccctccccgtttccgggcccagcgcctcacagagctctgctaccacctggatgctaactctaagcatggcaccaaagccaaccgtgtgtatgggcctccctcagacagactgccttctgctgaagcccagctccttccaccagaactttacaatcctaatttccaagaagaggaagatgagggaggggatgagaatgcacctggctccccatcttttgaccaaccccacaaaacctgctgtcctgacttgaactcattcattgaaatcaaggtggaaaaggatgaataaaatctacagccaagaataactctggcttccgccatgccccatgtctcagaaataggtggccatggggcttcacaaaataatgagatgctctgtgcagtctgagaaagcaaatttgcctcttttcttaacacagtctctactggggaagcagaacactggtgggataaaaacttatctagaaggggagaaactccctccactgtgaacagtaagccagaatatgcttattcctcagcataaacagtatctcggagaagcctgggatgagaaaatgaggaggatgggtccaagaaacatgaggccttcttgacat

SEQ ID NO: 13864 - protein, 538 aa, Homo sapiens
MSFSATILFSPPSGSEARCCCCACKSETNGGNTGSQGGNPPPSTPITVTGHGLAVQSSEQLLHVIYQRVDKAVGLAEAALGLARANNELLKRLQEEVGDLRQGKVSIPDEDGESRAHSSPPEEPGPLKESPGEAFKALSAVEEECDSVGSGVQVVIEELRQLGAASVGPGPLGFPATQRDMRLPGCTLAASEAAPLLNPLVDDYVASEGAVQRVLVPAYAKQLSPATQLAIQRATPETGPENGTKLPPPRPEDMLNAAAALDSALEESGPGSTGELRHSLGLTVSPCRTRGSGQKNSRRKRDLVLSKLVHNVHNHITNDKRFNGSESIKSSWNISVVKFLLEKLKQELVTSPHNYTDKELKGACVAYFLTKRREYRNSLNPFKGLKEKEEKKLRSRRYRLFANRSSIMRHFGPEDQRLWNDVTEELMSDEEDSLNEPSVWVARPPRFRAQRLTELCYHLDANSKHGTKANRVYGPPSDRLPSAEAQLLPPELYNPNFQEEEDEGGDENAPGSPSFDQPHKTCCPDLNSFIEIKVEKDE

SEQ ID NO: 13865 - DNA, 2088 bp, Homo sapiens
  CDS (42)..(494)
cccatactgttgacattgtattagatataagtgatttagagatgatgctaagtgtacaggagaatgtgcataggtgcatatgcaaacactatgccccccccaccgccccccacctgttttttgagacagagtctcactctgtcacccaggctggagtgcaatggtgtgatctcggctcactgcaaccttcacctccagggttcaagcagttctcctgccttagcctctcaagaagctgggactacaggcgtgtcccactatgcctggctaattttattgtatttttagtagagacagggttttgccgtgttggccaggctggtctcaaactcctgacctcaagtgatctgcctgcctcggcctgccaaagtgctggagattacaggcatgaaccactgcgcctggccctaacactgtgccactttatatcaaggacttgcacatccgtggatttttatatctgcagggacctggaaagaatcccccacggacactgagggatgaccgttggggcactgccatctcccatttgcagatgtgggctggaggctagggaggttaaggaacagctaggagctctagaactggaaagtggcagaggctggacatgcaccagggactgtgccccctgagctgtcctggttagaaggaggggagcctagccacactgatcttacttgaatccccaggactcgatgcctgaggtccggcagagctcctttgccctcctgggagacctcaccaaagcctgcttcatccatgtcaagccctgtatcggtacgacactcgccttgtccctaacccatgaccccagccccggcctcaagtgatggagagcaatacccggggatgactgtgaccacattgggatgtattcgtactgtctgatggggcctgctggactaggtcctgcagcttaccctggctggccctccttctcagcacccctgtttctccccaccagccgagttcatgcccattctgggcaccaacctgaacccagagttcatctccgtctgcaacaacgccacctgggccattggtgaaatctgcatgcagatgggtgagtgccctgcaagtggcaacacgcgccccccattagcctgttctcaacctgggggcgggagcctagctctgactgacagcttccttcaaggcaagtctcttgggggtcgtcaggggtggagccaagcagaaaggtcatttgtgattggcttctctaaagaggagggataggagggctgttctgattggaccgttttgtgtagttggctaaaagactcattcggattggttgggtgactttggcttttttttcctttgacttgggcagcgtgttgtcaccttagcgactccagagaagcctctgttgtttggagggtgtgggtctgtccctggttggccagggattctgggtggggattagccggagaaggtcttttgtttcctcactggtagtggttggccagtctctagttggaactggggcgagtagtgagtgaggtggggcggccccctggcccctgtgggtggcgggggctgtgcagggctctgactgggtgctcccccaggggcagagatgcagccttatgtgcagatggtcctcaacaacctggtggaaatcattaaccgacccaacacacccaagacactgctggaaaacacaggtgggcacctggcccggctgctgcctgcacccctgcctgccttctggaggtggggttctgggctgggaagggcatcagaaagagccttgtcaaggaaccaaggagggtgtctggaagtacctggaaggggtcactgggagaagccccaagaaagatgcagcctcaggctgggtgcagtggctcatgcctgtaatctcagcactttgggaggcagatcacctgaagtcaggagttcgagaccagcctggccaacatggtgaaaccccatctctactaaaaaatacaaaaattagccgggggtaatggcacgtgcctgcaatcccagctactcgggaggctgaggcaggttgcaatgagccaagatcatgccactgcactccagcctgggcaacagagcaagactccatctcaaaaacaaaac

SEQ ID NO: 13866 - protein, 151 aa, Homo sapiens
MMLSVQENVHRCICKHYAPPTAPHLFFETESHSVTQAGVQWCDLGSLQPSPPGFKQFSCLSLSRSWDYRRVPLCLANFIVFLVETGFCRVGQAGLKLLTSSDLPASACQSAGDYRHEPLRLALTLCHFISRTCTSVDFYICRDLERIPHGH

SEQ ID NO: 13867 - DNA, 2290 bp, Homo sapiens
  CDS (1480)..(1782)
ttgctcagtcactggggcaactacttttcacccaatgtcctctggaaaagaaagatctggagggtctttttcttcaaaataataaggagggggtgcagaagggtagggatgaacctctccctcctttgccgcttgagctttagctggcaaattggcaaataaacctgctctgtaacctcttctgttacttcgttttactctccttcctcctcatcatcagtgtgaaaaagttccaagggagaacgcaccagaccccacatttgtcccactgttaccctgatgcttctgagctccccttactcaccacagggatggctttaagagtacttgggtgtcctccagcttagttccacattctccgttgctccagtgacccttcaacctggattcgagcccccacaatggacgtcacttgccgagaccagttcagtcagggagaccctaacccagcagcactagaggaattaaagacatacacacagaaatatagaggtgtgaggtggaaaatcaggggtctcacagccttcagagctgagagccccaaccggagatttacccatgtatttattaacagcaagccagtcattagcattgtttctatagttattaaattaactaaaagtatcccttatgagaaatgaagggatgggccaagttaaaggaataggttgggctagttaactgcagcaggagcatgtccttaaggcacagatcgctcatgctattgtttgttgtttaagaatgcctttaagcggttttccgccctgggtgggccaggtattccttgccctcattcctgtaaacctgcaaccttccagcgtgggcgttatggccatcatgaaaatgtcacagtgctacagagattttgtttatggccagttttggggccagtttatggccagattttggggggcctgttcccaacaccaggagatgtgttgatttgctccagcaatgaaaccacatctggtacggcagctgcaattggagtcactacttagttaagctcatcataatccactgtcatcctccaagatccatctgtcttctgcacaggccaaatgggagagttgaacagggagatggtgggaatcaccacccctgtgtccttcaagtccttgatagtagcactaatctccatgttccctccagggattcaatattgtttttgatttactacttttctaggtacagccagctctaatggcttccatttggcgtttccaaccataatagcctttaccagtcaaggagccaatgtgggggttctgccagctgctaagtatgtctatgccaattatgcatcctggcacttggaaaatgaccacaggatgagtctggggacccactggacccgctgtaagttggacctgagctaaaactccattaattacctgacctcaggtgatccacccaccttggcctacctgtagggaccagccccacagggtcggtgggtttttctccccgtgtgcggagatgagagagcatagaaataaagacacaagacaaagagaaaagaaaagacacctgggcccaggggaccactaccaccaagacgcagagaccggtagtggtcccaaatgccaggctgcactgatatttattagatacaagacaaaggggcagggtaaggagtgtgagccatctccaatgataggtaaggccacgtgggtcatgtgtccactgaacagggggcccttccctgcctggcagccgaggcagagagagagggagagagagagacagcttacaccattatttctgcatatcagagacttttagtactttcactaattttctactgctatctaaaaggcagagccaggtgtacaggatggaacacgaaagcagactaggagcgtgaccactgaagcacagcatcacagggagacggttaggcccctggataactgcgggcaggcctgactgatgtcaggccctccacaagaggtggaggactagagtcttctctaaactcccccagggaaagggacactccctttcccggtctgctaagtagcaggtatttttccttggcactgacgctactgctagaccacggtctacttggcaacaggcgttttcccagatgctggcgttaccactagaccaaggagccctctggtggccctgtctgggcataacagaaggctcacactcatgtcttctggtcacttctcactatgtcccctcagctcctatatctgtatggcctggtttttcctaggttatgattatagagtgaggattattataatattggaataaagagtaattgctacaaact

SEQ ID NO: 13868 - protein, 101 aa, Homo sapiens
MREHRNKDTRQREKKRHLGPGDHYHQDAETGSGPKCQAALIFIRYKTKGQGKECEPSPMIGKATWVMCPLNRGPFPAWQPRQRERERERQLTPLFLHIRDF

SEQ ID NO: 13869 - DNA, 1735 bp, Homo sapiens
tttatatacggtatggctggaaaagttttggattttaaaacagggtccctctccttgaatctgggtggacttgtcaatgccctgaccaatagagatgacgaaagtacgtgtcaccggactgacttctagggccagtcacagaaagccatgcagttcctgtcttgttggaaggaacactgctcttcaagccctgagctccgcttcgtaagtccaactcccctaaggccatcatggcaggagaggccatatctgggcgcttcagtggatgttcttatctggacccagccttccagctatccccactgacatgcaaaccaagcctctagaccagcccgtccaccggccgaatgctgcctgtgaccgacctctgccattgccacatggaacagaagcacctcccagctgctccttgcccaaattcttgacccacaaaatgtgagacaccattaaaacttgtttcagatgacccctaaaaaataaaatcaacctcttcatctggtgctcttataaaaacttactacggaagcttcttgagagacagttcgttggtcttcctgaataatttttttttttcttttttgagacaatgtcttgctctgacacccaggctggagtgcagtggtgcgatcttggctcactgcaacctctgcctcccgggttcaattgattctccttcagcctcccaagtagctggaattacaggcgcctgccaccaagcctggctaatttttgtattttttagtagagatggggtctcaccatgttggccaggctggtctcaaacttccgaactcaaatgatccacctgtcttggcctcccaaagtgctgggattacaggtgtgagccaccgcgcccagcccctgaatttttttaagggtcatgatgcctgggaataagttttgccccactctgcagactttaatgcctctttggcatagtctatcaaactattaacaaatattttaattttaataaatattgcttatgacaactattttttaaaaagtggagttgttctgtttaatctggagagtagggtcagagtcctgccttcatccggcgccctctcctaaattattgctctcatactctaaggcaactctgtggatcctccctgaagttcacagcttgaaagagctttgcagttattctttcaagatgagatcggcttgtcctaaatccagccctggggttggaagcaccttttagggaagcaccctaaaaagtgtgtctcctggaggtgaacagtgttaaagtataggttgaaaaattgcacccatgggtgcacagatggatgtctgtgtgcctacaagcaggtagaacaaactatccattaggctgagctggtgagagtggaaaaataaataattattcaaacttacctctttcttagagaaaacgaatagctttcacataagtgtggagttcctgttccttttaaggaactctaggctgggcatggtggctcatgcctgtaatccctgcactttgggagtccgaggtgggtggatcacctaaggtcaggagtttgagaccagcctggccaacatgatgaaaccccgtctctactaaaaatacaaaaaattatctgggcgtggtgacacgcacctgtaatcccagctactcaggaggctgaggcaggagaatcgcctgaacctgggaggcggaggttgtagtgagcggagattgagccactgcactccagcctgggcaacaagagtaaaactccatctc

SEQ ID NO: 13870 - DNA, 1934 bp, Homo sapiens
  CDS (119)..(472)
aaatgcatatatacataatgatatatagagataattaactttaagtttattaaactgtatttactctataaactatgacttcattttttgttttgttttgtttttttgtttttttgagatggagtctcactctgtcactcaggttggagtgcagtggcgccatctcagctcactgcaacctccgcctcctgggttcaagcaattctcctgccgcagcctcccaagtagctgggactacaggcacctgccaccaagcccgggtaatttttgtatttttagtagagacggggtttcaccatgttggccaggctggtctcaaactcctgaccttgatccacctgcctcagcctccccgagtgctgggattacaggcatgagccacctcgcctggcctataaactacgactctgatgaccgcatagtatttaagcaagaaaacaaccaaaatgttctagctaaagtggagaccacttaacctaacccaattaaactttaagttgaacacaagagtagtagatgcagttcagctccatgacattgggtgagttgtctaaatgctctgtgctttggtgtccttgtctgcgtgtgacatgaagccgcagatctcaaagatctctttcattccgtgaaagcgctctcaatgtgtgaagttgactgcttctcctgctgtttaccaagagaataatcttaaccctacattgtggagatcggatttgttctcacttgacagaaagccagtcccacgagcagcttggtacccaaataccagtctgtttagtgctcattagagatgaagaaccatattcataagtcaagctgagacggagtgtcatctccagacagaatcaacaccaccccctcctcaggaactgggatttggctgctttccaagccgctgctgaccaggttccattgcccagcttggctgatgagatcactggcagagtaccatgggtgcagacggggcctgctgtttcaacatgttctcaggagggctcttgcccacatttcttggagaggtgtgagcaccaaacatgctgaaccatccagcccatcactgagcagggccatctctcttcatcccttttcatttggtttgcatttttatgtcatgctccttccctggataaaagggataagaggagtttctcagatttgatttctcagtgggaactgtttgctttggaagccacctacaccaatgctaattgagaacagagctcagaatgggagcctgagaactgcacccggatgaactttttggtgggctgatttccgttgatcttgtcagaattaggttgtatatgcatgtaataccatgatcaactattttccaaaaggctgagcaaatgcatcagtgtctttttcctttgaccagttacttaccttggaaaaattatttgtagttaagcatataaagtcttcatcaggaaaactactggagatcctggccctgactacccagcaataacatttctggaactcccgaagcaatcagtgctctctgatcgctaaacatgatgggcttctattagagagattacagtaaaaaataacaatcagctctctgatgatcctgtgaggagggaacgggttgggaggagtagatttggctgaggacaagcccagactttcgtcacagggacagaccaacgtgttaacacaaagggagaacacgggagcatcctgcaccgtgcatttcagccacagatcacatggcccctccgcgggcccagcccacgccctgaccgcccggcctggccaggtctccgtatctctctgccccgccgccccttcccaactgcggacatgctgggtggatccggatcgcatggaagacgcagcctggccgcgctctcccagtgagtcctcatttcgcctctttggttttttcctttcttttttttttttataaaaaacaaacgaattgttgt

SEQ ID NO: 13871 - protein, 118 aa, Homo sapiens
MESHSVTQVGVQWRHLSSLQPPPPGFKQFSCRSLPSSWDYRHLPPSPGNFCIFSRDGVSPCWPGWSQTPDLDPPASASPSAGITGMSHLAWPINYDSDDRIVFKQENNQNVLAKVETT

SEQ ID NO: 13872 - DNA, 1565 bp, Homo sapiens
  CDS (114)..(764)
cttgcgcacgcgcagcccgcccctgcggcagagtggcgcccgcgcgtgactcccccctgccggctgcggaggtgggggggggacggcgcccccgccgtgtgcgtggggcggggatggagcacgcgccctggagccccggggccagctctagggcccgtgcaggccacaccatgaacacctccccaggcacggtgggcagtgacccggtcatcctggccactgcaggctacgaccacaccgtgcgcttctggcaggcccacagcggcatctgcacccggacggtgcagcaccaggactcccaggtgaatgccttggaggtcacaccggaccgcagcgtgattgctgctgcaggttaccagcacatccgcatgtatgatctcaactccaataaccctaaccccatcatcagctacgacggcgtcaacaagaacatcgcgtctgtgggcttccacgaagacggccgctggatgtacacgggcggcgaggactgcacagccaggatctgggacctcaggtcccggaacctgcagtgccagcggatcttccaggtgaacgcacccattaactgcgtgtgcctgcaccccaaccaggcagagctcatcgtgggtgaccagagcggggctatccacatctgggacttgaaaacagaccacaacgagcagctgatccctgagcccgaggtctccatcacgtccgcccacatcgatcccgacgccagctacatggcagctgtcaatagcaccgctcctcgccacctgctcggctgatcagacgtgcaagatctggaggacgtccaacttctccctgatgacggagctgagcatcaagagcggcaaccccggggagtcctcccgcggctggatgtggggctgcgccttctcgggggactcccagtacatcgtcactgcttcctcggacaacctggcccggctctggtgtgtggagactggagagatcaagagagagtatggcggccaccagaaggctgttgtctgcctggccttcaatgacagtgtgctgggctagcctgtgacccctcgggactgcctggtgcaggtggtggcagctggagggacccatgcagcacccaggtcagagcagaccctcccctgccggcctgcgccagctggacctgatggccccctgtggcgccttgacctgctgggccaggctgccctgggactctcagcccccagttgcttatccagatgtgacagagctcgacccaagccaggctgcacactcctggactgggctagcctgcactgcctgggaaagtcggccgagggcccaaagctgctgaggggtctgaggctggtgcccacccccaagccagtgcgttctctgcccctccctgcccgcgtttcagggcctcggtccatagagaacaccaccaccatggccaggtggaagggtttattagtccctgccagcagctgtcctccctggtgcaggtggcctggccagcccactggattggggacgggccaggctgggccaggtcgggggctcagtctgggaggtaataaaagcagaccgacacgcagatgttgctcgggaagcag

SEQ ID NO: 13873 - protein, 217 aa, Homo sapiens
MEHAPWSPGASSRARAGHTMNTSPGTVGSDPVILATAGYDHTVRFWQAHSGICTRTVQHQDSQVNALEVTPDRSVIAAAGYQHIRMYDLNSNNPNPIISYDGVNKNIASVGFHEDGRWMYTGGEDCTARIWDLRSRNLQCQRIFQVNAPINCVCLHPNQAELIVGDQSGAIHIWDLKTDHNEQLIPEPEVSITSAHIDPDASYMAAVNSTAPRHLLG

SEQ ID NO: 13874 - DNA, 2451 bp, Homo sapiens
  CDS (1660)..(2103)
aggtttgtgatcttgatgtagcaaagcgattcttttcatcttcggcgagcccaggggatggactcatcctagtgctcatggtctgaacctgccgtgttcttggcttttcgtgggaggctgcattgcggattgagggagagtgtccaaccgtggcaatggaagggactgggtacttgctggattttttggtgccaccctttagaagcaggtattattggctctgctttgcagatgaaaaaaactgaggttgaggtgggctaagtgtatccatcaggccggacagaaaacatgacccatcaatgtggccccaaccttggtgacaccttagaatagcagtgattcatttggtctcagatcttgatgtgtgactagctgcagccacccgcaccttcacagacataaaaaccgccagacccctgacacgcccatgaagacacacccaaagatgtctttggagatccccgggcaacagggacactggcatttctttgcatctccgtgccccaatcctggacctgttctggtgcacaggaagctggttacgaagggatgcagtggagatggtttgcagaaagaacaccaagtttgccggactccgtgttatggagatattttgtacttctggggatggaggctggagcatgcccaggagaccacatagtcatgagcattcacaattacccagcaattaacatgtgctgggaaccctgcccagtgagagctgacagatcttctgtcatttatttttcccaagcctgtgaggtaagcgctaacagtaggcccattctacagatgagggaactgaggctcagtgaagtcaacggctcaagggtgcatggctgggaggacacagaaacagggctcttgcctgtgtgccaggtggggactcgcccctcctctcgtccctgtgcctgtggtcagctaagaggagcccaaggctctggagtgggacaggggatagcgtttggctgtgttgtttgctcactgctctgagaaccagcagaagggctgagctgaaaacttcactcctccttgccaagctgtgtgccttgaagaagatatgcctttggggttcgaagtggccctggagccagccctatctggcagtcctgctttgctacttgctagtaagttattcagtctcttggagtctcagatttctcatcccttaaatgagctaataacaccgaggtggtggtgagggttaaatgggatgaggtcatgtatctgcagtgcctggcacatcactggaaaaacagcaagcaccgattgagccctcagagcctgacacgtacaaactcctgcaattcttcctgcaagcctctggcgggaactgctaccaacctaattttacaggtggggcatctgggccacagagaggtggagtagtttgcccaacctcacgcagctctaagtggtagagctggcaggcagacccaggcagtttggcaccagagtccattttcaaggcaccattctcatctttctcagtggcaggtcctcagcaatagggttagaaggctgctgccattcagatagcacagacaagacagaggtgagagttggcattggattctgtaaaagcgttggccactggtgcatttttttgtacaaccccaggggtaccatccacagcgattctcggagtcatgctctagaatgtcgcactggagttgtgtagcatgtgctcttgagatccagcctatgtgtggcctgggaaatgggagtcatgaatccagtcactggcatggctgtcattcatctggctgggtgactcccagcaggtccccatgttctctgggctttatttcctcacttactcaatgggagttggcttcagtgatggccaaaagccgtttggtcactacatgctgtggatctctgccatttggacttagagacagtaccactgaaacatgcctgaccacacacctcttcaagagtccaaactttgattctaaaagggcacatgctttgctttcttcagaggctgagtcggggcctcatctccggtgcgcagagcatgaagatgttactttcttttggtggaagccattttggtttcccatacccggcgaccggaagaattctggagggagtctctaattgcaggtggaggccagagctacgtggaaatgctgccttttgggatttcctgtaatgcagttacgtgcctccaagaagaacaacggtggctgcaaagaccagaacgacttcacggcaccgtgcgtagttttcagttcctggcttttggcatgttggagagagacctgtgcttattggatggagtgagaaactaatacccatccaggcctgctgttccaaactttttcagttgggtcttttccttagccctgcgattagcacgggatgaattcatctgctttttggactcactgaccatctcagactgtttttaacatgcttggggtttgataaaactggaaagat

SEQ ID NO: 13875 - protein, 148 aa, Homo sapiens
MSHWSCVACALEIQPMCGLGNGSHESSHWHGCHSSGWVTPSRSPCSLGFISSLTQWELASVMAKSRLVTTCCGSLPFGLRDSTTETCLTTHLFKSPNFDSKRAHALLSSEAESGPHLRCAEHEDVTFFWWKPFWFPIPGDRKNSGGSL

SEQ ID NO: 13876 - DNA, 2130 bp, Homo sapiens
  CDS (59)..(2002)
gacaacacgctgactaggaaaaggaggaggcggggcagtggggccttcggcggcgactatggaaggagccggctacagggtggtgtttgagaagggcggagtgtacctgcacaccagcgctaagaagtatcaggaccgagactctctcatcgctggtgtcatccgtgtcgtggaaaaggacaatgacgtcctcctgcactgggctcctgtagaggaggctggagattccacccaaatcctcttctccaagaaggactccagtgggggtgactcatgtgcttctgaggaggaaccaacctttgaccccggctatgaacctgactgggctgtcatcagcactgtgcggccacagccctgccactcagagcccacgagaggtgcagagcccagctgcccccagggctcctgggccttctcagtgagtctgggggagctaaagtccatccgccgctccaagccaggcctcagctgggcctacctggttctggtgacccaggctggaggttccctgcccgcactgcacttccaccgcgggggcacccgcgccctgctccgcgtcctcagccgctacctgctgttggccagctccccgcaggactcccgcctctaccttgtcttcccccacgactcctctgctctctccaactccttccaccacctgcagctctttgaccaggacagctccaatgtggtgtcacgcttcctccaggatccctactccaccaccttcagcagcttctcccgagtgaccaacttcttccggggtgccctgcagccacagcctgagggagccgcctccgaccttcccccgccacccgacgatgagcccgagcctggattcgaggtcatttcctgtgtggagctggggcctcggccaaccgtggagcggggccctccagttacagaggaggagtgggcacgccacgtgggccctgaaggtcgcctgcagcaggtccctgagctgaagaaccggatcttctcggggggtctgagccccagcctgcggcgcgaggcctggaagttcctcctagggtacctcagctgggaaggcacagctgaggagcacaaggcccacatacgcaagaaaacggatgagtatttccgcatgaagctgcagtggaaatctgtgagccctgagcaggagcggagaaactcacttctgcatggataccgcagcctcatcgaaagggatgtgagccgcactgacaggaccaacaagttctacgagggtcccgagaacccggggctgggcctgctgaacgatatcctcctcacctactgcatgtatcacttcgacctcggctacgtccagggcatgagtgatcttctctccccgatcctctacgtcattcagaacgaggtggatgctttctggtgtttctgtggcttcatggagctcgtgcaagggaactttgaagagagccaggagaccatgaagcggcaactcgggcgactgctgctgctcctgagggtgctggaccccctgctctgcgacttcctggattcccaggactccggctctctctgcttctgtttccggtggctgctcatctggttcaagagggaattccccttcccggatgtccttcggctgtgggaggtgctgtggacagggctccctggccccaatctgcacctgctggtggcctgcgccatcctggacatggagagggacaccctcatgctgtccggcttcggctccaatgagatcctcaagcacatcaacgagctgactatgaagctgagcgtggaggacgtgctgacccgcgccgaggccctgcaccgccagctaaccgcctgccccgagctgccccacaacgtgcaggagatcctggggctggccccgcccgcagagccccacagcccctcgcccaccgcctccccgctgcctctgtcgcccacccgggccccgcccaccccgccgccctccacggacacagccccgcagcccgacagcagcctggagatcctgcccgaggaggaggacgagggcgccgactcctaaccccgccaggcagcctcgttctgcacaggcactttagcccgagccaggcacacctgcgagggggcaggtgtgctccgccgccctgctgataagctggcttcattaaactgacacttctcatgtgc

SEQ ID NO: 13877 - protein, 648 aa, Homo sapiens
MEGAGYRVVFEKGGVYLHTSAKKYQDRDSLIAGVIRVVEKDNDVLLHWAPVEEAGDSTQILFSKKDSSGGDSCASEEEPTFDPGYEPDWAVISTVRPQPCHSEPTRGAEPSCPQGSWAFSVSLGELKSIRRSKPGLSWAYLVLVTQAGGSLPALHFHRGGTRALLRVLSRYLLLASSPQDSRLYLVFPHDSSALSNSFHHLQLFDQDSSNVVSRFLQDPYSTTFSSFSRVTNFFRGALQPQPEGAASDLPPPPDDEPEPGFEVISCVELGPRPTVERGPPVTEEEWARHVGPEGRLQQVPELKNRIFSGGLSPSLRREAWKFLLGYLSWEGTAEEHKAHIRKKTDEYFRMKLQWKSVSPEQERRNSLLHGYRSLIERDVSRTDRTNKFYEGPENPGLGLLNDILLTYCMYHFDLGYVQGMSDLLSPILYVIQNEVDAFWCFCGFMELVQGNFEESQETMKRQLGRLLLLLRVLDPLLCDFLDSQDSGSLCFCFRWLLIWFKREFPFPDVLRLWEVLWTGLPGPNLHLLVACAILDMERDTLMLSGFGSNEILKHINELTMKLSVEDVLTRAEALHRQLTACPELPHNVQEILGLAPPAEPHSPSPTASPLPLSPTRAPPTPPPSTDTAPQPDSSLEILPEEEDEGADS

SEQ ID NO: 13878 - DNA, 2475 bp, Homo sapiens
tgttccatgctctctaggtgtgcctctttcaatatttcctgtccttttcgccactgctcataaatggtttctaatcattcttataattgtaccttcttggagccttgagagacaggcacaggttctcttacataggctattattgatattggttgcttttattttccctccaacccccactccagataacaactgttgagtgcgtaccatgtggcaaacaatgggaatgaagagattaatgagccctcaaagaattcatgatttacgtagcacatacttctagctaactgttctagctacaccagccagttctagagaggtacccatggaggttttggatatgtgcttaactccttgaagattcttctggaatgatgcctaaagtaattgtcaagagaagctatgctaatcttcctcttcagaatattcccatttctttcttagttataggtatgaggagtctaaaatatgctttaacatagtaagcttattgttataactggaaccatgcaaaatcttaatttcctataatataatttcttgctcctccaaagtcattcaaatattaaattggacttattctatatgttgcttagtggaaaggtatcacaaataaaaagtgggccacaatgagtaggtcaattaaataaatgcaaaaaatatattgatttattaattacaatataatactgtgctaaatgcttagcttgcattatctcatttaattcttaccaaaactctttgaggtgattattgtatacactcccatttacagatgaaaaactgaggtttaaggaaaagatgtgtatgcccaaatttcttaatgactaaatggcagcagaccaggactgtcttgactccaaagaacatgttctaatactgtacagcttcagactccttcatgagagctgtgatgctcaataatatatgtcaggatatgaatacttagactcatgccagaccatgtcataagccttagacctttttcatttgtgtttatagatagtgaccttttagtgcagtgacaatttcttaccacacagcaatctgcatgcaaggaattgctaatatctgctttgctcagaaggaagcttgtatgtagcattaattatggcaccattaatccattcagttatttattgaaactattatttgttgagtttctgctacatgcttggaagtttcatgtgttatctcctttaaactcactgtaaaaggcatgaggataccaattttctatatctgcagtaattttcccagggttacgtagctcctaactggatgtagtgtcttggattcagacccagctgtttgtctccgaagtctataccaaactaccctggtagtttagagcttatgtttaccagaaatttatgtcccaccagcacgtaatttttaaaccaactctgttgaggtataatttaaataaatgaaatgcacatgttttaagtgtgatacatttggtaagatttgattatgtatatacccttgtagctaccacccccactcaaattatacatttccatcactcagtaaattgctttgtgcccttttgcagtctctcttactccttgccccaggctaccattgatctgatttccatcactgtagactagtttttccaattctagaagttcatataaaaggaatagtacagtatatactcttttttgcctgattttttcacttaatgtaaagttttgtgagattcatacatgttgttgcctattcaatagttcattcttttttattaccaaataatattccattatatcacacatcacatttgtttttccatttgtctcctgatgtgtatatggttgtttctagtatggggtgatgttgaataaagctgctatgagcgttcgtatcccagttttattggctcatccactgttgtccaaaagaatttcttgaactctgcatttgtcctgaaggattctctgattgttcttcatacaagaactctaggaatataacatggaatccagctaatttctgaaactcatgtatttaattatacatttacactaacggccgtgtgcactgagaaaaatcctcctgattaatggcattgcttttagagtcagtgatcttttatttctcatgcaagtcatagtcaccactgtcagtcaggcttctcagttccaagcaactgaaaccaatcctggctcccttaaaaagtagatgaatctggccaggcatagtggctcacgcctgtaatcccagcattttgggaggtcaagccgggcagatcacgaggtcaagagattgagaccagcctgaccaacatggtgaaactctgtctttactaaaaatacaaaaattagttgggtgtggtagtgcgcgcttgtagtcccggctacttgggagactgaggcaggagaatcgcttgaacccgggaagcgtaggttgcagtgagccaagatcgcaccactgcacttcagcctgggtgacagagtgagactccatctc

SEQ ID NO: 13879 - DNA, 1678 bp, Homo sapiens
  CDS (18)..(944)
gcggccgcggcgggaacatggaggagctgctgaggcgcgagctgggctgcagctctgtcagggccacgggccactcggggggcgggtgcatcagccagggccggagctacgacacggatcaaggacgagtgttcgtgaaagtgaaccccaaggcggaggccagaagaatgtttgaaggtgagatggcaagtttaactgccatcctgaaaacaaacacggtgaaagtgcccaagcccatcaaggttctggatgccccaggcggcgggagcgtgctggtgatggagcacatggacatgaggcatctgagcagtcatgctgcaaagcttggagcccagctggccgatttacaccttgataacaagaagcttggagagatgcgcctgaaggaggcgggcacagtggggagaggaggtgggcaggaggaacggccctttgtggcccggtttggatttgacgtggtgacgtgctgtggatacctcccccaggtgaatgactggcaggaggactgggtcgtgttctatgcccggcagcgcattcagccccagatggacatggtggagaaggagtctggggacagggaggccctccagctttggtctgctctgcagttaaagatccctgacctgttccgtgacctggagatcatcccagccttactccacggggacctctggggtggaaacgtagcagaggattcctctgggccggtgatttttgacccagcttctttctacggccactcggaatatgagctggcaatagctggcatgtttgggggctttagcagctccttttactccgcctaccacggcaaaatccccaaggccccaggattcgagaagcgccttcggttgtatcagctctttcactacttgaaccactggaatcattttggatcggggtacagaggatcctccctgaacatcatgaggaatctggtcaagtgagcgggccttactctggaaggaggcctcagaggtttctccacagtcctcttctgggcaaattcttgtttcttcacatgccggactagcttaagaccaatgcagtagcttatttccaagccttgcaaagtatataatatctaagaggaaaggttttgtcatcccagcgttgtccactttgtggggctttgtaggtagacggagccacactacaggcagggtatgagcagagggatgtatggagtgtgggtgactctgagcctcactgctgctgcaaggtggggaaactgtaagtgaacccctgtgggtgcgggggagggtatccggtgcgcagggaggtggccagcgcccccgggcactgctgctcataggtacctttccactgcctcctccctgctctcctgtgcaggaatgtctctgagctgttcacgttgatgcttcttggttggcaagacttgggtgtagacatgaaaccatcttactaaaagtgtcttaaaatgaccaattccagaatcaagcgtattccgttttcttcctgcatgatccctgggccctcccgcaggctgagcaagtctgtaaactgattctgggagaaaccaagctgctggccatagggtgtccttgggtacatccaggagtcttcattgcttctgttattaccccgtctcctctgccattttctacagcttgctgagttgtcattcctttgcaacattaaaatacatgctgaactc

SEQ ID NO: 13880 - protein, 309 aa, Homo sapiens
MEELLRRELGCSSVRATGHSGGGCISQGRSYDTDQGRVFVKVNPKAEARRMFEGEMASLTAILKTNTVKVPKPIKVLDAPGGGSVLVMEHMDMRHLSSHAAKLGAQLADLHLDNKKLGEMRLKEAGTVGRGGGQEERPFVARFGFDVVTCCGYLPQVNDWQEDWVVFYARQRIQPQMDMVEKESGDREALQLWSALQLKIPDLFRDLEIIPALLHGDLWGGNVAEDSSGPVIFDPASFYGHSEYELAIAGMFGGFSSSFYSAYHGKIPKAPGFEKRLRLYQLFHYLNHWNHFGSGYRGSSLNIMRNLVK

SEQ ID NO: 13881 - DNA, 1641 bp, Homo sapiens
  CDS (27)..(1382)
gctgatgctgccgtgcggtacttgtcatggagctggcactgcggcgctctcccgtcccgcggtggttgctgctgctgccgctgctgctgggcctgaacgcaggagctgtcattgactggcccacagaggagggcaaggaagtatgggattatgtgacggtccgcaaggatgcctacatgttctggtggctctattatgccaccaactcctgcaagaacttctcagaactgcccctggtcatgtggcttcagggcggtccaggcggttctagcactggatttggaaactttgaggaaattgggccccttgacagtgatctcaaaccacggaaaaccacctggctccaggctgccagtctcctatttgtggataatcccgtgggcactgggttcagttatgtgaatggtagtggtgcctatgccaaggacctggctatggtggcttcagacatgatggttctcctgaagaccttcttcagttgccacaaagaattccagacagttccattctacattttctcagagtcctatggaggaaaaatggcagctggcattggtctagagctttataaggccattcagcgagggaccatcaagtgcaactttgcgggggttgccttgggtgattcctggatctcccctgttgattcggtgctctcctggggaccttacctgtacagcatgtctcttctcgaagacaaaggtctggcagaggtgtctaaggttgcagagcaagtactgaatgccgtaaataaggggctctacagagaggccacagagctgtgggggaaagcagaaatgatcattgaacagaacacagatggggtgaacttctataacatcttaactaaaagcactcccacgtctacaatggagtcgagtctagaattcacacagagccacctagtttgtctttgtcagcgccacgtgagacacctacaacgagatgccttaagccagctcatgaatggccccatcagaaagaagctcaaaattattcctgaggatcaatcctggggaggccaggctaccaacgtctttgtgaacatggaggaggacttcatgaagccagtcattagcattgtggacgagttgctggaggcagggatcaacgtgacggtgtataatggacagctggatctcatcgtagataccatgggtcaggaggcctgggtgcggaaactgaagtggccagaactgcctaaattcagtcagctgaagtggaaggccctgtacagtgaccctaaatctttggaaacatctgcttttgtcaagtcctacaagaaccttgctttctactggattctgaaagctggtcatatggttccttctgaccaaggggacatggctctgaagatgatgagactggtgactcagcaagaataggatggatggggctggagatgagctggtttggccttggggcacagagctgagctgaggccgctgaagctgtaggaagcgccactcttccctgtatctaactggggctgtgatcaagaaggttctgaccagcttctgcagaggataaaatcattgtctctggaggcaatttggaaattatttctgcttcttaaaaaaacctaagattttttaaaaaattgatttgttttgatcaaaataaaggatgataatagatatt

SEQ ID NO: 13882 - protein, 452 aa, Homo sapiens
MELALRRSPVPRWLLLLPLLLGLNAGAVIDWPTEEGKEVWDYVTVRKDAYMFWWLYYATNSCKNFSELPLVMWLQGGPGGSSTGFGNFEEIGPLDSDLKPRKTTWLQAASLLFVDNPVGTGFSYVNGSGAYAKDLAMVASDMMVLLKTFFSCHKEFQTVPFYIFSESYGGKMAAGIGLELYKAIQRGTIKCNFAGVALGDSWISPVDSVLSWGPYLYSMSLLEDKGLAEVSKVAEQVLNAVNKGLYREATELWGKAEMIIEQNTDGVNFYNILTKSTPTSTMESSLEFTQSHLVCLCQRHVRHLQRDALSQLMNGPIRKKLKIIPEDQSWGGQATNVFVNMEEDFMKPVISIVDELLEAGINVTVYNGQLDLIVDTMGQEAWVRKLKWPELPKFSQLKWKALYSDPKSLETSAFVKSYKNLAFYWILKAGHMVPSDQGDMALKMMRLVTQQE

SEQ ID NO: 13883 - DNA, 1947 bp, Homo sapiens
  CDS (406)..(1143)
agaaagaggcttctccaacccggcccggcccttccttcccctttcccgcagtcgttgcctcctcctcccctgcctcctcctccccttcctcctcctggccgcttagtctcacacccgccgggccgttgttcccgagacgttgttgagtcccctgtgtcctcttctgggtggaggaactgcaatgtctggtggagaacagaaaccagagaggtactatgtgggtgtggacgttggaacaggcagtgtccgtgcagctctggtggaccagagtggggtcctgttggcttttgcagaccagccaattaagaattgggagccccagttcaaccaccatgagcagtcctccgaggacatctgggctgcgtgctgtgttgtcacaaaggggattcccatcgaaacgtcatcatgtggctggaccatcgagcagtcagtcaagttaacaggatcaatgagaccaagcacagtgtcctccagtacgtcgggggggtgatgtctgtggaaatgcaggccccgaaacttctgtggctgaaagagaacttgagagagatttgctgggataaggcgggacatttctttgatctcccggacttcttatcgtggaaggcaacaggtgtcacagcacggtctctctgctccctggtgtgtaagtggacatattcagcagagaaaggctgggacgacagtttctggaaaatgattggtttggaagactttgttgcagataattacagcaaaataggaaaccaagtgctacctcctggagcttctcttggaaatgggctcacaccagaggcagcaagagaccttggccttctccctgggattgcggtcgcagcttcactcattgatgcccatgcaggaggactaggagtgattggggcagatgtgagagggcacggcctcatctgtgaggggcagccagtgacgtcacggctggctgtcatctgtggaacgtcttcttgtcacatggggatcagcaaagacccgatttttgtaccaggcgtctgggggccttatttctcagccatggtacctgggttctggctgaatgaaggtggtcagagcgttactggaaaattgatagaccacatggtacaaggccatgctgcttttccagaactacaagtaaaggccacagccaggtaactgctgtctctgttccctctaaaattttccttgtgtgactgtattgagagaattcacgttgggcagttgggtgattttcagatcctacagacaatgaaaatgcctgttagtgcttgaaagatagtcacctggatgatccagaagatagatgtattaattctttaaatgaggtaagagaacttagagaacctagagataccccaagaatatacccagggactatagataagaaactctgatgtagaagaaggaccatggattctggagtcaaaacttcttagtttcacatcccagccatactccttaatagatacaggaccttgagctagttacttaacctctttatgcctgtctcttcatctgtaaaactgaagataataactgatatggagtgatttctagaatattttgaagcaagctgagtgcaaaaaaaatttacgatatactccctttcatgtaaaaagaaagacataggaaaatacatgtgtatctgttcatttttgcaaaagaaatataggaagtggccaggtgcggtggctcactcctgtaaccccagcaccttgggaggccgaggcgggcagatcacgagttcagagatcgagaccagcctggccaacatggtgaaaccccatctctactaaaaatacaaaagttagccgggcatggtgatgtatgcctataatcccagttacttgggaggttgaggcaggagaattgctcaaacccgggaggtggaggttgcagtgagcagagatcgtgccactgcactccagcctgggcaataaagtgagactccgtctc

SEQ ID NO: 13884 - protein, 246 aa, Homo sapiens
MWLDHRAVSQVNRINETKHSVLQYVGGVMSVEMQAPKLLWLKENLREICWDKAGHFFDLPDFLSWKATGVTARSLCSLVCKWTYSAEKGWDDSFWKMIGLEDFVADNYSKIGNQVLPPGASLGNGLTPEAARDLGLLPGIAVAASLIDAHAGGLGVIGADVRGHGLICEGQPVTSRLAVICGTSSCHMGISKDPIFVPGVWGPYFSAMVPGFWLNEGGQSVTGKLIDHMVQGHAAFPELQVKATAR

SEQ ID NO: 13885 - DNA, 1862 bp, Homo sapiens
  CDS (196)..(1203)
gatatatggaagatttaaacaccattcattctttgtttttccacaaaggaccgtcctccttctaatatttggaagaaaatagatcaatccagggactataaaaatggcaatcaactcagggaatatcaactggaagggctcaactggctcttgttcaattggtacaatagacgaaactgcatcttagcagatgaaatgggtcttggcaaaactattcaatcaattacattcctctatgaaatccttctgactggtataagaggacctttcctgattattgctccactttctactattgcaaactgggagagagaatttcgtacgtggactgatattaacgttgtggtttatcatgggagcctgattagcagacaaatgatacagcaatacgagatgtacttcagggattcacaggggcgtatcattcgaggagcttacagattccaagccatcatcaccacttttgaaatgattcttggaggctgtggagagcttaatgcaattgaatggcgatgtgtgattattgatgaagcacataggttaaaaaataaaaattgtaaactcttagagggcctgaaactcatgaatctggaacacaaggtgcttttgactggcacccctctccaaaatacagttgaagaactatttagtcttcttcactttcttgaacccttaaggtttccttctgaatcaacatttatgcaagaatttggggatctggaaacagaggaacaggtacagaaacttcaggctatcctgaaaccaatgatgttgagacgattaaaagaagatgtggaaaagaagttggcacctaaagaagaaaccatcattgaagtagaacttactaatattcaaaagaaatactaccgggctatcttggaaaagaacttttcttttttatccaaaggagcaggacaaactaatgtacctaacttggtcaataccatgatggagctcaggaaatgttgtaatcatccatatcttataaaaggtgctgaggagaaaatacttggagaatttagagatacttacaatccagctgcttctgattttcatcttcaagcaatgatccagtctgctggtaaattggtccttattgataaattgcttcccaaaatgaaagccggaggtcataaagtgctcatcttctctcaaatggttcgttgccttgacattctggaggactatctcatacataaaaggtaaagcatactgaatttactgtgaattatgctaagtatatgctattaagatttgtgcagcactgtaatgtaaatgaactttactcatatctttctctttgctagattagaataatgcattcaaatttataagtaaagattgtttaggattatgtgttatattttcctaacctgcatatgttgcaatattagatgtgcctgaggagtccaattaagaaaagcttgcaaataaatatttgtttacccaggaatgggtttaaaaatgtacattttacttgattaataaaccttgtggatgaaactttaaatagatatatatttacaacagtcatcttcaaaattgaaaaaagtgattcaagaactttggatctatttcattgttataattagagccttaagttgtgggacttttattcttattatatactatataaaatttgttcatgctttaattttttctgatttgtttcaatgtgggttttttgttttgttttgtttattggtacatcacaataagatagtgttaaatattgtctaatcaggccgggcgcggtggctcacgtctgtaatcccagcactttgggagcctgaggcaggcggatcatgaggtcaggagatcaagaccatcgtggcttacacggtgaaacccacgtctctact

SEQ ID NO: 13886 - protein, 336 aa, Homo sapiens
MGLGKTIQSITFLYEILLTGIRGPFLIIAPLSTIANWEREFRTWTDINVVVYHGSLISRQMIQQYEMYFRDSQGRIIRGAYRFQAIITTFEMILGGCGELNAIEWRCVIIDEAHRLKNKNCKLLEGLKLMNLEHKVLLTGTPLQNTVEELFSLLHFLEPLRFPSESTFMQEFGDLETEEQVQKLQAILKPMMLRRLKEDVEKKLAPKEETIIEVELTNIQKKYYRAILEKNFSFLSKGAGQTNVPNLVNTMMELRKCCNHPYLIKGAEEKILGEFRDTYNPAASDFHLQAMIQSAGKLVLIDKLLPKMKAGGHKVLIFSQMVRCLDILEDYLIHKR

SEQ ID NO: 13887 - DNA, 2094 bp, Homo sapiens
  CDS (61)..(1314)
aaaaaacaatatcgtttgctgtcacttaaatatcatccagataaaggaggtgatgaggttatgttcatgaggatagcaaaagcttatgctgctttaacggatgaagagtcccggaaaaattgggaagaatttggaaatccagatgggcctcaagccacaagctttggaattgccctgccagcttggatagttgaccagaaaaattcaattctggttttacttgtatatggattggcatttatggttatccttccagttgttgtgggctcttggtggtatcgctcaatacgctatagtggagaccagattctaatacgcacaacacagatttatacatactttgtttataaaacccgaaatatggatatgaaacgtcttatcatggttttggctggagcttctgaatttgatcctcagtataataaagatgccacaagcagaccaacggataatattctaataccacagctaatcagagaaattggcagcattaatttaaagaagaatgagcctccacttacctgcccatatagcctgaaggccagagttcttttactgtctcatcttgctagaatgaaaattcctgagacccttgaagaagatcagcaattcatgctaaaaaagtgtcctgccctacttcaagaaatggttaatgtaatctgccaactaatagtaatggcccggaaccgtgaagaaagggagtttcgtgctccaactttggcatccctagaaaactgcatgaagctttctcagatggccgttcagggacttcagcaatttaagtctccccttctgcagctccctcatattgaagaggacaatcttagacgggtttctaatcataagaagtataaaattaaaactatccaggatttggtgagtttaaaagaatcagatcgtcacactctactgcacttccttgaagatgaaaaatatgaagaggttatggctgtccttgggagttttccatatgtgaccatggatataaaatcacaggtgttagatgatgaagatagcaacaacatcacagtaggatccttagttacagtgttggttaagttgacaaggcaaacaatggctgaagtatttgaaaaggagcagtccatctgtgctgcagaggaacagccagcagaagatgggcagggtgaaactaacaagaacaggacaaaaggaggatggcaacagaagagtaaaggacccaagaaaactgctaaatcaaaaaaaaaagaaacctttaaaaaaaaaacctacacctgtgctattaccacagtcaaagcaacagaaacaaaagcaggcaaatggagtcgttgggaatgaagctgcagtaaaggaagatgaagaagaagtttcagataagggcagtgattctgaagaagaagaaaccaatagagattcccaaagtgagaaagatgatggtagtgacagagactctgatagagagcaagatgaaaaacaaaacaaagatgatgaagcagagtggcaagaattacaacaaagcatacagcgaaaagagagagctctattggaaaccaaatcaaaaataacacatcctgtgtatagcctttactttcctgaggtagagctgaagtttcctgcaccaggcaagcctggaaattatcagtatactgtgtttctgagatcagactcctatatgggtttggatcagattaaaccattgaagttggaagttcatgaggctaagcctgtgccagaaaatcacccacagtgggatacagcaatagagggggatgaagaccaggaggacagtgagggctttgaagatagctttgaggaagaagaggaggaagaagaagatgatgactaagcagtactctgaatggaccacagtgtttgcacatatttgcaattttttgctgttttggaagtgtatcataaaccagaaacagtacagaactgatgttgagggaggtgtagtttttttactctagaaatgggtgcataatataactaggcagtggcggtgccttggtacaacctgaaaaatgttaaggcttattgaaacctttcaagtaggggatggtacatttatttcatctgcaaatgataataaatcctttgttattataactgtct

SEQ ID NO: 13888 - protein, 418 aa, Homo sapiens
MFMRIAKAYAALTDEESRKNWEEFGNPDGPQATSFGIALPAWIVDQKNSILVLLVYGLAFMVILPVVVGSWWYRSIRYSGDQILIRTTQIYTYFVYKTRNMDMKRLIMVLAGASEFDPQYNKDATSRPTDNILIPQLIREIGSINLKKNEPPLTCPYSLKARVLLLSHLARMKIPETLEEDQQFMLKKCPALLQEMVNVICQLIVMARNREEREFRAPTLASLENCMKLSQMAVQGLQQFKSPLLQLPHIEEDNLRRVSNHKKYKIKTIQDLVSLKESDRHTLLHFLEDEKYEEVMAVLGSFPYVTMDIKSQVLDDEDSNNITVGSLVTVLVKLTRQTMAEVFEKEQSICAAEEQPAEDGQGETNKNRTKGGWQQKSKGPKKTAKSKKKETFKKKTYTCAITTVKATETKAGKWSRWE

SEQ ID NO: 13889 - DNA, 4002 bp, Homo sapiens
  CDS (207)..(3281)
aatgcgcttgcgcacgtgctgtctaccagttcctgagagggacgcgtgccgcggagccaggcttactacgtgacccggacaccaggcatacgctaggggcagtcagctgtgccttctctttcggagttgttccgtgctcccacgtgcttccccttctccactggctgggatcccccgggctcggggcgcagtaataatttttcaccatgcatcggaaaaaggtggataaccgaatccggattctcattgagaatggagtagctgagcggcaaagatctctctttgttgtagttggggatcgaggaaaagatcaggtggtaatacttcatcacatgttatccaaagcaactgtgaaggctcggccttcagtgctgtggtgttataagaaagagctggggtttagcagtcaccggaagaaaagaatgcgacagctgcagaagaaaataaagaatggaacactgaacataaagcaggacgacccctttgaactcttcatagcagccacaaacattcgctactgctactacaacgagacccacaagatcctgggcaataccttcggcatgtgtgtgctgcaggattttgaagccttaactccaaacttgctggccaggactgtagaaacagtggaaggtggtgggctagtggtcatcctcctacggaccatgaactcactcaagcaattgtacacagtgactatggatgtgcattccaggtacagaactgaggcccatcaggatgtggtgggaagatttaatgaaaggtttattctgtctctggcctcttgtaagaagtgtctcgtcattgatgaccagctcaacatcctgcccatctcctcccacgttgccaccatggaggccctgcctccccagactccggatgagagtcttggtccttctgatctggagctgagggagttgaaggagagcttgcaggacacccagcctgtgggtgtgttggtggactgctgtaagactctagaccaggccaaagctgtcttgaaatttatcgagggcatctctgaaaagaccctgaggagtactgttgcactcacagctgctcgaggacggggaaaatctgcagccctgggattggcgattgctggggcggtggcatttgggtactccaatatctttgttacctccccatgccctgataacctccatactctgtttgaatttgtatttaaaggatttgatgctctgcaatatcaggaacatctggattatgagattatccagtctctaaatcctgaatttaacaaagcagtgatcagagtgaatgtatttcgagaacacaggcagactattcagtatatacatcctgcagatgctgtgaagctgggccaggctgaactagttgtgattgatgaagctgccgccatccccctccccttggtgaagagcctacttggcccctaccttgttttcatggcatccaccatcaatggctatgagggcactggccggtcactgtccctcaagctaattcagcagctccgtcaacagagcgcccagagccaggtcagcaccactgctgagaataagaccacgacgacagccagattggcatcagcgcggacactgcatgaggtttccctccaggagtcaatccgatacgcccctggggatgcagtggagaagtggctgaatgacttgctgtgcctggattgcctcaacatcactcggatagtctcaggctgccccttgcctgaagcttgtgaactgtactatgttaatagagataccctcttttgctaccacaaggcctctgaagttttcctccaacggcttatggccctctacgtggcttctcactacaagaactctcccaatgatctccagatgctctccgatgcacctgctcaccatctcttctgccttctgcctcctgtgccccccacccagaatgcccttccagaagtgcttgctgttatccaggtgtgccttgaaggggagatttctcgccagtccatcttgaacagtctgtctcgaggcaagaaggcttcaggggacctgattccatggacagtgtcagaacagttccaagatccagactttggtggtctgtctggtggaagggtcgttcgcattgctgttcacccagattatcaagggatgggctatggcagccgtgctctgcagctgctgcagatgtactatgaaggcaggtttccttgtctggaggaaaaggtccttgagacaccacaggaaattcacaccgtaagcagcgaggctgtcagcttgttggaagaggtcatcactccccggaaggacctgcctcctttactcctcaaattgaatgagaggcctgccgaacgcctggattacctgggtgtttcctatggcttgacccccaggctcctcaagttctggaaacgagctggatttgttcctgtttatctgagacagaccccgaatgacctgaccggagagcactcgtgcatcatgctgaagacgctcactgatgaggatgaggctgaccagggaggctggcttgcagccttctggaaagatttccgacggcggttcctagccttgctctcctaccagttcagtaccttctctccttccctggctctgaacatcattcagaacaggaacatggggaagccagcccagcctgccctgagccgggaggagctggaagcactcttcctcccctatgacctgaagcggctggagatgtattcacggaatatggtggactatcacctcatcatggacatgatcccggccatctctcgcatctatttcctgaaccagctgggggacctggccctgtctgcggctcagtcggctcttctcttggggattggcctgcagcataagtctgtggaccggctggaaaaggagattgagctgccctcgggccagttgatgggacttttcaaccggatcatccgcaaagttgtgaagctatttaatgaagttcaggaaaaggccattgaggagcagatggtggcagcgaaggatgtggtcatggagcccacgatgaagaccctcagtgacgacctagatgaagcagcaaaggaatttcaggagaaacacaagaaggaagtagggaagctgaagagcatggacctctctgaatacataatccgtggggacgatgaagagtggaatgaagttttgaacaaagctgggccgaacgcctcgatcatcagcctgaaaagtgacaagaaaaggaagttagaggccaaacaagaacccaaacagagcaagaagttgaagaacagagagacaaagaacaaaaaagatatgaaactgaagcggaagaaatagtgaagagaaactcgggcatctgtgtttgatcatgggaagatactctcactaactgaaccctctctggctggactgttaaaagcaacgagaggccccggcacacctggaagctggccgcgaattcggcctctgggcctgtgtgtctgtgagctcaacctggctaaaggcagagtcactcccaaatgggtctctttagaacttgatggctgggcactgccatctctagaattgccacgagtctctctcttcctgcccagtccagggccctcctttcctataagttcatattttgctttgagccagctttttagtctcattcccacacatgtggaagccacgttgcctctcgaccgcctgaggcccttaagtacatcgctttctggtggtgcccaggaggctgctgctgggccgctgggtctctctttgtggacttgtacctggagcaggaggaactccagtccgtcccggcatccatggcagcccgcggttaggtgcgccagggtttgctgatgttgtcttgtgctgttccactcttggctccagcagacccactgtcccagaaaagcctgatcctgtagtttatgtagaatgccacatctgcgtcctcaagacctgtttcatccatttgggaaaagatgttgggaaaggccactttgctcgcaggggtgaggggaaggatagagaatctatttttaataaataacattctagaaagatc

SEQ ID NO: 13890 - protein, 1025 aa, Homo sapiens
MHRKKVDNRIRILIENGVAERQRSLFVVVGDRGKDQVVILHHMLSKATVKARPSVLWCYKKELGFSSHRKKRMRQLQKKIKNGTLNIKQDDPFELFIAATNIRYCYYNETHKILGNTFGMCVLQDFEALTPNLLARTVETVEGGGLVVILLRTMNSLKQLYTVTMDVHSRYRTEAHQDVVGRFNERFILSLASCKKCLVIDDQLNILPISSHVATMEALPPQTPDESLGPSDLELRELKESLQDTQPVGVLVDCCKTLDQAKAVLKFIEGISEKTLRSTVALTAARGRGKSAALGLAIAGAVAFGYSNIFVTSPCPDNLHTLFEFVFKGFDALQYQEHLDYEIIQSLNPEFNKAVIRVNVFREHRQTIQYIHPADAVKLGQAELVVIDEAAAIPLPLVKSLLGPYLVFMASTINGYEGTGRSLSLKLIQQLRQQSAQSQVSTTAENKTTTTARLASARTLHEVSLQESIRYAPGDAVEKWLNDLLCLDCLNITRIVSGCPLPEACELYYVNRDTLFCYHKASEVFLQRLMALYVASHYKNSPNDLQMLSDAPAHHLFCLLPPVPPTQNALPEVLAVIQVCLEGEISRQSILNSLSRGKKASGDLIPWTVSEQFQDPDFGGLSGGRVVRIAVHPDYQGMGYGSRALQLLQMYYEGRFPCLEEKVLETPQEIHTVSSEAVSLLEEVITPRKDLPPLLLKLNERPAERLDYLGVSYGLTPRLLKFWKRAGFVPVYLRQTPNDLTGEHSCIMLKTLTDEDEADQGGWLAAFWKDFRRRFLALLSYQFSTFSPSLALNIIQNRNMGKPAQPALSREELEALFLPYDLKRLEMYSRNMVDYHLIMDMIPAISRIYFLNQLGDLALSAAQSALLLGIGLQHKSVDRLEKEIELPSGQLMGLFNRIIRKVVKLFNEVQEKAIEEQMVAAKDVVMEPTMKTLSDDLDEAAKEFQEKHKKEVGKLKSMDLSEYIIRGDDEEWNEVLNKAGPNASIISLKSDKKRKLEAKQEPKQSKKLKNRETKNKKDMKLKRKK

SEQ ID NO: 13891 - DNA, 2131 bp, Homo sapiens
tgtgatacagcacataaacagaattaaaaacaaaagtcacatgattggagtgttggcaagatggctgaataggaacggctctggtctgcagctcccagcaagaccaatgcagaaggtggatgatttctgcatttccagctgaggtacctggctcatcacactgagactggttagacagtgggtgcagcctatggagagcaagtagaagcagggtagggcgttgcctcacccaggaagtacaagggggtggggaactccctcccctagtcaagggaagccatgagggactgtgctgtgagggactgtgttatctggcccagatactatgcttttcctacagttttcacaacccacagaccagaagattcccttgggtgcctacaccatgagggccctgggtttcaagcacaaaactgggcggccatttgggcagacaccgaggtagctgcaggagttatttttcttacctcagtggcgcctggaaccacagcaagacaaaaccgctcacttccctggaaagggggctgaagccagggatctaagtggtctaactcagtggatcctacttccatggagcccagcaagctaagatccactgggttgaaattcttgctgccagcacagcagtctgaagtcaacctgggatgctccagcttggtggggggaggggcatttgccattactgaggcttgagtaggcgttttcccctcacaatgtaaagaaagccatgtgggaagttcgaactgggcagaacccactgtggtgcggcaaagccactgtagccagtctgcctttctagattcgtcctctctgggcaggcatcataaaggtacataaatccatgaagatgaggaaaacccagtgcaaaaaggctgaaaattccccaaaccagaatgcctcttctcctccaaaggatcacactcctcaccagcaagggaacaaaactggatggagaatgagtttgatgaattgacagaagtagacttcagaaggtgggtaataacaaactcctttgagctagaggaacatgttctaacccagtgcaaggaagctaagaaccttgataaaagattacatgaactgctaactagaataaccagtttagagaagaacataaatgacatcatggagctgaaaaacacagcaggagaacttcttgaagcatacacaagtatcagtagccaaatcgaccaagcagaagaagggatatgagagattgaagatgaacttaatgaaataaagtgtgaagactagatgagagaaaaaaaaaatgaaaaggaacaaacaaagcctccaagaaatatgctatgtgaaaagaccaaacatacatttgaggtgtacctgaaagtgatggggagaatggaaccaagttggaaaacactctgcaggatattatccaggagaacttccccaacctagcaagataggccaatattcaaattcaagaaatacagagaacaccactaagatactccacaagaagagccaacaacaagacacagaattgtcagattcaccaaggttgaaatgaaggaaaaaatgttaagggcagccagagagaaaggtcgggttacccacaaagggaaggccatcagactaacagcggatctctctgcagacaccctacaagctagaatagagttggggccaatattcaacattcttaaagaattttcaacccagaatttcatatctagcctaaataagcttcataagtgaaggagaaataaaaccctttacagataagcaaatgctgagagattctgtcaccaccaggcctgccttataagagctactgaaggaagcactgaatatggaaggggaaactggtaccagccactgcaaaaacataccaaaatctaaagaccatcgacactttgaagaaactacatcaactaacaggcaaaataaccagctagcatcataatgacaggatcaaattcacagataacaatattaaccttaaatgtaaaggggctaaatgacccaattaaaagacacaggctggcaaattggataaagagtcaaaacccatcagtgtgctgtattcaggagacccatctcacatgcaaagacacacgtaggctcaaaataaagggatggaggaatatttactacgcaaatggatagc

SEQ ID NO: 13892 - DNA, 1715 bp, Homo sapiens
tagccaacaatttacaaataataaaatatacattgcttgtattataaattccatttagccagttgattctcagagactgcttccattgatttttgccgaattctggttccataaccagccgatggctgccatgcatgaacagttgtctttccagcgtaaatattgggtaatatttttgccacagaaacaacaaagacatatgtcagaacttcattcactcaccagggatgggaacaacttccttgctaaattggaaaataattttcaaatactgaaagaatatctcttcagttttgtatgctgttcacagtgtaatacctacagacacgaaacacttttaagttatacctgcagtattaatgctttctccatcactttcttaagcccagaaaatcaacagtaaacccagcccttgtttgtagcatttgtcgatttccatatgggaatatcccgccatggccaatttcaagctgctcacgtgacgtcactgaagacgggttggtaaaagaggggtccagtagccaccatgagatagtgcttcccctgtgtagatagaacagatgtgagtaaccctgaagcacagataatgacaaaatatagtgagatcatgaggaaggggcaatttgtgaatattcattacctttgtttttagtataatttattcaattgtaagcttctataatttaatgtttaataaagactgtgtttaacaaccagctcacaaaggttctgaaaatgttcacaatcagttccgttaagccagtgctggtcggctgcagcgcaccactgcatattgggaattgaacgggtagagggttgtctttctcttgggacaagcacactttaaggggagcgtattcattgcaggaccaaggctcaacgtgcactgctccccacccgtcccagctcctctttatgcttgtgggggccagccactctccagtcctccccaggaatatacgtcgcaaccaggcgttcttttttcattggcctcattcttcccagggccggctcagaggcccccaggtctaattgccattggtttaactgctgtttaataaatcaaactatttttctgactaaatcttgctaatcagtaaatagtgatcatctgaattctccatatgctaaaaagtcatttttccaaggggtaaaattaaagtaatatttggcataaaaaaattctaatacacaggcagacacctttatgtctaatatctcaactgtagaggttagataatcacagagtgctatactgtgttatagccttaatatgtagagtgcttacagatcactaagaaatatttaaataatatcactaaataggccaaaatcctgaaaagcaattcgtaaagaaaacatacaaataaccagtaaacacaagatattcaacatttgtagtatccaaataaaatataaactaaaggccaggtgcgttgtctcacgcctataatcccagcactttgagaggccaaggcaggtggatcacgaggtcaggagttggagaccagtctggccaacgtggtgaaaccctatctctataaaaatacaaaaattagccgggcatggtggcgtgcacctgtagtctcagctactcgggaggctgaggcaggagaattgcttgaaccagggaggcggaggttgcagtgagccgagattgtgccactgcactccagcctgggcaacagagactccgtctcagaaaaaataaaaat

SEQ ID NO: 13893 - DNA, 1801 bp, Homo sapiens
  CDS (709)..(1548)
gctaggtcggctttaaaatcgatgcagagtaattgcagtacatgggtagttggatgacattaacatgagaaatgtgctgtagtcgtcatccttggaacaaacacgtccaattacagtgaaattctgtgccccttacccggctaatttgaacacagctcaccgccaaggcctcctccagcatggccagccctgggcagagatcgtcacgaatggatttgacgggaatggggctggggactgtcatgttgaagcccggtggagatgtgggacagggacctcgtttgttccagagcctgttccaaccctccctggcttttgtggcatgttttctatgccgtttgctgcaaggatgcgttgggcatggagtaacattcccgagaccgtcctgcagtactgcacgtgtgcgtgtctgtgctttggtttgtctgtgtgtctaccttgttttagagtaaaaaagtgaatctgaggccagatcatcagtctgcacctgcctctcctcagtataatatcaatacagaagaattatattcctacctaaaggaattcatccacatactatatttcaggcatctattggtgaatcccagagaccgccgagttgtgattatcgaatcggtattatgtccttctcacttcagagagacactcactcgtgttcttttcaaatattttgaggttccatctgtcttgcttgctccaagtcatctaatggctcttctgacgcttggaattaattctgccatggtcctagattgtggatatagggaaagcctggtgttacccatatatgaaggaatcccagttctaaattgttggggagcactacccctaggaggaaaagctcttcacaaagagttggaaactcaactattggaacaatgtactgttgacacaagtgttgctaaagaacagagccttccctcagtgatggcgcgtacttgctttgtaagtgatctgaagcgaggactaaaaatccaagcagcaaaatttaatattgatgggaataatgagcgtccctccccacccccaaatgttgactatccattagatggagagaagattttacatatccttggatcaatcagagattcagttgtggaaattctttttgaacaagataatgaagagcaatcagttgccactttaatattggattcccttatacagtgtccgatagacaccaggaagcaactagcagagaatttggtagtcataggtggcacttctatgttgccaggatttctccacagattgcttgcagaaataaggtatttggtagaaaaaccaaaatataaaaaagcacttggcactaagacatttcgaattcatactccacctgcaaaagctaattgtgtggcctggttgggaggggctatttttggagcattacaagatatacttgggagccgttctgtttcaaaggaatattataatcagacgggccgtatacctgattggtgttctctcaataacccacctttggaaatgatgtttgatgtcgggaaaactcaaccacctctgatgaagagagcattttccactgagaaatagaagtttgattaaaaatcaaccttgcttcatatcaaatatttaaccaattataagcaaattgtacaaagtatgtaggatgttttgttatagaggactatagtggaagtgaaagcattctgtgtttactctttgcattaatatataattcttttgactttgtttctcttgtgtagtggtaaaatggtagctggtgcttattgagatttgctgtatttatatcaataaagtatagtaaagcagtttgattttg

SEQ ID NO: 13894 - protein, 280 aa, Homo sapiens
MALLTLGINSAMVLDCGYRESLVLPIYEGIPVLNCWGALPLGGKALHKELETQLLEQCTVDTSVAKEQSLPSVMARTCFVSDLKRGLKIQAAKFNIDGNNERPSPPPNVDYPLDGEKILHILGSIRDSVVEILFEQDNEEQSVATLILDSLIQCPIDTRKQLAENLVVIGGTSMLPGFLHRLLAEIRYLVEKPKYKKALGTKTFRIHTPPAKANCVAWLGGAIFGALQDILGSRSVSKEYYNQTGRIPDWCSLNNPPLEMMFDVGKTQPPLMKRAFSTEK

SEQ ID NO: 13895 - DNA, 1828 bp, Homo sapiens
gaattttgtggggacacagatagtgagattatagtggttgttcatctcttccctgccatgccatgcacacacgtggcaccttgggtttgtctggggggagaatgatgttcccgttatcccgatggtgtccagcttttgtatttgtcatgtcagctgctgggcctgtcttagaagttgctaataacttccactttaatattactcttattgatgcattgggtttttttattgaccaataaataatttaggcattggcaatgttaagaccataacataaaccttttctaagtaatttttccatattgagcttattagcatcttttggtatctgctgggtttttagctttacaacaggcactcacatataaacatgtttatcctatttagatttgtagttcctgggagtcagagttctgtgagcagtcttaacttataaagcatgttcagacatgcttttcagatgattttgtttcattttaaaaggggaaatggcattaacctaataggaattctcctcctgaacctcagaggcagcagatggtacagctctctttgaactttactgcccaggtgaacgttctctgcatttagatcttcaggagttttacagactagtgtggagtggacatgtaaggacaagaggaagaggcaggtttcagctgagctcttctcctccttagagcaggacagtgttgggatgggctgattgtgagtatggagttctttctggaggagctccagcaggagctgggcaaatactgggagctttgactaaggggcatgcattgcagatgaggtttgaccagaggttttccaggatccctgaagaactctgcacttctaagcctgtaaggccacaacaggtgagatgaagggggagttgaacttccagctccttgtgtgtcccctagggttccccttttgggtccacacaaaggctcttgagcccaatctgaaggtctaaggctatggatatctcctccatttctaagttgggacaaggttgtccagcaaaaagaaaagcaaagactggtccaatcttagagacgtttgttttggaagcagagctgggctattagctttcctcaagaaggaaaaaggagtgctacaaagttaaatactgatttttaaaaaaaattggcattcacacaatttctactaccacagatgagacttctttttgtttttctcaaaaacttaggctctccgagggattggtggaggctgtggtacagtgagggagcagagttctctgccacgttggaaatcagcctcagacaggagcaggccttgggttccctatggtggtggaggcgagctgagagatgttgaggcagtgagagcgattgatagactgctacccagcattggagagatgactctctagatgtcctgggctggcattctagcttctgacatgccagtcaaacccatagattcacacgcctgaagggaccatcagtggtaagatttatcctcctgacttcagacaaagccacatccaagccatctcaggcatttaaggatctatcctatttttgaagtctccaaaaaggatcccttggtctctcagtttaatgtcataaactctgtaagtcaggaaatttaactttagagcaagctcagattctttctatggttcaaagaccattttctttggcaatcatcctctctctgagtacccttcatgtatttgaaaaccaatactaaattggctttcagctgtctcttctccccaggtggaataatttcagttctagtcacttgaattcagaagaaaaagcatgctagcaaaattcaaatcaagtaaatataagccttttttagg

SEQ ID NO: 13896 - DNA, 2158 bp, Homo sapiens
  CDS (69)..(977)
actagcgaccggtgacctctttttcccccttgcctggctcctgtggtggcaggctgggcacgaggaccatgctgggccggagcctccgagaagtttctgcggcactgaaacaaggccaaattacaccaacagagctctgtcaaaaatgtctctctcttatcaagaagaccaagtttctaaatgcctacattactgtgtcagaagaggtggccttaaaacaagctgaagaatcagaaaagagatataagaatggacagtcacttggggatttagatggaattcctattgcagtaaaagacaatttcagcacttctggcattgagacaacatgtgcatcaaatatgctgaaaggttatataccaccttataatgctacagtagttcagaagttgttggatcagggagctctactaatgggaaaaacaaatttagatgagtttgctatgggatctgggagcacagatggtgtatttggaccagttaaaaacccctggagttattcaaaacaatatagagaaaagaggaagcagaatccccacagcgagaatgaagattcagactggctgataactggaggaagctcaggtgggagtgcagctgctgtatcggcgttcacatgctacgcggctttaggatcagatacaggaggatcgaccagaaatcctgctgcccactgtgggcttgttggtttcaaaccaagctatggcttagtttcccgtcatggtctcattcccctggtgaattcgatggatgtgccaggaatcttaaccagatgtgtggatgatgcagcaattgtgttgggtgcactggccggacctgaccccagggactctaccacagtacatgaacctattaataaaccattcatgcttcccagtttggcagatgtgagcaaactatgtataggaattccaaaggtaactttttcctttcattactttacagaaatactgtcaagtccaatagagagcacagactagggaggcggattgggtgggtttgaatctctgctctgccacttttattaatcatgtgagttgagtatgtgacttaatctcttttagctcaatttccccatctgtaaaataggaataataaaaatactgacttcagagaggtttgtgaggatcaattagacagtcatgttaagtctgtaaattgtttctgtaatgggcaagatagcaaatattttagattttgtggaccatgcagtctttatcataactgcttaactgccattatagtgagaaagcagccacagacaatatgtaaatgaaaaagtgtgtctctgttccaataaaactttattttcaaaaaccagctggcttgtcacatctggcctatgggccatagtttgcccatccctaatgtaaagaaaggactttagcccaaagccacaacttgcatagtaatgcctcaaaaaatgttaacatctttactgttattattattactactgcatctattacagtagcaattgagtaatgaatacatgaatgttataatgttaaattactaaccttttaaaaatattaagcattgcaatatattaatactttaaatcttttaggaagataagttaccctgcagaataatgaagtttcacaacctcagcactgttggtgtttggggctggtaattgtttgttgtgggagactgtcctgtgcattgtaagatgtttagtagcatccctggcctctacccctacatgcaagtagtaccccaccaccaaaaccacaatcccacaaccaaaaatgtctgcagacattgtcaagtgtctcctggttagggaaaaggagacaaaagtaacccccaggtaagaccactgctatagagaaatactaccttatttaaaatcttccattaaggtaatatatgtaaggccaggtgcgtacacctgtaatcccagcaccttgggaagccaaggcaggaggatcgcttgagatcaggagtttgagaccagcctgggcaacatacagagccctatgtctacaaaaagttttaaaaaaattgtggggtgtggtggtgtgcacctgtggtcctagctgtttgggaggctgaggggggaggattgcttgagtccaggaggttgagactgccgtgagccatgattgcaccactgcactccaccctaggtgacagagcaagaccctatctc

SEQ ID NO: 13897 - protein, 303 aa, Homo sapiens
MLGRSLREVSAALKQGQITPTELCQKCLSLIKKTKFLNAYITVSEEVALKQAEESEKRYKNGQSLGDLDGIPIAVKDNFSTSGIETTCASNMLKGYIPPYNATVVQKLLDQGALLMGKTNLDEFAMGSGSTDGVFGPVKNPWSYSKQYREKRKQNPHSENEDSDWLITGGSSGGSAAAVSAFTCYAALGSDTGGSTRNPAAHCGLVGFKPSYGLVSRHGLIPLVNSMDVPGILTRCVDDAAIVLGALAGPDPRDSTTVHEPINKPFMLPSLADVSKLCIGIPKVTFSFHYFTEILSSPIESTD

SEQ ID NO: 13898 - DNA, 2176 bp, Homo sapiens
  CDS (135)..(530)
agctggaaggagggaggttagagccacccatgggttcagaagctgataagcaggttattgactctgaatttgcctcatcgtatgtaaattggggacaaatttggggatttaatgatataatgtaagaagcagacatgtcacagccctggttatacagtcagtgtataataagtggtaagccgtcagaggaggcagccggtgagaatgggagcatctcagcagccctccgccccctgctcctggttgcagatgtacctgttcttggctatttgtgccccagctccgtgtcctccggtgtgtgtgaggccaagctcctggggtggggacttgggggtgtgtctgcagctcctgaggccaagaccaaggctgaggccgaggctgaggctgaggccaccttggtgaggaggaaattgcaggtggagaagctcgttgaccgtgaccttgatctgaccgtaattttgatggtgccgatgccgtcagcacgcaggcctcctgccctcgccacgactggctcctgcagcccacctggctgagaggtgtgctggctctcgcaggttgcaaaatggggacatcaccgtccgcctgggctacagcgtgctcgccgattgcatttggggagggactgagggctgattgtgttgtggggatgttggcagagaatcagagagggcatccaaaaaggccaacagttcggtggggagaggaggcgcaaggctggttcctgttttctgggctttgatcgaaagggaacaggggacacatctggggacagtctccttcctggaggaagaagggcttagggtgctggtgtggagtttgcacagatggggataatgagctggagggtgctgggcaggagctggccagtaataggctgacgagggaggccctgctggctgggcctggttttcaagtgagcatcctgagctgcggggacccagggggtcttagagacctcagagctgagactcgggaccacagaggggtgggctgtgctcagggcaacacagcggatggggcagatgttgcgaaacctgtctctctgcctctctttctcctgctacagaactggatcctcccagctcatggctgtcaaatcctttagatgcttctgggttccatgggcgccttacactggcttccctgtaggacagcagaccctgggggttggctctgatggtattcaccatggggtaccccatgcaagcacagtgctttcacgcccagcctcccagcctgtggagtaggcctgtgtctggccagcctcgctttgtggccagaggagggagacagtggttctggagacaggagctggcctggggctgccctcccagcccctgttctcccagctcatctccttgccttgcgggtgctggccaccctccccccgccagctccatccccagctttctctgcccgagccgtgacctgtcagtagggggcagtggaggccttgaaagtccttggagaggactttgaagcagtttttacaaatctgtccctggaaagtctctcctgtcacacccccagcggctccctccctcctaacatttttcctggggttgtcatgcagcggggggtggaggaacccactaggccgtggatagagcagagccatgttgacacaaaccctggctgaacccacatgctccctacagccagcggccgatcactggaaccagggaagtgacctcatagcaagggcccgcagagcagccatcacgcattcccgatcttggtttctggacccagctctggaaaagaagccagatcctagccacttggagctgcctagggaagaccccagcctggtgccggctgacagctcactggaacttttcatctgcttggccaggtgatgccaaggggcagaggttagaagtgctaagaagcaggccgagggtggtggctcacgcatgtaatcctaacactttgggaggccaaggcgggtgaatcccttaaggtcaggagttcaagaccaggctggtcaacatggcgaaaccccatctctactgaaaatacaaaaattagccaggtatggtggtgcacgcttgtaatcccagctactctggaggctgaggcaggagaatctcttgaacccgggaggcagaggttgcagtgagccgagactgtgctactgcactccagcctgggcaacagagcaatactccgtatc

SEQ ID NO: 13899 - protein, 132 aa, Homo sapiens
MSQPWLYSQCIISGKPSEEAAGENGSISAALRPLLLVADVPVLGYLCPSSVSSGVCEAKLLGWGLGGVSAAPEAKTKAEAEAEAEATLVRRKLQVEKLVDRDLDLTVILMVPMPSARRPPALATTGSCSPPG

SEQ ID NO: 13900 - DNA, 2209 bp, Homo sapiens
tcatccatgtggatacatgtagctatagcttattgatttttccatgtgaaccttttgaaatactggatattaattcaagacaagttctttaaatttgagcctaaaacccagtagcactctgtacattgaaaatttcagattcataagaaaccatcagtcctgactggaacttcataatttgttcatttgtctgtgttttgggggaaaaaactttaaaacctcaaccatttatcaaggaatttgattaaaaaaaataatctatcaagtggctgatctcttacattaagggaaaaaacaggcaaagcattcatttgaaggagcctagccattttctctttcttatttaaagacttggcttggaacttagcagttacatatgcagggtagcgagttaaaaagccatgtttaattaacaggcgctttatacttctgtatccttgttatgatatagcaccttgttcttcagtgtagaaagtgatttctgcatattttaaaggactggcatctttatggtaagaaagccatataaataaagatatacttagatgaaaatcggaacatgtttttaaaatagtgtgtgtctactttcatctctgttatcaaacttgctgcataagccagagttgatgctctgtgattatgctaatgaccaaaagaatcgatgatgcgagactagatgaaatcagtggtataatcggggaaagttatcagtttttttgtcattaagtattagtgataaataatacactgttcatttcgagtggatagaacatatttaattctgatgtacagagtttcattttagtcaggctcattgctgagtaaaatgatcatcttttgtaatttaagaggaaagagaaaaggcatttttgtcagcctggctaactgacttgggccatctagaaatgtttaccttgaccagccagggaagattggaaaaacttaattttttttcctcctagacaacttgcttatttgtactgacattttattaagaatatcagatactcagtaaatagcataaatgactagagatgttaaacaaaatgagtataaaggtagatagtgtttccctgaagaatggggaaaatgataacaaaggggcaatgtttggataatgctctttttaaatgactagtctgcattaaccaggggctattaaagtcggtatcacccattagacagcagttttaattttttttaattgagtttttcatatcaaataagatcatacttagtaatggtttacttaaagagaagtaatacttgtaacttagaatcttttcctgggttactaaaaccttaagggaaaacactgattctaccttccttgtcaacaaagcgtttctaacacaattctctgtaacagacatttctctgtggatagagtttagcacttgttttactactgtatgacagtacctggtgacaagagagaaaataatagaataattagcaatgttctgtaggacatgaaaagtgattgaagtctacgagagaaggaaatcagatcgatgttattttaaaaaaatgcatcacaaaaatgattctcttcaaagcaaagcctcctacccaggctggggccagctgtgctctgccatttccctgccacagccctgtccgtccacgttggctcttaccagcagtaccatctgctgctccagcagtggccttctctatggtaaggcaggccaattgggtcaaatcttgtgatatggcagatgtccactgagagctaagattgggccaggctcatttttatgtgtgtccaaagccaagatttcaacttggtgaaaggctgtggaatttatttccccaagtgttgcccaaactctgttcttttcttcaactgcctccttgggctgagatgattgcttaatgctcttaattatgctggatccctctgtattttcgaacacctgtgggtaattcagatcatgagtggtcacagaggctggctcgacaaacggcttccctttccgaatgggaaaatcccagggagctggaccatgcaccgtgtgtctggagctgagtggaggctgaaagaggatggaacacttcccttgaacttgaactggcattgtgttgtgtccaagtatccttcacccttggattggggagagtcttacaatgaataactcagaaaaaagttttcaaaataatcctagattgtaagatatctacgaccattatccatagccatatcttt

SEQ ID NO: 13901 - DNA, 2519 bp, Homo sapiens
  CDS (389)..(868)
gaaaatgtgtatgtgtgtatatgtgtgcgagtgtgcgtgtgtgcgcgcgctgtacctctccctgcgtggtgaagccatcagattgtgcgctcactgatccctgttgttgagtctgataagggtgagctcagaagccatcagatcgtggcctcactggtcccagttgtggagtccgatgagggtgagctcagatgctctgtggtcactccctgtgccgtgcttcggggacgctgagatgctgcaccagccaggcagggcggggtgggccccacttccatcgagctcctgcggatgatgagcaccacccaggagccacctggggggcagggcaggggctgaatcccactgggggtgactgtctctcacatgacaggagtccagggcatgcatggaggctcctccgtgtcatctagcgccagctccttctgtcactcctctgtggcctggagcggcctgctgtctcccggtcacgagccagcccgtgggcatcagcaccgcaagagcagggtccgtccatcttttgaggcacccccacccccgccacacagtgccttctgtttcctctcattgggcagaatcgtgtcatgtggccgcccagttgcaagggagcccgggaagggtgcgtgggccctgtccagcagacctggctgcttgtgataatgccatcagtggccctgttgtcactttggccttgcttacgttgccgattaggttaggaaatggtcttgattctgggatatgtgagcctgaagttaccaatgtaaagcagcacctaatacatgttttggccaaatgggcatttgttaaaaaaaacaacaaggtttggtcagagctcaatgtcaccatctttggacaaatttatgtgatataagaatacatcagagattttattgaaaaatatattgcaatttcatcattacatactttaatggcaaaatatgctattaacagtgcaaggccaatatgctccctgttgcagctgcccgtgaggtggccttccccagggacgctgacatgtctgccacctccagcatggccgtgcagaagcaagacgtccatgggcagctccaatggtgacgttgcctgcacgccacctagctgagcaggaacagttgtattggaggcgtgtgggtgacgagagagaggttaacggctggtgtttgtgtgaaactggagacaaatgaggactgggcattgtgtctacgtgggcgtgtgcaacaactgcgtgcatgacagctgctgtggatcacatgggctcatgagtgtgcctggtgtccacagatgtgcacagtggtcataagtgtgcagtgttggtgtgtgtgcacagtggctgtgggtgtgcgtagtagccataggtgtgcacagcggccatgggtgtgcaaagtagtgggtgtgcacggtgctgggcgtgcacagtggccgtgggtgtgcactgtggtaggcgtgcacagtgcctagatgtgcacgctgttggtgtgcatggtgatgggcatgcacagtgggtgtgcacagtggccgagggtgtgcatggtggtggtgtgcagtgtctgggtgtgcactgtggtaggtgtgaacagtgggtgtgcatggtggtggccgtgcacagtgggtgtgcatatcggtgtctgtgggtgtgcacagtgtcttgggtgagcatagtggtgggcacgctgcatagggtgggtgtgcgcagtggtggtgggtgtgcacggtggtgggcgtgcacggtggtgggcatgcacagtgggtgtgcatagtgactgtgggcgtgcacagtgtgggtgtacactgtggtaggtgtgcacagtggatgtgcacagtggccgtgggtgtgcacagtgtctgtgggtgtgcacggtggtgggtttgcacagtgactttgggcatgcactgtcttgttctgctgcagtgctggtggcgtagtgtccacaggctggctgagcactggtggcagctgcggtgagtgttgcttcttgcctgatgggacttctttggtgttgctgctcctcccttggttggggttttctagagccctgagcgccctcacactgaggtcagcgctgttatctgtgagaagaagctgtgtcaggctctggtgacacacacttcaccctgccaagccccccagtaactgctgtggaccaggcagcaagaagatttgccctgagcggcgcaaggggcaggacccatggctggggctccacactcagggtgtctggctccttcattaggtgatggcttcgccgattcactctcacttgctctccttttcctgtttcttgggcctctcctcgcctggccacctgaccaaaagattgctttatgtgatgtgattcatgtaacaagtgcttctgccttaaacccagagtctgtgccttggctcacgcctgtgatcctaacatttcaagaggcccaggctagaggatggcttgagcccaggaattcgaggctgcagtgagctatgatcacgccactgcactccagcctgggtgacagagcaagaccctgtctctaaattt

SEQ ID NO: 13902 - protein, 160 aa, Homo sapiens
MEAPPCHLAPAPSVTPLWPGAACCLPVTSQPVGISTARAGSVHLLRHPHPRHTVPSVSSHWAESCHVAAQLQGSPGRVRGPCPADLAACDNAISGPVVTLALLTLPIRLGNGLDSGICEPEVTNVKQHLIHVLAKWAFVKKNNKVWSELNVTIFGQIYVI

SEQ ID NO: 13903 - DNA, 3032 bp, Homo sapiens
atttagatgtcgggggcgggggagggtggttggcggcgggagttgctgagagggccggccgcttatccctgtttggtcccacttttctcccagcacctgcccttgttcaccgcctcttcatctacttggatttggctcgaataaaccctcagctcccggccagcgctgagagccctggcggaagagtgggtagcggtggccttaagtattaaatctgagcctgcttcttgggggagagactcgttgaaaagggagtgtgttgggggggtgttgtgcgctgaggggagttagaacttcccggtcggttacccagtgggaagctgcggggcacaaagcccagaatttgctgctaatcgctgggtgccctggagacagagggggcgtgtcctctgcggattccattctcaccttcccctcccgcttctgatctcgctgtttgctccacccttgctccccacccactatcagctccagcgggtgggggtgaagggctgtccccaggccaacacctccttccaggctttggggagtggggattctttccccggatgggcagagttccttctgcagtggcgctaccgtccgtgctgccctcctggaaacaccggggtttggggcaggaacacttcacctgaaagcaggcctgcttggcgcctcccggcacatctgtggtctcctctgcacgtcgctcgcgcagcctccttgcctggaatgtccttcgctgcccatcctcataggcccacctgggagagatcatatccatgccccctgccccaggtttgtgggtcaaggactggcactgtctggtgctgtagcactggggcacaggccaccccccctgcccccaggccctgcttttcgtgcaacccccaggcacataatggccacccagctaaggctctacaagcgtaagcctgagcctcccaggtggacaaggacagaagtcacctgggggctcactcctggtctcatcggagaaacctaggcccagagaggtgggggtactaaagcaaagtcacaccacatgctcctctgatggccagggtgagcctgcagtcctctcctctcccccttactccagggtgctggggtggcccctcaggacagtgaactgactgtgtcccaggctccaggtccctggcacagctggggtcacactgacagcctgcccagaggcaccccaccttgggacccgtaccccagcagcccctgcctggctccttcttggggtgcccccaacctacaggctcagggcagataatgccagtgcttctccttggtggctggggagggggactgtccaccccctactattcgcctagtgtgggtcacgtgttttaacttctcagggaggcggggccagcatcttgactgacagcatccttgaggccttgcatggtggaaggtttggaatgcctccccctctcccctactgggggatcaacccaaatcttgaggccacatagacactgggctctggatggacagaagcaggcgcagagagaaaagctcagctaggggtgggagaacccgggaggagaggtaaccccaagagggaagggtgcctcttccactacctctgctaccagccatccccaggacagtggttcctccccaccccgcccagccctgaggactactggttggggattgcctccggagcccagcttagggaggacagtagacagtaggctttggagttgggagacagggttccgcttctgctggtgtgactggaggcctcctcgtgcgctcagaaaggtggtgaggaggctcctccaatggaggccggccccacagcccacactgttcctgaggatgggttcttctgggtgaaggagaccaagcccctcgccgaagggtgctgaaacaagtcagaagagaaagtgggaaccagtgcctctcctgggagacttgagtggggccttgtgggagtggggcctcccaacagaggcaagtggcgtaagggtctttctgctctctccctcccacgccttgctgctgttgctgtcacctgggcaggtctggggccagaggcgtgaccatgcacccacaggaaggggaccccacagctggacctagcttcaagggacatggaggggcctcgaggggccccctgctggagggagaagtaaagtccagtggcacatcctgggcaagtgttcagtttccaaaaccgagggaaatccagatacttcccaagaaaagaggttctagaacgaggattttcagctttagaaaattaaaaagctgaagtggaaaagaggatggatttcctgtttccaggatgcaaaggcctcccagaaaatcagaaacccaaatggaagtcatgaaagaaaagataggcttggtggttgcttcttcattcacctgtgaatgttataggctctggaagaagaaggaacaggtctggagatgattaatatgatgaataaataatagtggaaattttccctgatcagaagagggcatgagtctgcacagtgaaagtgttggtagagctccaggcagggttactttaaagaaaaagacacacccttggcatctcctggtgacattcttgaaatccacagataaaatctcagcgacctcccacagaataaataaaccattgacaaaggagaaaaaaaaaaaaacattggcagcagatttctcatctgcagcactgaaagccagaggaccaaggctggcctgggcccaggattctcaaccagagcattcatactgttccccaaccagattaagaaatagattttgagccgggctcagtggcttacgcctgtaatcccagcacttcgggaggctgagatgggtggatcacgaggtcgggagatcgagaccctcctggccaacatggtgaaaccccatttctaaaggtatagaaattagctgggtgtggtggcgcgcgcctgtggtcccggctgcacaggaggctgaggcgggagaatcacttaaacccgggagacagaggttgcagtgggccgggatcgcgccattgcactccggcctgggtgacagagcaagactatctc

SEQ ID NO: 13904 - DNA, 2665 bp, Homo sapiens
gaaatgatgcctccatttactgaaaagaggaagaggtggtgggggtggagcagattttagaggctaatcaggcattggggtttgaacaggggatgtttgagatccctggtggacatccgagttcagcgagaacattgcagctgagggacgcagggagaaggggcatttcccgtggccttgaaggagactcatatttggagatcagagggagaacatgctccaggtagaaaaggtgtggcaggcaaaggtggtggggtgggaagcaggtcacagctctgctggggctcggggcagccctagcagctctgtcttccattggtctgctctggaaaaggcagtcaggccactaaagcctggctgaaatctggctgcttgggcgcctgctgtcttaggcctggcccctttccacactcccactgtctgtgtggaccttcgagacatttgcatttgggagctgtggttagagcacagcgtgtgatgaaggcaggcaaggacaggccatgcattcgggggtctggggtcaggcgagctcctcacaggtgctctggaccacgctagcagccgctaagcccgtgcaggtggacaaccactgtggctgtagagcgacaatcgcccagaattggtgtcatctcagcgcctccactgtgtcccaagtcatctcggatgccctaccctccgccctgctgctctttagacctgccgtctcctccctgcccgcacaggcctgtgattgagctctgcatcccttcctcgctggaccccaccctggctccccctggctgccatgtagtctccctcttcactcagtacacgccctatacgctggctggaggcaaggcctgggacgagcaggagagagacgcttatgcagacagaggtaaagacagctgcacgttctgcctccagagccacagccgggcatgcgacccgactgggcctgctcctcctcactgccccattcaggattgacaactgcaggtgccgttccaaagggaggaaatagtcaagggaacctcaagtcaacatagttgactgcaggggtcaggaactgggctaagaaagtcaagaagacacagttcctgccctccagttgctcacagtctagcaagggatggaggagactaattaagaaaccttttattacagcacagctgactgcacgaaccaaaggagaagcatgagccagagagacaaggaaggctttcaaaggaagggatggtcaagctgggtttccaaggatgactaggagctggccaggcagcaaagggcattccaagcaagagaaacagcttgatcaggccaggcgtgggggctcatgcctgtaattccagcacttcgggaggccgaggcaggcggatcacccgaggtcaggagttcaagaccagcctgaccaacatggtgaaaccccgtagctactaaaaacataaaaaaattagcagggtgtggtggcacatgcctgtaatcttagctgctcaggaggctgaggcaggagaatcgtttgaacccagaggcggaggttgcagtgagctgagattgcgccactgcactccagcctgggtgacagagcgagactccgtctcaaaaaaaaaaaaaaaaacagcttgagaaaagtgaagaggtgaaaaaagctgcatatgcaaaaggagatcagcagcttcgtgtttaaggttggggtagggaagtggggaaaactggggactggactggcctacccatgcatctttgggatgaattaatcatttgcttgtggactgatttttgtttttcacctattgaggtataatttgcatatgataaaataagcccatttctgtgtgtaatttaatgactgttagtaaatttgccaagttgtacacccatagtgcctcctcttcttcctaataccatctcatttctctgtttttggcaccccagtgttcgattgcatcgaggtctatgcccctggcttcaaggactctgtggttggcagagacatcctcacaccaccagatttggagagaatcttcgggcttcctggaggggtatgtataagcctagggggtctctcaccatagccttccctctgcaccctcacttcctggctgtgacctctctgctttatcttgtccctccatactcagctttcatcaggaagggaggacagtggcagggaccccggctgagagagggcagagaagcggtcaaaccgagggaatgggggatccctagtgggggctcagaaacacaggcaggacagcccccactgagaaggtcaccaggattgtggccctctgccttgacaactatgctggctctgccatctgactttcttgagagagagcacccccttctcaaggcagcagcacatcctcagacttgtcaatttatcaaaaactagagattggagacagggagaccagataggaggccaggttcaatcgcctcattgcagctactgagcacttgaaagatcagagaccaccctaggcaacgtagtgagaccccatctctacaaaaacaaaaaccccgccaggtgtggtggtgcgtacctgtggttccagctacccaggaagctgaaacaggatgatcgcttgagcccaggagtttgagactgcagtgagctgtgatgcgtcattacacttcagcctgggcaacagaatgagaccctatctctagaaagaaaatt

SEQ ID NO: 13905 - DNA, 1955 bp, Homo sapiens
ctcatatgctttttttaaaaaaagaaataattgctcataagaagaaaaaatacagaattattgaaaacaaaagtacctcaaccttcagttctcagatatagtactataaataattagttttcaatcttggcaggctttttacgtagtcacatatgatttgagcatttttttcctcttttttacacagataagattatatgtatggctatatgactttactcaaaaataagtcttgaagatctgtccataccaataaagatctgtgtaagattttaagagctgcaggagattgttattgattttgattagattgcactacagcctatacagtcttctatttagattttgaggttttacttgtggtctagaattgattgttttgtacaaaattcaatgtactcattcagcaaatacttactgaatgtctgctgtgttgcaggcactgacctaggtttcagggatatggtggcaaacaagaaagatgtgaaagacagtcccagccttcccaggccttataatcaatggcatttgaaactaacaggtctgctacatttgttctgtatacgcacacgtgcgtgcacacaagcacactcgcacgcgcacacacactgaatcttgccagttgtgtccatctagtccagggttctgcaaactttttctgaaagagccagatattaagtattttaggctttgtaggctacagatggtctctgtcacatattcttctttgttttggttttggtaaacatgtaaaaatgtaaaaactattcttagcttgtgggcagtaccaagacagaccattggccagatttggcacaggctatagtttgccaacccctgatctaggcactatcaggaattttttgatctgtggaatacagagagagatgtattaaagaattctactgtgattgtaacattcttatgtttgtttttctaaaatctcaatgtgcatctaatcatgtttcagttcactcctgttcttcacagtaattctttttaattgagctttctccatgcctggctttgtccccttttcatgtcattgaggctggtgatttttatggctgcagctgttgttggctacacgtatttatagacagcagtttgcttgattaggatgagaagcatgggtggctttctccatggttgtataggtcaggtcctgaatcccccagtgtgcttctgtggcctttggagtcagtcagggacagaccttgtcctgagccactgtgggcagtgaagacaggacaggctgaccaggtttgtagactggaaacagaccagtagacagagcaaagatgtctctccaccagtcatgaaatttggagatcaagggctgattcgagaagttgcttaggaagccactgagtattgtaagacccacctgtcacagtgtccttgactttgaccaccaactgctctaagtctgtcactcttttagtctcttctggaatgatcttaggacagtctgtcttgttggagtgttggttgtccataggaagtaaagaaaggattccactattctactgagccatgacttcttcatggttgttgctttggcaacctactatctctgaccaacatgtggcctgcctcactgcagccagccattccatgtgcagggaacaggcacagctttcaccttaaaatccttcatctcctgcccttgctaccagtccctgccacttcaggcttcaggattctcatctatccctctgaggggttttctccttccactgagtagagtgcactgccctgagtgagccgcttccccatcagctggatcccatctcttataaaaatacaaaaattaaccaggcatggtggcacacacctgtaatcccagctacccaggaggctgaggcagaagaatcacttgaacctgggaggcagaggttgcagtgagctgagatcatgccatgcactccagcctgggagatggagggagactc

SEQ ID NO: 13906 - DNA, 1755 bp, Homo sapiens
  CDS (2)..(337)
catgcacaggtatgttcattgcagcactactcgcaatagcaaagacttggaaccaaccgaaatgtccatcaatgatagagtggataaagaaaatgtggcacatatacaccatggaatactatgcagtcataaaaaggatgagttcatgtcctttgcagggacatggatgaagctggaaaccatcattctcagcaagctatcacaaactatcgtaggaacagaaaaccaaacaccacatgttctcacttataaatgggagttgaacaagaacacatggacacagggaagggaactcacacacccgggcctgttagggggtgggggcctaaggaagggataacattaggagaaatacctaatgtaggtgacaggttgatgggtgcagcaaacgaccatggcatgtgcatacctatgtaacaaaactgcacgttctgcacatgtaccgcagaacttaaagtataataaataaatatataaatatttataaataaataataaatacataaatatcagaaagtaaaagaggaaaaaaactgaaccttgaatttttttcttttagaatatttataatatttaacgtatttgaaggtgaaggccatcctacatggacatctgaagctttagctaagtattatcttttctgtaatgtgactattggtttgcagttcggttcttcttttcgaatagtatgagattaattttctcagtacttaaatcactcctcagttaagttggatgttcatggaggaacattctttccttcaggttgctgatacatttgctgcactgtgggggagggagtgggtatctgagttagtcagttttaccatttataaaatgtttggtggaggaaattgaaactaattgctaaattgttagtaaccagtgcattaactaggaccctactgagtggactgaaagaatcgaaaatgtttaactggttgagaggcaatgatgttgcaaatggggtattcttcaaagctccttctttttttaaaccttcaaaggcaattattctgaatgtaaactacagaccaaattgcagtcttctgtaagcatttcagagattacctcaaatattttttgattaaaaaactcttccgtggtcttttgtgcttcagaactacccagtacaacagggtcttcagcctgctcaggacctctaaagagagctagcacacagtcagccaactttggctgcttcaactcctaggaacaagaaatgatgctgagataatttgtctggcaggtattatcagcccacaatgactgctgtcatttagcctcaaaatgtttatttttccttttacaatgctgtatttctttagaaccttcctattccgagtgtggaccctaggccagccccatagacttcccctggggacttgtcagaaatgcataattttaggccccaccccagacctgttggaccagaatcttcatttaacaagatgcccagaaaacctgagataatcaaagacccacaactaagtaagacctctcaggatctcaaagccaagtgttttacagagaagagaagatagaaaaggcatattatctaggagtggaaaagaattttatgctgaaaatgttgaagagagaattcaaaatcaaattcaacattccacctaggaggcttccatctctgcttaggagctgagtaatggaggtgattggtgtaagtgttcagtacctatgaagacctaactcttgagggagagactccaatgtaaacttcctactcaatactgcctt

SEQ ID NO: 13907 - protein, 112 aa, Homo sapiens
MHRYVHCSTTRNSKDLEPTEMSINDRVDKENVAHIHHGILCSHKKDEFMSFAGTWMKLETIILSKLSQTIVGTENQTPHVLTYKWELNKNTWTQGRELTHPGLLGGGGLRKG

SEQ ID NO: 13908 - DNA, 2157 bp, Homo sapiens
aaaaaatgaatgaagaaaatatggcaaaacttaataaattcacattaagcaggagaaagacctaactaaattagtaatctgaattgtagaatatttttaaaaaattaatagtaacttaattactgtcagattcatggagttccttggagaaattgctttggcaaatagatagggaaaatttacaaatagcacaaaacttggtaaataaagcaatttctaaagaatccgccatggactagtatttttaagttattttctccataaagtgcatgtatgttatcaatttgccttgcaaaatcatttttataagaaagagagctatttctgtttttaccaattatttgtggtatttgaaagtcattcatttacaaaaacataagaatgatatccatttactcattcactcattcattgagcaaatatatattggaggtcactgtgctgggtacatagtggtgagttcaataaagtccttgccttttctagcatgggggatgggagttaactaaaaaataaaataaatgaataaatattttgtaatacattatgataagagcataatcaaggtgctgaataatttctttgggaagatgacatttggctgagtactgaaggatgcaaagaagtcattcatgcagagaagggaggaaagagccacccaggcagaagggagctatgcggacaaagcaaaaggctgggagatgtttagcatgggccagaaactagaaggtagtcagtgtggctacagtgtgttgagtggtatgggaagaaatcagagaggtatgtggcagatgaacctaccgaggcaaagctaaaatatgaaattttattccggatgtcatagggagccatatagtgttctttagattgtgagcatagtctgattcataattttgaaacatcccaatggctttttatgagggaaactgattacaaagtagttgtatcagccaaagtagttatatcagtagttatatcacaaattgattacaaagtagttatgtatcagtagttatatcagaaattgattacaaagtagttacgtatcagtagttatatcagaaattgattacaaagtagttacatcagccaaagtagttttatcagtagttgtatcagaaattgattacaaagtagttctatatcagtagttatatcagaaattgcactaggtacttcaaacagatgagatttagtataggggcttggttacacaggtgttggaagtagaagaaaaaggcaacacagggtaactggagataataactgcagaaggcagctcccacatcacagtgcagagtgtaaagggccaccttggagctcagagacagacagtaggtgaatatccagcacagtgggcagccttgaggcagggaagcctgtgtgagggagctgctgctgctcctgggacagaatcatggaggcttgcactaggaggtgggatgggatagaaataaatagacgagagagcgattttaaacctagagcctataggacctgatgcttattgggtaggaaataaaaaatgactggcaagattctgacttgaacaactaaatatctggggcactgctttttgagatgcagaaagcaagagaaacaggcttagagcattgtaagtgttgagtttagaacatgctgagtttgagatgtcaagcaaatggttagatatgtgaatatggtggacagagaagacatgtagactggagttatggatgtggaaatcaacatgcagatggtatttaaaaccatggaaatggacgatatcatcgagggagagaatggaagagagagaagggctagttctgagcccttgggaatctcctgtgttgagagatcagtacagaagcgacaaggagcaaaggaaactgagatggggtagcaggaataatagaaatcaagagaatgcagtcctatagaaaccaagacaggaaggaggcagcagtccactgtttctagcggacctaagagatgcttaagatgtaacagaatgatgtccatggatttagctacatgaggatatctggctacacgcctgatggggtagtaggctgaagagtttacgggaggcaagggcactccattctgacacggagagtccaagggaatgtaaaggccaaattgtttcctcagttcagggcctacttggagctaggc

SEQ ID NO: 13909 - DNA, 1890 bp, Homo sapiens
  CDS (150)..(848)
aagcaaagcagctcttatttgaaaaaccactgggttccgagttcattactacaggaaaaactgttctcttctgtggcacagagaaccctgcttcaaagcagaagtagcagttccggagtccagctggctaaaactcatcccagaggataatggcaacccatgccttagaaatcgctgggctgtttcttggtggtgttggaatggtgggcacagtggctgtcactgtcatgcctcagtggagagtgtcggccttcattgaaaacaacatcgtggtttttgaaaacttctgggaaggactgtggatgaattgcgtgaggcaggctaacatcaggatgcagtgcaaaatctatgattccctgctggctctttctccggacctacaggcagccagaggactgatgtgtgctgcttccgtgatgcccttcttggctttcatgatggccatccttggcatgaaatgcaccaggtgcacgggggacaatgagaaggtgaaggctcacattctgctgacggctggaatcatcttcatcatcacgggcatggtggtgctcatccctgtgagctgggttgccaatgccatcatcagagatttctataacccaatagtgaatgttgcccaaaaacgtgagcttggagaagctctctacttaggatggaccacggcactggtgctgattgttggaggagctctgttctgctgcgttttttgttgcaacgaaaagagcagtagctacagatactcgataccttcccatcgcacaacccaaaaaagttatcacaccggaaagaagtcacgtctactccagaagtcagtatgtgtagttgtgtatgtctttttaactttactataaagccatgcaaatgacaaaaatctatattactttctcaaaatggaccccaaagaaactttgatttactgttcttaactgcctaatcttaattacaggaactgtgcatcagctatttatgattctataagctatttcagcagaatgagatattaaatccaatgctttgattgttctagaaagtatagtaatttgttttctaaggtggttcaagcatctactctttttatcatttacttcaaaatgacattgctaaagactgcattattttactactgtaatttctccacgacatagcattatgtacatagatgagtgtaacatttatatctcacatagagacatgcttatatggttttatttaaaatgaaatgccagtccattacactgaataaatagaactcaactattgcttttcagggaaatcatggatagggttgaagaaggttactattaattgtttaaaaacagcttagggattaatgtcctccatttataatgaagattaaaatgaaggctttaatcagcattgtaaaggaaattgaatggctttctgatatgctgttttttagcctaggagttagaaatcctaacttctttatcctcttctcccagaggcttttttttttcttgtgtattaaattaacatttttaaaaagcagatattttgtcaaggggctttgcattcaaactgcttttccagggctatactcagaagaaagataaaagtgtgatctaagaaaaagtgatggttttaggaaagtgaaaatatttttgtttttgtatttgaagaagaatgatgcattttgacaagaaatcatatatgtatggatatattttaataagtatttgagtacagactttgaggtttcatcaatataaataaaagagcagaaaaatatgtcttggttttcatttgcttaccaaaaaaacaacaacaaaaaaagttgtcctttgagaacttcacctgctcctatgtgggtacctgagtcaaaattgtcatttttgttctgtgaaaaataaatttccttcttgtaccatt

SEQ ID NO: 13910 - protein, 233 aa, Homo sapiens [sequence omitted]

SEQ ID NO: 13911 - DNA, 2045 bp, Homo sapiens
caggatgctgaggcagaagaattgcttgaacccaggaggcagaggttgcagtgagccaagatcatgccaccgcactccagcccacacgacaaagtgagactgtctcaaaaaaaaaaaaaaaaaaaatcgcagcttagctgaattcttgatagaaggtggtgacttagatgccttctcttctggtttgtctgctgtgtctgtgtgcacctggacccattgtgctctggaaagcaggcacactggagtcctggagtgcaggctggctggcgccttgcagtgcctggtgatggctggggtttggtccctggtctgtcccctggggttcccatgtctattggtgaggcagcagtgtgtgctcgtaggagaccctctgtcaagaggctctgtcgggagccagcctgctgccctgcctttgaggctgatccttcaccctaggagggcaggcactgagggccagcactctggtcacgccaaggatgctatggcgacccactgaagaatgagctattaccctgcccacccctgcctgctgtgcccccaagcaccccttgggggttactcacttgccttcctggtatcaggttaagaggttattagaccttccatttattcactcaattcttttccctgctctcctgagtaatagctcaggaacccgtgccccagccatgctgggaacatgcttagaaagtaaggggaaacctttgggccagcacccacgtggttttgaatcactcaaggacaatctgcctaagtcactggcttggtggccgtgggccaagcaaggagtcatccagtagcgcctctgccctcactgtcctcctcctccaggtttctttaccgagaggaagccagcgggaggcccgacatccaaaacattgactagtgtgcccccgtgtggctctggtggaagggtttggaaaatgcagccaggttttcctaaccttacccaccaaggccggaggatgccctaaggacagcctgcagcccctgcagccctctttttgcgtaatctttgatttttcttgttattatttcttaacagttaagcgccttaaggcctcatttaacttgagttaaagaagtgtgattttggaggacccaaagattttccactggtgtagggaatgtctcctcccggctctgagagacttcctccaatccacaacctaccgcaggtatgtgttcttattaaaaggggcagggacaaaagctctgcctgtccctcttgtactttcaggctataatcaatcagcaggcacacctgttcagactgtgacattgaatttccaggatcagaaccagagcctggtacagacacaagccttccagtacttgtattttaagttccatagatgcttggaccttttgtgggctcctgggacagtgatcatgaaagaagagtgctcccaggggatgagcaagatgatcccctttggctgggaagaaaagattccatgtccatctggtttttattactcctctaaaaatgttccctttatagttttataattgtacttaaataaaaataattgcacttaaataaaaaaaaattggggagattatagcagaagctgttggtgtcccggccatagctgtgtcccttggtctgccacagaggtcactcccagaatacacttaggactccctgtgtctccttctgagggtgacctgagccacgatgttatgggatggaggctaacacctggtaggccccacatttttgacaatttggttttaagaaaactcataggtatggccacacgtggtggctcacgcctgtgatcccagcactttgggaggctcaggcgcgcggatcacgaggtcaggagatggagaccatcctggctaatacggtgaagccccgtctccactaaaaatacaaaaaaaaattagccgggcctggtggcgggcacctgtggtcccggctactcgggaggctgaggcaggaaaatggtgtgggcccaggaggtggagcttgtagtgagccgagatcataccactgcactccagcctgggtgacagagtgagactccgtctcaaag

SEQ ID NO: 13912 - DNA, 1924 bp, Homo sapiens
  CDS (1207)..(1869)
gttcatttatgtctcccgtaacagtctgtgctgtccagagacccagtatccttaggatattattctcatcctcatggttgaagctgggtcactgccatgtccataatccaccctgaggaaagagcatggagagccagcagcttcatttctaaggacaggaagccaaatctgcacttttcacttccactcataatccaccctgcattccactcatcagcttcacaagtaggttttcacctggtcatagctatgcctaactacagggagtgctggggaagtgtgatcttttgttgggggcacactgggagagtgggtctgtccactgcctcccagcctcagagcagctcaccacaggagcaggagagtgaactcgtggctgtggctgtcaggcagggcctttcttgagagccagcgcaggcctgggctcctcagaggcttctggagtgagagatggcacctcagcctggcccatggaggcatgttcagggatcagcactactgtgcttcttggaggaggtgggacttgagctggacccatgggaggctggaaatttagatgagtgaaaaggaggaaaggcgaagtagagccacattacagagggcctcagagtccagataaagcagttaacatgtagtggctccaggagggaagcctgtctgtgcaccacatacccaggatgtttgtgggaaggaaggagatgtgcggaagggacccaggagacctgcaggaggcaagggctgcaacagaccccctctggaagtttacaggaggtgagtgtgagtcattagagacattcagttctgtaggaactaacgaactcccaagaggcagtaaacttaaaactcagcagtctcgataagtatggataaattaggcaaagacagattctgaggaatttctggtgaggggtgccaagtttggggagcagcccctggctccttgcaagctacccttcagtgctctgtgtgaccaagtccaagtcgatgcaggagggcaggcactgggtcagcaagccactcagtgaatgtgcaggtgaggccgttcataggcgcttgtgtgcctcccagcaggctgcctgccattgccagggctggccttcagcagggtgcgccaccatggcctgagtggttttctgctgaagtccgtgctgatttggccagtggataggcatcacctgggtgcaaaaccattgtctccaggtaggaatgacctcagctgtttgctccgtgtctcgctcagcctgtagatgtgtccctcatcccttcatgcctccctcttcactcctcttttactttctactcggggcttgcatgtttacaagagaggtgaacccaacagaaactagtataggccaaaaggaaaatgtgctgaagctcacacagcacagtcgtgtggaaagggcagcagtgactgcttcatccagtgcccttcccacagccagtcagttgcgacccaaggggcttagggtaggagtgtttctccataggggaagagtaacagcctgcacccaccacacacccaaagccctacatcctgccacactgagacctcacttcatttgggcgggtccctcctgggttgcagtttccttcattgctcccctgtcccaaatactcaagtctctctcattaaaaataaagagcaggccaggtgcagtggctcacacctgtaatcccacactttgggaggccaaggcgggtggatcacttgagcccaggattcgagaccaacctgggcaacatgacaagatcctgtctctacaaaaaataacaaaaatcatctgggcatggaggcacacgcctgtagtcccagctacttgggaggctgaggtggaaggatcacctgagcccatgaggtggaggctacagtgagctgagatcacgccactgcactccagcctggatgacagcgagactccatctc

SEQ ID NO: 13913 - protein, 221 aa, Homo sapiens [sequence omitted]

SEQ ID NO: 13914 - DNA, 1494 bp, Homo sapiens
  CDS (200)..(1264)
agaaatcaccaaagacatgagcgtaagccaccatgagcactgtcaacagaaacaataatctgtagattcatcccacaaatactataaatattagaaactgttgagctatagactgggtatggtggctcatacctgtagccccagcactttgggaagccaaggtgggaggattgcttgagcccaggagttcgagactagcatgggcaatatggtgagaccccacctctattttgtcaacattgccactatttttgaatcagagaatttctttttgcctgggattaaatggaatggaatacttggcctagcttatgccacacttgccaagccatcaagttctctggagaccttcttcgactccctggtgacacaagcaaacatccccaacgttttctccatgcagatgtgtggagccggcttgcccgttgctggatctgggaccaacggaggtagtcttgtcttgggtggaattgaaccaagtttgtataaaggagacatctggtatacccctattaaggaagagtggtactaccagatagaaattctgaaattggaaattggaggccaaagccttaatctggactgcagagagtataacgcagacaaggccatcgtggacagtggcaccacgctgctgcgcctgccccagaaggtgtttgatgcggtggtggaagctgtggcccgcgcatctctgattccagaattctctgatggtttctggactgggtcccagctggcgtgctggacgaattcggaaacaccttggtcttacttccctaaaatctccatctacctgagagacgagaactccagcaggtcattccgtatcacaatcctgcctcagctttacattcagcccatgatgggggccggcctgaattatgaatgttaccgattcggcatttccccatccacaaatgcgctggtgatcggtgccacggtgatggagggcttctacgtcatcttcgacagagcccagaagagggtgggcttcgcagcgagcccctgtgcagaaattgcaggtgctgcagtgtctgaaatttccgggcctttctcaacagaggatgtagccagcaactgtgtccccgctcagtctttgagcgagcccattttgtggattgtgtcctatgcgctcatgagcgtctgtggagccatcctccttgtcttaatcgtcctgctgctgctgccgttccggtgtcagcgtcgcccccgtgaccctgaggtcgtcaatgatgagtcctctctggtcagacatcgctggaaatgaatagccaggcctgacctcaagcaaccatgaactcagctattaagaaaatcacatttccagggcagcagccgggatcgatggtggcgctttctcctgtgcccacccgtcttcaatctctgttctgctcccagatgccttctagattcactgtcttttgattcttgattttcaagctttcaaatcctccctacttccaagaaaaataattaaaaaaaaaacttcattct

SEQ ID NO: 13915 - protein, 355 aa, Homo sapiens
MGNMVRPHLYFVNIATIFESENFFLPGIKWNGILGLAYATLAKPSSSLETFFDSLVTQANIPNVFSMQMCGAGLPVAGSGTNGGSLVLGGIEPSLYKGDIWYTPIKEEWYYQIEILKLEIGGQSLNLDCREYNADKAIVDSGTTLLRLPQKVFDAVVEAVARASLIPEFSDGFWTGSQLACWTNSETPWSYFPKISIYLRDENSSRSFRITILPQLYIQPMMGAGLNYECYRFGISPSTNALVIGATVMEGFYVIFDRAQKRVGFAASPCAEIAGAAVSEISGPFSTEDVASNCVPAQSLSEPILWIVSYALMSVCGAILLVLIVLLLLPFRCQRRPRDPEVVNDESSLVRHRWK

SEQ ID NO: 13916 - DNA, 2438 bp, Homo sapiens
  CDS (414)..(725)
tacttactactggaccctgttttctctgagcagtttaatatggtttctttactattaatctaaatttgggctaattttatatatttttcaaaaggcattgattttctaaagagttttttaatcattaattcactctggtaatataagtaatacctttatatagtcatctaaactttccaaagcacttttacctattattctcagaacagtccaggaagtaggcaaaacagacattatcaccattttatgaggtattggatgctaaatgacttgctcagcgtctcataactggtaagtagcaggatcaggtctgaaatccatttcacctggccttagatccatctttgagggtctctttatctgataggcttctcgtcttggataggcaaaggaaggatgaactggagcagaggatgtcggccctgcaggagagcaggcgggagctgatggtccagctggaagagctgatgaagttgctgaaggctcaggccacagggtcaccacatacatcgcccacccatggaggcggccggccaatgcccatgccagtgcgctccacgtctgccggctccacccccacccactgtccgcaggactcgctgagcggagtcgggggagacgtgcaggaggccttcgcacaagcagaggaaggtgcagaggaagaagaagagaagatgcagaatgggaaagacagaggtaaaggcagctcagcaggactgctcgtttaaatggggagcccgagctcatggatcagccgccccccactttgtttctgcattcctccctgccaccacctttcccagagctttcggacccgaggtccctgtacctacttttcccatctgacagtcaggttttaccttccaggtgacaaggtcagtcgatcaccaagagcttcctcatttcctgatcctgggataggtagttgggatacaggaagtagatacaagtagaacacaaaagatgaccctttgactggagaagtttatgatctagttaataaagcaagaccaggccaggtgcggtggctcacgcctgtaatcccagcactttgggaggctgaggcgggtggatcacaaggtcaggagttcaagaccagcaggctggccaacatagtgaaacctcatctctactaaaaatacaaaaaattagccaggtgtggtggcaggcgcctgtagtcccagctacttggggattcttaatccttcaatacatgcaaggatgagtaaggcccatcccctgacctcaaggattttgcatcatggtaggaatggcagcagtaaagtaaattaagtaccactgaggagcactagttactgtagtgcttaatcaagcagtccctgctgaagtgatcaggagcagcttcccgacagtgatgttgggtcagacattacggaatgaataagatttggaagagaggtgagttataaaatgatggagcccacttaggaaaaatgaaccgtaagctggaggtccagacacaaagggcataagataggaggtgtggtactaaggacaggaatgtagatgggatctagagccgcactcgccgatagaaatgcaggccacgcacataatcaaaacatttctaacagcctcattgaaaaaccaaaaagtaataggcgtcattaattttaatagtatatcttacttaacctgatattttcaaaatattgtcctttcaacatgtaatcagtattaaaacatgatccagatactttgctgtttcctgcactaagtctttgaattccagtgtgtatgttacaattgccgtgcatctcagttcagcctagccctgtttcaggggctcggtagtcacgcgtggctagcggctgctgtgatagacagcgtaggtctcgattgcacaggcaagggtcagtgatgctagaaagtctgttgagatcattatgggatgatgaaatgaacatagctttgttttgagcggcagtttaaagttcgtagaacactctcatatttattaccttatatgatcctcagaatattgttgctgttactagtccccttttagaagagagaaaactgaggctaagtgacttgtctaaggttgcatatttggtaaatactggtgctgatactcaactttgaggccattgacttctatttcactgctttttcctcaccataaaagatgaaagagccaggtgcggtggctcacgactgtaatcccagcactttgggaggctgaggcaggtgggtcacttgaggtcaggagttcgagaccagcctggccaacatggtgaaactccatctctactaaaaatacaaaaattaactgggcatggtggcgatgcctgtaatcccagctatttaggaggctgaggcaggagaatcacttgaactggggaagcggaggttgcagttgagacaagatggcaccactgcactccagcctgggcgacagagtgagactccgtcac

SEQ ID NO: 13917 - protein, 104 aa, Homo sapiens
MSALQESRRELMVQLEELMKLLKAQATGSPHTSPTHGGGRPMPMPVRSTSAGSTPTHCPQDSLSGVGGDVQEAFAQAEEGAEEEEEKMQNGKDRGKGSSAGLLV

SEQ ID NO: 13918 - DNA, 2046 bp, Homo sapiens
  CDS (163)..(2046)
atatcggtgaaagaccagaggaaggctatcaaggccctgttggcgtgggtgcagaggaaaacgagaaagtatggcgtggcggtgcaggactttgcgggcagttggaggagtgggctggctttcctggcggtgatcaaggccattgaccccagcctggtggacatgaaacaggccctggaaaattccacacgagaaaatctagagaaggctttcagcatcgcacaggatgccctgcacatccccaggctcctggagccagaagacatcatggttgacacaccagacgagcagtctatcatgacttacgtggcacagtttctagaacgttttccggagttggaagccgaagatattttcgattcagataaagaagttcctatcgaatccacttttgttcgcatcaaagaaactccttctgaacaggagagcaaagtcttcgttctgactgaaaatggggagcgtacctacactgttaaccatgaaaccagccacccaccaccctccaaagtctttgtctgtgacaagcccgagagcatgaaggaattccgcctggatggtgtttccagccatgcgctgtcagacagctccaccgagttcatgcaccagattattgaccaggtcctgcaagggggcccaggtaagaccagcgacatcagtgagccatctccagaatcctccattttatcatccagaaaggagaacgggaggtccaactctttgccgatcaagaaaacagttcactttgaggctgacacctacaaggatcctttctgcagtaagaacctgtccctttgctttgaagggagcccaagagtggcaaaggaatcattgaggcaggatggacatgtcttggcagttgaggttgctgaggaaaaggaacagaaacaggaatcctcgaagattccagaatcctcctctgacaaggtcgctggtgacatttttttggtggagggcacaaacaataattctcagtcttcttcctgtaatggtgctttagagagtacagcccgccacgatgaagaaagtcactctctttcacccccaggagaaaatactgtgatggccgattccttccagatcaaggttaacctgatgactgtagaagctttagaggagggagactattttgaagccatcccattaaaagcctcaaaatttaacagcgacctaatagattttgcttctaccagccaggctttcaacaaagttccttcacctcatgagacaaaacctgacgaggatgctgaggcttttgagaatcatgctgaaaaactaggtaaaaggagtattaaatctgctcacaaaaagaaggattcgccagagcctcaagttaagatggacaaacatgaacctcatcaggactccggagaagaagctgaaggctgtccttcagccccagaagagacaccagtggataaaaagccagaggtgcatgaaaaggtcaagagaaagtccacccgtcctcattatgaggaagagggagaagacgatgacctccagggtgtgggcgaggaattatcttccagccccccaagcagctgtgtcagcttggagacccttgggagtcacagcgaagaaggcctggatttcaagccctccccacccctctcaaaggtttccgtcattccccacgacctcttctatttcccacactatgaggttcccctggctgcagttttggaggcttatgtagaagacccggaggatctaaaaaatgaagaaatggatctcgaagagccagagggctatatgccagacctggactccagggaggaggaggccgatggctctcagagcagctccagttcctcggtgccaggagagagcctccccagtgccagcgaccaggtgctgtatctcagcaggggtggtgtgggtaccacaccagcctcagaacccgctccactggccccccatgaggaccaccagcaaagggagaccaaagagaatgaccccatggacagccatcagtcccaggaatccccaaacctggaaaacatagcaaaccccctagaagaaaatgtaacgaaagaatcaatcagtagt

SEQ ID NO: 13919 - protein, 628 aa, Homo sapiens
MKQALENSTRENLEKAFSIAQDALHIPRLLEPEDIMVDTPDEQSIMTYVAQFLERFPELEAEDIFDSDKEVPIESTFVRIKETPSEQESKVFVLTENGERTYTVNHETSHPPPSKVFVCDKPESMKEFRLDGVSSHALSDSSTEFMHQIIDQVLQGGPGKTSDISEPSPESSILSSRKENGRSNSLPIKKTVHFEADTYKDPFCSKNLSLCFEGSPRVAKESLRQDGHVLAVEVAEEKEQKQESSKIPESSSDKVAGDIFLVEGTNNNSQSSSCNGALESTARHDEESHSLSPPGENTVMADSFQIKVNLMTVEALEEGDYFEAIPLKASKFNSDLIDFASTSQAFNKVPSPHETKPDEDAEAFENHAEKLGKRSIKSAHKKKDSPEPQVKMDKHEPHQDSGEEAEGCPSAPEETPVDKKPEVHEKVKRKSTRPHYEEEGEDDDLQGVGEELSSSPPSSCVSLETLGSHSEEGLDFKPSPPLSKVSVIPHDLFYFPHYEVPLAAVLEAYVEDPEDLKNEEMDLEEPEGYMPDLDSREEEADGSQSSSSSSVPGESLPSASDQVLYLSRGGVGTTPASEPAPLAPHEDHQQRETKENDPMDSHQSQESPNLENIANPLEENVTKESISS

SEQ ID NO: 13920 - DNA, 1788 bp, Homo sapiens
  CDS (105)..(1541)
gtagtggggctggagcagagcctgccgcgaacccccggagcccacgatccctcgtgccatccctcgaatccaccagcacgagcgtcccacccgcgcctgggaccatggccactgactcatgggccctggcggtggacgagcaggaagctgcggctgagtcgttgagcaacttgcatcttaaggaagagaaaatcaaaccagataccaatggtgctgttgtcaagaccaatgccaatgcagagaagacagatgaagaagagaaagaggacagagctgcccagtccttactcaacaagctgatcagaagcaaccttgttgataacacaaaccaagtggaagtcctgcagcgggatccaaactcccctctgtactcggtgaagtcttttgaagagcttcggctgaaaccacagcttctccaaggagtctatgccatgggtttcaatcgtccatccaagatacaagagaacgcattgccactgatgcttgctgagcccccacagaacttaattgcccaatctcagtctggtactggtaaaacagctgccttcgtgctggccatgcttagccaagtagaacctgcaaacaaatacccccagtgtctatgtctctccccaacgtatgagctcgccctccaaacaggaaaagtgattgaacaaatgggcaaattttaccctgaactgaagctagcttatgctgttcgaggcaataaattggaaagaggccagaagatcagtgagcagattgtcattggcacccctgggactgtgctggactggtgctccaagctcaagttcattgatcccaagaaaatcaaggtgtttgttctggatgaggctgatgtcatgatagccactcagggccaccaagatcagagcatccgcatccagaggatgctgcccaggaactgccagatgctgcttttctccgccacctttgaagactctgtgtggaagtttgcccagaaagtggtcccagacccaaacgttatcaaactgaagcgtgaggaagagaccctggacaccatcaagcagtactatgtcctgtgcagcagcagagacgagaagttccaggccttgtgtaacctctacggggccatcaccattgctcaagccatgatcttctgccatactcgcaaaacagctagttggctggcagcagagctctcaaaagaaggccaccaggtggctctgctgagtggggagatgatggtggaacagagggctgcagtgattgagcgcttccgagagggcaaagagaaggttttggtgaccaccaacgtgtgtgcccgcggcattgatgttgaacaagtgtctgtcgtcatcaactttgatcttcccgtggacaaggacgggaatcctgacaatgagacctacctgcaccggatcgggcgcacgggccgctttggcaagaggggcctggcagtgaacatggtggacagcaagcacagcatgaacatcctgaacagaatccaggagcattttaataagaagatagaaagattggacacagatgatttggacgagattgagaaaatagccaactgagaagctccaccagccactgatgccagccctggcactgcccctgcacaggagacaagtgcgttcagggcacaggccccgacatcaccccaaggacaacggcacaagtagagagaaactacctacctcacttcaaattatgtttggacttgacaaaaatgtatgcaaatgatgggggatggtagaaaaaaattatttacacaaccttggaagattaggcatgaatacacagagatttaccttttgg

SEQ ID NO: 13921 - protein, 479 aa, Homo sapiens
MATDSWALAVDEQEAAAESLSNLHLKEEKIKPDTNGAVVKTNANAEKTDEEEKEDRAAQSLLNKLIRSNLVDNTNQVEVLQRDPNSPLYSVKSFEELRLKPQLLQGVYAMGFNRPSKIQENALPLMLAEPPQNLIAQSQSGTGKTAAFVLAMLSQVEPANKYPQCLCLSPTYELALQTGKVIEQMGKFYPELKLAYAVRGNKLERGQKISEQIVIGTPGTVLDWCSKLKFIDPKKIKVFVLDEADVMIATQGHQDQSIRIQRMLPRNCQMLLFSATFEDSVWKFAQKVVPDPNVIKLKREEETLDTIKQYYVLCSSRDEKFQALCNLYGAITIAQAMIFCHTRKTASWLAAELSKEGHQVALLSGEMMVEQRAAVIERFREGKEKVLVTTNVCARGIDVEQVSVVINFDLPVDKDGNPDNETYLHRIGRTGRFGKRGLAVNMVDSKHSMNILNRIQEHFNKKIERLDTDDLDEIEKIAN

SEQ ID NO: 13922 - DNA, 1633 bp, Homo sapiens
  CDS (908)..(1519)
ctcaagatgagtaaaaagcccccaaatcgccctggaatcacttttgagattggtgctcgtttggaggcactggactacttacaaaaatggtatccatcacgaattgaaaaaattgactatgaggagggcaagatgttggtccattttgagcgctggagtcatcgttatgatgagtggatttactgggatagcaatagattgcgaccccttgagagaccagcactaagaaaagaagggctaaaagatgaggaagatttctttgattttaaagctggagaagaagttctggctcgttggacagactgtcgctattaccctgccaagattgaagcaattaacaaagaaggaacatttacagttcagttttatgatggagtaattcgttgtttaaaaagaatgcacattaaagccatgcccgaggatgctaaggggcaggattggatagctttagtcaaagcagctgctgcagctgcagccaagaacaaaacagggagtaaacctcgaaccagcgctaacagcaataaagataaggataaagatgagagaaagtggtttaaagtaccttcaaagaaggaggaaacttcaacttgtatagccacaccagacgtagagaagaaggaagatctgcctacatctagtgaaacatttggacttcatgtagagaacgttccaaagatggtctttccacagccagagagcacattatcaaacaagaggaaaaataatcaaggcaactcgtttcaggcaaagagagctcgacttaacaagattactggaagagaccagctgtgtattttatagctaatatagaatactggaaggttgtaactttattggtttgttggcatccaaagctgttggggttgatggtgctgaaaaaaaggaagactacaatgaaacagctccaatgctggagcaggcgatttcacctaaacctcaaagtcagaaaaaaaatgaagctgacattagcagttctgccaacactcagaaacctgcactgttatcctcaactttgtcttcagggaaggctcgcagcaagaaatgcaaacatgaatctggagattcttctgggtgtataaaaccccctaaatcaccactttccccagaattaatacaagtcgaggatttgacgcttgtatctcagctttcttcttcagtgataaataaaactatgcctgatgttgcacatttgccacttgagaagctgggaccctgtctccctcttgacttaagtcgtggttcagaagttacagcaccggtagcctcagattcctcttaccgtaatgaatgtcccagggcagaaaaagaggatacacagatgcttccaaatccttcttccaaagcaatagctgatggaagaggagctccagcagcagcaggaatatcgaaaacagaaaaaaaagtgaaattggaagacaaaagctcaacagcatttggtatcaggagttgggatttctcagcactgctaatgaagatcccctcttatagtccaataagcttatcaggacttccagagtcatgacatgaacagtttaattgaacccatccactctgggcaggtaagagaaaagaaaaagataaggaaagaagagagaagagagacaaagatcactacagaccaaaacagaagaag

SEQ ID NO: 13923 - protein, 204 aa, Homo sapiens
MLEQAISPKPQSQKKNEADISSSANTQKPALLSSTLSSGKARSKKCKHESGDSSGCIKPPKSPLSPELIQVEDLTLVSQLSSSVINKTMPDVAHLPLEKLGPCLPLDLSRGSEVTAPVASDSSYRNECPRAEKEDTQMLPNPSSKAIADGRGAPAAAGISKTEKKVKLEDKSSTAFGIRSWDFSALLMKIPSYSPISLSGLPES

SEQ ID NO: 13924 - DNA, 1839 bp, Homo sapiens
  CDS (297)..(668)
aaaccccagagctaatagaagacaagacaaaaacaagctcagagcagaactaaaggagacagagacacaaagagcccttcaaaaaaaatcaatgaatccaggagctgtttttttgaaaaaaatcaacaaaatagatagaccaccagcaagactaacaaagaagaaaaaagaagattcaaataaacacaataagaaatgataagggggataccatcactgatcccacacaaatacaaacaaccattagagaatactataaacacctctatgcaaataaactggaaaatctagaaggaatggataaattcctagataaatacacacttccaagactgaatcaggaagaagttgaatccctgaatagagcaataacaagttctaaaattgaagcagtaataaatatcctaccaatcaaaaaaagtccaagtccagatggatttacagctgaattttaccagaggtacaaagagaagctggttccatttattccgacactatttcaaacaactgaaaaggaggaacttctccctaactcatgctatggggccatcatcatcctgataccaaaacctggcatagatactacaagaaaagaaaacttcaggacaatatccctgatgaacatcgatgcaaaaattctcaacaaaatattggcaacccacatccaatagcacaacaaaagatttatccgccggccgggcgcggtggctcacgcctgtaatcccagcactttgagaggccgaggcgggcggatcacgaggtcaggagatcgagaccacggtgaaaccccgtctctactaaaaatacaaaaaattagccgggcgcagtggcgggcgcctgtagtcccagctactggggaggctgaggcaggagaatggcgtgaacccggaaggcggagcttgcagtgagcggagatcgcgccacagcactcccgcctgggcgacagagcgagactccttctcaaaaaaaaaaaaaaaaaaaaaagatttatccgccacaatcaagtaagctttatcactgagatgcaagattggtttaacatacacaaatcaataaatgtgattcatcacataaacagaactaaagacaaaaactacatgattatctcaatggatgcaaaaaattaaggctttcagtaaaattcaacaccccttcatgttaaaaactcttaatacactaggtattgaaggaacccatctcaaaatcataagagccatctatgacaaacccacagccaatatcatactgaatgagaaaaagctagaagcattccccttggaaactggcacaagacaaggttgccctctctcaccacttttattcaacatagtgttggaagttctggccagggcaatcaggcaagagaaagaaataaagtgtattcaaataaaaagagaggaagtcaaactatccctgtttgcagatgacatgatcctgtatctagaaaacccatcgactcagcccaaaagcttcttaagctgataagcaacttcagcaaagtctcaggatacaaaatcaatgtgcagaaatcacaagcattcctatacaccaacaacagacaagcaaagagccaaatcatgaatgaactcccattcacaactgccaaacagagaataaaatacccaggaatacagctaacaagggacacaaaggacctcctcaaggagaattacaaaccactgctcaaggaaataagagaggacacaaacaaacggaaaaacattccatgctcatggacaggaagaatcaatatcatgaaaatggccacattgcccaaagcaatttatagattcaatgctattgccattaccataccattggcattcctcacagaattag

SEQ ID NO: 13925 - protein, 124 aa, Homo sapiens [sequence omitted]

SEQ ID NO: 13926 - DNA, 2122 bp, Homo sapiens
  CDS (4)..(939)
gtgatgcggatgactctgaacgtaatgacctggcggcggagggagatggtgcgctggctggtcagctgtgccacagagattggcccgcaagccctgatgaatatcatgcagaactggtattccttattcacaccagtggaggcggctaccatcgtggcagtgacgggcaccacacacgccactctgctgcgactgcagctggacacatcgcggagggaggagctctgggcctgcgcccgcaccctggccttgcagtgcgcgatgaaggaccctcagaactgcgccttgcctgccctgaccctgtgcgagaagaaccactcggccttcgaggcggcctaccagatcgtgctggacgcggcggccggcggcctgggccacgcccacctcttcactgtggcccgctatatggagcaccgcgggctgccgctccgggcctacaagctggcgacgctggccctggcgcagctcagcatcgccttcaaccaggacagccaccctgccgtcaacgacgtgctttgggcctgctctctcagccactccctgggccggcacgagctctctgccatcgtccccctcatcattcgcagcatccactgtgccccaatgctgtccgatattctgcgccgctggactctctcggcgcccggtctgggccccttaggggcacgccgggccgccaagccactgggtgccgaccgggcgccgctctgccagctcctggacgcggcagtcaccgcctacatcaccaccagccactcgcgcctcacgcacatcagcccgcggcactatggggatttcatcgaattcctgggcaaggcccgggagaccttcctgctggcgcccgacgggcacctccagttctcacagttcttggagaacctcaaacagacctacaagggcaagaagaaactcatgcttttggtgcgggagcgttttggttgagggacagtggggtgcgtgggagtggggatccccctcgcccctgcgtcccccacccttgctctccaattaggcccacgtggcatttcagtattattaagtcagggaaggagcccggctggagatgggggcagggggagcagcatcctgccacgtgtgtgcctgggagtctgtgagcaagtgtgcaagactccagaagcagaagccatactgccacccagaagcctggaaggggtgtgtgcttgggctgctggtatgaccccactttgggcaccccaaaagcaataggcaaactccccttacccagactggcttgggctccaggagggaggctgggaggcaggactttccagaaatcgaccctctaagtcaatgtagcacattttcccccaaccccaccctgggtggccaagggtcctcccccaccccctactgctcagggccccccattatgccacctccaaagtggctgcccagccaggaccattggctcacccccactgaaggaattgaagaggcctcaggcctcagcctcatacctcacccccttatcctatccggccaggacccccatttccttgggcactagggtcccagggtgggctcagggttggggaagtcctcgctgccctctcttctcacctgctagtcactggacgtacaactcaggaactgagcgaggctcacactgccccttccaacctggggttgggggacacagacgcgagagagccggagacccccacccccgatctggaaaggaaagagacctgtatcttggtgtttttctggctttttcaccctttcgcctcctgtctttctgcttcgccccttcatcttactctgtttccatttttcccggcacttacctgcctttctctctgcacctaagtccctgccgccctctctctttggccatccttcctttcccccaccttgacccagggaggagaagggagaacatcacccccccaagtcacccccacatcttttcccttcttgtatattaaggacaaaataccacatcattttgtaactttttttctatttattgaacggtgtattacatgtccttttcctttttttttttcaaagattgaacagaaatttttctttttaattttattttgagactggggtgcatctccagagccactcacaccctcaacctcgtttcctccgc

SEQ ID NO: 13927 - protein, 312 aa, Homo sapiens
MRMTLNVMTWRRREMVRWLVSCATEIGPQALMNIMQNWYSLFTPVEAATIVAVTGTTHATLLRLQLDTSRREELWACARTLALQCAMKDPQNCALPALTLCEKNHSAFEAAYQIVLDAAAGGLGHAHLFTVARYMEHRGLPLRAYKLATLALAQLSIAFNQDSHPAVNDVLWACSLSHSLGRHELSAIVPLIIRSIHCAPMLSDILRRWTLSAPGLGPLGARRAAKPLGADRAPLCQLLDAAVTAYITTSHSRLTHISPRHYGDFIEFLGKARETFLLAPDGHLQFSQFLENLKQTYKGKKKLMLLVRERFG

SEQ ID NO: 13928 - DNA, 2273 bp, Homo sapiens
  CDS (244)..(1068)
ttttccccggcgtggtctcactcgcgatttaaggcataggtgtcgccgagccgggaggctgggagtcgccaggcgtgcgggggagaggcctgggccgcgccgcggcggggggtggaggaagagggcaggcgaggcgggaaggtgggctctggccgccgggagccggggacggagccgccgccgttgcccctagcggggagcagccgggaggagggggccgcagtcgggagaggggaccccaccatgcccaaagtcttcctggtgaagaggaggagcctgggggtctcggtccgcagctgggatgagctcccggatgagaaaagggcagacacctacatcccagtgggcctaggccgcctgctccacgacccccccgaggactgccgcagcgacggcggcagcagcagcggcagcggcagcagcagcgcgggggagcctggaggagcagagagcagctcgtccccgcacgcccccgagagcgaaacccccgagcccggcgacgccgagggccccgatggacacctggcgaccaagcagcgcccggtcgccagatcgaaaatcaagttcaccacaggcacgtgcagcgactcggtggttcacagctgtgacctgtgtggcaagggcttccgtctgcagcgcatgctgaaccgtcacctcaagtgccacaaccaggtgaaaagacacctgtgcaccttctgcggcaagggcttcaacgacaccttcgacctgaagaggcacgtccgcacacacacaggcattcgtccctacaaatgcaacgtctgcaataaagccttcacccagcgctgctctctggagtcccacctgaagaaaatccatggggtgcagcagcagtatgcctataagcagcggcgggacaagctctacgtctgcgaggattgcggctacacgggccccacccaggaggacctgtacctgcacgtgaacagtgcccatccgggcagctcgtttctcaaaaagacatctaaaaaactggcagcccttctgcagggcaagctgacatccgcacaccaggggaataccagcctgagtgaggaggaggagaggaagtgaggagaaggaaggggaggacagacgttcacactgccacgtatgtctacgtggatttttggttttcagcttcccccaccccactggctcttcttaattagaagtgaccagttcacctctgtgtccttttgaaacatcagcagtagggtccattccaagattgtcagttaccgttagtgacgtcaggccctgtaacctgtgtcctgtctggcgcagttgctcacattcaccaaagtttgttttcatgatcctgatggccaagaacaccgtgtgggatttttttttcccccaaggattttcacacacggaaggagaggtatttcttagagagatcatcattttatggtgccttgaaataaaaatacttctacttgaaatgctgtttaagcaaggcaagtgaattttgttattctgaaagagtttacagaaactattttaataaatgaaatgttcttgtgaagcttttaaaagcaaaatggaacattgacctacagctctctgttcagggcttattgtgtgatgtttaacttcaggttattgaggtggggaggttgattactttatattagttgtgtgggtttgaagaagcagatcttcctctctttttttgtttttgagacaagttctcactctgtcacccaggctggagtacagtggcatgatcatggctcactgcaaccttgacctcccaggctcaggtaatcttcccacttcagcctcccgagtagctgggactataggtgtgtgccactatgcccagctaatttttgtattttttgtagagatggggttttgctagaatgtgtgtattcttgctgtccactgtttcttcttcttttagcattttaattagcagatagcatattatacatactgtttggaactttgcatttttcttttttttaattttaaattttaagtgttgtgggtacatagtaggtgtatatgcatttttcttttaatagtacatctagtggttctttccaaaatagtacaaaaaagtgttctcatacaaaaaaattagccgggcatggtggtgtgtacctgtagtcccagctacttgggaggctgaggcaagagaatcgcttgaaactgggaggcaggggttggagtgagccaggactgtgacactgcactccagcctgggcaacagagtggactccatcgcaaaaaaaaaaaaaaaaagtgttttcattcttctttac

SEQ ID NO: 13929 - protein, 275 aa, Homo sapiens
MPKVFLVKRRSLGVSVRSWDELPDEKRADTYIPVGLGRLLHDPPEDCRSDGGSSSGSGSSSAGEPGGAESSSSPHAPESETPEPGDAEGPDGHLATKQRPVARSKIKFTTGTCSDSVVHSCDLCGKGFRLQRMLNRHLKCHNQVKRHLCTFCGKGFNDTFDLKRHVRTHTGIRPYKCNVCNKAFTQRCSLESHLKKIHGVQQQYAYKQRRDKLYVCEDCGYTGPTQEDLYLHVNSAHPGSSFLKKTSKKLAALLQGKLTSAHQGNTSLSEEEERK

SEQ ID NO: 13930 - DNA, 2268 bp, Homo sapiens
  CDS (781)..(1767)
gtgttgatatgtgagaatgtgtgtgtatgtcactgtggggaggtggctccaggcttcctggtgtgcccggggtggccacagtaaggaggctgcactcaggccctgcccgtactcctgccctccccgggtggcccaaccttgtgtgactgcaagtgactggaggaggccagggggttggaggacgtgtccaggtcctatgtcacaggccaggggcacatccacacacctgcgcccctggctgagctgtgttgtcagggaccctcagcacctgggaaggtgtggggaggccaagaggccaggtcctaggaaggcttgtagtggacccttcatctgcccaggggatccatttgtggggtcaagggaggtcctccagccaggcccaccccgaccccggccagagcatcttccccacccctgggctcccacccagctgcccactggcccacgtccctacctgtccccggttcttgccgctccctgtcctgggaggcaggttgggatctggccttacttccagtaaaatgacttctctttcatattaggccaaggcgagagagcggagacatttatgaaactttgtttaatgtactgaaaagccatcggccagaacatttaggaaattgattttcctggcattgatgaactcgttttattttaccccagtattaattacttttttttaaaacaaattaatttaagagtcgtaaaacctaacaagtgagccaaacgtccatagatcgtgtcctgctccgcccctccccacactgaccccctccctctatgggtgggggcccccagtggggggacctcctgtccctcccactccctcccagaggtgatgcgcccccatcctcctctgcaggagaggcctcctcgctgcgggactacgcggcctccaccatgaccgagttcctcggcatgtttggctatgatgaccagaacacgcgggacgagctggccaggaagatcagctttgagaatctgcacgcgggctccaccccggaggcagccacctcctccatgctgcccacctccgaggataccctcagcaagcgggcgcggttctctaagtatgaggagtacatccgcaagctcaaggctggcgagcagctctcctggccggcccccagcaccaagaccgaggagcgggtgggcaaggaggtggtgggcaccctgcccggcctgcggctgcccagcagcacggcccacctggagaccaaggccaccatcctgcccctgccgtcgcacagcagtgtccagatgcagaacctggtagcccgggcctccaagtacgacttcttcatccaaaaactgaagaccggcgagaatctgcggccccagaacgggagcacctacaagaagccatccaagtacgacctggagaatgtcaagtacctgcacctcttcaaacccggggagggcagccccgacatgggcggggccatcgccttcaagacaggcaaggtggggcgcccttccaagtacgacgtccggggcatccagaagccaggccccgccaaggttccgcccacccccagcctggctcccgcacccctcgccagcgtgcccagtgcccccagcgcccccgggccagggccagagcctcctgcctccctgtccttcaacactcccgagtacctgaagtcaaccttctccaaaacagactccatcaccacggggaccgtctccactgtcaagaacggactgcccacagataaaccagccgtcactgaagatgtaaacatttaccagaaatatattgccaggtaggcccctggggaggagcctgccgtggagagaaggtggggggccaggactgaccgggcactctgaggccattcgtttgatatctgacctctagggccaaggtagctgcctcctcccatccccatccacttcggtccctccaccgcaccgagggctgccctgcacgcccgtttgggagcctccctctgctctgtgtagtccaggccacacattccctcagcagcctgtgcccccagttagggccggggtcccgacgcagggcctggccacaggtgagtgcagctcccccagcttgcctgggtcctgctgtcacacagagccttgagtagggtgcaggccaccgtgaaactgtcagggctgggaaggtagaggcaggccaggtgcagtggctcatgcctgtaatcccagcactgtgggaggccaagatgggaggatcacttgaggccaggagtttgagatcatcctgggcaacagagtgagaccctatctctttaaaaaaac

SEQ ID NO: 13931 - protein, 329 aa, Homo sapiens
MGGGPQWGDLLSLPLPPRGDAPPSSSAGEASSLRDYAASTMTEFLGMFGYDDQNTRDELARKISFENLHAGSTPEAATSSMLPTSEDTLSKRARFSKYEEYIRKLKAGEQLSWPAPSTKTEERVGKEVVGTLPGLRLPSSTAHLETKATILPLPSHSSVQMQNLVARASKYDFFIQKLKTGENLRPQNGSTYKKPSKYDLENVKYLHLFKPGEGSPDMGGAIAFKTGKVGRPSKYDVRGIQKPGPAKVPPTPSLAPAPLASVPSAPSAPGPGPEPPASLSFNTPEYLKSTFSKTDSITTGTVSTVKNGLPTDKPAVTEDVNIYQKYIAR

SEQ ID NO: 13932 - DNA, 1242 bp, Homo sapiens
atggcatgaacccgggaggtggaggttgcagtgagtcaagatcgtgccactgcactccagcctgggtgacagagcgagactccgtctaaaaaaaaaaaaaagaaagtcacctgttaaagattacacagcaaactgccagcatccaaagcctgtcctcttccctcttccatttgaataggctccttccagccaacattcatgtatattctatccaggctccaccttccccttggaaactgcagctgtgtttgctgaaaaggcaagtggggacagcttgtttcctcccaacctcaggtaccttcctctccaactgctgctcctaaatctcagaatatatggtgttgcttgcttctcctccgaaccgccccctcccctcagggtggggatagggcatggaaatggcctttggaagttaatgggattcttggggtcagattggattctccagaaccttggggaaaggaaagtcaggtttctagtaaataaataacatcctggaatggccctagcataggctatttgtaggaggaaaggagagaagtagagaagcaaatcttgactatttcccccaagaagtgccaagtggttttggaacttttttttttcggttttgaacatttttaagggaaagtttatcctactctaccatatttaaatagcatacgctacaaagaacgacttgatttcctttaggccaaagagaagagatggccttgtttgttttcctagtgataagagtcgaggattaattgttaaatctctttttgaagactgagagatgccagggcaaggtggctcatgcctataaccccagttactcgggaggctgaggcaggagaattgcttgaacccagaaggcagaggttgaagtcagccaagattgtgccactgcactcccgcctgggtgacagagcaagaatcccccaaaaaaaaaaaaaaaaaaaaggaaaaggacttttagagggccaggcacggtgactcacacctataatcccaatattttgggaggccaaggaaggaggattgcttgagcccaggagttggagaccagcctgggcaacatggcaaaatgccatctctacaaaaaagtacaaaaattagcgtggtggtgcacatctgtagtcctagctactcaggagactgaggtgggaggatcacctgagcccagggaggtcgaggctgcagtgagccgtgatcgtgactctgcactccagcctgggcaacaagaatgagaccttgtct

SEQ ID NO: 13933 - DNA, 2766 bp, Homo sapiens
  CDS (397)..(1122)
aaagataaaaggtttctaaaacatgacggaggttgagatgaagcttcttcatggagtaaaaaatgtatttaaaagaaaattgagagaaaggactacagagccccgaattaataccaatagaagggcaatgcttttagattaaaatgaaggtgacttgcactgagcgggacctgcgagcagcgcgggcggcagcccgggggaagcggtgagtcgcgggcggcaggcccagccagtccgggaccatgtctggagaactaccaccaaacattaacatcaaggaacctcgatgggatcaaagcactttcattggacgagccaatcatttcttcactgtaactgaccccaggaacattctgttaaccaacgaacaactcgagagtgcgagaaaaatagtacatgattacagaaaatgaattgtggagagcaaagtacatctatgattcagcttttcatcctgacactggtgagaagatgattttgataggaagaatgtcagcccaggttcccatgaacatgaccatcacaggttgtatgatgacgttttacaggactacgccggctgtgctgttctggcagtggattaaccagtccttcaatgccgtcgtcaattacaccaacagaagtggagacgcacccctcactgtcaatgagttgggaacagcttacgtttctgcaacaactggtgccgtagcaacagctctaggactcaatgcattgaccaagcatgtctcaccactgataggacgttttgttccctttgctgccgtagctgctgctaattgcattaatattccattaatgaggcaaagggaactcaaagttggcattcccgtcacggatgagaatgggaaccgcttgggggagtcggcgaacgctgcgaaacaagccatcacgcaagttgtcgtgtccaggattctcatggcagcccctggcatggccatccctccattcattatgaacactttggaaaagaaagcctttttgaagaggttcccatggatgagtgcacccattcaagttgggttagttggcttctgtttggtgtttgctacacccctgtgttgtgccctgtttcctcagaaaaggtatgtatttgttattcgtcagaatcatcatgagtattaatcctaaaaaccaattgaaggtgcaggtgccattattccatttcattggcagggaagttgagactcaaaagatactgaagccagggtctcttaaaaggaagggatggaggcagaaatcaaacccacatctgtctaatttcagatgcacccagctcttttctacccccttccattaaatttgaaaatgctttattcttttgtgagaatcagattaactctgatgcaaatttgcttttatgaaaatttaaaatatggtccaatccactggcaaatgcatctgtaatacagatatgataggatgcaagttccacccccagggacagcaattatatgcacttagcttaggtggttggtatatttgcttcctttcttcccacttagttttttgccttaaaagctttcttgtgcacgcctctcatcgcaaactgcccttgaatcctgcctttgatgtgagaacaggactaactggcgttaaatcggcattttctacatcaggtctccagcctgctcttgacctgactccaacacacaaagcagcggcattttgttgtctgtcattttctgtaagtgttaccaggccccttgccttggtaataccctttcctttgtgggccagtaggtcccgaacatatggtctttaatcccccagccttgcggagttggttttggatgaggtgttctgttctagaactaatgctgtcagatccctctacctgatcgagaactccaccttgtatctgctctcccactctgtctccgaccctgctgttcttgaatagaaatttaaacctcatggacaggagcccttcatcaccttggagcctactgaagagccccccttgaagagggcaggaccttcagaacttgctctgggagcctgattcagatgaatttcctcatctctacagtgggataatgatacctgcttaattgtacaaaccccagagtcttggggctcaacctgagaatgtccatttctttagtatgtggcttatgaacactggtgttcagcagctggccttgatttagcagttcagactttgagcacataaaatgccaaggggtgtgcctgataccaagttgtaaaacacctaagaaatgtagctgtaattattttcagattgaaagggttttagatttgaaaacccatagagaaactttctactttggccttttttctttgagtgctgcaagaaataaaatatagcccaacatttattttttatgattcattgaaactctaggggtagaaatggaaagctttctgtaactactagtgtccttaggtcaaggccctcagaaagcgtgtggttttacatttgagaaaccaatcctcttttgttttactgtattttaaaatagcttcttactctgttttgttgtttatacattgtatgtttggcttcttgaggtctctggctcctcagtttttccttggctcataacatagtatcctcattgatccaagcatgaccctgttttgcttatttttattttacttatactaataatataatgaatatccacaaattcagtgcccaatgaggcaggagaatcgctcgaacccagtaggcagaggctgtggtgagccaagatcacgctactgcattccagcctgggcaacagtgcgagattctgtctc

SEQ ID NO: 13934 - protein, 242 aa, Homo sapiens
MITENELWRAKYIYDSAFHPDTGEKMILIGRMSAQVPMNMTITGCMMTFYRTTPAVLFWQWINQSFNAVVNYTNRSGDAPLTVNELGTAYVSATTGAVATALGLNALTKHVSPLIGRFVPFAAVAAANCINIPLMRQRELKVGIPVTDENGNRLGESANAAKQAITQVVVSRILMAAPGMAIPPFIMNTLEKKAFLKRFPWMSAPIQVGLVGFCLVFATPLCCALFPQKRYVFVIRQNHHEY

SEQ ID NO: 13935 - DNA, 2695 bp, Homo sapiens
acttacatctttaccaccgcgtctattcctctctcaccccgcccccatggcccaagtctttagcctggcattcacgtaccctcactggcaatcttggggaaagcctcagaaaatggtacagcagaaagcccagcgtggaggagccagttgggagactcagcatgtgggcaccctgcttctctgcgcagagcctcctctgtcataggtagatccagcccatctcaggttacactacagtctgtaacccctagcctctccctcctcgcgcccctctggcctccatcactgtcgtgccggtcgtggggacagatgggagggaattacggtatttacagctgctcttcgccggctcttgctcccccgcgtgtcgacaaccgaaactgcagcgaggcccagaggcctctgcccactcccctcggagttccaggaggacgctaagcgcgagaagccaggctcagggaaactgaacgcccatacgctcctagtccctctcacctggatcctctgcgtcaggttacgtgcttgcgctatttttccttttgtttctttaaatttttttttgtagagacagtgagcgtgtgtgtgggggggtggaagggtaggtctcaccattttgcccaggccggtctcgaactcgtgggctcaagccttagccacctgccttagcctcccaaagtgctgggactacaggtgtgagccaccacgcccagcctgtttgcgctgttttctgaggctttccgccaaattgctttctttcctggcaagaaagtcaccccctagaattggggtgtcccagtggactggccgggtggttggattgaaggatgtcctccaacctcaccttcagctgtggcctggctggggacccagcacgtggttcaacgccatgggaatcacctgtttctcctttggagcgagtcacacctggaggccattctcaactctccacagcttgttgtatgtccctgagtgaagcattaacctctctgaatctcaggtgcctcctccgtacagtggagcttccatattctagcatttgcctcacagagttgtcagtatgattacatgggatagtataggttgcaggtggagagctggaggataatcaccgccaccacactagggcactcattgtgtgcctgggcctaggcattttgaaatagccctattaaaaaaggatcatccacagataaattgaaggtcagagagatttagtgattgcatggggtcacacagccgagctaggactggactcagaaagacatggatacacaagtgctgggagatgtgggtggagtctgaggtctgtgagtttatagcaggtgtccccaacccccgggcaggaccagtatgggtttgtggcctgttagcaatggggctgcacagcaggaggtgagcagcaggcattactgtctgagctctgcctcttgtcagatcagcagaggcattagattctcataggaacatgaaccctattgtccccacatgcgataggttgctgcactccttatgagaatctaatgcctgatgatctgaggtggaacagtctcatcctgaaaccattccaatggccccaccccaacccatggaaaaattgtcttccagaaaaccagtccatggtggtaaaaagattggaaaccactggtttagagggtacctagggacctgaaaaataaactggccctgcctccctttggttaatgctttcttcctctaatggattattcatcacctctcaatccaatgcttgaggggccagggacctaaaagaccatccaggcctatttccttatggagagagggaaaggacttgtccagttccacagctgggcagtgcagatctggattggagctcaggtctcttagtcctgtgctcctgctgctccttcccccactgggtgagcagttctgcagggggctgccactcctacccacaatcaaactgctcacttatttggagcacctgttcaggagctgcccactgggtacccctgaccccacttggctgggagcttctgccactccctccctcctctcaagcagctgattgctctaagcagagaggaaaccagtgccattctggctcccaaatgctggtacaagaccagcaaatatttaccactcttgtgtgtgtgtgtgtgtgtgtgtatttttttcttttgttagaaaagggctagcgcaatatataacaagtgattcatggtggcgtcttctggtagattgattgtattttgtcccttctttttttttttttttgtttttttgagacggagtctcactctgtcgcccaggctggaatgcagtggcctgatctcagctcactgcaagctccaccttccgggttcacaccattctcctgcctcagcctcctgagtagctgggactacaggcacccatcaccacgcccggctaattttatatatatatatttttttagtagagatgggttttcaccatgttagccaggatggtcttgatctcctgacctcgtgatcctcccacctcggcctcccaaagtgctgggattacagacgtgagccaccgctcccagccccttctttgtattttaaaatttctttagtaatgaacaaacattaataagacaagaaataaaaagctgttttaaaatttctcttaagcaaaaggccaacaatcatttaaaaaatgagtgggataagaacagattgttctcagg

SEQ ID NO: 13936 - DNA, 2119 bp, Homo sapiens
  CDS (361)..(705)
gttaacagtagttacaatattatttcttgaagtcccgaattctaagaccgatgctgatgatccttctctcctttcccctcagcttgatatatggtccaaatccaactatcaagtattccagaaggtaagttttactttttgcttcttactcaagcggcattaggaaaacgtgaatgctttgaggtttaaacattggtctcaaatcagaggcttttgaaaaagtgaaaaaagccagacagaaaaggatgctcactgtctgattccatatgtatgacattctggaaaaaaactgtattctgaaaacctagttttaaaactcggtttctcagagccctagcggtctccactggtgcccaagggatgggccaagggaagcaggctggcactccctcaccctgccccttccccactttgtgctctggggacactgtatctttttcagatattgggcttccttatgaaaaactgttatgggaaatgtcagacgaaatgaaaagtgaccagagaaaattcatttccccagctcctgacagtgcagggccccttccctggactaactcgggccctgtggctgatgaggattctgtccccaccgccacacccccaccagtccccacagtactcagggccagctccctgcagggcagcagccggcttcttatgttctcatccatcttctgtctctggtctcatccagtagtgaaataagagagttggccatcatctcattcgttccctcatccagctcaacaacaggtgtccactccccagcactttgggaggccaaggtaggcagatcacctgaggtcaggagttcaagaccagcctagccaatatggcaaaaccctgtctgtactaaaaatataaaattagccgggcatggtggcgggcgcctataatcctagctactcaggaggctgaggcagaagaattgcttaaacctgggagacagaggttgcagtgagcccagattgtgccattgcactccagcctgggagacagatgagactccatctcaaaaaaaaaaaaaaaagtatccactgagcccctttgctctgtgccaggcactgttaggtgccagggccacagaggaaactccaacaggcaaggaagcctaacaaatgactccaggtgattaactgggggctgtggccaggaaacacaagggggcctccttctgattaggctagtcagaggaagcctttgtaggggaaactgaggcaggcagtgtgagaaggaggagccagccccgtgaagtggggatgaagtggaggtagaaggcagggctcaggtcagggaggtgcctctaggccctggtgcagaattcggattttatccttaattcagtgagaaaccactgacgggatttacacagagggggatgtgattttgaaagcttggtccgagttatccccacgatgaagaatggttgtgtccacagtgtgccaggaagcacaggactcttttgtagatcaaggtgaaattcacataacttgaaattaaccgttttaaagtgaatgctccttggcttgatgtgccttcacaatagtgtacatccgctacctctgtctggttctaaaacatttccttaccccacaagaaaatctggtgtgcattgagcagtgagcataggacttagtggatcagaggggcgtcatggaccaccctctagaggtgtttactgtacataatccacagtgccccctgggcccctttttggtgataagggctaggcagaggacaggcgtctaggattaggggagtagtctgaggctgaaaaccacacatttagggaacctatataagcattacagattcatgatctgatcacagctaaatgcaatgtgctaccctggattggatcctgaaacagaaagaggttactaatggggccgggtgcggtggctcatgcctgtaatcccagcactttgggaggctcaggtgggtggattacaaggtcaggagttcgagaccagcctggccaacatggtgaaaccctgtctctactaaaaatacacaaatcagccaggcgtggtggcgggcgcctgtaatcccagctacgcgggaggttgcagtgagccactgcactccagcctgggtgacagagcaagactacatc

SEQ ID NO: 13937 - protein, 115 aa, Homo sapiens
MGQGKQAGTPSPCPFPTLCSGDTVSFSDIGLPYEKLLWEMSDEMKSDQRKFISPAPDSAGPLPWTNSGPVADEDSVPTATPPPVPTVLRASSLQGSSRLLMFSSIFCLWSHPVVK

SEQ ID NO: 13938 - DNA, 1949 bp, Homo sapiens
  CDS (303)..(800)
tctgagcatccgaagcgcggccaggtatgcatctagggcaccggggtcctggtggcgcgccagtgggccccctccctccacccctgtgactaaaccaccctccctacacggttgaatgacaagttcaaccttccctaaaacccccggtgacgagtccagccgcgcgcccattcttcacgcaggggcgggacggactttcaaagacttggagttcccacgggtgtgggttcgagaccttcctctgccagttcccagctccgctaccctgagcaaatgacttacgctccattggattttccgcaatgtggctgaaggtggggggcctacttcgggggaccggtggacagctgggccagactgttggttggccttgtggggccctggggcctgggccccaccgctggggaccatgtggaggttcttgggcccaaaagttttaccaggatgggcctgggagaggcctgggtgaggaggacattcgcagggcacgggaggcccgtcccaggaagacaccccggccccagctgagtgaccgctctcgagaacgcaaggtgcctgcctcccgcatcagccgcttggccaactttgggggactggctgtgggcttggggctaggagtactggccgagatggctaagaagtccatgccaggaggtcgtctgcagtcagagggtggttctgggctggactccagccccttcctgtcggaggccaatgccgagcggattgtgcagaccttatgtacagttcgaggggccgccctcaaggttggccagatgctcagcatccagggtacagcatgaccctcgactcctgacccctgacctcccttctaccccagccctacccaccaacaggccccaacttcagatactcacacggggtccctcctcacctcttcgcttacttcccccctggttccactgtctcccaagacaacggcttcatcagccctcagctgcagcgcatctttgagcgggtccgccagagcgccgacttcatgccccgctggcagatgctggtgagtgcccagtgggggagggcggtgagggaggcaggctccatctcctctgacctgcctgaccttcctggcttcactgccccactccctgcctctgagcctcactttccccatctgtaaaatgggaatcaccagagtacacacctcctggcattgctgtggtgattaaaacagggaacagcagcctgacctctctgtgcttcagttcccttccctgggaaatggcgatagtgacagccacacccacatcatagggtcacataaatcagtttacactgagcactgagaacggcccctgattcactgtgagcaacatgcaggtgttagctgtgattattactgtttttttaattaaaggagatcgtgtctgtaataggttggcacggcgcctggcaccaagtaagtgcccaggacatgagctgttctaataactgggtaaggcatggaatccaggattccgccacccacctgctctcccatccctgttctgcttattcgccatgcggccccaggcaggtactgcctctctctgggccactctgaataggacctggcccacaggaagcccattgtaaattttagctcttcttgatcacagtaactgtgagttaataataacatataagagcataataaaggatggttggccacgtgtaatggctcatgcctgtaatcccagcactttgggaggctgcggtgggaggatcatttgagctcaggacttccagaccaccctgggcaacatagtgagaccttgtctctactaaacataataacagtaataattagctgggcacagtggcacatatctgtagtcccagctattcaggaggcaggaggatggcttgagctcgggaggttgatgctgcagtgagccgtgagagtgccactacactccagcctgggctacagaacaagaccctgtctc

SEQ ID NO: 13939 - protein, 166 aa, Homo sapiens
MWLKVGGLLRGTGGQLGQTVGWPCGALGPGPHRWGPCGGSWAQKFYQDGPGRGLGEEDIRRAREARPRKTPRPQLSDRSRERKVPASRISRLANFGGLAVGLGLGVLAEMAKKSMPGGRLQSEGGSGLDSSPFLSEANAERIVQTLCTVRGAALKVGQMLSIQGTA

SEQ ID NO: 13940 - DNA, 1860 bp, Homo sapiens
cagtaaatgctccccccatcctctccaggcccaaaccactggaattgtcctttactcctctttctgtcttatattcatgtctgtcagctaatatacctgaccacttctccccaccttcactcctgtccacccttatctccttcacagaccattatggcaggctcctcagtgatctctctgctctcacccctgcccccagagtgttccttacatgcagctggagggatgctgtgagcacctgtatcaggtcatatccctcccctgctcagaacacttccaaggctacatcttgctcggggtaaaacccagagtcctctgcaaggccctgcattgtctgccctcatcacctctctgacatcatctactcttcttactccctgtgctccagccacactggcccgagggcctttgtgcttgctcttttctttgcctaaagaactcatctatcaaatagcccagacttgttccttcctctttaggtctcccctgagatgtcactgccttcctgagatcttccctcaccacccttctaaatttgtgacttatagtcacatctatctttgcttctttaactttatccttagcattaatcatattactgtttaacactctgtagaatttatctgtgtttatggtctgtctcccctgacccttacctctaggagactgttgacttcatcagggaaggggcttttgtctacttcctccgttatctccaacacatagaaaagtgcttggcacacagttagggctcagtaactacttatcaaataaactattgaagagcacatatctggatcccagcatggcagggactctgccgatcccctttctacagaactccaaggagctgccttaaagttttctgagggctcaagatattcaacaagtatttcaccttgcctcttctttctcctcagcattgggaacacagaagagaacaaaatatttccctacccctatagaacctacagtaatagggacagtaatttagactatcaaataatcacacgtgtgaaattaccaagaaaggtagagagtgttataagaatacttgataggaaatcaaatccggatcctaggaaatgaggtttgaggtgatgaaggagtaggcattaactcctttaagagataagagtttgggatggttggagcctagaggctgatgcagagcaagaggtcagaccttgtgtatgccataaggagtttgggtgtttaccccacatgtagtgggaagttgtagaattttaagctggggacaggagcgtggtcaggtgtttgtgtgtgtgtgtatgtgtgtgtgtgtgtttccttctaaaattcttcacactaaagtgtactttaaaagactcctctggcttctgtgtggggaattgactataaggcattaaggattaaagtagggagaccagtgacaaggctgttactgtggaattaaaatagctgtgattgaagacagccacacattctttgctgtttttcctatcaagaggtggagtctccttccttctccttatatctgagctggccctgagatttgttttgaccaatagaatacaatgaaagcaggctgggtgcggtggctcatgcctgtaatcccagcactttgggaggctgaggcaggtgaatcacttgaggaaaggagttcgagaccagcctgaccaacatggagaaaccctatctctactaaaaatacaaaaaaaaaaaaaaaaaaatagccaggtgtggtgcactcctgtagtcccacctactctggaggctgaggcaggagaatcacttgaactcgggaggtggaggttgcagtgaaccaagatcataccactgcactccagcctgggtgacagagtgagactctttctc

SEQ ID NO: 13941 - DNA, 1517 bp, Homo sapiens
ctgacaatatgactttctgatgtactaagtacattttagtggtcaatgttctctacattaaatggcttttgttttggtaaacccatatgtttggagtattaatggttgtatttctaatttgttaccctggcccaaatgatgaagtaatagaatgttgcatatttccttccacttaacatttaatttgtgttaatgaaaccaaatgtcacttttaactctggaacttctaaaatgaactacaccgggaagccctctgtattctttgtggtttcccatgttccatgagccagcaaccgggtgttcacttgcagtgactctggtttactcagcccctggggatgcattactgctcggaaatgggaagggagagtagcaggtggtgcgtaattgagagctgtgtttgattgggactgacctggtgcccctttcctctgccgggttgaatgagagtttaaaggaggaactgctgctgctaagaacaaaatgaacccgagtgcctcttactgtttgtcccgactgtcagtgcatagggattaactaacatccaggaacttttagctggcctctgctttgttcttcaacattcggaccttcagtgagctctagacctgcacaaacgacctgcagcaaatggcagctttcatttgggctgaggaagaggaatattggagagaatgaggagaaggaaataaatatctttcctttttggcccttcctgctttatctttctccatctttatgcctttattaatgaggattttccaaatatcggtcttcaaaaatgccataagaagacttcattttctgtggttttaatgtcataaaatatctccttatgtgaaataactagatatgctggatcaagcataacaaacatccctttaggacattgctgaatctgtatttaaaacataagggaaaaactgagggaacagatggaaaaaggaactggaaatggaagtgaattgactgctgcagctgccctctgggctcctgcagatcttggtaatcaaaaggattggggttcaactgccttgtgggagacaggagacagggtcttgggtccatttaagttagagataccatagtaacgtgagacactcaaaggactgtggtctcagtagagaggtgacaaatacgtcttgacctgttcttgcctgaggaaaacgtttctaagaattcttaaccacaggccctccctcatagattttcagtttcaatttatactctgtgtggtctggcaatttccaagctgtgaaacttatttaaaacagtctgatggtactcacataaatcaccaagttaaaaaaatgcaaaatagaataaaaaatatgagcatggaaaataaatactatcaaaagggctcagattgatttaaaaaggaaacacagacaattctttaagactgaatggactaaagaactcattcatgtaaccaaaaaccatttctgccacaaaaactattgaaattaaaaaaagaatgacttaaataagaatggatcttatactccaaaaag

SEQ ID NO: 13942 - DNA, 1632 bp, Homo sapiens
  CDS (28)..(1392)
tgtaagaacagccaaggacagagagtcatggttgagcagagtgaaaaactgaatggtgtccttgaagcgagccgcctctgggataacatgcggaagctgggggagtgcacagaagaggcgcaccagatgactcatgacggctacttgaaactctggcagctgagcaagccttcgctggcctcttttgacgccatctttgtggatgaggcccaggactgcacaccagctatcatgaacatagttctgtctcagccatgtgggaaaatctttgtaggggacccgcaccagcagatctataccttccggggtgcggtcaacgccctgttcacagtgccccacacccacgtcttctatctcacgcagagttttcggtttggtgtggaaatagcttatgtgggagctactatcttggatgtttgcaagagagtcaggaaaaagactttggttggaggaaaccatcagagtggcattagaggtgacgcaaaggggcaagtggccttgttgtcccggaccaacgccaacgtgtttgatgaggccgtacgggtgacggaaggggaattcccttcaaggatacatttgattggggggattaaatcatttggattggacagaatcattgatatttggatccttcttcagccagaggaagaacggaggaaacaaaacctcgtcattaaagacaaatttatcagaagatgggtgcacaaagaaggctttagtggcttcaagaggtatgtgaccgctgccgaggacaaggagcttgaagccaagatcgcagttgttgaaaagtataacatcaggattccagagctggtgcaaaggatagaaaaatgccatatagaagatttggactttgcagagtacattctgggcactgtgcacaaagccaaaggcctggagtttgacactgtgcatgttttggatgattttgtgaaagtgccttgtgcccggcataacctgccccagcttccgcacttcagagttgagtcattttctgaggatgaatggaatttactgtatgttgcagtaactcgagccaagaagcgtctcatcatgaccaaatcattggaaaacattttgactttggctggggagtacttcttgcaagcagagctgacaagcaacgtcttaaaaacaggcgtggtgcgctgctgcgtgggacagtgcaacaatgccatccctgttgacaccgtccttaccatgaagaagctgcccatcacctatagcaacaggaaggaaaacaaggggggctacctctgccactcctgtgcggagcagcgcatcgggcccctggcgttcctgacagcctccccggagcaggtgcgcgccatggagcgcactgtggagaacatcgtactgccccggcatgaggccctgctcttcctcgtcttctgaggacaaggcgcacgttctccgcagtgcagagcagcttgccgaggaccccgcgtgaagaaagccagcgaggggggcttctgctccctgagactctgggttcacccacagcactttctgaggaagaggacaccagcccaagctggacctgccatttctccactccctacagacagccagtctccacttgcctcccctctggatgtatctggtcagggaagtgggggatgttcttttgat

SEQ ID NO: 13943 - protein, 455 aa, Homo sapiens
MVEQSEKLNGVLEASRLWDNMRKLGECTEEAHQMTHDGYLKLWQLSKPSLASFDAIFVDEAQDCTPAIMNIVLSQPCGKIFVGDPHQQIYTFRGAVNALFTVPHTHVFYLTQSFRFGVEIAYVGATILDVCKRVRKKTLVGGNHQSGIRGDAKGQVALLSRTNANVFDEAVRVTEGEFPSRIHLIGGIKSFGLDRIIDIWILLQPEEERRKQNLVIKDKFIRRWVHKEGFSGFKRYVTAAEDKELEAKIAVVEKYNIRIPELVQRIEKCHIEDLDFAEYILGTVHKAKGLEFDTVHVLDDFVKVPCARHNLPQLPHFRVESFSEDEWNLLYVAVTRAKKRLIMTKSLENILTLAGEYFLQAELTSNVLKTGVVRCCVGQCNNAIPVDTVLTMKKLPITYSNRKENKGGYLCHSCAEQRIGPLAFLTASPEQVRAMERTVENIVLPRHEALLFLVF

SEQ ID NO: 13944 - DNA, 2623 bp, Homo sapiens
  CDS (52)..(2289)
atagtggaggaagcagtgcaggagctgaactctttcctcgcacaggagaatatgaggctacaggaattgacagatcttcttcaggaaaagcatcgcaccatgtctcaggagttctccaagttgcagagtaaagtggagacagccgaatcacgagtgtctgtcctggagtccatgattgatgacctgcagtgggatattgacaaaattcgaaagagggaacagcgactcaaccgacacttagcagaagtcctagaacgggtgaattccaaaggttataaggtgtatggagcggggagcagtctgtatggcggcacaatcactatcaatgctcggaagtttgaggaaatgaatgcagagcttgaggagaacaaagagttggctcagaaccgtctctgtgagctggagaaacttcggcaagactttgaggaggtcactacacaaaatgaaaagctgaaggtggaattgcggagtgcagtggagcaagtcgttaaggaaactccagaatatcgctgcatgcagtcacagttctccgtcttgtataatgagagcctacagttgaaagcacacttggatgaggctcggaccctgcttcatggcaccagaggaacccaccagcaccaggttgagcttattgagcgagatgaggttagtcttcataagaagctgaggactgaagtaattcagctagaagatacattggcccaggtccgcaaggagtatgaaatgctgaggatagaatttgagcagacccttgctgccaatgaacaagcaggccctataaacagggagatgcgccacctcatcagtagcctccagaatcacaatcaccagctgaaaggggaggtcctgagatataagcggaaattgagagaagcccagtctgacctgaacaagacacgcctgcgtagtggtagtgccctcctgcagtcccagtctagtactgaggacccgaaggatgagcctgcggagctaaaaccagattctgaggacttatcctcccagtcctcagcttcaaaggcatctcaggaggatgccaatgaaatcaagtctaaacgggatgaagaagaacgagaacgagaaaggagggagaaggagagggaacgagaaagagaacgggagaaggagaaggagagagaacgagagaagcagaagctaaaagagtcagaaaaagagagagattctgctaaggataaagagaaaggcaaacatgatgatggacggaaaaaggaagcagaaattatcaaacaattgaagattgaactcaagaaggcacaggagagccaaaaggagatgaaactattgctggatatgtaccgttctgccccaaaggaacagagagacaaagttcagctgatggcagctgagaagaagtctaaggcagagttggaagatctaaggcaaagactcaaggatctggaagataaagagaagaaagagaacaagaaaatggctgatgaggatgccttgaggaagatccgggcagtggaggagcagatagaatacctacagaagaagctagccatggccaagcaggaagaagaagcactcctctctgaaatggatgtcacaggccaggcctttgaagacatgcaggagcaaaatatccgtttgatgcagcaattgcgggagaaggatgatgcaaatttcaagctcatgtcagagcgtatcaagtccaatcagatccataagttgcttaaagaagagaaggaggagctggcagaccaggtgttgactctgaagactcaggttgatgcccagctacaggtagtaaggaaactggaagagaaggagcatctgttacagagcaacattggcacaggggagaaagagctgggtcttaggacccaagccttagagatgaataaacgcaaggcaatggaggcagcccagcttgcagatgacctcaaagcacaactggagttggctcagaagaagctacatgattttcaggatgagatcgtggagaacagtgttaccaaagaaaaggacatgttcaatttcaaacgagcccaggaggacatctctagacttcgcaggaagctggagaccacaaagaaaccagacaatgtacccaagtgtgatgagattctgatggaagagattaaggattacaaggcacgcttgacctgtccgtgctgtaacatgcgtaaaaaggatgctgttcttactaagtgttttcatgtcttctgctttgagtgtgtgaagacacgctatgacacccgccagcgcaaatgtcccaagtgtaatgctgcttttggtgccaatgattttcatcgcatctacattggttgatctaagtcaagagaagaagaggagctggctagtcaggaacttattcattaaccaccaaacctctacctcttctctccttgactgtcacctgtaggacagtttatcagtcaactacctttcctccagactttacttccaggctctcctcttcagtagctggatgactttagcagaaaggactggtaaatacaagccttgggtttcagaatgaattagaaacaaataactcttactgtcttccctcccagctttgtttattttgtgcttttagacttttcagtgttttctttttccagcccactgtataaacttggattgtccattcctcctg

SEQ ID NO: 13945 - protein, 746 aa, Homo sapiens
MRLQELTDLLQEKHRTMSQEFSKLQSKVETAESRVSVLESMIDDLQWDIDKIRKREQRLNRHLAEVLERVNSKGYKVYGAGSSLYGGTITINARKFEEMNAELEENKELAQNRLCELEKLRQDFEEVTTQNEKLKVELRSAVEQVVKETPEYRCMQSQFSVLYNESLQLKAHLDEARTLLHGTRGTHQHQVELIERDEVSLHKKLRTEVIQLEDTLAQVRKEYEMLRIEFEQTLAANEQAGPINREMRHLISSLQNHNHQLKGEVLRYKRKLREAQSDLNKTRLRSGSALLQSQSSTEDPKDEPAELKPDSEDLSSQSSASKASQEDANEIKSKRDEEERERERREKEREREREREKEKEREREKQKLKESEKERDSAKDKEKGKHDDGRKKEAEIIKQLKIELKKAQESQKEMKLLLDMYRSAPKEQRDKVQLMAAEKKSKAELEDLRQRLKDLEDKEKKENKKMADEDALRKIRAVEEQIEYLQKKLAMAKQEEEALLSEMDVTGQAFEDMQEQNIRLMQQLREKDDANFKLMSERIKSNQIHKLLKEEKEELADQVLTLKTQVDAQLQVVRKLEEKEHLLQSNIGTGEKELGLRTQALEMNKRKAMEAAQLADDLKAQLELAQKKLHDFQDEIVENSVTKEKDMFNFKRAQEDISRLRRKLETTKKPDNVPKCDEILMEEIKDYKARLTCPCCNMRKKDAVLTKCFHVFCFECVKTRYDTRQRKCPKCNAAFGANDFHRIYIG

SEQ ID NO: 13946 - DNA, 1766 bp, Homo sapiens
  CDS (164)..(502)
taaaatcttaaaaattcttaaaaagctctcttgaatttgacctctactaccttccaaggaccttggaaagacttaagtatgtgttagaactctcctgaaggcttggtcttcctttagtgacattaacactcaggtttgttattccagtgggcagccccagttcatgcaaactgacctgttgtgtctggtgtccttagactttgatatgcaggccaaagtccaagggatatgcaaacataacacacacctgtacttccataaaaaccagcagaattgtagatcagctcattttactgaaattttaaaccctgtaaaaaaaaaaatactatgcttgaagaaagaaatcctggtgcatataaaaactacaatgagtaacagtaatacaggtaagaatcaagcaggccttgagcaaaacagtccattattactgtgtaaactatgttgctatgatacttattttgagcctttatgcaccagcacatacatagtaagacacacaagatagttcaacaaaatctaagtaatatacaaacactgtaagagcttttccaaccaaagaaactttaatgtagatctgaaatgagccatcatgatacagaaaaagatgattatcatttcgtgtcctttccaagtagaactatctgataaccttttctgtttgtatcagaagagatttcaactcaacatgaaaattctactacttggaattatttgaaaaatcaagtatttgaaggaaaaaattatttttcatctaaagatgcattacatttccttttgctagaaacgattgacaatgatgtaatttttcctgacatataattaattatggtactcttcaggtggatggcagctgtatacctacactcattccaagtcatgttgaagtgagtccagcatttccctttctccagcatccagctatatctaaggagatttttttttccccacaaatgacagtggctgaaatttcatatgtattgttctcttctcacccaaggcaactcttaagaaagaacagtatgtggaatgttgcatgtaaaagatttttgcatactcaaaaaattgctctgacataacaggggcatgcatttaggggatatatggataaactagggaggaaactgacagttattgatggactcacatatcccatagtgaagtaggcattacatatattatttcagaatacctggtatgtttttgcctacaaatcttttatttgattttgaagaaagctattgtataatgtttgaagaccagtccctgtaagtaggactaatgtgtggtggtggcccatagtcttctggatattggtttgtttttgtcatagatttcattaataaatttatttctgccctcaactatatatacaactgagtaagccatttaagaattctgactccttggctgggcatggtggctcatgcctgtaatcccagtactttgggaggccaaggcagccagatcacttgaggtcaggagtttgagaccaacctggccaacatggtgaaactctgtctctaacaaaaaaaaaaaaaaaaaaaaaaaaaagaaaaccaaacaaaaattagcctggccaacatggcaaaaccctgtctctactaaaaaaaaaaaaaattagccgggcatggtggcgggcgcctgtggtcccagctactcgggaggctgaggcaggaaaatggcatgaaccctggaggcggagcttgcagtgagcccagatcgcgccactgcactctagccagggcaacagaacgagactccatctc

SEQ ID NO: 13947 - protein, 113 aa, Homo sapiens
MQTDLLCLVSLDFDMQAKVQGICKHNTHLYFHKNQQNCRSAHFTEILNPVKKKILCLKKEILVHIKTTMSNSNTGKNQAGLEQNSPLLLCKLCCYDTYFEPLCTSTYIVRHTR

SEQ ID NO: 13948 - DNA, 2178 bp, Homo sapiens
  CDS (213)..(1142)
agaagggcgcggagcaccggagggcacgcagctgacggagctgcgctgcgttcgcctcgtttgcctcgcgccctccactggagctgttcgcgcctcccggctcccaccgcagcccacccggcagaggagtcgctaccagcgcccagtgcgctctgtcagtccgcaaactccttgccgcccgccccgggctgggcaccaaataccaggctaccatggtctacaagactctcttcgctctttgcatcttaactgcaggatggagggtacagagtctgcctacatcagctcctttgtctgtttctcttccgacaaacattgtaccaccgaccaccatctggactagctctccacaaaacactgatgcagacactgcctccccatccaacggcactcacaacaactcggtgctcccagttacagcatcagccccaacatctctgcttcctaagaacattcccatagagtccagagaagaggagatcaccagcccaggttcgaattgggaaggcacaaacacagacccctcaccttctgggttctcgtcaacaagcggtggagtccacttaacaaccacgttggaggaacacagctcgggcactcctgaagcaggcgtggcagctacactgtcgcagtccgctgctgagcctcccacactcatctcccctcaagctccagcctcatcaccctcatccctatcaacctcaccacctgaggtcttttctgcctccgttactaccaaccatagctccactgtgaccagcacccaacccactggagctccaactgcaccagagtccccgacagaggagtccagctctgaccacacacccacttcacatgccacagctgagccagtaccccaggagaaaacacccccaacaactgtgtcaggcaaagtgatgtgtgagctcatagacatggagaccaccaccacctttcccagggtgatcatgcaggaagtagaacatgcattaagttcaggcagcatcgccgccattaccgtgacagtcattgccgtggtgctgctggtgtttggagttgcagcctacctaaaaatcaggcattcctcctatggaagacttttggacgaccatgactacgggtcctggggaaactacaacaaccctctgtacgatgactcctaacaatggaatatggcctgggatgaggattaactgttctttatttataagtgcttatccagtagaattaataagtacctgatgcgcattgaacgacaatcttaagccctgttttgttggtatggttgtttttgttttcctccctctcctctggctgctacaacttcccctttctggtacaagaagaaccattctttaaaggtgagtggaggctgatttgcagctgaagtgggccagccttgcaccagccaggccagaccaccatggtgaaggcttctttccccactgcaggacccactttgagaaggaccgaggaggaggatttgggttgttttgttaggggttactttcaggggaacatttcatttgtgttatttcttaaacttctatttaggaaattacattaagtattaatgaggggaaaggaaatgagctctacgaggatttcaccctgcatgggagagagcagggttttctcagattcctttttaatctctatttatctggttgtttctgacaggatgctgcctgcttggctctacaagctggaaagcagcttcttagctgcctaattaatgaaagatgaaaataggaagtgccctggagggggccagcaggtcacggggcagaatctctcaggttgctgtgggatctcagtgtgcccctacctgttctcccctccaggccacctgtctctgtaaaggatgtctgctctgttcaaaaggcagctgggatcccagcccacaagtgatcagcagagttgcatttccaaagaaaaaggctatgagatgagctgagttatagagagaaagggagaggcatgtacggtgtggggaagtggaagagaagctggcgggggagaaggaggctaacctgcactgagtacttcattaggacaagtgagaatcagctattgataatggccagagatatccacagcttggaggagcccagagaccgtttgctttatacccacacagcaactggtccactgctttactgtctgttggataatggctgtaaaatgtttaaaaac

SEQ ID NO: 13949 - protein, 310 aa, Homo sapiens [sequence omitted]

SEQ ID NO: 13950 - DNA, 2173 bp, Homo sapiens
atgaatgaatgaatgatagtctcgagctgtttaacttcatctctcttatggtttgcatataagattgtgcagtggggctgggcgcggtggctcacgcctgtaatcacaacactttggaaggccaaggcaggtggatcacctgaggtcaggagttcgagaccagcctggctaacatggtgaatggtgaaaccccatctactaaaaatacaaaaattagccaggcgtggtggtgtgtgcctgtagtcccagctactcgggaggctgaggcaggagaatcacttgaacccagaaggcagaggttgcagtgagctgaggcaggctgcaccattgcactccagcctggacaaaaagagcgaaactccatctcaaaaaaacaaacaaaaaaaagattgtgcagtgtagttgtaagattggggagaccaaactgttaaagcgattattgactggggaactggagatggttgacatactttgtcctcaccaagcccctttcagttccttattcacaatgagccactagtgggtgtacttggttctagtgggtatatgtggttttattcaactatgttagggtggataaaggtttacattattgccgattgtattcatatgaccatttactattccgagtcactacatgcagctaagcttagcagttgctgagtataaagcactgccttgaagccctatagatggcgttagttctgacttctttttaccatgtaagatgcatcacgtgtgcttgtgctagagaggaactaaagggacagccatttcacgcagtgtaaggctgatttctccttaggtgctccccatatctagaagtatgacctgaatctttgtctactcgatacccattgtcagctccacagttgtggtatcttgctgtatgttgatttagagcctgctcagcagtttagcagataccagctatttctcattggaatgttccgtgttttctctttcctcctaaagtgtgcctcttcactggccagtacttactacgtatcctctgtgaataaggaaataatctttcctatcaagacactagtgaacctgtagtcccagctacttgggaggctgagatgggaggatcccttgacaccaggagttagaggctgtgatgagctatgatcatactgctgcgtagaccctgtctcttttttttttctttttttaaggggagggggggtgacactaatgagaaaaacaggactactgtgatgaatacaaataagcatatacttgatggaaaaatataaatctagttttctcacgggattgtgaaggagcgacaaggagaaacgtaatttttctagctaagaagagggccttaaaccctagctatgagaagctaagtcctgtatgattttggattggcctggacttagcaacagcaccatgatgtagagtggtatgtgtggtacatgtggttgattctatcacttatgcttagtaactaaacaggtctaagaggtatttacatgtggttgattctatcacttatgcttactaactaaacaggtctaagaggtatttcattcagcaaatgctatatttgccagttaaacaatctttcatcggtaagtgatttggttctaaaaaatgcattcaggctgaggctgtgtgacacttacatacctcaaggctaaagagtttccattgtgcaaaaacctggtcctcttactgcatgtgatgactaccctgcagcttgagtgggagagtgcgtattaacatggtttcaccaactaaagctcctggctgaggcttgcatttctcaccaaagattttattcttgaattgcgaatgttacattttttattttgtcaaactagatggtatgtttttcctctaatatgtcttccctcacaacaccacacatgaaaatgagtcctctgaaaaggacagcctgtagtatagtgtcttccatgcttatgttcttaactaaatctcaaccttgggatgcattcaaagaaaagtaaaagacacatgttttttactctggggtcttctctctgcaggtggagcagttctggaggttttatagccacatggtacgtcctggggacctgacaggccacagtgacttccatctcttcaaagaaggaattaaacccatgtgggaggtaaggactaatggcttctgactgcttttttgagcaagtttgggttt

SEQ ID NO: 13951 - DNA, 2160 bp, Homo sapiens
  CDS (95)..(925)
gctccagtcgcctccgacctcggcgctgggcgggcgcgccgggcctggggaaggggcgggcgcggggacccgatgcgcgggagcggaggccgagatggcttcggcgggaggcgaagactgcgagagccccgcgccggaggccgaccgtccgcaccagcggcccttcctgataggggtgagcggcggcactgccagcgggaagtcgaccgtgtgtgagaagatcatggagttgctgggacagaacgaggtggaacagcggcagcggaaggtggtcatcctgagccaggacaggttctacaaggtcctgacggcagagcagaaggccaaggccttgaaaggacagtacaattttgaccatccagatgcctttgataatgatttgatgcacaggactctgaagaacatcgtggagggcaaaacggtggaggtgccgacctatgattttgtgacacactcaaggttaccagagaccacggtggtctaccctgcggacgtggttctgtttgagggcatcttggtgttctacagccaggagatccgggacatgttccacctgcgcctcttcgtggacaccgactccgacgtcaggctgtctcgaagagttctccgggacgtgcgccgagggagggacctggagcagattctgacgcagtacaccaccttcgtgaagccggccttcgaggagttctgcctgccgacaaagaagtatgccgatgtgatcatcccacgaggagtggacaatatggttgccatcaacctgatcgtgcagcacatccaggacattctgaatggtgacatctgcaaatggcaccgaggagggtccaatgggcggagctacaagcggaccttttctgagccaggggaccaccctgggatgctgacctctggcaaacggtcacatttggagtccagcagcagaccccactgaggggctgccgagcctcagggcaggtctcccgcccggcatgtgtgttcagggactgagcctggggacgcccacccacacccactgcttcctctcggcgcaccccaggggagtgttagcagcgaggccttcctcactcaggagtggaaactcagatgtgtcactcagactcaacttgctgggacactgacaggcgttcctgaggttttcagccacttaggctcgttgcggtttaaagatccctctaggtcactgagaaatgccacagaatgtgcaggaagcctgggaggcttctgtgaggaatgtgaggcacattattggggaaattgaggagacagcctagacactggctggcctgatgttttgttgacagtgaacccacagtgggagagagttttttccagtctgatctggttcttacacacacacataactcaaaagttttgtgaacaagtactttccttttttacatgttacatgtcctcatgttttctgttttctgtttcataacacaaggctggttgtggcctacaaacctaatttcatgacccagtggtttgcagtccagcgtggcctacacggatatggggagccactgagggatgttttccccccttgcttgtgccttaaaggcagagaagcgaggcggatgccctggaagcacccagcatcacacccaggcttgtgcggggccaggctgggagcccatgcagtagggcagaaggcagcggaggccaggtctgtcccggctggagaacagcgtccacgcagtcctgcctggggtcaggccctcactgaccctcaggggagcccccaaggtgctgtctgtctagacaggctgtcccaccccagggtggctagtggccatatgcagggaatggtgcttctggctgtggcacgcactggatcacccaggtcccagcagacatggccgcccaaagtcagcaagcctcctttgtgctatgtggagctcacagcctcacatgtgaacacccgtgtctgggttgcctggggtgatcctccctcctgcgtggtggctgtctctggaaagcatcccttgccgctgccacgggcagccccagcccccgtccgtccaggctcacccacagtagtgatgcagacgtgacgtgggggaagggggctgagccctgtggctgggttctgacaactgtaacggttttgtcgagcttaggcccctttggagggagaatcaataaataacaaacaccaactac

SEQ ID NO: 13952 - protein, 277 aa, Homo sapiens
MASAGGEDCESPAPEADRPHQRPFLIGVSGGTASGKSTVCEKIMELLGQNEVEQRQRKVVILSQDRFYKVLTAEQKAKALKGQYNFDHPDAFDNDLMHRTLKNIVEGKTVEVPTYDFVTHSRLPETTVVYPADVVLFEGILVFYSQEIRDMFHLRLFVDTDSDVRLSRRVLRDVRRGRDLEQILTQYTTFVKPAFEEFCLPTKKYADVIIPRGVDNMVAINLIVQHIQDILNGDICKWHRGGSNGRSYKRTFSEPGDHPGMLTSGKRSHLESSSRPH

SEQ ID NO: 13953 - DNA, 1777 bp, Homo sapiens
tgtgcaaatgggtatgtattttttcatactcatctttactgttagcccttcatccctctacaaaatgtttaatgttttaaacagatttactccctacagtctgcttgggttagtagtttatatagatttaatttagcattttctcaagtactgggctttttttctggcagaatttttcaaatagccaaaacataattttccctctgaatattaaaaaacaccaacaaaaaagatttttgcacgacaaataatttttacacatgcaaaaaagtaattttcaaaagtaagcacttctgccagatgatgcttaataagtctgtcctaatggtatttatcttaatgcttactttcaggaacagtggataataccatattcagtccccctgacaaacccctgaaacaggtaatgtcattagtcctactttctggaggaaatgaaggcacagagaagataagtaacttgcctgaggttgcacagccaatatgcagctgagtgggagttgagtgctaggctgttggatttcagagcctgccctcttaaattgctacgtgacactgactctcatatgtatttatgttttatcaagcttaatataggataaattgtcgtgcttagggatgtagtctcaaagagtggaaattcagacattagtagaaattcaggtatcaggacagttggggaccaggaggccaaaagggggtatggtttagggagtcattcacagatgtgggattctggatatcaggacaactggagttgaggagaatgtcttcccagcatcccaaaccactcattcgcctaacaattagactggcccttgggagcactattcttcttcattggtctcattgccacaaccattctcacaaactcccattgccctcagctcagcccaaggctttgtattgttcaggctgtgctgtgggccctgctctaaaaatagcatatggcaaagaggcctgtcttgtagttgcaaaagtggtgtaggatttgaattccccatgatgagctaatttgggggcccactacaaagattttcagaaaacttttcaaaataatctcaactactgtgactacggaacacaatggcaaggggctgggagcaggaaataataccttcattatccaaactaatgtgcatacatttgaaatgtacaaaaaagtagatgtgttgcatgtgacaactcgacctggtaatgaggttttggggcatcacatcaatgctagttgtaaatactgtatttgccatgtactgcctttggattaattagcatccataacataaaataagttgtttcctgaaatgtaaacctagcaattagcgcttcatcaagtccctatcagatgttagaaaaaaaaattggttttgcagttgtttttttcacccaaaacaagtctgacagtacatattggtggcattcacagcaacataacggtaataaacttcagctactgttgggctctttgtaagcggtacagttactaaagcgagagtttggaagtatggttttcttttaggcaccctcaccagcatggtgagggtgcctacattctagttaaagtcagtaacacaaattaactcatgtaaatgtttttaatcagtgtttcttacagctgattattcagctcattaactctgatcataaatctggactttggaaaacttaacatttgttctatgttaccttttagaacaaaatggtggctgaggtagagaaatgacttgttctctgactggtgactttggtccctgcatcaaggagtggcagaggtctc

SEQ ID NO: 13954 - DNA, 1997 bp, Homo sapiens
  CDS (323)..(751)
taactcatgaaacttgagaacacgagaacaacaaaaatactttccttgaacattttcagctagaatgacacggcattctcctacataaaacattataattttcccactactccaaaggaatccaataaataattttacagtgaaggggcctggatcaaaactggcagtgacacctggcccctgacaagcctgagtcacaggtccctgtgcaggtcccagcgtccagtcctccaagaaccagcactgccggagcctcgctgtggtttcttccttccccgatgggaccagctggaatttccaagctgcttcacagaggccaaagatgacaacacgagaggtggtcaaagccaaggtttccctgcgctgcctttgtcttcttcccatggcctggcctgagtgctgcagctgggccccaggagatgagctcctcgcccaagctggagagcatccgctgcacccgccatgccgggaagagctcgggtgggctttctccatagcaattcttcgcaatggggtcccaatcggtgggatgaggccctgggatgaggtcctgcatttggccggacatgactcaatactgatcttcgactgccatgaagaggttctggaacaccacgatgctccaggagaagctcctggctgggctgcaggcagcaagagacatggccagcagccgtcacagcagcactgcttcacactagggctgtggacgttacagccctgcaccagcaaatccctcctctcgcaaacatagcctggttcatccacgatgaggagcttcccttgcacagagttctggcactgattccacgggtgactgctactgcccaggttaacctgcactttgcacgggctgggctggtcgtggtcttgaacctggaggagagtcctatgtctgactcccgctcttcctgcctgaaggtgctgctgaggacatgaatgaggatatctgggcaagggccccacatgcccagcagccccatccttgtgaatgattatagggagaaaagcattttccaggccaatggctcactccaggtgccaggggtcatgtcaatttgctctggaaaatatgtcacatcagtagcagcaggtgcagttggaatagccacctgctgagctttgtgaaaatccacaggcgttctccaaggatgcccgccttgcgcctcgcccagctagggagtcaggtgggggctgtgctggggatcaccagccctgcatcgttcacatcttttgggggtagcactaaccttggcattttcaccagacatgcagatttgagttcattaacctggtaggaaagaaaaattgcagggcttccatttaactttttataccatgacagccgtaaccctgtgggtcacagagctgatgtgagaatgccgccggtttctgggatgtctttttagctacacactcaggagcttgcaaagtgaccacaggcaggctctgcagaactcccaggcccagctcgagatgaacttggactacagttgcatgatccctgaccgtcagccaccactttgactggtggaccaccatggtgttttggggccccagaatttggcattcaccaaaatcagtgttctgtgggccctgaaagcgcaggatgtcgcccttgtctggagcaccccactgaaggggcagtggctcccgtggggaaggctgggagggcaagtcctgcacacctgagagcccagggagcccggctttcttgtcaaccacaggtgaggacaaggacaggaacacaaccaaatcagttgcacaactgtgtcttttagggtctgtctcatggcacattctggtgccaagtactgcatctatcagagtacagtcaggaaacagaaaacttaccacatttaagtatttaaaattgtagggcttgcacggtggctcacgcctgtgatcccagctctttgggaggctgaggcaggtggatcactggagtgcaggagttcggggccagcctgggcaacatggtgagatttcatctctac

SEQ ID NO: 13955 - protein, 143 aa, Homo sapiens
MTTREVVKAKVSLRCLCLLPMAWPECCSWAPGDELLAQAGEHPLHPPCREELGWAFSIAILRNGVPIGGMRPWDEVLHLAGHDSILIFDCHEEVLEHHDAPGEAPGWAAGSKRHGQQPSQQHCFTLGLWTLQPCTSKSLLSQT

SEQ ID NO: 13956 - DNA, 1760 bp, Homo sapiens
  CDS (200)..(1552)
agaaaaaatgatgcccaggttgggctccccggcccaccggccgaggagaggcctgcgctgcacacgcgcagaccgagcatccgcgtcaagaggcgaagagagcgcgcgctccccacgtcctgcgctcctggctgccgggcattcgtctcagccgtgactctcgccaggccggggctggcgcgcccacgtctgaagagcgatgccccgggagatcatcaccctgcagctgggccagtgcggcaaccagattgggttcgagttctggaaacagctgtgcgccgagcatggtatcagccccgagggcatcgtggaggaattcgccaccgagggcactgaccgcaaggacgtctttttctaccaggcagacgatgagcactacatcccccgggccgtgctgctggacttggaaccccgggtgatccactccatcctcaactccccctatgccaagctctacaacccagagaacatctacctgtcggaacatggaggaggagctggcaacaactgggccagcggattctcccagggtgagaaaattcatgaagacatctttgacatcatagaccgagaagcagatggaagtgacagtttggagggcttcgtgctgtgtcactccatcgctgggggtacgggttctggcctgggctcctacctcctggagcgactgaatgacaggtaccccaagaagctagtgcagacttattcagtgtttccctaccaggacgagatgagcgacgtagtggttcagccctacaattcactcctgacactcaagaggctgacgcagaacgcagattgtgtggtggtgctggacaacacagccctgaaccggattgccacagaccgcctgcacatccagaacccgtccttctcccagatcaaccagctggtgtccaccatcatgtcggccagcaccaccaccctgcgctaccccggctacatgaacaatgacctcatcggcctcatcgcctcgctcattcccaccccacggctccacttcctcatgaccggctacaccccgctcactacagaccagtcagtggccagcgtgaggaagaccacggtcctggatgtcatgaggcggctgctgcagcccaagaacgtgatggtgtccacaggccgagaccgccagaccaaccactgctacatcgccatcctcaacatcatccagggagaggtggaccccacccaggtccacaagagcctgcagaggatccgggaacggaagttggccaacttcatcccgtggggccccgccagcatccaggtggccctgtcgaggaagtctccctacctgccctcggcccaccgggtcagcgggctcatgatggccaaccacaccagcatctcctcgctctttgaaagttcctgccagcagtttgacaagctgcggaagcgggatgccttcctcgagcagttccgtaaggaggacatgttcaaggacaactttgatgagatggacaggtctagggaggttgttcaggagctcattgatgagtaccatgcggccacccagccagactacatttcctggggcacccaggagcagtgatttccctccccactactccttctccttctagatggtaaccacagcctcgaccatgcctgctccctctgacccagcttcacctcatggacaacccttcttggttcatctccagcccgtgagctggtcctgcttcctcccttccatgccctaacttttaatatgcttgttcagctctaataaagtaataaagcttggttgtcagtat

SEQ ID NO: 13957 - protein, 451 aa, Homo sapiens
MPREIITLQLGQCGNQIGFEFWKQLCAEHGISPEGIVEEFATEGTDRKDVFFYQADDEHYIPRAVLLDLEPRVIHSILNSPYAKLYNPENIYLSEHGGGAGNNWASGFSQGEKIHEDIFDIIDREADGSDSLEGFVLCHSIAGGTGSGLGSYLLERLNDRYPKKLVQTYSVFPYQDEMSDVVVQPYNSLLTLKRLTQNADCVVVLDNTALNRIATDRLHIQNPSFSQINQLVSTIMSASTTTLRYPGYMNNDLIGLIASLIPTPRLHFLMTGYTPLTTDQSVASVRKTTVLDVMRRLLQPKNVMVSTGRDRQTNHCYIAILNIIQGEVDPTQVHKSLQRIRERKLANFIPWGPASIQVALSRKSPYLPSAHRVSGLMMANHTSISSLFESSCQQFDKLRKRDAFLEQFRKEDMFKDNFDEMDRSREVVQELIDEYHAATQPDYISWGTQEQ

SEQ ID NO: 13958 - DNA, 2040 bp, Homo sapiens
agaatatgatgcaggtcatcaaaatctgagttccaaatatgttttgaacaatagaaaacatgagaaaaactacataaccttccaaaaccattactttgaattgtgacatttatttgaaaataaaacttccagatattttatttaaaggatcttatgttgtttgagtcacacttcgtcattatcagtccttcctgtcagggaaaagtgtgtttgggagaaatacaaagaaaagctttgagttgccaagatagcatttactaaatttggtcataaaaaatgttctgaaacttactttctgtatgctgttctagaggcagctcaagaattacagaaatttccttttttctacactcttaatttttctactttatgtatttctttttggctctttaaaaggcaacagattaaaaaaaattagaggaaaaacatttgttctactaatgtgtcacttgagaatcccagacaatacatagtatcattgagctaaaatgtgttgtagcctatagaacttagcacttctctcaaagagagaaggggagacccaatgagagaggcagacatggggtgaggccaatgaacactcagaaattaaaaagaatagttctaccttcttgacttatgtgtagcaactaaatcacaattagagaaagatacatgtgtgagtgtgtgtgtgtatacttgtgtgtgtgaaggtgtgcatgtgtacaaggaaaatggaaaatgcatttctacctagtgtcataatgaaactaggttttcggccaagatattttccttttgcctttgcatatctgtggcctactggacccttatattgtacctgtgtagaaaggaagcctctaagtctagttgagaggcaaagtgccttgaaggccgtgacccattaaggaaccatattgaagaaatgtaaagccaggcagtaatgaagagcatgacccattaaggaaccatattgaagaaatgtaaagccaggcagtaatgaagagcaaatgaggccagaggtgagcacggtaagtaaattagacccaagtgggcagtgaaatctgagagcaaatgagagtggtgaggaaagaggatgagaacgtaaggcacgggccacatggactctgcatctttagcgtgctgtttggccacagggaatagaaacccaacaaatagtggcctaactcctagatgcctgtttctctcaagggaatggattcagaggagccacttcaaaagctagtgcagtgcttctgcagtttcattaatgcatcaagcccgttccatctttccacttaacagagcttctctttggtcctcatagtttcaagacggaagtgaaaggactgtgggagtcaggacctcacatggaataaaccaggaaggcaggaggtgaagatgagaatggaatgcatgaatttgaagttgaggaaggtacagtaggtattcataatgataaggtctactatggtatgattatggaggtgagtgaggttggatggacaagacccttggagaagaaatcaagaaatggagaagcaggtattaaaaagatcatctacaggtacattgaaacctccaaatattaaaacagaagtggtattttaaatgaattatgactcccgcctccccatcccacattctataaccttccattgtcttcatggtgagtgtagagaaataaatgccttggtggagtcgctataacatgccatgagtcgcttgtttttcctcatgtgcggtttcctcctagcctcttctacagacctcatattgccctgtgttggagagagtgccaccctttagcctgggctgccatgctcctcggctcctgctgactgagacactctggcagaaggctcttccctcctttcttcccataggacatgctctcagctctcctcccaagtcctagcaatcagctacaagaatctgcttcattactttcatcctccttccctccactgcccggaggaccaggcaggctgctctcagctgcctgatctattattggggctcaaaatacatcaaactctcttaaaagccaaaacatttttt

SEQ ID NO: 13959 - DNA, 1890 bp, Homo sapiens
  CDS (368)..(730)
ggcctttttttttttttttttgagacagactctcactgtattgcccaagctggagtgcagtggtgcgatctcggcttctcttaactactcagagtaaaatgtgagaagaaacaatacaaagatgggatttataacacggaagcaaaatatagagatttgaaaattctcagcctaagcatgtaaataaaaaggtatttaggaaagtaaaccaagggtgtgaccaagtgactttctgatcagagtgtggctagaaagaagccaggtgttttcatcatgacaataggagaatgaacccaatggcacttcagagagcttcaaggccgctcctcccatcacaggcccacagtgcgagggccttgaaggcaggatggtttccagggaagggcgtagaacactcatggaactttggggcttgctgcccggggctgcctcaagtctctgctccccacatcccggcacagtgctccttggctgccgtagttgtggctccagtgggcccaggtgcagtttagtccctgctctggagggcaaagtggtgaacctcagcatccacatggtactgattttgcaagtgtgcagagtgcacaagatgtggaagcatggcatccttcaaagagatttctttttttttttttttgagacagactctcactgtattgcccaagctggagtgcagtggtgcgatctcggcccaccgcaacctccgccttattccattattattccattgtagcttggaagcacgtaactagtttggtttcacaggtacaggactagagagcaatttgcctcaggatgaatcacatgatttagataatacctagatgagactctgccctttaagttgactttaaagtttatgctgaaatgagttttaatactttgggggctattggagtgaaatgaatgtattttgtacatgagaaagacatgaatatagggggggtccaggggcagaatgtaacatgtcctctccaaaattcaggtgttgccaatgtgatagtattagaaggtggagcctggccgggcgcggtggctcatgcctgtaatcctagcactttgggaggccgaggtgggcggatcacgaggtcaggaaatcgagaccatcctggctaacagggtgaaaccccgtctctactaaaaaactacaaaaaaatagccgggcgtggtggcaggtgcctgtagtcccagctactcaggaggctgaggcaggagaatggcaggaacctgggaggcggagcttgcagtgagctgagattgtgccctccagcctgggcgacagagcaacactctgtctccagaaaaaaaaaaaaaaaaagaaggtggagcctttaagaggtgatgaggggctcctccctttgtgaatgggattacagccttcataaaagaggctcaatgcagacttccttgtcctcccttttgcacgtgaggacacacgtcctttctggaggatgcagcatcaaggcacccttggaagaggacatttgaacctgatgatgccttgatcttggacttcataaactacagaactgtgatacatttctgttctttataaatcaggtattttgttatagcagcacaaacagactaagaaagttgcctatgggtgccaggcgcggtggctcacgcctgtaatcccagcactttgggagggtgaggcaggtggatcatgaggtcaggagttcgagaccagtctggccaacatagtgaaaccctgtctatactaaaaatacaccaaaaattagccaggcatggtggtgtgcgcctctaatcctagctactcgggaggctgaggcaggaaaatcgcgtgaacccaggaggcggaggttgcagtaaaccgagatcacaccacagcactccagcctgggcaacagaatgagattgtgtctc

SEQ ID NO: 13960 - protein, 121 aa, Homo sapiens [sequence omitted]

SEQ ID NO: 13961 - DNA, 2069 bp, Homo sapiens
ggatgaaatgggtagaggtatggaaaacctttgatgtctggatggctgtggagttatccatgatatgaaatagcagctgagctgttgcctgttatgaaaggtaaaagttacctgtcgaatttcaaatgatagatccaactccaggagaactgactcactagatcacctggctacttttggccatgctggttacagtgaggagaaaaaagaagtgtagcccaggtaataccttcagtttttgttctctcctcccggaagaaagaaaaaaggcccaaaaattcccaaagatgagctttggttgggccaaaaatgttaaacatttatggcactctttcctcacaagtaggaggaaaaaaggttgaatcagttctcagggctggagcaaagtaaaaaagggcagaggacatccttcagttgttagcctacctgcacgccctcaaccccattccagatagggtctcctccgcaactgtaatattaaaccttttgctaaatttactgcaaggggtcgaatacatctgcagtgaggaaggtgccgggccagggtggggtagcgggggcagttaatggccttgtattttgcagttattacatctatggatatacgatagaagttgatgtaaaatgttttatgcttgtaatgtcgcagatgcgagggggattagctcagtaaggcaatgctgcaaagaagttgttagtgggacgcaacttccttgctttttgctgctgtaggatagacggaaatttaaatcgtttgttgaaagcaaaatatgtctcacagccgatgatatttactatgatttttgcccattggagcctctggaaaaaggaagacatacacttctaaacatttttaaagcagtttttaattgcaagtgagctcatataaaatcagatgtctgaccctagaggctggtgattttctagcctgatgtgcataattttgagtgggtcttagaaagcacttaggaaagctttgctttttgcttggccttggaaacatgtctggcccttcagcatctcagctttactgctgccaaagaaaagtctctggcatattttggaatcctgaattcatagatcctagttgcttggacttgacgcttgagctaaaacttgacattgcctcctacacactatttcagtctcagcacaagctgtgttaaactgaaagagatacaggctcagggaagacgacttctatttggggatcaaggcagattcaggatacccctctgtggggctcttcactataaaaaatggatgttgatggaactacgtggattatcacaggtgtccatgggaaccggcttctctggtgggaccatacgaagtcgaactgctgatctgttctgtatttctgatacagggactgattacattcctaacttgtgattattgacaaaagctacatgttgaggggaaagcatatcactaggactgtgacccctgtgcctacccatcttactctctacctcttaggaaagtttcactgtgtttacttgggacttctggactagctgccgtttgcaacagtggacttaccagtttgccactactctgctacctttctactggtgcacacaccttagtaaggcagtttgattactaaatgcagctgtctccagaaatggaatgatgctataggccacttactaaatgaatgatcaggaggaaagcagtgagtggctctctaaaaccattttgaaatattttgaaaattcaggatttaattctgaccagttctgaaaatggcatgtctttctggttacattatataaaaatattttctggccaggtgcggtggctcatgcctgtaatcccaacgctttaggaggcccaggcaggcagatcacgaggtcaagagatcgagaccatcctggccaacaggatgtacaacaggatgtactaaaaatacagaaattagccgggcgtggtggcgcggacctgtagtcccagctactcgggaggctgaggcaggagaattccttgaatacaggagggggaggttgcagggagccgagattgtgccactgcactccagcctagcaacagagtgagactgtctc

SEQ ID NO: 13962 - DNA, 2067 bp, Homo sapiens
  CDS (200)..(1456)
ttcaaattcacttattctagtagtttgtagattcctttgaattttttatgtctgtaatcatagaagcattctatgcttgtgcagataaagcatttttcagtgttaaaagttttattgacttctttttctggagtttccatcttctcattttgtcttctccttttggtatcaagtgctaagaatagcaccacttggaaatatgacaggactgcagccagtgtggataattatcattttcaactacagatctctctcagccttgtctgcttatcacactggcttgatcgcgcccatgaagatccgcacagaggcccctgggaaccttcgtttatacagtgggagccccactcgcagcgagaaagagcaggtctccatcagctccttctactacaaggagcggaaatcaagacgatggaaaagtaagcgtgagggatcagactctggcaatcgacagatcaaggctgctgggaaagtcatcatccaggatattgcttgcctcctgcctgttcacaaatcgctgggagagctgtacatattgaatgtgaatgatattcaggaaacatgtcagaagaatgccgcctctgccttgctcgttggaagaaaggatcttgtccaggtttggtcgctggctacggtagctacagatctttgccttggtccgaaatctgacccagatttggaaacaccctgggctcgacatccatttgggcggcagctgctggagtccctgttggctcactattgccggctccgggatgttcagacactggcgatgctctgtagcgtgtttgaagcccagtctcggcctcaggggctaccaaacccctttgggccttttcctaaccgttcttctaatcttgtggtgtcccatagtcgatatcctagctttacctcttctggttcctgctccagtatgtcagacccagggctcaacactggcggctggaacatagcgggaagagaggcagagcacttgtcctccccttggggagaatcctcaccagaagagctccgctttgggagtctgacctacagtgatccccgtgagcgagaacgcgaccagcatgataaaaataaaaggctcctggaccccgccaatacccagcaatttgatgactttaagaaatgctatggggaaatcctctaccgttggggtctgagagagaagcgagctgaagtgttgaagtttgtctcctgtcctcctgaccctcacaaagggatcgagttcggcgtgtactgcagccactgccggagtgaggtccgtggcacgcagtgtgccatctgcaaaggcttcacgttccagtgtgccatctgtcacgtggctgtgcggggatcgtccaatttctgcctgacctgtgggcacggtggccacaccagccacatgatggagtggtttcggacccaggaggtgtgtcccaccgggtgtgggtgccactgcctgcttgaaagcactttctgaacctacagaagttgggtattgtctgaaatcccagaggacccataagtgccggtgacaagctgtctgtcaggggagaggctccagaacctgggttcgtccccagtgagaccggaggatgatcccccaaggactgcgcagcatcagctcttggtgggcctctgccttctcttctgtttggccacctggtgtggatgtcactgtgtgaagataaggacagaagtgcagagctgcgctttgtgtgttgtctatgtcggctgagctaccaaggtggaagttttcatggagaaaagcacctggctccagggccagtgttacagtgttaccctgtaaggtgttagccttaaaccaccgagcagcgttctcttgatgccagtgcagagaccagagtcagatgcccgaggacagtgggtaggaatttcatcaacaaatggacctatggcatcatggctttagaagctggtacatttactgagctgatggacagtggccttctaaaatatgacacttaaattgtaaatatgcactgtacttaaggattcttaagatgtatttttttgttatttctcctccagctgctatcccttggctaataaaattctagtaatttg

SEQ ID NO: 13963 - protein, 419 aa, Homo sapiens
MTGLQPVWIIIIFNYRSLSALSAYHTGLIAPMKIRTEAPGNLRLYSGSPTRSEKEQVSISSFYYKERKSRRWKSKREGSDSGNRQIKAAGKVIIQDIACLLPVHKSLGELYILNVNDIQETCQKNAASALLVGRKDLVQVWSLATVATDLCLGPKSDPDLETPWARHPFGRQLLESLLAHYCRLRDVQTLAMLCSVFEAQSRPQGLPNPFGPFPNRSSNLVVSHSRYPSFTSSGSCSSMSDPGLNTGGWNIAGREAEHLSSPWGESSPEELRFGSLTYSDPRERERDQHDKNKRLLDPANTQQFDDFKKCYGEILYRWGLREKRAEVLKFVSCPPDPHKGIEFGVYCSHCRSEVRGTQCAICKGFTFQCAICHVAVRGSSNFCLTCGHGGHTSHMMEWFRTQEVCPTGCGCHCLLESTF

SEQ ID NO: 13964 - DNA, 1910 bp, Homo sapiens
aatgtatagtaaatttggtattaaaattgtctcaattatttgaaatttccatttctattgtttttactctgtcatcaatttctgtctggatatgcagttacctgtagctcagaatctgactaggttatcgttaaattcaaaacccacaagaggacattatgttaacaaacctggaaaatataaatggagttttaaaagaaatatataaactaccaaaatagacttgaggaattagaaaacctgaacaaagcaataaccaaggaaagcattgaacaatattattaaacaattcgctttatgaaaggttcctgtccctgataaatattgtattaggaatgtttgcttccaaggaatgactaaagggaaaagggatttataggaaacatagagggtaatctcatagaaaacctttgcagtaagtaaggctggacttcatgtaaactgtgaagtcattaaaaagcaaatcttgttcactgtatcttttaaggtttctatggctcttgttctctgcttttctccaaatacacgttttcttagcctgtatatagttgaataatagcgacccacccgaatttacccagcatttagctccagcacttactgacatcgaattatccacagctaaatgtctcttagttcaaacgcgcaaaacacattctcattggtcaccaaatgaccagtgtgtttcctctcctcaagtgcagtgtctgcttttggtctgatgagctgtgggtggataatcagggtatgtgattgattcatagtctgtgcagaggaggttgaacctgagtgtagtttgcactggtgaatttattgacatgtctgctatagctctattgatgagtctatcctgttttcaagaatgaccgtttccaaaatatgtatattggtattgagcacaaaaaaggctaacagcctgaaaaagaaaactccagtttttgaacataaatggctccagtacatgagcataaatattcattgtctcatatatatgattgtataaacaaatactataagatcatattcattcaacaacctaccacaggcaaatagtatttaacccaagaatgcagggtgattcaatactgggaaatctattaatataataaaattaatatgctattgatattgatcaaaaagtcaaatataccatctgatgctggaaaagcagctgataaaatttaacaattcctgatacgatatttcgtacacttggtttttgtacttttttgctatttccagtaaactgaacattttttcatttttataaccagacaatatatcaaagatgtttaaaacctcttaatgcagataataaatatttttatattccaagttcctaattcacgtaacgatctcttaataagtacctttaatgaaacattccattaaagtggtctggtttttgagaattattaagaaacagaatagagtttttctttgtcccacaggagaccttgtttcaggagtgtaccttttctgatgttcaatgtgaaggatcggcagtgccttttaggaatgaataattgcttttcttcagcaggtgcctttcaaaattgttctcttcacttactctaggaattgcctgtggctgtctgaactctgactcccttctctaagctgagtcaatgctctaatcatgacctttgtgcagctctcactgatggctgatcctccacctggatgttctatttcagactcagtatgttcctccctaagcctatttcaccctctgttcaaaacaatttacagcagggcatggtggctcatgcctgtaatatgagtactttgggaggctgagacaggaggatcatttgaggccaggagcttgaaaccagactgggcaacatagtgagaccctgtgtctaccaaaaaccttaaagcctgggtaacagagagagactctgtct

SEQ ID NO: 13965 - DNA, 1684 bp, Homo sapiens
tattacaatgatgcttctgtcctaagaagcttgagacaccgtcatctttgttactactatgactgtttatgttagtgcctcaccttttggtttccttgtgtgcccaaagctgctctccagagaacgtcatctcagtttcctgatcacaagcaggcttttccctgagatagatccaggcattgaatgcccagagcacatttagtatgtgcacgaatcctctagcttcctctcgcatttgtaaaagaatctgattcaccaggatgtttttggttcttttatgtaattttccatttcctgattgtggcaggtttttttttccattttctattcatctgtaactgctttggctcagccctttgtctccctactttctgccctgcagctaacttcatgagaaagtcccgtgttccctgggtctggaaacttgtcttgtcccaggagacatactctagttttcaagagacgtgaaagagcttcagcaacctcagaatgttctggtggcagcatcaaaatcatgaccatgcatgaataaggggtattgtcatgtgtgtgctgatagagcccggggaccactgaattctagccccatctctgaaatatgtgcccaccagggcagagcattttcttttaagttccgcccagcttctctgcaaagtgggccactttagttctagatttcagagatctctgtataaaccagattacgattttagggtcttgaaggagaaaaaaaaaaatgtcataaatcttattaatactaatggcttttgttttaccagcaagaaataagtaaattgctctcattgggataagataaaccttttaataaccatttcttataggcactgagtagtttgtaggtgggcatcgaatttccaatgtggaaattatgctgaaaaaactgtctcccagcaggggtatttattttcttttctaagccccacaacatcatcaaatgacaagagtcagcattctcatatgcatgtgtgtcctttgtatgaacgttatctgcccagtagtgcccagaaatcaaatgaatataaactaagactttgttttcgatgtgctttttacttttggcatttataaactctctgagtcatccctgggagtggaggacacagcggtgggaccagtacttatgtgaatatacagtcataggttttattgtcttgctgtctcttaaaaaaaaaaaaaaaggaagttctacaagtctcatggaaatactggaattggagatacatatttaacatgctaactttattagatcatgatttctacctaatttggttgtgtttcagtaaactacaatccccagtcatgtgacaaacacctgtttttaatagaatccatcatcttcagagaaattggttgtattcatgagctaaaacatgaatatatgggctgggtgcagtggctcacgcctgtaatcccagcactttgggaggccaaggcgggcagatcacctgaggtcgggagttcgagaccagcctgaccaacatggaaaaatcccatctctactacaaatacgaaattagctgggtgtggtggcacgcgcccgtagtcccagctactcgggaggctgaggcaggagaatcgcttgaacccaggaggcggaggttgcagtgagccgagatcacgccattgcactccagcctgggcaagaggagtgaaactccgtctc

SEQ ID NO: 13966 - DNA, 2179 bp, Homo sapiens
ggaaaaacatgcagaacctcttcagccagtggctcccagggagtggcgggacagtaaagccccagaaacgggtgagcccaagactctccccacctaggacagttttctgactttggcatagggaggggaacttaaaaagaggcccatcatcctgcaggtcgagatggacaccagagtccagggaggctaaggtggctggaattcgcatcggaggatgaaggagaggaaggagctaaacagagagaagggccagaacctgcccaggggcgcctggagtctagccgtgttgcagtcggcccgtggaaacttactcctgaggctgggaggctctaaactgaacagctcccaaagatcaggtggggctggaaatcactgaagctgccaccagccaagtaacaggccccactgagtattcggggcgcccagggcattccccgaagggccatgccttaggagtggggctggactcggccaagggtaaagacgctgtcagactcgtcggaaaagtgcttcaagaacaagcttccaaaggtgggaaccagccgggcgcggtggctcacgcctggattcccagcactttgggaggccgaggcaggcagatcgcctccagagcagcctggccaacatggggaaaacccgtctctactaaaaatagaaaaacttagccgggcgcggtagcacacgcctgcggtcccagctgctcgggaggctgaggcgggagaatcgctcgaacccgggaggcggagcttgcagcgagccgagaccgcgccagtgcactccggcctgggcgacagagcgagactccgtctaaaaaatatatataaccgtcaccgggagaaaaaggtgatttaaacaggcctagagagttcgatcgggagcggggagcggggagcgggtcccagagagccctgggcagccccaccgccgctgtggcctagttgccaccacagcccgggaggagcccaggcaccgtcacccccgccgtttggggaacaaatggttcagggtaagcaacagatacggtttcatcaacaggaacgtcaccaaggaagatgtgtgttcatcagactgccgtgaaggagaaccccggggaggaccctggcggcgggggagctgcggaggccgcggagtccgatgttgagggagaaaagggcgaggcggcggcaagtgttccagggcctggtggggcccaggtcaaggcagtaaacctgcggccaccgtaaccactgcagacgcgggacctccccgccgtcaccggcagaatcaccagaatcctccgtggggaacggaaggagggatgagacagcgctgccgcgggccaggccccaccacgcgggccccaccgcagagtcccactttcctccatggaggccgcagttctccagcctccggggcggccgggagcagcgatgcgggggtgacagcgcggggagcggggacaccagcggggcagcgagtgtaccggggacgcagaccacgattccgcaggacccacctcacccaagacggcctggagaggacagcgaggaagaggataaagacaatccgggagatgagacccaaggtcaccagccacctcagcaccggggccgccgcaacttcgattaccgacgcggtcgcacagaaaaccctaaaccacaagatggcaaagacacagaagcagctgatccaccagctgagaattcctcgctccaggctgggcaaatgcggctgctacctctaccatcaccccgtttagtcatcaaacaagaactaggaaattccagcgataagaaatgaacgaaaattggagctgaagaccctaagtgcttgcttttcgtccactgaccagataactagaactagctgcattatctgtggggcatggggtttccaattatttttacctaaagacgtctctttttggtaataacaaagtgtttttttaaaaagcctggtttttctcaatacgcctttaaaggttttaaaattatttcatatctgctcaagttgagatttttaagaacttcatttttaatttgtcataaaagtttacaacttgattttttcaaaaaagtaacaaactgcaagcacctgttaataaaagtcttaaataaaaacgaacaggcctagcaatgaaaggatggaatcagcacacgccggtgttgaaaacggctttgacacataggctcaatgtgct

SEQ ID NO: 13967 - DNA, 2007 bp, Homo sapiens
  CDS (265)..(1713)
gcggccgccctggcttccttctacctgtgcggccctcaacgtctccttggtgcgggacccgcttcactttcggctcccggagtctccctctactgctcagacctctggacctgacaggagacgcctacttggctctgacgcggcgccccagcccggctgtgtccccggcgccccggaccaccctccctgccggctttgggtgcgttgtggggtcccgaggattcgcgagatttgttgaaagacattcaagattacgaagtttagatgaccaaaatggatatccgaggtgctgtggatgctgctgtccccaccaatattattgctgccaaggctgcagaagttcgtgcaaacaaagtcaactggcaatcctatcttcagggacagatgatttctgctgaagattgtgagtttattcagaggtttgaaatgaaacgaagccctgaagagaagcaagagatgcttcaaactgaaggcagccagtgtgctaaaacatttataaatctgatgactcatatctgcaaagaacagaccgttcagtatatactaactatggtggatgatatgctgcaggaaaatcatcagcgtgttagcattttctttgactatgcaagatgtagcaagaacactgcgtggccctactttctgccaatgttgaatcgccaggatcccttcactgttcatatggcagcaagaattattgccaagttagcagcttggggaaaagaactgatggaaggcagtgacttaaattactatttcaattggataaaaactcagctgagttcacagaaactgcgtggtagcggtgttgctgttgaaacaggaacagtctcttcaagtgatagttcgcagtatgtgcagtgcgtggccgggtgtttgcagctgatgctccgggtcaatgagtaccgctttgcttgggtggaagcagatggggtaaattgcataatgggagtgttgagtaacaagtgtggctttcagctccagtatcaaatgattttttcaatatggctcctggcattcagtcctcaaatgtgtgaacacctgcggcgctataatatcattccagttctgtctgatatccttcaggagtctgtcaaagagaaagtaacaagaatcattcttgcagcatttcgtaactttttagaaaaatcaactgaaagagaaactcgccaagaatatgccctggctatgattcagtgcaaagttctgaaacagttggagaacttggaacagcagaagtacgatgatgaagatatcagcgaagatatcaaatttcttttggaaaaacttggagagagtgtccaggaccttagttcatttgatgaatacagttcagaacttaaatctggaaggttggaatggagtcctgtgcacaaatctgagaaattttggagagagaatgctgtgaggttaaatgagaagaattatgaactcttgaaaatcttgacaaaacttttggaagtgtcagatgatccccaagtcttagctgttgctgctcacgatgttggagaatatgtgcggcattatccacgaggcaaacgggtcatcgagcagctcggtgggaagcagctggtcatgaaccacatgcatcatgaagaccagcaggtccgctataatgctctgctggccgtgcagaagctcatggtgcacaactgggaataccttggcaagcagctccagtccgagcagccccagaccgctgccgcccgaagctaagcctgcctctggccttcccctccgcctcaatgcagaaccagtagtgggagcactgtgtttagagttaagagtgaacactgtttgattttacttggaatttcctctgttatatagcttttcccaatgctaatttccaaacaacaacaacaaaataacatgtttgcctgttaagttgtataaaagtaggtgattctgtatttaaagaaaatattactgttacatatactgcttgcaatttctgtatttattgttctctggaaataaatatagttattaaaggattctcactcc

SEQ ID NO: 13968 - protein, 483 aa, Homo sapiens
MTKMDIRGAVDAAVPTNIIAAKAAEVRANKVNWQSYLQGQMISAEDCEFIQRFEMKRSPEEKQEMLQTEGSQCAKTFINLMTHICKEQTVQYILTMVDDMLQENHQRVSIFFDYARCSKNTAWPYFLPMLNRQDPFTVHMAARIIAKLAAWGKELMEGSDLNYYFNWIKTQLSSQKLRGSGVAVETGTVSSSDSSQYVQCVAGCLQLMLRVNEYRFAWVEADGVNCIMGVLSNKCGFQLQYQMIFSIWLLAFSPQMCEHLRRYNIIPVLSDILQESVKEKVTRIILAAFRNFLEKSTERETRQEYALAMIQCKVLKQLENLEQQKYDDEDISEDIKFLLEKLGESVQDLSSFDEYSSELKSGRLEWSPVHKSEKFWRENAVRLNEKNYELLKILTKLLEVSDDPQVLAVAAHDVGEYVRHYPRGKRVIEQLGGKQLVMNHMHHEDQQVRYNALLAVQKLMVHNWEYLGKQLQSEQPQTAAARS

SEQ ID NO: 13969 - DNA, 2620 bp, Homo sapiens
ttttcatgcttccatagaatcatccctgacctcaggaaaaaatacaaaaatggaacaaacaaaacagaatagtaaaacctgaagtaagaaaaaaagaaatgaatttgacattgtacagatcaggagaaagaaagttcattaacagtttcaagatccctgcgttttcacccagcaggaaacaaattaccatgagttaaggtggggaaattactggcaattcattgccttcttttaaagactttaaaaaaaaatgagtaaataattttagactattaccccctttccatgagagatacacagctagttaaactgccatgcatattaattttttgttttcattttattccacctaccaactacacagtgtctgctttccaaaattagtttgaaagccaatgacctgtgtttgaactgggtgaaatagcatagcagttcacacctggaataaaagaatgattgtgtgtgagtctgttaatggctgtgtagagctatatctctatatggagctatataaaaatatattttatacatgccagattcatttagacttgaattgaccctgtggtaaagcagcaggaataaaatatttttttgataaagcactcactcaaatagagaaatgagctcttgcagttaccatttaatctgtgacttctttttgagatgcagaaaaactccattataaagtgctcagttcatccagggacacagacacactgtgggttataacacaccctcatctgcatggtgaggtacatgagtcagctgctcttctctcaggagggtggctttaaagctccacagtcatgcatgctaccaattccagattgtccaaacctgtaggttagcaaggacacaggtgagccataggtatgacatgttcataaaaagaaaaatatattttaatacaaaacttgtcaggggagtggagagtgtcaaattgaggacaggagagacctagattcaatgccatagttcttggctaatctctgagaagcttgttagtcaccctctttctccttcccttactctcctgtatcttcccttacatactgcatagtcccttgtaatttacaagacataaaatacttcctttgttcatctgtatactgaatgtaagaatgaacaaaaggtcatcataaggacagcctgtgagtttatgcactgcatactgcaaatgacccactccagcaatgggaagacacccctaacattgcttctctccttataacgaaaatattattcatcatcagctttaaaatggatcttctcactctgtgcagtctccgtggtaacgtcccataagcccagggttttaagacctttctcctgtgctctaagcctacatatctaactgcctaatggcctttccacttgaatgacacatcattcagtttcagtgtcctaaactgaagtttcaactccaagtctgtttttttctcttgtagtcttcatgtcagtcaatcagtcttttatcctaaccagaaatatgtgagttctcatggattcctccctctcactcacttttcagttctataatcacccagttcctacattgtttgcatcttaaatatctcttctagtcctcccttctcctttatacccactgccactgccacaatgttagctccttcagatctcatattttctcacttttattgctatagacataccccccgcagttatcctacctctaggcaaatcccttccaaaatgcagctgccagtgtgatctttgtaaaatgcttttatgataaagttcaaactcattagcaaagcacacaaagacctttgtgatgtggtattgctgaattaaactactggcagccctagaaaggtaaagtgtatttgatgcttctgtgctgttcccttagcccagaaagcccttccagtttctgtttagtaaagtcctattcatctttcactactcaatgagtcataagtaatcccattaggaaagcctgtgtgatctacctcctccctaatttgccaccttgagtttgcttcaccccttcataatactcagtcaatcataatgtcttataatccatcatagcacctcacacaatgaactccaatgtctggtttgttgggatgtccgccttactacattgtaagcttcttaagggtagaaaccagttctgataggcttagggcagtgaccaccaacagaaaaagtacttggtaaatgtctaacacaatctgttttactttttccagagcacgaggcatgcatgaaagagattaatttactccacatgggaagttactacccaggcttaccaaaaggtcaggtttatataaagtggcgttcctttttttcccccttagtaagacattaaaaaaagaaaccacaattgaaaagccaagagctatctgtgatacggaatatgaacacagaatcagattctcatagcagctaagctgttccccaggcagtggttctcaaggtgtgcttccaagaacagcagcagcagcggcatcacacatgcaaattactggactctgccccagatccacagaattggagactggggatggggcttagcattctgttttaacaagtcctccagatgattctgttgtgtatctagcttgagaatcactgccctggagaatgg

SEQ ID NO: 13970 - DNA, 1711 bp, Homo sapiens
aatgtgaatggtagagatggaaagagcaggcaaagataagaacctggtggagaatgtagaagtagaattgagagagagctagaaggagcaatgttaggattgacattgtcactccggtttctctgagaccacgtttgacattgttgtattcacataataaccatctgtttacctaagctactttgagtgaattctattcctgtaaccaaaaaaagtcttcatgagaacaccccattttacaatataatcctgtgtgcataactatgacttgagatctatttctacactgaaatctgcaatatgagattgttctaaggaaagcctctaaataaccaaaaagactagacaaccttcagtattagggtttaataaaaatagttagcattctgatatgggaaatgtattccagatggaatgttattaaggcttatcagtctagagtaaacatggatgtgtacaccaaattcttcagtatcagaaccagatggcactcaaaaaggtttaatttcattcaaataagcaatgccactttaccaactagaaaggggataaatgaaactcattacctcagtgtatggcttaggactcagataaatgcatgtgagagagatccttaataggtgattgagataaattagggaaatttaagaaatcttcttatacctttaagggagactagtgagaaagattttgctgtctaacaaaacattttcttgatgttagtattcgattccacaataagcggtatcttttattctagtgttctctgtgggtagtaggtatgaatttgccctgtgactctcaggtgtcttgttacattcttcttatgaatcagattattttctcaagagtctggagatcttatgtcatcctgaaaatgtagggaacggtctctttagcttatcagagttagaattgaaatgcatattttccaaattcatatggaccatatcaagttgggagcctgtttagtgcccaatctgaccttggaacactttgccccactatgtgactttaaataagcttcttaacttctcagggtcttggtgctaaggtcagtctttctgaattcatcaaaggttttcaaagatcctctcgccttttgagattctgcatggtagtaaaacccacttcctcactatggaacccacccgtctttctgtgtcagacaattttcttctgcttatggttggggccactcctcacctttaactaatgaattccttttctgctttgtgatgagctagtcttttctgcccagattgcactgaaagataggagctgctgcttcgttgtaaggagagctcaacctgttcacaaagatatctacctccctacaaattttttttagaacaaatattgcttgaatacatttaaggcaaaaataaaccaataaaaatcagccttagatttgatagctgggttggaattgaacctttaggttttcttaccaaacaggatttatctctgcttcattaatacatagcattaatttggcatttttattctccactttaaatagaacacgggaagacaaaataattttctttcagcaacaagaaagtaaagcagtagcaggaaatctagaaaaaaaaatccttctaaataggaattaatattttgcatcctttttttgtatttttttcctcaattagagtcctagccaataaacattcaagtcaaccaaaagtattatttctgaatggaaaag

SEQ ID NO: 13971 - DNA, 2413 bp, Homo sapiens
  CDS (43)..(1218)
ttttcctaatctggtttcgtctgcttggttcatctgtgtgcgatggctccggactcggatcccttccctgaagggccgctcttaaagctgctacccttagacgctagagaccggggcacccagcgctgccgcctgggcccggccgccctccacgccctgggcgcgcgcttgggctcggcagtgaagatctcgctacccgacggcggctcctgcctctgcactgcctggcctcggcgggacggagcggacggctttgtgcagctggacccgctgtgcgcgagccccggggcggcggtcggggcgtcgagatcccggaggagtctcagcctgaatcgcctcctcctagtgccctgtccgcccctgcggcgcgtcgccgtgtggccggtgttgcgagagcgggcaggcgcgcccggtgcccggaatacagccgcggtgctggaggcggcacaggagctgctgagaaaccgaccgatctccctgggccacgtggtggtcgctccgccaggcgctcctggcctggtggctgccttgcacatcgtcggcgggacgcccagtcccgatcccgctgggctggtcacccctcgtacccgcgtcagccttggcggggagcctccgtcggaagcccagccgcagcccgaggtgcccctgggaggtctttcggaggcggccgactcgctgcgggagctcctccgcctcccgctccgctacccgcgcgccctgaccgcgctgggcttagcggtgcctcgcggggtgctcctggcggggccccccggagtgggcaagacccagctggtgcaggccgtggcgcgcggggcgggcgcggagctgctggcagtcagcgccccggcgctgcagggttcccggcctggggagaccgaggagaacgtgcggcgggtcttccagcgcgcccgggaactggccagccgcggacccagcctcctcttcctggacgagatggacgccttgtgtccccagcggggcagtcgagcacccgagagccgcgtagtggcccaggtgttgacgctgctggacggcgccagtggggaccgcgaggtcgtggttgtgggagccactaaccggccggacgctctagacccagcgctgcgtagacccgggagatttgaccgagaggtgaatgggcttggcgggtttgcccactgtcggtggaacctcggccgcttctggcgccatttggctgccccggaggcgtttgcctcttaggtttgagcatcggtgaggttggagtggggctctttgcaatgcagagaacacgttctctgccgatatatgatctgtgagtcaggacctgtatttccccagagtcaaattgtcaggacctgtgagtcaggatctgagagtcaggacctgtttccccagagtctaattgttttgggaagcgaggtgtccattacagattaattttgttgtgcaggtcctataatcagtaatgttaattcttaagagaattttggtcacctacaagcgtgttaaactcattttttggaatgagaatttaaagaaggatagcctcaagaagtaagtgtgttgaaataaaaagggagaaggtggggaagaactaaatggaagcaggcattaactcttctggatttattcattccttgtcataacaccagcatcctattccacaattgaggaggtacccacaactgctccctgagttgtcagggaggttgaatattcagagctgtcctattttaagctttggtcctaaattgacttgaattctaaagaacagtttgaaatttagtgactgatatttctattttgtgataggattcaaaagagaaatgataattacacacttttggctcagttagttcaggacttgagtggatttcttccttgcactatctagtacctgtgtccttaagggcagggacctagctatctatacctggcttctagaactttgtgtgttcttaaaaataacaaaaacttgttaaatgacatagaattttcattgtgcaactttctagccagtgttactcctctggaatattaggattttcgtatattcagaatctaaagtatacgtaaagtgcacggtactagttccaaagtggttcactaaattgtacatgtttgtcaggataaaaaacatattattattttggccgggcgcggtggctcacgcctgcaatctcaatactttgggaggctgaggtgggtggatcacctgaggtcaggagttcgagaccagcctggccaagatggtgaaaccccgtctctgctaaaaatacaaaaaataagccgggcatggtggcacatgcctgtagttcctactctggaggctgaggcaccagaatcacttgaaccaggaggtggaggttgcagtgagctgagatggtgcccgctgcactccagactgggcagcagagtgaaactgtgtctc

SEQ ID NO: 13972 - protein, 392 aa, Homo sapiens [sequence omitted]

SEQ ID NO: 13973 - DNA, 1838 bp, Homo sapiens
  CDS (106)..(1089)
gatgagcaagtggtggggacgcccctgctggtgaaatctggcgtggagtatacacggcttgcagtggagacagcccagggccttgatgggcacagccatcttgtcatgtacctgggaaccaccacagggtcgctccacaaggctgtggtaagtggggacagcagtgctcatctggtggaagagattcagctgttccctgaccctgaacctgttcgcaacctgcagctggcccccacccagggtgcagtgtttgtaggcttctcaggaggtgtctggagggtgccccgagccaactgtagtgtctatgagagctgtgtggactgtgtccttgcccgggacccccactgtgcctgggaccctgagtcccgaacctgttgcctcctgtctgcccccaacctgaactcctggaagcaggacatggagcgggggaacccagagtgggcatgtgccagtggccccatgagcaggagccttcggcctcagagccgcccgcaaatcattaaagaagtcctggctgtccctaactccatcctggagctcccctgcccccacctgtcagccttggcctcttattattggagtcatggcccagcagcagtcccagaagcctcttccactgtctacaatggctccctcttgctgatagtgcaggatggagttgggggtctctaccagtgctgggcaactgagaatggcttttcataccctgtgatctcctactgggtggacagccaggaccagaccctggccctggatcctgaactggcaggcatcccccgggagcatgtgaaggtcccgttgaccagggtcagtggtggggccgccctggctgcccagcagtcctactggccccactttgtcactgtcactgtcctctttgccttagtgctttcaggagccctcatcatcctcgtggcctccccattgagagcactccgggctcggggcaaggttcagggctgtgagaccctgcgccctggggagaaggccccgttaagcagagagcaacacctccagtctcccaaggaatgcaggacctctgccagtgatgtggacgctgacaacaactgcctaggcactgaggtagcttaaactctaggcacaggccggggctgcggtgcaggcacctggccatgctggctgggcggcccaagcacagccctgactaggatgacagcagcacaaaagaccacctttctcccctgagaggagcttctgctactctgcatcactgatgacactcagcagggtgatgcacagcagtctgcctcccctatgggactcccttctaccaagcacatgagctctctaacagggtgggggctacccccagacctgctcctacactgatattgaagaacctggagaggatccttcagttctggccattccagggaccctccagaaacacagtgtttcaagagaccctaaaaaacctgcctgtcccaggaccctatggtaatgaacaccaaacatctaaacaatcatatgctaacatgccactcctggaaactccactctgaagctgccgctttggacaccaacactcccttctcccagggtcatgcagggatctgctccctcctgcttcccttaccagtcgtgcaccgctgactcccaggaagtcttccctgaagtctgaccacctttcttcttgcttcagttggggcagactctgatcccttctgccctggcagaatggcaggggtaatctgagccttcttcactcctttaccctagctgaccccttcacctctccccctcccttttcctttgttttgggattcagaaaactgcttgtcagagactgtttattttttattaaaaatataaggctt

SEQ ID NO: 13974 - protein, 328 aa, Homo sapiens
MYLGTTTGSLHKAVVSGDSSAHLVEEIQLFPDPEPVRNLQLAPTQGAVFVGFSGGVWRVPRANCSVYESCVDCVLARDPHCAWDPESRTCCLLSAPNLNSWKQDMERGNPEWACASGPMSRSLRPQSRPQIIKEVLAVPNSILELPCPHLSALASYYWSHGPAAVPEASSTVYNGSLLLIVQDGVGGLYQCWATENGFSYPVISYWVDSQDQTLALDPELAGIPREHVKVPLTRVSGGAALAAQQSYWPHFVTVTVLFALVLSGALIILVASPLRALRARGKVQGCETLRPGEKAPLSREQHLQSPKECRTSASDVDADNNCLGTEVA

SEQ ID NO: 13975 - DNA, 2350 bp, Homo sapiens
cttttctctcgttaatctgttttttgtcatgggggtattggccatggaccttggaatgggtgaggaaaaggtactacacctctttgccctacaaaagcaggctggcaagtaggatggcccagcacctattgcatgccaagtgtcttcactcaggcagttccatccgtgtctaaacaacctcgcacttttcacttccccactttggggatgaggaagctgagactcaaaggggcagattattcgtcttagatcactcagctggcaaatggaagaaatagtgtttgaaaccacaatctgttgcagcctcccagatgggtacctgcccaccagaaggtcttatgcctagtgttccattattggaatgctaagcaggtgggagttatttatatcctgcggctcaaggtcatcaccaaggcctgatttttcacacacgtctgcaattcaaattgtaacctctgggccgggcacagtgactcctgcctgtaatcccagcactttagaaggctgaggcaggtggatcatttgaggtcaggagtttgagaccagcctggtcaacatggtgaaaccctgtccctactaaaaatacagaaattagctgggcatggcagcctgtaatcccagctacttgggaggctgaggtgggagaatcacttgagcctggcaggcggaggttgcagtgagctgagaccacgccactgccctcctgtgtgggcatcagagtgagaccctgcctaaaaaaaaaaaaaaaaagtaacctcttaagctctctccttagcttctgggaaaaatgagtaggggaactcattcacactagaattctaatataggttaataatatcctctttcccagggggctccaagatgtggacccaagtctcacctttctctatctccctcacagccagtcatgaccatgcgatggcctcggaccgtaggaagtagtttaactgaactgtttctcttgggaatttcccctaaagctgaggcatttccttctaagtctcactggaaagttcccaagagcccacgaggtcaaggctacagtgagtgatatttgcaccacagtgctccagcttgggtgacagaacaagactctgtctcaataaatagattaataaataaataaataaataaataaataaagtactgaaatctgtattggcaggtgcatcaagacgtagaaactctccttgctcattttggttctgtgaacttccaagtacctttgagaacccccaaggaatccaactcgatttctttcctttcaacttaacccattttctaaataccgtgcatctcagctctgtgctaaggtgcttggattgtgctgaagaagtcataatctccatccttaaatggttgtacaaactaaggaaataaaagcctctcagtggatggtatttagagatgaaagaattatatacagggaggaaaaatgtagagtgaggcttcccaactgggcaagggaccctcacaggctgttacttgggtcccccagtgtcctctcaagttttgcctaggattggggtccccaggtgtgctgttgggggcccaggccccacaagggtagctctctgaagaggtccatttgtccctactgactctgagggcacagctgttgagatctgggtccctgggatgagcatctggggagctgcctctaggctagccttctcttggtgtactccctcagcattcctggagcctggttgggggctggccctagggagcccgcccctgcctgtgcagagttgctcctggcccaggggagagtgaatgcattgtgctcaggcctcagtaagaggcagccttggcaaccagaatcctgagggagggtgtgcctggcaggtcccctatggactcaaccagccactgtcctcatcaccaagcattagtttggacactagctgcaccctgctaccaacaagagatcaaagaatcatgtctgggacatagagtccagagacctgggctctagtcctggccctgtcactaattctcggggcaaacttggtcatatttgttacctcatatgtgccagacactgtgcaagatacttcacatacttaaggccaggcacggtagctcacgcctgtaaccccaggactttgggaggccgaagcaagtggatcacctgaggtcaggagttcaagatcagcctgaccaacatggtgaaaccccgtctctattaagaatgcaaaaattggctgggcctggtggcacgtgcctgtggacccagctactcgggaggctgaggcgggagaattgcttgaactcaggaggtggaggttgcagtgagctgagattgcaccgctgcactccagcctggatgacagagggagaacatctc

SEQ ID NO: 13976 - DNA, 2180 bp, Homo sapiens
  CDS (205)..(1887)
gcttccggcacgggatgttttcggttgtttgaccgagagagttgtaggcgcaaagctgaggaaaggagagtgtggagaggggcctggtgtggtggggcccggtgtttgggaccggagggtgttgacggctgatgagttccttgggtttgctctttcttcacctgaaaagaagactccaggaagggcagcacatgccggagaaagatgaattgcagcttgaccgcccagaggcgcggcagtgacgccgagttgggaccctgggtgatggctgcgaggtccaaggacgcggcgccgtcccaacgcgacggacttttgcccgtgaaagtggaggaagactcacccggaagttgggagcccaactatcccgcggcttcgccggaccccgaaacttctcgactgcactttaggcagctgcgttaccaggaggtggctggaccggaagaggcgctgagccggctccgagaactctgtcgtcggtggctgagacccgagctgctctccaaggagcagatcctggagctgctggtgctggagcagttcctcaccatcctgcccgaggagcttcaagcctgggtgcgagagcactgcccagagagcggggaggaggcggtggccgtggtgcgggctctgcagcgagcgctcgatggaacctcatcccaggggatggtgactttcgaggacacggctgtgtctctaacctgggaggagtgggagcgcctggacccagcacggagggacttctgcagagagagtgcgcagaaggattccgggagcacagttccgccgagtttggaaagcagagtggagaacaaagagttgattccaatgcaacaaattttagaagaagcggagccacaggggcaactacaagaagcgttccaggggaagcgccccctgttttctaagtgtggcagtacccatgaggacagggtggaaaagcagtccggagaccccttgcccctgaaacttgaaaattctcctgaagcagaaggactcaacagcatctcagatgtcaataagaatggttccatagaaggggaagactctaaaaataatgaattgcagaacagtgccaggtgttccaaccttgttctatgtcagcacatcccgaaagcagagaggcccactgacagtgaggaacacgggaacaagtgcaagcaaagtttccacatggtgacgtggcacgtgctgaaacctcacaagtctgacagtggagacagtttccatcattccagcctttttgagacccagaggcagctccatgaagaaagaccttataaatgtggtaactgtgggaagagtttcaaacaacgctctgacctctttagacaccagagaatccacacaggtgagaaaccctatggctgccaagaatgtgggaaaagcttcagccagagtgctgccctgaccaagcaccagaggacacacacaggcgagaagccgtacacctgtctgaaatgtggggagcgcttcaggcagaattcacacctaaatcgtcatcaaagtacccacagtagagacaaacattttaaatgtgaggaatgcggggaaacctgtcatatttccaacctttttagacatcagagactacataaaggggaaagaccctataagtgtgaagaatgcgagaagagcttcaaacagcgctctgacctctttaaacaccacagaatccacactggggagaagccctatggatgttccgtctgtgggaaacgcttcaatcagagtgcaaccctcattaaacaccagagaattcacactggggaaaagccttacaaatgtcttgaatgtggggaaagatttagacaaagtacacaccttatccgacaccaaagaattcatcaaaataaagtgctgtcggctgggcgtggtggctcacgcctataatcccagcactttgggaggccaaggcaggcagatcatttgagatcaggagtttgaaaccagcctggccaacatggtgaaattctgtctctactaaaaatacaaaaatgagccgggcatggtggtgcatgcctgtaagcccagctattcgggaggctgaggtaggagaatcacttgaacccaggaggcggaagttgcagtgagctgagatcatgccactgcactccagcctgggcaacagagcgagactccatctcaaaaaaagaaataaagtgctgtcattttgatatgtt

SEQ ID NO: 13977 - protein, 561 aa, Homo sapiens
MNCSLTAQRRGSDAELGPWVMAARSKDAAPSQRDGLLPVKVEEDSPGSWEPNYPAASPDPETSRLHFRQLRYQEVAGPEEALSRLRELCRRWLRPELLSKEQILELLVLEQFLTILPEELQAWVREHCPESGEEAVAVVRALQRALDGTSSQGMVTFEDTAVSLTWEEWERLDPARRDFCRESAQKDSGSTVPPSLESRVENKELIPMQQILEEAEPQGQLQEAFQGKRPLFSKCGSTHEDRVEKQSGDPLPLKLENSPEAEGLNSISDVNKNGSIEGEDSKNNELQNSARCSNLVLCQHIPKAERPTDSEEHGNKCKQSFHMVTWHVLKPHKSDSGDSFHHSSLFETQRQLHEERPYKCGNCGKSFKQRSDLFRHQRIHTGEKPYGCQECGKSFSQSAALTKHQRTHTGEKPYTCLKCGERFRQNSHLNRHQSTHSRDKHFKCEECGETCHISNLFRHQRLHKGERPYKCEECEKSFKQRSDLFKHHRIHTGEKPYGCSVCGKRFNQSATLIKHQRIHTGEKPYKCLECGERFRQSTHLIRHQRIHQNKVLSAGRGGSRL

SEQ ID NO: 13978 - DNA, 1869 bp, Homo sapiens
ctcagtgttaagaggtggcgacttgctcaggcttctaaaggacaggtgtttgggagcctcttgccggaagcctgctgtgggggccctctgtccctgctcctcgccggcccccatccccaagggtgcagcagaagccaggttttccctgtccctgtccgggctgtctctgttccttctattttgctgattttcagaaaaactagatccggcacctttgtggtgcacagtccccaccagcgggaaccagtaggtgacaggctccattcaacaggacaggcaggttagggacacccctggctggcagcagccgttcctgctcctacccagccccggttactccttctgggacctcaggcaagtgacttcgcctcccctcactggtctcccctgtgaacaggggctccagctgttcttcctgcacaggccatcgagccagtaaaatgaacttggcacccagcgcatccatacggagggtcttggagaacaacttctcttcggaccttagagtttctaaggtgattctagaattccatgccggcaagtttggcaaactgcagcttcagggaatagcccctacaagactaccctcactgcagaccaagaactgcacaccagaaacaagctcaggcatccctaggaccaccctcacgtctgagcaatgggctacaggtttgggggtccttacatccaccctcaggctcattaattcacctgcatgactcagacagtttatggtgaaaggaagcaggttaaagtcattgatgaattctagagcagagtccaggagagcccagtcacggagctcccgtgtcctcaggatgcagcacaacagaatagagctgaacagggcacctttggggtccaggtgtgtctgggagcttgaccacctggctgtcagcgtggctggccctaagtctccagtccctcgcagaggtcagaactgaggcagcaaagcccctgaaaacgctggtactccagtgccagccaggacgttctgggggccgagagctcaccctgcaggccacccccggccccggccccagcgttctcgcagtggaatagtcacgtttgtctgggcagctccttcagcgttgcctgcttcctcccttgcggcagggctgcccgtgcctatgaagcatgtaaagacccaccgtgtgcaggcgttagcccggggttggctccacctagctcttccgcaggtgtcattctccatcgttgctacatcctgaggaggctggaactcagggtttcaatacatttgccatcaccatcaacgttataaccttatcaaccgtgccaggtaggaccatattgcagtctggtggatgtcacctaaaaaggaagaccggagtcccactcagtcatagcagtttatctagtccatcaccacatcagatcagcagatgtcccccagggcgaggccactcaggtttgcaggctgccattcgaccttgtcaagttccaaaagcagaggcggccttggcgtcaccctttcaggcatctggtgtagttgagctgagacgatgccctccacgccgctcttaaggtagtactgtaatgtaggattcacgtaaaattggatttcccggccgggcgcggtggctcacgcctggaatcccagcactttgagaggccgaagtgggcggatcccctgaggttgggagttaaagaccagcctgaccgacatggagaaaccccatctctactaaaaatacaaaattagctgggtgtggtggcacatgcctataatcccagctactcaggaggctgaggcaggagaattgcttgaaccagggaggcggcggttgtggtgagctgtgattgtgccattgcactccagcctggacaacaagagcgaaactccgtcgc

SEQ ID NO: 13979 - DNA, 1715 bp, Homo sapiens
  CDS (113)..(1714)
gtgtgattggctgttgccatggatacgctttgtgtagcggctatgggcgctgtcttacaacaaagccaaggaatctcgctgctgagggttctgtgctttattatgaagaataatggacgatgatgatgcaaagctcaaagcagaaatagaagctgaattggataaactcagcatttcctccttggaaaaagaagacaatgagagtgatgcaaaatcagaaacccagagtgatgatagtgatacagattcagttgaattaccagaatcagttcttcactgtattaacatcataaagaacaggagtaaagctgttgaagagctcattcttcaggacctggaagatactgatattttaagctatagttatggagcagtttctaataatcatatgcatttaagaacaggactatcaactgaatatgaagaaagttcagagcaattaattaagatattatctgaaatagaaaaagaagaatttatgagaagtaaaaccgattgtgccactcctgattttgttcctgagcctagtcctcatgacttgcctatggatgaacatgttttaccagatgatgctgatataaattttggatactgtgaagtggaagaaaaatgtagacagtcttttgaggcttggcaagagaaacagaaggaattagaagataaagagaaacaaactctcaaagctcagagggatagagaagaaaaacaatttcaagaagaagaagaaaagcgacattgctggatgaaacaatttaaagttgaaaagaagaaattagagaacattcagaagcaagaacaggacaagatgaatgatgaactctataaagaagagaaaatttggaaagagaaatttaaacagcatgaggagtatattagaaacttgcatttacaaatggaagaagaaagaacaagatttaaagaccaacaagaaaaagaaaaaaattctttgttaaaacagcagaataatgcagctgttaaaattcaagctaaatataaagcatttgtagcctatcaaaaatatggcccaattattaaagagcaaattgaaagtaagaaaaggaaagcacaagagtggaaggaaaaggaagcaaaaatacgacaaaaggaggaagaaaatcgaaaaagattagaggaggaacaaaggataaaagaagagagaaaaaagcaaaaggaagaggaaaggaaaaggagagaaaaagaatatgaagaaaaaaagaatattgtgaaacaggaaagagagcaactaataagcaaggaaaaaataatattaagagaagatgcaagccaacagctaataataagtagtgcattaaagaagagcggatataataacaaacatttaagtcttgaagatatttcaaatgataagggtgatatagccaaaaatctagtggatgaaaattcaaagaagcaggaagatgttctcctttggctagttgaggaatcaaatatgaaagaaaatgtagatagacagactatattaaaagaatcaatacaagtaaagttaaaagaatctatatcaagccaaacaattctggcagattttaaaatggaagaaaaaaatgaaaacctagcaaaaaaacgatgttcagaagaattggtcaagcaagaaagaaaatatgaaaatacagataacaaaactgaattgggaaactctgatctaaaaggaaatctgaaagaacagtttccattgcaagaattaaagtctgatgcac

SEQ ID NO: 13980 - protein, 534 aa, Homo sapiens
MDDDDAKLKAEIEAELDKLSISSLEKEDNESDAKSETQSDDSDTDSVELPESVLHCINIIKNRSKAVEELILQDLEDTDILSYSYGAVSNNHMHLRTGLSTEYEESSEQLIKILSEIEKEEFMRSKTDCATPDFVPEPSPHDLPMDEHVLPDDADINFGYCEVEEKCRQSFEAWQEKQKELEDKEKQTLKAQRDREEKQFQEEEEKRHCWMKQFKVEKKKLENIQKQEQDKMNDELYKEEKIWKEKFKQHEEYIRNLHLQMEEERTRFKDQQEKEKNSLLKQQNNAAVKIQAKYKAFVAYQKYGPIIKEQIESKKRKAQEWKEKEAKIRQKEEENRKRLEEEQRIKEERKKQKEEERKRREKEYEEKKNIVKQEREQLISKEKIILREDASQQLIISSALKKSGYNNKHLSLEDISNDKGDIAKNLVDENSKKQEDVLLWLVEESNMKENVDRQTILKESIQVKLKESISSQTILADFKMEEKNENLAKKRCSEELVKQERKYENTDNKTELGNSDLKGNLKEQFPLQELKSDA

SEQ ID NO: 13981 - DNA, 1740 bp, Homo sapiens
actaagtggtgatgagcatgagtaacaattggaaatctcatacattgctggtagaaatacaaaatggtaaagccatttggaaaaacaataggcaatctcttataaacatactcgtccatttgacatagcaatcctatttttaggtatttatccaagagaaatgaaagcatatccatacaaacacccgaatgtgaatgctcatagtagcctaattcaaagtagccctaaactagaaacaatccaaaagtctaacaactggtgcatggataaacaaattgtggcccatccacataatggaaagctacccagcaatggaaaggaacaaacaagtgatacatgcaacaacatggatgaatctcaaaagcactgtggtcagttgaaaaaaaaaaaaggcaaacacaaaggagtacataccatatgattccacttatatgacattctagaaaaggcaaaactatagggacaggaaacatcaatggttgccagggactgtgggtgaggagaggagacttgactataaaggaacatgaggaaatttttcagggtgacagaaatgttctgtatcttgatatggtggtgtaaaagtgaggtataatttatatacagtaaaatgcacaagtcttaaatgtacaactcaattaatttttacgtatgtatacaccatgaaaccttcacccacttcaacatacagaccatttccttcaccctggaaggacccttgcaccttattgaatcaatacctagtcctccggaggtaaccattattctgatttctaccaccatagattagttttgcttgattttgaatgtcatatgaatggaatcatatacttttttgtttggcttttttttttttaatctcagcatagagtttttgagattcatccatgctgttctgcatattacaacatttttttacttttattattgctggtgatattccattctctgattatatcacaaactgttctatgtttttcttgatggatatttggattttgtcaagtttttggctattagtaattaagtggctatgaatattcttgtataagacttttggtggacatataaactaatttttcttgagcatattcctggatgtggaattgctgggtcctatagttggctttataagaaactgctggccaggtgcagtggctcacacctgtaatcccagcactttgggaggccgagatgggtggatcacttgagctcaggagtttgagaccaacccggcaaacatggtgaagccccgtctctactaataatacaaaaattagccgggcatggtggtacactcctgtaatctcagctactcgagaggctgaggcacaagaatcacttgaacccaggaggtggagtttgcattaagctgagattgcaacactacactccagcctgggtgacagagtgaaactgtgtctcaaaaacaaacaaacaaacaaaaaacgaaacaaaggccaggcgtggtggctcatgcctgtaatcccagcactttgggaggctaaggtgggcgggtcacctgaggccaggagttcgagaccagcctggacaacatggtgaaaccccatctctactaacaatacaaaaattagccaggtgtggtagcacatgcctgtaatcccagccacttgggaggctgaggcaggagagttgcttaaacccgggaggcagaggttgcagtgagctgagctcaccactgcactccagcctgggcgacagagtgagactctgtcttgg

SEQ ID NO: 13982 - DNA, 1684 bp, Homo sapiens
ttgtaatggatgaagaggcatgactcagtagatggttgatttgggaataaccacatccagtctagaagggagctgaccctcagaatttctagctatgggatagacagacctgcctaactaagagacagtttactgatagactgtggtaaattctgtatggagatatacagacaacagaaggagaacataattcctggttgggtggggaggggagggtgtgcttgtggttctcagccctggatgtgtttcggaatcacctggagataaacatatagaacctgggctccatgcctaagattctgattttcagttctgggagtataacagggccatcagaattctcttttttttttgagacagggtttcactgtcgcccaggctagagtgtagtggtggcaattatggctcattgcagcctcgacctcctgggctccagggatcctcccacctcagcctataactgggactacaggcatgcaccaccatatctggctgattttagtttttgtggagctcggatatctctgtgttgcccagaaggtggccatcagaattaacaagcttaccaggtgatcaggacctgaagccaagcactaaacataataataacagcacatactataaactggacatcttaggtattttctcttattctcataaccatccctaaatgcaatttatattatccccattttacaggcaggaacactgaggtttaagtaatttggccaaggtcacacagcacagcccatattttaattaagctctcagtctaaaggcctaagttattttgccatatcccatacagcaggaggtcagcctggaagaatcttcccagaaatttaaattaagataattaactcagatgtaaactgtaaaatctgtacataatgggtcagacaaagatatgcaagcggatttaaagagacacaaaggctccgagctagtgaaagttcgaccttaaccctacggcatcgattaacatatcaaaaggaagaatgtgtcctttggggtgggagggcgcttgggccagttagtctgatactttgtgagctgagggagggttcctggccctggcagcattgtgatctggtattaactctttcccgtggcttctggtttctcctgaccttcctggctgttctgtttccttccgtttctccacctaccccttaaatgtggatgttccttgcattccactctccccgtattcccaggatgactgcatccacttcggggcacagctgcctgtgctaaggacttccagaggcgtgcactcctgaggtcctgactcaaggcatcaaggcaatccaggggagtgggagaggtgttctcagacaggactggagttcacatcctagctgggcgtcttactggctatgggtcttagaagttacctattattgctgggtgtggtggctcacgcttgtaatcccagcactttgggaggccggggcaggcggatcacgaggtcaggagttcgagaccagcctgaccaacatggtgaaaccccgtctctactaaaaatacaaaaattagccaggcgtgatggtgggtgtttgtaatcccagctactcgggatgctgagacaggagaattgcttgaacccaggaggcggaagttgcagtgagctgagattgtgccactgcacgccagcctgggcaacaaagagcgaaactctgtc

SEQ ID NO: 13983 - DNA, 2310 bp, Homo sapiens
tatttagtaaatatttgataaactaatgataagccattatagcttataccattttccatttctcaacaattcaaataatcaccatgtactatgctttatgtcttgctttgcttttctgtaggaaaactttggaccttattgagaagaggaaaacacttaattgggcagaagtcctagtggcacccaccagagctctactgcattcagacactgttcacacactgaccattcatgtgtgttcagcatctgaacttggccttgtgacgtagagaccctgatgaaagctaatgtttctgttttcatgaaaatattcaatctagggaacaccttagaggaaaaaagacttttaggtaagattggtttggaaattgggaatgacccagcttgtgcctatatatgtgggcctgcaatcaacttctgtggtaggagtgagttgcctacctgaagggaaactttttacataggatttaaaaagatgatactaatttaaaaacaaacaacattttaaataggttcaaagctagtgaaagtaaaaataaactaattaatattaccccagtattaagaatttagtacacctacaaccatctgatcttcaacaaacctgacaaaaacaagcaatggggaaaggactccctatttaatcaatggtgctgggagaactggctagccgtatgcagaaaattgaaactgaaccctttccttacaccttcatacaaaaattagttccagatggattaaagacttaaatgtaaaacccaaaactataaaatccctagaagaaaatctaggcaatactatctgggacataggcacaggcaaagattttataatgcaaataccaaaatcacttgcaacacaagcaaaaattgacgactgggatctaattgaactaaagagcttctgcacagcaaaagaaactatcaccagagcaagtagacaacttacagaatgggagaacatttttgcaatctgtccatctgacaaaagtctaatatccagagtctacaaataacttaaacaaatttacaagaaaaaaccccattaaaaagtgggcaaaggacatgaacagacacttctcaaaagaagacatgcatatggccaacaaacctatgaaaagaagctcaacatcactgatcattagagaaatcctaatcaaaaccacaatgaaataccatctcacaccagtcagaatggcaattattaaaatgtcaaaaaaaaaaaaaataacagatgcttccgaggttgtggaggaaaaggaacacctttacactgttgctgggagtgtaaattagtttaaccattgtggaagacagtgtggcaattccccaaagatctaaaagcagaaataccatttgacccagcaataccattgctgggtatatatccaaaggaatataaatcattctattataaagatacatggatgcgtatgttcactgcagcactattcacaatagcaaatatgtggaatccatccaaatgtccatcatagactggacaaataaaatactgtacacatatatatacacaccatgaaatactatgcagccataaaaaagaacaagatcttgtcatttgcatggatatgcatggagctggaggccgttatccttagcaaactaaggcaggaacggaaaaccaaacagtgcatattctcacttataagtgggagctgaatggtgagaacacatggacacatagggggaacaacacgccactggggcctgttgaggaggggagggagagaatcaggaagaatagctaatggatgctgggcttaacatctaggtgatgggatgatctgtacagcaaaccaccacaccacacatttacctatgtaacaaacctgcacatcctgcatatgtaccccttaaaagctgaagataaaaaattgttttttagtggtttctacctgtaatctcactttgggaggctgacgcaggaggatcgcttgagcccaggagtttgagaccagcttgggcaacaaacaaagggagatcccatctctacaaaaaattaaaaattgctgggcacggcggtttacacctgtaatcccagcactttgggaggccaaggtgggaggatcgcttgagtccaggagatcaagatcagtttaggcaatatagtgagaccctgtctctacaaaaaaatttaaaaattagccaggtgtgttggtgtgtgcctgtagtcccagctacttgggaggctgaggtgggaggatcacttgagcctgagaggtcaaggttgcagtgagccatgatcatgccacttcaccccagcctgggtaacagagcgagaccctgtctc

SEQ ID NO: 13984 - DNA, 1897 bp, Homo sapiens
ggtaaacatgttgcttggaagtatgcttttccagtttcacaaaatgacaccagtggccacagaagttagtaccctttggcctctaaaaatttcgctttatgaagagaaggctactaaaagacatgtaggacttagggttcaaggtggcagactagaggagctagtgtgtactgctctcgtggagaggaaatagtgacgagtaaacatggactctctaagtggatcatctaagaaaccacgtcaggattcaggatgcatcaagggagtaatgggacatggagaacagagaaaatcgaagctgggcagctgcctgcctgggaccagcatgaagacaggagaagctcctcaacacagggaaagaattagtgagtaagagtcctcaggggatccatacttcccacagtgacctgtgcaatcctgagaatgtgaaaaaccccatgactcccttgggcctctagactgatacagagagctacccagagtttttgcagaggcaacactcaagtccgtggggacccccacaggccctggactctggaacagcctggttgaggtgccatggccctgacagaagctgcagtcatggtgctggagatggacagattgctctactccctcttgacagaaaacctgctaaacccctgtggtttaggagagctttgtgttcccccaggaagcacttcgatggtgaattgggtgactccactcatcctgctcctaactgggcaggattcaacttcaccctgctcctaacttgggcagagccccaagcagggggtggggaggacgccctccctctcagaatactgaaaagggtgagatccctgggctctcaggatgttgggggagcagggcatgtctccctctgaagggctttccagaaagggtatagtcttgtctaccagccacagtctctgccttagggagctctatagcccagaacacctaagaaagaaaatgtggacgtggtgccagtgatcagaaggggctcctccaaggcctaggagcaaacctggtgaggttgtcagctctctctcccctgaccacagagtactactgtgcgtatgccaaaatacaacagagctacatggctgagttagaggctatctgccagccaccactcttaaggagcacctactggattacagcccaaatgaaacatcaaaaacattatgccagcatacagcacctgtgaaacctaaggcaaaaatccagacataaataaagattatgtacagagccttggctctctgcaagcacccagaaatggagccaactgactatactcaacttatgtcacagttaaaggaacatcagccctcacacatgaaaaagaatcagtgcaagaaacgctggcaattccaaaaggcagagtgtctctttatgccgaaacaaacacattaacccatcagcagtagttcttaaccagattgtaatgactactggacagacagagaattcagaatctgggtagcaacaaagctcatcaagatccaggaaaaagttgaaacccaatccaaggtattcaaggaattccgtaaaacagcccaagagctaaaagacaaaatagctattttaaagaagaaatcaactgaacttctggaattgaagaatttacttcaagaatttcataatagtccaggcacagtggctcatgcttgtaatcccagcactttgggaggccaaggcaagaggatcacttaagcccatgagtttgaagtcagcctcctgttctctacaagaaattagccaggtatggtggtgcacatttgtagtcccaactacttgggaggctgaggtaagaggatcacttgagtcagggaggtcgaggctgcagtgagctgtgatcatgccactgctctctagcctgggccacagagtgagaccctgtctcagg

SEQ ID NO: 13985 - DNA, 3489 bp, Homo sapiens
gaattataagcaggattaacgtagattaaagttgacagaatctggttcttgctctgtccctttcccatggtggccagccccagctgcccagctgctgttgtctgtaagccaaagctcctgcgtgttctccttccaatagaaaacgactgtgcggaacctcatcctccccgggcccagggtgttggtgcagctgctgagggatctggtgaggtagcctatgctcatgtgccactggagatgcccggagagttccaatgcccaggccataccagcagctccctgggtgatgtccccttggacttagtttcactctgaagctgggaagcaatagcctacattttcagttaaataaaagctggaaatgatgatctcgttaggcctgcctcctgtacttcatgctttggtgctctccttcattttcctgccaggaagactttcccagtgcctctttctatatgcttgcatcccgttctcaagtctctgaccagcggttccactttgaagtccatcccacagaagtattagctcaaggctgcaaagatacaggaatgagaacgcttgctgcaacgctgctcataacagggagaccaggaaaataacccaaagggccattcacacaccaggtttttgagatgaatgacatcatgagcaactcatgagcatgagcaccaggcgtgcctcaccatcttggctccttgttgataacgtgtcagtccctaatatccagcctgactccaaggactgagatgatgagtgtgaaagtactttgtaaattgcaaatggttttgcaaacctaagggatatgatgaatcaacaatgagcaaagtcctttgagacctttcacaaataaaggcattttatatatttaaatccttggcactcacaaatttagcatttgaggttttgccaacctgtggagcaaccccatggcaatttgccatttagctgaggcatatattttcctccatccacaacctgagtatctcagacgaggatgaggagtgagtgaatgaaggagaatgttaaaatatgattacattatagagtctttaaatgctcattaaaacatatattcgttcagtatcttttatgctttcattaatgtgccctaggctattgagaaagaaagagtaagacaaaaaggtgaaaactagaaatattctatgtaatggaaaagaccataaatatactcataaaacaattagtgagcacagaaatatacaatcaggtaatctataataatgtacatgtaataatctacaacagattttttcccttattttggattctgagaagtgagcactaacatattgcaaagggatttaattgcaaatgatttgtgtaaacctggtgccatagaaaaacttctggggttgaatttaattttatcgcatttaaatagaaaaatgcccacctgagaatatgcagctgtaattacgagggagttttattggttgttactgtggcatgtgtttatttctctcccacttaacattctggatggagggagttcaaggctgctgtgtagctctgcagttgtctggttttcctgctctgccatccttagggtatggccttggtctgtcctcatccttatgggcccccagtgaagctctgatcaagacctcctaattttgaatgtcctagaacttgaatacaccccttccacttatgtcacacggccacatctaaactacatggtaggctgggaatgaattttttattctgggtaactgtgtgtccaataaaaagcccgagattttataactcaaggaaaggaagcacagctcacaattgctgccacaggtcagcctctgtctgtccatgagccagttgttcagatgggaggaaatctgaatagaggaagagacaagtcaggcaagaaagttgtgactcagggtttatctcatctgctggggagttcaaggggcagtttaatactggctgtatttttcgtttctctaagtagaagtttcatttaagttactgtggaataggctgggcgtggtggctcatggctgtaatcctagcactttgggaggctgaggtgggcggatcacttgagctcaggagttcgagaccagcctgggcaacatggcaaaactccgtctctgctaaaagtgcaaaaagttggccgggcatggtggtgtgtgcttgtagtcccagctactcagaaggccgaggtggggggattgcttgatcccgggaggcagaggttgcagtgagctgagatcatgccactgccctccaacctgggcgacagagtgaaaccccatctcgatagataaataaataataaataaattgtggaatgatcttctttgacattctgctagatatgaaggctgcttagaggcagttgtttgagaaagaaaaaagcaagccctgacctccaggaactggtgacagtggacgctatacaccactcgttcacagtgttgctcgacgctggtcaggtgctcacagctcggccatgttgtcttcctgttggccataagccgactcacagagcactgaccttggacaaggtcatggtgaaaccatggtaaatagagacaaagcaaagccacttcatatttttttctgagcacagacacaaaaaagtttcctgtaggacccataattttgattatgacagggtaaagacaagttccattttctaggatttgatttgagccaaggtcaatgaatagcttattttgtagcttaattgacaacagtaaatacttttgcagtcttaggtcccgcttgatctgtactagggagggtaatttgaaccaagagcctgattcccgggcatttctgccctaaccagatcacgggctaaggatgcaacagagcatagtttcagcagagcccccttgaaaaaaaagttatgctgaatccatgatgcaacatccatttgaaatgaggaaaaagaaggcaaagatgacatgatttattttgtgtcatacctaaataattagaagaaagcccctttttctagtagcacctataaaaatttcactgggctttggaggtctaaagggaaattctagcacatatttcagctccagttaatccaaggttaccatcatctcagttttgtgaagagatggaagaagccaactgaaacagtagcgtaggaacccagccctgccttttgctttatatgtgaccttggccacgtacctgaccttcacctttctcatatagaaaaagaaaataggcgggccgcagtggctcacgcctgtaatcgcagcactgtgggaggccaaggcagatgactcacctgaggtcaggagtttgagaccagcttgaccaacatggtgaaacctcatctctactaaaaatacaaaaattggctaggcgtggcggtgtgtgcctgtaatcccagctactagagagactaacgcaggagaatcgcttgggcccgggaggcagaggttgcagtgagccaagattgcgccgttgcactccagcctgggtgacaagagcgaaactccctct

SEQ ID NO: 13986 - DNA, 2057 bp, Homo sapiens
  CDS (157)..(600)
tagaaacagacccacactggccaccgcaccagattcaaggcatttgttactgttagggactatgatggccacatcagtttaagtgttaagtgctccaaggaggttactactgccatccaagggaccatcaccctggccaagctttccattgtccctatgcggagaggttactgggggaacaagatcggcaagtcctacaccaccccctgtatggttacaggctgctgtagctctgggctagtacaccttatccctgcccccaggaacaatggcatcatctcgactcctgtgcccaagatgctgctgctgatggccggtattgacaactgctacacctcagccaggggctgcactgccgccctggacaacttcaccaaggccaccttcaatgccatctccaggacctatagctgcctgacccccagcctctggaaagagactattcaccaagcctccctgtggaatgcactgaccatcacatcaagacccacaccagagcctccatgcagaggacccaggctccagctgtggttacagcataagctttcatacaagaataatagtgaattacacctgttaaaaataataagcagaagaaaatgaaattgaacaaaccagccaccgtagtcccttctaaagcgacgtggtctgcgggcatcagtgcccttcctctctggctatagctcttcggcatctgaagaaagttatcctaactattgggtgatccagatttgggcactgtctgctatgatgatgccagctggtcgggaaggaatataaagtataggctcaacccttccacagtcactgtactgggaattcaggcttttcctctctgttgatgtcaagaattaacctgtagataacattcttttttttttcttttttttttttttcaatttttccttgttcttgtcaaaggctgtgtcgcttaaaaccaaatcttgatagattcttcatctttatcactctctatgagaagtaaatatgatttaagtgaaccacagtgagaggcctgtcctcactacagcaaataagatgtgtcccaggtgacaagtccagtctccttttaacatggtgcccagaattccacatacctgagctttgggggctgatacaaagccactgcctctgatcccacggaatgacctgaatttactatcagttttgccacaatcagtgcagtttgaggatacgtagacccctgagatgaggcctgagatagatgttctgggaaaccccaaggaagctaaagtacctgccatggtttctttcatggcaggttgagtaagccaagctcctgagaatgattggtcacattgtctttgctgttaaggtttcttggtttacagatggtgaagttgcagacaagttagcaaaccaactgaattttaataaaggaagctttaggaaaatggatgaagatgcagttggaaaattaaagtcatgcttccttgatacatacctcaattctggcaacttctcacttggaattttccaaagtcagtttttggtaatcttgccatttgtattatctttatttatatagttctggttatgcttggtgtgtgccagctgttttgggagtgatgtttttccttatttctcttggctcctgttaagtgttaagttgctgaaactgacctttaatgcttccaaagcaatcagcatctttctctctggatggcttttagaagtggacacagtttactgatttagccagtgaagagaaagctttccatagtgtggtttactcagagcaggtgacaaaaggatgaatttctggctgggcccagtggctcacgcctataatcccagcactttaggaggccaaggtgggcaatcatttgaggtcaggagtttgagaccagcctggccaacatggcaaaaccctatctctactaaaaatacaaaaattaaccaggtgtggtgacaggcacatgtagctactcaggaggctgagacaagaatcacttgaacccgggaggcaaaggttgcggtaagctgcgagcatgccactgtactccagcctgagctacagagcaagactctgcctc

SEQ ID NO: 13987 - protein, 148 aa, Homo sapiens [sequence omitted]

SEQ ID NO: 13988 - DNA, 3190 bp, Homo sapiens
ttggaattggagtctccatgaaccagtggtgacttccagagctctgctccttctagattccttcagagttcttgagcctcctaaaaagtataaggaggagccaggtgccatggctcatgcctgtaatcctagcactttgggaggccaaggtgggcagattgcttgagcccagtagtttgagaccagcctgggcaacatagtgagacctcatgtttacaaaaaatgcacaaagttacctgggtgtggcggtgggcacctgtagtcccagctactcaggaggctgagatggaaggactgcttgagcctgggaggtggagactgcggtgagctatgatcatgccactgcactgcagcctaggcaacagagtgagactctgtctcaaaaaagaaaaaaaaaaaagcaaaagaaaatatggaaggaaggagggtatgccttctccattgtcttggattccatacacctgctgggacaggggcctcacagctttgtctttcgcaggcctgcaccctggctcggcggaatgctgaggtgtttctcaagtacatccacaggaacaacgtcagcatgcccagtgtcgccagccacactcggggacccgagcaacaagtgaaaggtcagtgagagacctgcccagccaccagtcacttcagcgacagcccctccctgaaatataccatgtacccagttttcacacaatctcaaatttcctgctgcttctccttagaaatgaaaatgtatgatgtgggatggtgtgggcagtaatgattcatggtcaatttttaaacacgcatcaagatctggaaggcaaaaacaaggataaaatttccccaagtattttcatttatcttagagtctggacagcactgcctagtggaattttctgaaataatggaaattgcctgtatctacgctgtgcaatacagcagctactgagctagtgcaactaaggaactaaattttaacttgtatttaatattaactaatttaaatgtaaattactgattttgattcctggttaatatattgaacagcacaagactagggtgtcttatagcctaggaacagaatgtggactgagaatcctaaaaccaaatgctgaccctggatttgtcactgattgattaagccttttaaaactttagtttcttatttaaaatgaggggagcatctagactcttgctcctcaaattgtagttcccagaccagccacaatgacatccctaggagagtgtatgaaatatagaatctcaggccacacccaaaccgactgagtcagaaactgcattttggcactttgggaggctgagatgggagggttgcttgaggccaggagttcaagaccagcctgggcaacatattgagaccccatctctacaaaaaattaaaaaattagcctggtatggtggcgtgcctatagctctagttattcaggaggccgagatggaaggctcatttgagcccaagagctggaggctgcagtgagccatgtttgcaccattgtactccagcctgggcaatagagtgagacgctgtctcaaaaaaagaaaaaagaaaagaaaaaaaagaaaaaaagaacaaagaacctgcattttggcaaaactgcccaattctaccaaccaggtaatttgtgtgttcataaaatttagataagtgctattctacataatctttaatatctccgaattctagaaagtctatgataataaatatataacttttaaaaattgcctattatctgaccatgtgaaacttaaatcattatctgtggaattattctgaccatgcagaaattagcctttgagtgagtgaagagtttaacaaatgtcatcttgccaaggcagagaaatataactctggagtccgaggctaggaatggaacccaagccgacttggagtgaggagtggggtatgggcttggagacaccatggacagggtagggtgcgtggtctgcttaagaagagcttccctctttgctcagatagctcaagagttggagagaacagagaccactggaaagaatggaatcaaagttccctacagagaggagggagcagagtttctcttccaaatgtgctattctatttgcggtcaggggacctgtggggagctggtattatgtcacttcttccagcacatttgaaagcatatgttctggcttccaaatgtagatgggagcttgggtgaggccagctgcctactgagagaccacatatcccacctacacctctgcgtgctgaaggataacaggcacccagagacagtgggaaatgcctacatcttcttggaggcaagaccaagttgttgcccatgtaaaagctttcaggaagaggggggaaaataatcctgaaactctttatgatttctgccagatctgggttgattccctcagtcacaccatagagggagggagcttcaatgagcaaaactctggctagggaacataaagactaaaagaaatgggtttctactccttccttgcccaattgaagcttccacctgagcagggacctacaatcccttatatatcagtttccttttcacctactacctagactcaaagccagtgccatatatttttggcttttttatgctgctggttgttatatggctgcataacaaccaagaaattcaatgatatccaactgtaaacatatgttgttgaagtggctgtgcattggctgaggagcagcatctcaactgggctcagcagtgcagttgtgcttcagtctgcaagtctagctagcttggctccttcactccaggtaagagcttgtttgctccacgtgtatttattctgggacctgggtcgaaggggcagcagttacccaggagaatttcctatagtggtgatagcagaggtacaaggaacaaagtcaagtctgcaagtacatttcaaggccctgcttgtgttttatctgttaacaactcatttgctaaagcaagttatgtagctaagccagagatcagttggggagtgagcaactgtacttgcctctttgggaaggaatgaaaaagttacatgataaaggcttagatacagggaagggtgaatgattggacccaaaaaaggctgagcacggtggctcgcgcctgtaatcctagcactttgggagaccgaggaaggaggatcacttgagctcagaagtttgagaccagcctgggcaacatagtgagacccccatctctac

SEQ ID NO: 13989 - DNA, 2235 bp, Homo sapiens
aacccgcccgcttctcctgcctaggctcttctttctgctcctgtcgccatggccccggcctcggcgctcaagcgaccctctcgctccgcccagacccctggatgcccagctgccgcacctcccgtggccccacgctgtggctacgtgttgtctgaagacgcctggggaaaccttcagggcctctgtactggcctgtcatgtggtcaaccagatctccttgattgcacagtcaaccccgctcctgtctgtcaggctcaggaaccacttacaagctatggcaggtgatgttccagcatcccacagggaggattatgctggtgagccacatggccaagcaggactatggcttcaacagctctggggcctgcatgttcctgcattagccctactccagcaatgaggctgaagttaccagagtgacatcatggtatctggtgcaagctatagcatccacctattcttggagcacacgtggtcagacactgattggcatgtgaccaagttgatggtggtcaaaacagaactcctttcatgcccacaagcttcagtattactatgttccctgccacttccgttgaagttttgcaggattgggatgatcctttggtgtgaacgaagccccaaagaggaccacgtggagagtgcctgactgttcctgtgatgtcttctagtacatgaacaggaatgaaacccactatgtcctccatgtgaactacatgctgagcgtgggtccagatgggaaaccattctcctaccctgcagaaatggtatatagtttcaaggatgtgggtaagtacaccaagtgaggtgctggtcctggactcatggatggtcttggtacccaacaagttacactggctctgtccaaacaacagctgtggaagcccctcccatgggaggggggtcccactggggctacacagaagtaactcctcacaagtggcttgtctgcatcctgggattggaaacccagtatagaagcagctgttggcagactcatgaagtaatacagagaatgggtggctgctcatacaatcagcagtaagacttcacttaaatcatgccaggaatgacatgaacaggactcaaagtaccccatacagtcttccctcccaggtgccaccacccctgaaatattaaccttggtagacttctcctgtcaaggtcacagtaagggtagccagtggtatcaagaccttggtataaatcagacatggccttcttcccagcaaggtcattaggtacccaatgtagagatagcagggaaaggatataaaaacaggaaagttccaggtgagtcatcttttgccccttgactaggcctgcctataggtttgacagctccaggaagtaagaaaacaggtatattgtcttccttcctatagctctgctagatgtcatcctcttaaggtcactaggattctagtgttgaaggcttgctgccacacagatggcactgttctatcctcaaagcattttcagggtgccatctaatgggtctgaatcctggttccattgcaaactttaagcaaggaacttagcattatccaatccccattttctccaactactggccccctctaaggaggctgaagagtgaaagcatgttgaacaccaagatgctctccaaagatggagtccttctcttctgagccccacagctctgcaagatgggtaaaactcaaggtggcattaggctctgagaggagctccatcacacagctggcatagtatggagctggaccagagcccaaatcccctatctccccactgtcctaaccaaaagcttacacttcagaacccaaggccgtgaacacagacctcacacagctgtaacctgagaaactgccattgctgatctagtgccagaaccgcttccccatccctggctttcctgctgacttcccacgagataagacttttctttaaaaagggggccttctcagccacacgcagtggatcacactgtaatctcagcactttgggaggccgaggcgggtggatcacttgaggccaggagttcgagatcagcctggccaacatggtgaaaccccatctctactaaaaataccaaaaaaaaaaaaaaaaaaaaaaaagcagggcatggtggcatgtacctgtaatcacagctacccaggaggcacaagaattgcttgaacccaagatgcagaggttgcagtgagcctgtttgtacccctgcactccagcctgggtgacacagtgaaaccctgtctc

SEQ ID NO: 13990 - DNA, 2958 bp, Homo sapiens
  CDS (52)..(900)
gggcccgcggaggaaagatactggggagtgggagccgcggggttcagagcgatgattcccccacaggaggcatccgctcgacggcgggagattgaggacaagctgaagcaggaggaggagactctgtccttcatccgagacagcctggagaagagcgaccagctcactaagaacatggtgtctatcttatcatcctttgagagccgccttatgaagctggagaactccatcatccctgtgcacaagcagacggagaatctgcagcggctgcaggagaatgttgagaagacgctgtcctgcctggaccatgtcatcagctactaccatgtggccagtgacactgagaagatcatcagagagggccccacaggtaggctggaagagtacctgggaagcatggccaagattcagaaggcagtggagtatttccaggacaacagcccagacagcccggaactcaacaaagtgaaactgctctttgagcgcgggaaggaggccctggagtccgaatttcgcagcctgatgacgcggcacagtaaggtcgtctcgcccgtgctcatcttggatctgatcagtggtgacgatgatctggaggcccaggaggacgtgaccctggagcacctgcccgagagcgtgctccaggatgtcattcgcatctcccgctggctggtggaatatggccgcaaccaagatttcatgaacgtctactaccagatacgctccagccagctggaccgctccatcaaaggactgaaggagcatttccataagagcagttcttcctctggggttccctactcccctgctatccccaacaagaggaaagacacacctaccaagaagccagtcaagcggccaggtgagcccccatcctggcccatctctgcaacagccagaggctgactgggactgtactgctttagtccaatctagcgttcgcagcgtcaggcccctccagagcttgtcgttgtggtaaccccgactgtaggtacacaggacagaaagcaagtgtctacccacccagtgaggccccccaagagcaagactcttccttccagctagcagagcctggggttacacagcttctttggaataggggagtaacacaggtgctcagcgaatcccgcctgaggcagagcccctgcctaggcctcctccctcacacacacgtcgccctgtcagaaggccaggcacactactgcagccaggatgctgggatagcaaggggataggtgctccaaccttcaccttccagaaaggcagggtgatctgaagtgacgtgtagctgagagctggatggggagaatttcactttcccagttgatccagaaaggaaagaaaccccagagcatcctctcggaagaacttaaactggctttgggctccagtgcgagcgagtgacttgtggaaaggggcaccatgatgagaggccggggccggtgggtgttgctgtcctgggtgaacatctcgtcatctgtctgttctttctccccggcatcatatcccttatagtctgtactccaggtaaacagtgtctctgccagccacagcttggcaagcccggctatgtctggccactgagagatgctgcccgcagctcgatgatgtgctgggatgttctggggtggggctgctgagattgcactgaaaaagaaagctggagaagccggggctgctcccacccaggctggccccctgtccagctgctgctgtgggcacatgccctagttgtggcctgtggcacctgcttatgacaacaagctttgggtagagcttacttacacccttggtttctccagtccctgcctgcccatgcccctcagagagtgaggtgtctgttccacaagagcacccgctcccctgcaggcctttgtttagggtttggagaaacaggcagagcaggggctgccctcagggagttgagcattagggagctggtgcctggggccttctccctccagtgtggaaatcctgcccaccagccaaaacctgctgcaaatggggactgccagcccagcctgtgggcgcagctgcctgcacagcggatggagcagctctgtgccttctgtgtggtggggagtggctgtctctatgaggctgctaggatgcttgggccccagccagtctgtgcttgcttcctcttctgcctggctccctgacaggtcccccagaagccccagagccctatttgcactgccttaagagtgcccgctggccatgcagctacctggcctttcaggcaggagggatctgatctcaggtggctcacagtggaccacatccatccttgggccagagacactagaggaaaactccagctgtggggtttcagagttgtcaggaactggtgggctcaggaccgatgtcaggctctagggagtcaggctctggggatgtcggttcccacttctgaggagagggacagggaggcctcccaggtggtgaagcaccgacctcagcatccctggaggcaattgggagcctgacgggtttggcggctgctagatccacatcggcgacccacatcctgccggcgtgcacctgcgtctgtgtctgctcctggtgggttgtggggcaggaatcagattcactcattagtaagccgcactcgctgaaggggagagcatgagcaaggcagacgtgagccaggccttggttattaggagctaattatgggccaagtatggtggctcacgcctgtaatcctagcacttcgggaggccgaggcgggcggatcacctgaggtcaggagttcgagaccagcctggccaacatggtgaaaccctgtctctactaaaaatagaaaaaaaattagttgggtgtggtgacgcacgcctataatcccagctacctgggaggctgaggcaggagaatcacttgaacccaggaggcagaggttgcagtgagccgaggtcgtgccaccgtactccagcctgggcgacagagtgagactgtctc

SEQ ID NO: 13991 - protein, 283 aa, Homo sapiens
MIPPQEASARRREIEDKLKQEEETLSFIRDSLEKSDQLTKNMVSILSSFESRLMKLENSIIPVHKQTENLQRLQENVEKTLSCLDHVISYYHVASDTEKIIREGPTGRLEEYLGSMAKIQKAVEYFQDNSPDSPELNKVKLLFERGKEALESEFRSLMTRHSKVVSPVLILDLISGDDDLEAQEDVTLEHLPESVLQDVIRISRWLVEYGRNQDFMNVYYQIRSSQLDRSIKGLKEHFHKSSSSSGVPYSPAIPNKRKDTPTKKPVKRPGEPPSWPISATARG

SEQ ID NO: 13992 - DNA, 1631 bp, Homo sapiens
  CDS (609)..(1457)
gagatcgctgggagcggttgcggcgtgcggggagctgagttatagctgtgacttctgccctgccaggccgcacacaagctggctgacccggtttgtaaaaatggaatttcaagcagtagtgatggcagtaggtggaggatctcggatgacagacctaacttccagcattcccaaacctctgcttccagttgggaacaaacctttaatttggtacccattgaacctgcttgagcgtgttggatttgaagaagtcattgtggttacaaccagggatgttcaaaaggctctatgtgcagaattcaagatgaaaatgaagccagatattgtgtgtattcctgatgacgctgacatgggaactgcagattctttgcgctacatatatccaaaacttaagacagatgtgctggtgctgagctgtgatctgataacagacgttgccttacatgaggttgtggacctgtttagagcttatgatgcatcacttgctatgttgatgagaaaaggccaagatagcataggacctgttcccggtcaaaaggggaaaaaaaaaagcagtggagcagcgtgacttcattggagtggacagcacaggaaagaggctgctcttcatggctaatgaagcagacttggatgaagagctggtcattaagggatccatcctacagaagcatcctagaatacgtttccacacgggtcttgtggatgcccacctctactgtttgaaaaaatacatcgtggatttcctaatggaaaatgggtcaataacttctatccggagtgaactgattccatatttagtgagaaaacagttttcctcagcttcctcacaacagggacaagaagaaaaagaggaggatctaaagaaaaaggagctgaagtccttagatatctacagttttataaaagaagccaatacactgaacctggctccctatgatgcctgctggaatgcctgtcgaggagacaggtgggaagacttgtccagatcacaggtgcgctgctatgtccacatcatgaaagaggggctctgctctcgagtgagcacactgggactctacatggaagcaaacagacaggtgcccaaattgctgtctgctctctgtccagaagaaccaccagtccattcgtcagcccagattgtcagcaaacacctggttggagttgacagcctcattgggccagagacacagattggagagaagtcatccattaagcgctcagtcattggctcatcctgtctcataaaagatagagtgactattaccaattgccttctcatgaactcagtcactgtggaggaaggaagcaatatccaaggcagtgtcatctgcaacaatgctgtgatcgagaagggtgcagacatcaaggactgcttgattggaagtggccagaggattgaagccaaagctaaacgagtgaatgaggtgatcgtggggaatgaccagctcatggagatctgagttctgagcaagtcagactccttccttttggcctccaaagccacagatgttggccggcccacctgtttaactctgtatttatttcccaataaagaagggcttccaaaggcatgctggagacttgtggagcagtccaaagctccatgtcaggtgggctccaggtgtacacag

SEQ ID NO: 13993 - protein, 283 aa, Homo sapiens
MANEADLDEELVIKGSILQKHPRIRFHTGLVDAHLYCLKKYIVDFLMENGSITSIRSELIPYLVRKQFSSASSQQGQEEKEEDLKKKELKSLDIYSFIKEANTLNLAPYDACWNACRGDRWEDLSRSQVRCYVHIMKEGLCSRVSTLGLYMEANRQVPKLLSALCPEEPPVHSSAQIVSKHLVGVDSLIGPETQIGEKSSIKRSVIGSSCLIKDRVTITNCLLMNSVTVEEGSNIQGSVICNNAVIEKGADIKDCLIGSGQRIEAKAKRVNEVIVGNDQLMEI

SEQ ID NO: 13994 - DNA, 1707 bp, Homo sapiens
  CDS (43)..(354)
cgcagaggaggcccacaaacactgcctgcctcaccaggagggatggtaagacgcttggcccctccttccctcagcctgacaaggggcagtccctggccctttcccaaagggaccccagagagggggaggcccagcccaccatcctgcccggtgggattagctatatccttctgcccctgggacaggaaccatgggaaagcttcctcctgctgcatctacccgctccctccccaccagccaggtccctctgcagtgtgtgggggtgggggcacccatccctgccacctgcctgtagtgggaagagaaacagtaaccccagccagcctccctggaggtgcccaggtaggaagtttttgatgcttggctctgaagatgtaatctcttctcctgacattgttgccagagcctgccacaaataacgtaagggtgtcaggacctctaggccacacaccgtcctctcctctcagtctggaagccccacagcctttgccctctgcattgggggacacaaactgtttacagcagggggggatcactgaccagcctgtggggcgggatgttggctgtgggcagcctccagaagggagctccctgggccccctgggatcagaagctttcaggtttggtagggccaaccttttgggctcttgtctctcaagctgtgtccaggcagaggcccaagccttggccaggaagtcttggtgaccctgtgaccttcccccaacgggggttcctgagagaggcctgtccttattcctttcccccacttctccccacatggtggatggatggactgattgttctagggatggaagcctagggaagcactgattgtccccagtgccaagcccagcaggggctagaggggctttttctgccacacactaacttcagttcagctgaggtcttggtgctttcggcttgtccgaggccacactgttcttctctaattaaagacacacccccctccaccccaaccaccatcaccaaagtccccatcctcaggcccctgccctcaagccagccaagttcttaggctgactggttcagatcagactcctctatgagggtctctttgtcaaaggaggtcagtgtcctagctgctttgggaatcagtgggggagacccccccaacccaggtatgccagggggtttaaatttacatgtgaaaagaatgacaggccaacattaatgaccatcctgtgacttgggatgcaccttctcttctcaggttcaaagcagcttaaggtatctatcatctgggagtgctttctctccccagcctcgctgggaggcaaggaagggccattcacaactgaacattaaggtcctcaaattaagacactatccagactcacaaaagatgtttccacccaaccagaaacagtggacccctgacccctagttgagtgcacacttccaaccaggccccttaatttatctcccacctaaatggcagctctgaagcttctgggctgccagcctcccattgccttgaacccgtgctcctcagagaccaagtgctaacagctcccctgttgacactatggaagccatggagtgatctaattgatacaggttgctataagtcagaggtcaggtgtcctagggtaaggggagtccctggagcaaagtcttctctgtggctgatgctccctgcagggaaatttaggagcagatttctgaaacagtgacgttcctcacagg

SEQ ID NO: 13995 - protein, 104 aa, Homo sapiens
MVRRLAPPSLSLTRGSPWPFPKGTPERGRPSPPSCPVGLAISFCPWDRNHGKASSCCIYPLPPHQPGPSAVCGGGGTHPCHLPVVGRETVTPASLPGGAQVGSF

SEQ ID NO: 13996 - DNA, 1821 bp, Homo sapiens
  CDS (393)..(1544)
agtgccctccccgctccgcggcgccggctgcgaagttgagcgaaaagtttgaggccggagggagcgaggccggggagtccgctccagcggggcgctccagtccctcagacgtgggctgagcttgggacgagctgcgttccgccccaggccactgtagggaacggcggtggcgcctccccagcaaaccggaccgactgggtccagccgccgcagggaatgacgccggtgctcctacagccacggctccgggcggggaaggcgagccccacagccggccctgcgacgcccgcctgggcagcaccgataaggagctgaaggcaggagccgccgccacgggcagcgcccccacagcgccagggaccccctggcagcgggagccgcgggtcgaggttatggatccagcgggcggcccccggggcgtgctcccgcggccctgccgcgtgctggtgctgctgaacccgcgcggcggcaagggcaaggccttgcagctcttccggagtcacgtgcagccccttttggctgaggctgaaatctccttcacgctgatgctcactgagcggcggaaccacgcgcgggagctggtgcggtcggaggagctgggccgctgggacgctctggtggtcatgtctggagacgggctgatgcacgaggtggtgaacgggctcatggagcggcctgactgggagaccgccatccagaagcccctgtgtagcctcccagcaggctctggcaacgcgctggcagcttccttgaaccattatgctggctatgagcaggtcaccaatgaagacctcctgaccaactgcacgctattgctgtgccgccggctgctgtcacccatgaacctgctgtctctgcacacggcttcggggctgcgcctcttctctgtgctcagcctggcctggggcttcattgctgatgtggacctagagagtgagaagtatcggcgtctgggggagatgcgcttcactctgggcaccttcctgcgtctggcagccctgcgcacctaccgcggccgactggcctacctccctgtaggaagagtgggttccaagacacctgcctcccccgttgtggtccagcagggcccggtagatgcacaccttgtgccactggaggagccagtgccctctcactggacagtggtgcccgacgaggactttgtgctagtcctggcactgctgcactcgcacctgggcagtgagatgtttgctgcacccatgggccgctgtgcagctggcgtcatgcatctgttctacgtgcgggcgggagtgtctcgtgccatgctgctgcgcctcttcctggccatggagaagggcaggcatatggagtatgaatgcccctacttggtatatgtgcccgtggtcgccttccgcttggagcccaaggatgggaaaggtgtgtttgcagtggatggggaattgatggttagcgaggccgtgcagggccaggtgcacccaaactacttctggatggtcagcggttgcgtggagcccccgcccagctggaagccccagcagatgccaccgccagaagagcccttatgacccctgggccgcgctgtgccttagtgtctacttgcaggacccttcctccttccctagggctgcagggcctgtccacagctcctgtgggggtggaggagactcctctggagaagggtgagaaggtggaggctatgctttggggggacaggccagaatgaagtcctgggtcaggagcccagctggctgggcccagctgcctatgtaaggccttctagtttgttctgagacccccaccccacgaaccaaatccaaataaagtgacattcccagcctg

SEQ ID NO: 13997 - protein, 384 aa, Homo sapiens
MDPAGGPRGVLPRPCRVLVLLNPRGGKGKALQLFRSHVQPLLAEAEISFTLMLTERRNHARELVRSEELGRWDALVVMSGDGLMHEVVNGLMERPDWETAIQKPLCSLPAGSGNALAASLNHYAGYEQVTNEDLLTNCTLLLCRRLLSPMNLLSLHTASGLRLFSVLSLAWGFIADVDLESEKYRRLGEMRFTLGTFLRLAALRTYRGRLAYLPVGRVGSKTPASPVVVQQGPVDAHLVPLEEPVPSHWTVVPDEDFVLVLALLHSHLGSEMFAAPMGRCAAGVMHLFYVRAGVSRAMLLRLFLAMEKGRHMEYECPYLVYVPVVAFRLEPKDGKGVFAVDGELMVSEAVQGQVHPNYFWMVSGCVEPPPSWKPQQMPPPEEPL

SEQ ID NO: 13998 - DNA, 2137 bp, Homo sapiens
gatgccatcagtcactgtgacaaatggtgtgtggggggagcttgctggctgaagcattgtcaccgtgggtaattatacacttaatattcatgtgttatcgttccacctggaatctttaaactcttcatccaggagacactaatcttcaccttattattacgtcctaatgtcactctagcagaagaatggggctgccaacagggggagagaacttcctccttctcctctaggttgtaataaacatggttatttgttatttgaactctggctgaagataagacgctatatgcccctgccagatatggcccaggtgtagagatgagtccaggttattgttaaaagagtgaaaatgcccctgtcacattccccatcgttttcttccatctataaagatgatggcaatggtgttggcaatggtggtgataatgatgattatcaagtgagcattattccatttttaggcatgatggaaggaaaagtcaaatgcagtgttcttaacacttcttataacgttcagaaaccaccagatagagagaatgctgtctgtccttaatgcaagcagcccttggaattgtttctagagctgtcatgagctgccgatgggaaggtgacatcagtgtcggtcacaaattctcccttcagcctgatctatgcctctagagagaattcccaggaaggcaagtttttgccctaactttgggaatccagtatgtatggactgaaccagggttccccataactacccctcttttatgtacaccacaatcaccctgtgattgacccatttgctgagcagagcgtaccaagagggagcctagatcttaaacagagctttgattgattggggctgaaagggggcagattctgtatgagaccagcaggcattacaaacttctcaatttgaaacaaaaatgctttaatgctacttattgttgttgtcttattgtgaaagttagtcattcttatatatggttggctttctttcaaggtcaattgcacagtctgttctttgggggcaccgcatagccctatagcatgcttaaaatgcataaagcttagaggaagactagttctctggagagaattctgtgtttgtccaagaactggatccctgcctcctcccacacagtcactccacagccagttgcatacttgcagagagatttatggggctgaacatacagctgcaagttttcttttcttctactttttttttcttccaggaacagtgtcctgctgtcaggtctgtgtgcactagacacaaacacataacttatttactacagcagtatccaaaactcctaagtagtgtccttgctgaatgtgagtgttttcatgaatatgaaacattctgaagatgtaaggaattcctagatacaagccaatcttgactcagtttacatctctgtctaatattttggtgaaggaccatccaggagtctagttacactgtacagctgtttcagttctaaagcaacttggttaccttatggtcaagatcagaaattccttaacggaatttgactgctctgtttcctttaaaagtatgctgattgtttatagtagcttctggattctctgtccttgggaggttctcttagattgaagcaaattctctctcataccttgtgttggtttttgtttttattttaatttttcctttgtgatctgaatgaataacatcatcacttaacacctattgccatttcaaagacagaatcccaacaggcttttctgggtatggacccatgcaatggtttgtctgcctttcaacaatttgtatcatcttggccattttggggaacagggattgtgcatggggaaggatggaagaggaaaaccaatatttatttaacattcagtggtagtaaacactgggattagtacttaattagagttgatcctcataataaacttgatccccattttacagatgagtaaattataactcagagaatttctaacttgcccaaagtcatacaactaataaattgtaaaggtgggagttaaagcaattttttattgaactatatagaaaatgtacaaattatttatacacatctccagttattacaaagtgaactgctaggaatgtgagtggaattggtaatgtcagttaaaggcagaaggacgcgct

SEQ ID NO: 13999 - DNA, 2126 bp, Homo sapiens
  CDS (11)..(1723)
attagatggcatgtcaaaaaatccttcagggaaaaacagagaaactgttccaattaaagataatttcgaattagaggtacttcaggcacaatacaaagaacttaaagaaaagatgaaagtaatggaagaagaagttctcattaagaatggagaaattaaaattttgcgagactcactacatcagacggaatccgttctagaggaacagagaagatcacattttcttcttgagcaagagaaaacccaagcactcagtgacaaggaaaaggaattctccaaaaagctccaatcattgcagtctgaactccagtttaaagatgcagagatgaatgaattaaggacaaagctccagaccagtgaacgagcaaataaactggctgctccctctgtttcccatgtcagtcctaggaaaaacccttctgtggttataaagccagaagcatgttctccacaatttggaaaaacatcttttcctacaaaggagtcttttagtgctaacatgtcccttccccacccctgccagacggagtcaggatacaagcctctggtgggcagagaggatagtaagccccacagtctgagaggtgactccataaaacaagaagaggcccagaaaagctttgttgacagctggagacagagatcaaacactcaaggttccattttgataaacctgctcctgaagcagcctttgatcccagggtcatccctaagcctttgccacctcctgagtagtagttctgagtctcctgctggcacccccctgcagccaccagggtttggcagtaccttggctggaatgtcaggcctcaggaccacaggttcttatgatgggtcattttccctctcagccctgagagaagcacagaacctggcattcactggactgaatctggttgcccggaatgagtgctcacgtgatggagacccagcagagggaggcagaagggccttcccactctgccagcttcctggagccgtgcatttcctcccccttgtacagttcttcatcggcttacactgccaggccctgcaggacttggcagctgctaagagaagcggagcacctggggactcaccgacacattcctcctgcgtgagctctggggtagagaccaaccctgaggactcagtgtgcatcctggaaggcttctctgtgactgcacttagcattcttcagcacctggtgtgccacagcggagcagtcgtctccctattactgtcaggagtgggggcagattctgctgctggggaaggaaacaggagcctggttcacaggcttagtgatggagatatgacctcagccctaaggggggttgctgatgaccaaggacagcacccactgttgaagatgcttcttcacctgttggctttctcttctgcagcaacaggtcaccttcaagccagtgtcctgacccagtgccttaaggttttggtgaaattagccgaaaacacttcctgtgatttcttgcccaggttccagtgtgtgttccaagtgctgccaaagtgcctcagcccagagacacccctgcctagcgtgctgctggctgttgagctcctctccctgctggcggaccacgaccagctggcacctcagctctgttcccactcagaaggctgcctcctgctgctgctgtacatgtacatcacatcacggcctgacagagtggccttggagaacaatggctccagctggaacaagaggtggtcagagcgctcacggtgatgttgcacagacagtggctgacagtgcggagggcagggggacccccaaggaccgaccagcagaggcggacagtgcgctgtctgcgggacacggtgctgctgctgcacggcctatcgcagaaggacaagctcttcatgatgcactgcgtggaggtcctgcatcagtttgaccaggtgatgccgggggtcagcatgctcatccgagggcttcctgatgtgacggactgtgaagaggcagccctggatgacctctgtgccgcggaaaccgatgtggaagaccccgaggtggagtgtggctgaggccctgagtgtccagccacatggtggcaccagcaccactcctttccttaccacatcaactgattaaagcagtgaccagcaggaactgcccagagaactgg

SEQ ID NO: 14000 - protein, 571 aa, Homo sapiens [sequence omitted]

SEQ ID NO: 14001 - DNA, 1661 bp, Homo sapiens
  CDS (29)..(433)
gtttccccggcaacccgcggccgccgccatggacgcgctgttgggcacagggcctcgccgggctcgcggctgcctgggcgcggctggacccacgtcttcaggtcgcgcggcgcggaccccggcggcgccctgggcgcgcttctccgcctggctggagtgtgtgtgcgtggtcaccttcgacctggagctgggccaggcgctggaggtgagcgggcgcgagcgcgggcgcgggcgggtgggcagggctgcgcctctcggggccagtcccgcctcgcttggggccctcggccgccccgcactctccctggccttcggccgccgcctcctggaggggcctcttctccgggctccagaagcgctccccaggccgaggagggaaggcgagctgctcggagtcggatcttgtcttcacattgggatggagcattttgcataacctaagtggtactctttcgatttttcccagtaaatgtctcacatctcccccctccattccccaccggagcagtgacaccttcatcccctcagtggctcccgccagagtcccgggcttaccctccgctccgcatcccatctctgggcataggcgaggctgacggctccttctgcaacaaaggtctcggatccgttcctttgctgccatcactgatgtcatccccaccccagctgcaccccagagttcaacctttgtggctctcctgcttaaaaccctgcagcgcctccttgttcacctagcatcagatccagaccccatgggccccgtccctccacctgcgtcttgtggtgttcttgctcgtgggggtctgttcatcggctgtgcccatgggctttcgatgtggtctttctgctgcctgcaggcctccactcacctacccacacaggcagcctcctttcctccagggaggccccgcaggatgatcttctctgtgtcctgtgtaacacacaccagggagctgaccagcacaggggaggcccacctgcagatggagggaggcttccccgcgctggcgcaaggaacctcgtgaggggtagtgagctctctattaccgcaggtgtccaagatcaggccaaatcatcatcatcaggaaagccaggcagcgcgtctctgtggttgggagatgctttctaaggccctgctgaactccaagaggccatgagaagcatatagtcttctaaacagaaaagcattaactctagcactctctggagcccctcccaccacacacggtccccagcaggtgcacagcctcaaacagcatcactgggtgggggctgagtaccaagaagtgtggtgacctgcccagggttgaaaacctttcttagttcaatactgttgcccagattgttccccacaaaatcacaaaagaagttaagaggttcctggccggacgcggtgactcatgcctgtaatcccagcactttgagaggccgaggcaggcagatcacaaggtcagcagtttgagaccatcctggccaacatggtgaaaccacatctccactaaaaatacagaaattagccgggcgaggtggcacactcctgtagtcctagctactcgggagactgaggaggagaatggcttgaacccgggagggggaggttgcagtgagcagagattgcaccattgcgctccagcttgggcgacaaagtgagactccatctc

SEQ ID NO: 14002 - protein, 135 aa, Homo sapiens
MDALLGTGPRRARGCLGAAGPTSSGRAARTPAAPWARFSAWLECVCVVTFDLELGQALEVSGRERGRGRVGRAAPLGASPASLGALGRPALSLAFGRRLLEGPLLRAPEALPRPRREGELLGVGSCLHIGMEHFA

SEQ ID NO: 14003 - DNA, 2182 bp, Homo sapiens
  CDS (119)..(913)
ggtttgggaggcccaggcggcggagcctccgggacggcgagcggcgggcggcggaggaggagacggcaggcattaaaaaatatttaatcattcatgtgttgagactcattcttgagttatggatgacaaggcttctgttggaaaaatcagtgtctcttcagactcagtatctactcttaatagtgaagattttgtcttggtttccaggcaaggagatgagacaccatctacaaataatggaagtgatgatgagaaaacaggactcaagattgtagggaatggaagtgaacagcagctgcaaaaagagctagcagatgtactgatggatcctccaatggacgaccagccaggggaaaaggagcttgtgaaaaggtcacaactggatggtgaaggagatgggcctctttctaatcagctctccgcttcatccaccattaaccctgtgccattagtagggctccaaaaaccagagatgagcctaccagtgaaacctggacaaggagattctgaagcttcaagtcctttcacaccagtggccgatgaggacagcgtagttttcagtaaactgacttacttaggctgtgcctcggtaaatgctcccaggagtgaagtggaagccttaaggatgatgtccatcttaagaagccagtgtcagatttcactagatgttaccctttcagtgccgaatgtgtctgaaggaattgtgagactcttagatcctcagacaaacactgaaatagcaaactaccctatctacaaaatcctcttctgtgtcagagggcatgatggaactcctgagagtgactgttttgctttcactgaaagtcattacaatgcagagctcttcagaatacacgtcttccggtgtgaaatacaagaagctgtaagtcctcaagagaaaactctctgcaaatgaaacttcaccagtgccctcactaggttgaaatgattatggtatttattatgatcactcataagccagatgaaattctctgctattgttttagtgattctagcctcatgggccaaaatataaattaactaaaaatttgattaactagaactttgttactactactaagaatgtcagaggagatctgttggctacttttgattgggttaagtaggcattctggttctaacattgacagatttgcaaaccattcttttaaatcaaaacttgttaggactgttttcattgtaatatcttcagatagtttctaacaatttaggaagtggtttttaaattggatttatagtgcttacaaccatttcttttttaaaaccccttgtctggacatttttagtgttgcttgctttataggcctaacaaattaggtaatttaccaaaagaaataagtgggataaagataattattgccctccaaagtaggtaatcttccagccttaataaaggtattttatatcttttgataacagcccatttcctaacatgtctggttgtaggtaagccggataccttacagttttgccactgccttccgccgttctgccaagcagaccccactttcagccactgctgcaccccagactcctgacagtgacatctttaccttctctgtgtctttagaaataaaagaagatgatggtaaaggttattttaggtagggaatcttattttattcatgtattaacatgctgtggttcaggggaaattctaggtcagattataactttcataccataaaatgatggcttttaaagggagggcttttaaaaaaaatctggatgataaaggcatataaatacataaatttaacagaggcaaagtttgaagaattttaaagcaattaaaaaaaattgtcatattgggaacatgttgctaccttcttttagtcagataccaagtggctaactgctcacaaaaatatggccaaaccgccaggcgctgtggctcacacctgtaatcccagctctttgggtggctgaggcggacggatcacctgaggtcgggagttcgagatgagcctgaccaacatggagaaaccttgtctctactaaaaatacaaaattagccgggcgtggtggtgggtgcctgtaatcccagctacttgggaggctgaggcaggagaatcgcttgaacccggcaggcagaggttgcagtgagccgagatcctgccactgcactccagcctgggcaacgagaacgaaactccgtctc

SEQ ID NO: 14004 - protein, 265 aa, Homo sapiens
MDDKASVGKISVSSDSVSTLNSEDFVLVSRQGDETPSTNNGSDDEKTGLKIVGNGSEQQLQKELADVLMDPPMDDQPGEKELVKRSQLDGEGDGPLSNQLSASSTINPVPLVGLQKPEMSLPVKPGQGDSEASSPFTPVADEDSVVFSKLTYLGCASVNAPRSEVEALRMMSILRSQCQISLDVTLSVPNVSEGIVRLLDPQTNTEIANYPIYKILFCVRGHDGTPESDCFAFTESHYNAELFRIHVFRCEIQEAVSPQEKTLCK

SEQ ID NO: 14005 - DNA, 1975 bp, Homo sapiens
tggtaatgactggattctggcactttatggttatagaaaccacttttatatattttgatttcctcccctaatgcttaattatctccatgtggacattatgatagagtgtcattgaaggtattaaaaatgtaattaattgcttaacagttatatcttgtgaaaacaatgtggaaatctttttacatttttaatttttggttcaaacaaacctaactaatcaaagagcagccacaaaaatcctcaaaatgcaaattagacacaataatgtacagctaccaattacagattttagtgtttttgtattccacagcaacaaactgccaagtcttaaaaaaaaagaagtcaactaaagcattctgttgttccctgagctctactgtatattctactggaagattttaagctctgtcatggacatatgactagaatcacaaattttttaaaaagtgttcagacaaggcaaatatctaactatgagctatagaagttaaatatattgagtatgtcagtgtttgcattttatttttggatggtatagaattttattagttttctataataatcattgcttatactggcttacagtgatttactgtattaacataagctttttatacagatctgagattgtatctaataagatgactagagtcatgaccatttagttaatctaaaaaatgaatagatttttaaaaaattaatttcagtggtcttttatgttatagagtgatggagtctaacaaaattttaaaatcttgtcacaaaaaaggatacagaaaagattttgcataatgttttattattatcctctctatgatcttttcgcttatcatttcagataagaccagaaattcccattcctgaagagttagatgacgatgaagatgttgaggatgtggatctttcagttcctggctcttgctatctcaaactgttgtcactcactccccctttggttttaccaggtgactcctatttggtagtagagaagctagcattttttagtggttcgatttgtctgattgtattcttttgtgataggtacatagtatagtttaaccttatgtgcttattttttaaccagaatgttaaatgcacccatctgttctattgaaacagcttgaggtagtatggtgtttaaatcatacgaaaaaacgttacatctgagtaggattgaacaagaaaactagtgtaaacaattgtgttcactgataattaaaattcatttaaaaggctaaatgtattccacaagatgaatttgcactggtactctaggtcattgatttaaacaatacttctttcttacataagccaagtgaaaagatcattagactattcagagatttactgagtagtttcattattatacatttattctttctatagagttatgccaaagatgttactgatatttatttcagagctataaattaatgcttttaaaagatggatcaaattgtatggtcattcagctttgatgtaaagcttatagggcctttatcttttaaaaagtaggctgggtatgatggctcacgcctgtaatcccaacactttgggaggctgagagaggcagattgcttgaggtcaggagttaaatacaaaattagcctggtgtggtggtgcatgctgtagttccagctatttgggtggctgaggcacaagaatcacttgaagctgggaggtggaggttgcagggagctgggatcatgccactgcattccagcctaggtgacagcctaggtgacagcctaggtgtctcaaaaaaaaaaaaaaaagtattctaatgcttatatgtggtaattattctatatgtatattgtgtttagaagtactcacttgcccctattactatatgccctacccaagaaatggtagacgataccatttgaaaaatatgtttgattgtggactgtgattaggaacttacattattttattttgaatgttattttctgatcattaaaaagttatttac

SEQ ID NO: 14006 - DNA, 2405 bp, Homo sapiens
  CDS (1696)..(2163)
cacagccagaaacagaagtccaaaaggaaagaaaagccactggagagcagattgaggaaaacaggtggccacggggccaggggcacgcttcttccagttctccatgttggtaatttttctttccttccttaaatatcactgtcaccaagctgggcacctcaaactcctaactgcttcacactcccaggtaccccaaagtcaaggcccatgctagaagaccatatgtggacccggtgacccggagctcgccaggcccatgccaaccacatagatcatgctggaccataccatgtccaggaccatgggatggctggttggagaatgggccctggaacccacacacaagcacagcttggctggtttcttactgagactgtggaggctgctggccccctcacctccagggagaagactcaggaaaggatgtagacactgtaggagttgtaggtgactgggcatggctgtgtctttagcatctttctggggcaattggtaaaagaaatgtatattgctcattgatgcagagacctcctctgtgttggatgctgggcgcacaaacacggataagcctcagcccctgccctcaaggtgttcacagtcacaagggggaagacatgagcaatcagaccatcaatacagggtgatctgttcagcaactgaggggtttatggcagctctgggggaggcctggcctccaggagatgctcctccctgaggctggcccttccatcccgcagccacaccagattccccaacttctcccctctgtactgtgtaagattccctgagcctgcaaaggtatcaattagctagtcagctttctaactaatgcaacagtgcaagtgctaatgagagaggatctgaggagctccttcctccttgccgatgtgccagtgggacaggaaaatacacccccacccaccccaccatgccaaggtcatggagaggacctaggtgagcctcccacacctggctcaccatccctgcccaggggacatccagccatgcccacatggatctttgaagaaaaatgcttcctctctgttcgtggtgactctactggtgggaatttcctttaacagaagaggaagaaagcaggggtggttggggggatggcgagagggactctgacatacgccctcctgtctgcatatagctttgctgcttgtggctgccaacactttcctgtttgtctgtctgcctgctgctcctcatcctagtgaggaccaaggcgtcctccccgacggtagccctccctgtcccaggcctggaagagcatccactgtgcctcactttatttcccgtccccattaccctgcctctggctgcctctcctctctactgcgggctcagcacacaacgctcttgtgttggggtggggtgaagggaagaactgctggtggaggagagtgcatctagctgccaaggcctggggagcacactcaggcaacccttccccttcccccacttttatctcaggagtcagctgcctgcccaccaagtcctcatcactctctctgtcttactcctccaacaggggatgaacgtagggcacttagcttcttccaccagaagggcctccaggattttgacactctgctcctgagtggtgatggaaatactctctacgtgggggctcgagaagccattctggccttggatatccaggatccaggggtccccaggctaaagaacatgataccgtggccagccagtgacagaaaaaagagtgaatgtgcctttaagaagaagagcaatgagacacagtgtttcaacttcatccgtgtcctggtttcttacaatgtcacccatctctacacctgcggcaccttcgccttcagccctgcttgtaccttcattgtgagttctctggtgcccagcgctcaggcccccaagcatcccttctcacatctacccacgactttcctctgtagctctggaaaactctggccttccagatgcaggaccctcatgaacttcctggccccagaccaatttccctctatgtccctttcccttccttcctcaagcccctcatttcccagatgtgagaccttggcgttctggccccccagcctctctccccatttaggaacttcaagattcctacctgttgcccatctcggaggacaaggtcatggagggaaaaggccaaagcccctttgaccccgctcacaagcatacggctgtcttggtgggtgagtatcaggtttcccacttcatcccaacatctactttctccagtcacgctgtgaaatatggaatattacagagttttccaaaaggcaggggaaactgggtgtggtgatgcgtgcatatggtcccagttatttggaagctgaagttgaaggatgcttgagtttaggggtttgagtctagcctgggcaacacagcgagatcgtctc

SEQ ID NO: 14007 - protein, 156 aa, Homo sapiens
MIPWPASDRKKSECAFKKKSNETQCFNFIRVLVSYNVTHLYTCGTFAFSPACTFIVSSLVPSAQAPKHPFSHLPTTFLCSSGKLWPSRCRTLMNFLAPDQFPSMSLSLPSSSPSFPRCETLAFWPPSLSPHLGTSRFLPVAHLGGQGHGGKRPKPL

SEQ ID NO: 14008 - DNA, 2100 bp, Homo sapiens
  CDS (201)..(668)
aaaaagccagaaccaggcctgtcccggacccgcgtcccggggaggctgcagcgcagagcagcggggctggggccggtggggggccgtttgggacgcgcggagaggtcctgagcgcggtggctctgcgtctcctagctctgatctccaggctacccctgtgattccgcgcagaggtacctctcggaggacgccggggtcccatgggcggcgccgcgcagggcgctaggaccccgcggggagcggaggcggcctcggcccgggagcctggaggacctggccggtcgatccgcccgggctggaaaactttctttataattacttctccaggtcggagcgcgcggcttgctaggcgcgcggggccggcgctgttacccggcgtggagtcgccgatttttttttcctgcgggaccgcggggccccccagactagcggagctggacgccggggcgagcacggggaggggcgcaccgagggaggagacaaacttaactctggggccgggattccgaggcgggggccgcagccctcgaggcccgaagccaccgcttcctcccccgcctccccattcaggtgggcgccaacggcgggagcgagggtgtccaggccgccgggctgccaggtccgagcacgcacagggagaactctgcccagtggttcgccgggcgctgtagtccccgggatcctagggaccgaggcggccaggccctggggccccttgagtgcggcagctaatgctctcaccgcggcgggggaaggagcttgccaccgagacccccagccacgtgcgtccctcgcattctttaccggggccggggtggcggctacggaccgtcagctgggcccagatggagtcttgggagccctcaagtgtctcctgtccttgcccgcgccgcccctcgccactggcgctgaggcctgacgccgcctgcgtcccggctagaggcgcgcttgcctacaggtgagggaagacccccttcaccgacagtggccttaggcctggcaaggcgccacgacccgcccaggagccccggagggggcacagctaaaaacaccgctggagagccccgagcttccacgacgatcgcagtaaagaagcagtttcatctgggcaacgcacactgcgctttaatcaagttcctattcaacatagtcccagtgattaatagcccaactgcttcgttttcggtccagagctcataaacaagatatttttagcttgacgcttttggacgggagggagtaaaaaccagatacgttaaataaatatcccgatgtgagccggagagctgcttgctgagccaaatgcaggacccattcatatagcattcacctgtggagggagacctggacggaaatcaaaaagcaccaagagcgatttgcgtttttttctgcggtgctaaaactaatggcttttcctacctaggaacaaagaaacgccactgtacatgcacggttcccggcctgtggagttgtgggaggaaggcgatgtctggccttttttgcacagctgctgttgcctgcccggagatcgggaactctgccccgtaggactggaagaaacctcagtaatgggaataagactttgtccaatagggggctgatgaatgtgtgggggcgacaatggcaaggagtgggactcccggcccggggttcgccaaccccaggggccacaggtcctcctacaattgaaccagaattcacccacccgggcctgccctgtgcagggtgccgagagcccagggatgcatgagagggtggctcctgcctctgggaactgggacagtgggagagacggataagttgtcacacagaggctgctgggaggaaggaggagacagaaggagtaggggatgggacttcattcgttcatcaaatgcacacgaggcacaaatgggaatcaagggtggatgtgctgtgatgaagagaagtcctgccctgaacaaggtggcgctgtggaggaggcagagatcagatttgtctgcggaggtgttatggactgaactgtgtccctgccccaaattcctgtgttgaaggcctaacccccatgtgactgtatttggagataaggcttttaggaagtcattaaagtgagatgatgtc

SEQ ID NO: 14009 - protein, 156 aa, Homo sapiens
MGGAAQGARTPRGAEAASAREPGGPGRSIRPGWKTFFIITSPGRSARLARRAGPALLPGVESPIFFSCGTAGPPRLAELDAGASTGRGAPREETNLTLGPGFRGGGRSPRGPKPPLPPPPPHSGGRQRRERGCPGRRAARSEHAQGELCPVVRRAL

SEQ ID NO: 14010 - DNA, 3305 bp, Homo sapiens
  CDS (41)..(586)
ctctgacaggatccggggctgagggaaggaggcggcggccatggagttgggcgagctgctctacaacaagtctgagtacatcgagacggcatctgggaacaaagtcagtcgccagtcagtgttgtgtggaagccagaacatcgttctcaatggcaagaccattgtgatgaatgactgtattatccgaggggatctggcaaatgtaagagttggacgtcattgtgttgtgaaaagtcgtagtgtcataaggccaccattcaagaagttcagcaaaggtgttgcattctttcctttacatattggagaccatgtctttattgaggaagattgtgtggtcaacgcagcacagattggttcctatgttcatgttgggaagaactgtgtgattgggcgccgatgtgtgttgaaagactgctgcaaaattcttgacaacacagtattacctccggaaactgtggttccaccattcactgtcttctcaggctgcccaggactcttctcaggggagctcccggagtgcactcaggagctgatgattgacgtcaccaagagctactaccagaagtttttgcccctgacgcaagtctagcatctctgcctcatgtcttgaatctgcttgagctctaagatgaacctggggacaaagtgagccagtcagcacctacaaagagcttttgtgtctttgacatctaccaccctcctccttttaaaaaatttctttagaatttctcaatcttcaaggctctaagtgcttaagaattcactaacagacagaccatctggaggagctgtcttcaaatgctgtgcttacaccttatctatgaacagtcactttgtaccattatctgtggaacacagaatcatctgttcccaacactccagccccttggtcctgtggatggctggatcccgcctgaaacggacctgcagagcagcagcacccttccggtgtggaggctatgtagctggtgcgctgctcacggccattcactgcccatgctgagcgcctctcacacaggtaatgcccagcttttctgctgctaacacatttggccagttgttgcagttgctcatcatcttgggaaaggtgtttgtgacttttcagagcccagattcctgttgtctattaaaacttgaagggaggggtgaatagtgtttctctcttcttcccaaaatgaccttagctgtcctaggatagttagtaaaagactttttagcattttgacctagggcctttggctttcactaaaagtggggacctcagtatcccagattgtaattttgccaagtgttagatttgagtctctcatgtggatgcattagtcaggtggttactccttgcttcaaggtacttaccttatttcattgaagacaccgcatttgtgaactcttgcttcctggcctagaaccattcagcctaccctgtatttgccataaactccacaattcacaccaaaatgtctgtacttagagctaattcgcatatatacaggaagggctcttagaatcagtttgtgggcacagagcctcaggagtaaatgaagttactagggctgttcttaccatctccttctggccaaatagcacaacatttcctcgttctgctctgacctcttagcttagaaggaagattcagaagtgaggggctaagaaggttgtccttgcctaatgctctgatctgtaagtgaatagggcagaacagttcagccttgaggttagaatttagcaggagctatcctgacttaatatccagttgtggggtttgcaaaacaaaacagctgtatgtaatcattgccactagttccatctagaactcctttctagtttgttatttttaaaatgtttatacataaaaccaccaaaatacatagcttcgacaagatggaagtttatttctctctcccataacagtgcagtgatagtcagctggtccaggccaggcaaggggctggtccatgatgtcatcaggcacccaggttcctactgtcttgccatgtggccacagttagcaacaaaggaggctgtaaatttagtttctacttgggcagccaaaactctgaggaaggagattctgctagtaaaaaggagtgggggaagaatggccattgggagacaacaagcagactcaaccaggcctctttgttggcttcctttcctcctgctgcacatgagccttcgccgtgcatttggagccatgacagctgatagctccagacctgcatcctcctagcttgggggctctgaatgaaaggtttcttcccttccagttcgaatttggaaactcccaaagttctcaatggtttgttgtgagttccatgtcctcttggatcagtcactgtggccatgcatgtttggccacatgattaatccagtctgggtcatgaccttttcttcatccaaaacaaggtggtgggaagacaaaaacaatagctactacaaacaataggagtttataattatgtgctgatgtattcgaagatgtgttgacagtcgtgagtgtgtatcctaggaaaggcgagctggactctgtctccatggtggctctcaccccagggacctaggaacagcctgtcaccacacaattacttttataaccctggagatgaaaatctccttgtcctcaaaatacttccagaagaacaaccagatgggaaggaccttggttgggactctttccagttcacttggggcagagggaatttaatggctcatgtagctgaaaaggatgggctagattgggcttcaggctgcatcccaggactccaaacagggatctgtctctttggctctcagctctgctttcatttgagttggctttattcttgggcttcacagtgtggccccacagcaccagttattgataaaaagagctcccctttgctgacagaactgctggatttggttctcattggtccagacgaggaaggtatccagcctcaagtcatcattgtggccaggaagatggaatacaccaaatggacaggcctggcatgtacccacagagactgagagttggtgctggtggttgtggtggcagatgatattacctgaagaagggacgaatgggtgctgggcaggacaaagcatcagctgtccagttcaggcctctcctctttccctggtgtcttcattttcctccgcctccctgctgtcccttaccctctgcccaatctctcattactcctggtcttgggagttgccttctgaggatactccactgggggtacctgagcctggattagagggcagggggaggatattgcctagccaaagtgggtgttcaataaaaaaccatttggagatgg

SEQ ID NO: 14011 - protein, 182 aa, Homo sapiens
MELGELLYNKSEYIETASGNKVSRQSVLCGSQNIVLNGKTIVMNDCIIRGDLANVRVGRHCVVKSRSVIRPPFKKFSKGVAFFPLHIGDHVFIEEDCVVNAAQIGSYVHVGKNCVIGRRCVLKDCCKILDNTVLPPETVVPPFTVFSGCPGLFSGELPECTQELMIDVTKSYYQKFLPLTQV

SEQ ID NO: 14012 - DNA, 2133 bp, Homo sapiens
gaaaaacaatgtttttagagacagggtgttgctacgttgcccaggctggactcaaactcctgggctcaagcgatcctcctgcctcagcctcctcagtagctgggaatgataggcgcgtgccatcatgcctgtatgaagtggaaatgaaaggctggtataagctgtaaagtctttttgttcttagagatttttttctcattctaaacattatcagacctgaaaagtatttgtcgtaatgactgagacggtcctggggtaacagcgtcttcttaacggccactttaattggcgtagtttacacctagcctctccgagaactggaggacactggtaatcactattagatattgagtgctgactgtatggcagacacataagcattggtgatctcctgtgaggcaggtattgttattcccaatttatagatgaagaaacagaagtcagtgaggtggagtccgtttttgaggtcacgcggctagtaattggagcctggtttagaaccaagtcagtctcattccagaatccagaaccagtgatttgtaactgatgcacttgtctccaaagggatccagcactgggttttctcatttttaatgcatccattccttaaagcctctgttcacagtcacaaggtgtactttttaaaggaacacagcacacaaatgtgaccgctagtggacagcagtggcagcccagttggatggcagagcctggcatgccgactgggacagaagccccagcacacggtgtgatgatggcgtctccaggctgacctccatggcctcaggaatcaaagtcctcggtctctttcacgcggggttcagaaagaaaactcggctatcttacatctcctctcccctgtttatttgactaaagtgaagttcatgtggcttgagcctcgtttcctggggaaatcagcctggcttaggattccattgtcttctgggactgggaagatgtggaaggctgacctcacgcccagctgaaggtcaccttcccagactctgagctcggctgccttctgcatcgccacggctggagggcctggcccaggccgtggctgcatgctggctttccactgtctcggtgtccctgctgcctgtcagtaatgtgcccagcaccttctggtgtcatgtcccctcttgcttgtgattcttttcctgagctagtccattttctacctcgagtctgctctcctgccattcccaggggccacagctcagtaatgtgggtgtcagggaaccccaggccaggcccccttgtgccactgtggctctccccaaagcagggcaccaggctggctgggggggtcctgcccagagctgccccacgctgccgtgtttgtgctgctgctgtgcagtggtgatcttgccaaaatgtggcttttcctttctcactcccccagagctcccagaaaagtctctaggacttttcttccccctaaataaaagtcaggatgtgaagccttttgacagaattggagtttactgtcatctgtttccgtttctctaagatagggatcctggcgaagcccatgaaagccatggggcgctcccaccgaagcctccgaggcacagacctcccgggagtgcctgtgggcgctgcttccttaaactgcaggaggctgcagcctcttgttgttcatgcgtcgttttttcatagtgtgtgtgggtttagagctacatgggttcttttctcacttatctgttcataccgcatgacaccgtccacttcaggcacagttgacggccgtctggaggtcatcagctgagggcacagtttgcctggttcttctataataggttaagtatttttttctccatttttttcccttttaaaagtactgctagaaggccaggtgcggtgtctcacacctgtaatcccagcactttaggaggccaaggcgggcggatcagttgaggtcaggagttcaataccagcctggccaacctaaggaaacctcatctttactaaaaatacaaaaattaaccaggtatggtggtatgcacctgtagtcccagctactcagaaggctgaggtgggaggatcacttgagccttggaaagagaggttgcagtgagccaagatcacaccactgcactccaccctgggcagtgagtgagaccctgtctc

SEQ ID NO: 14013 - DNA, 2134 bp, Homo sapiens
atggctcggtgcagccttgaactcctggggctcggggaatccttccacctcagcctcccgagtagctgggactgcaggcgtgcactaccatgcctggctaatgacattgcttttatgaagcaaaacataggatgttgtcgggcatggtggctcacgcatgtgatcccagtgctttgggagcctggggcgggcagatcacctaaggtcaggagttcaagaccagcctgagcaacatggtgaaaccccgtctctactaaaaatacacaagttagccgggcgtcgtggtgtgcacctgtagtcccaactactcgggaggctgagacagaaaaatcgcttgaacccaggaggcggaggttgcagtaagccaagattgtaccgctacactccagtctgggtgacagagctagactccctctcaaaagaaaaaaaaaagatgctgtttatgtacattccaagaacaaaagaaacctggccattccaacaagtgatcccaacgatcagatgctgtcctccccaagtccagagtccttacacctaccttctcagggacctgccaagctttcagcctgggggctaaaattccaataaaattgtttcagtttacattattttaaaaaattatttatttgagacagggagtctctctgtcgccaggctggagtgaagtggcgcgatctcagctcactgcaaccgccgcctcccgggtagctgggattataggcgtgtgccaccacggccaggtaatttttgtatttttggtagagatggggtttcgccatgttggccaggatggtctcggtctcttgaccttgtgatccacccaccttggcttggcctccggagtgctgggattacaggtgtgagccaccgtggttacattaatggagagttcaggattggaaggaaactaatgtcaagggctagatgtactttaaagttctttgaagtgggtggcggtgcctccatgtcaaaggtaaggaaacacagccgggtgtagtggtgtgcacctgtggtcccagctactcaggagaccgaggtggaagaatcgtttgaggccaggagtttgagaccagcctgggcatcatggcgagatcccatctctacaaatttaaaaaaattagctggatggggcagtccctagctgcttgggagcctgaggtgggaggatcacttgagcccaggaggttgaggcagctgtgagccatgatcctgccaccacacaccagcctgggggacagagccagaccctatctcttaaaaaagaaaaaataaggaaacaagtcccaaagcggtaaagatgaacaccaagtaagagcagggccaggatttacccttctggtctggaagcacatgttttgtgtatgtgggaggggaggggggttttgctctgttggggatactaacccccctattcccacatccctcagagtgctggctatggccacttgtctgagaaccatccaacaacatggcaaaaatgcagaattcttgcacttcaaacagactctggggggtaggacctaagtatcaatgtgtttaaccagcttcccaggggcatttgagaggcaaatgctaaagcagatgaagttcctgccctcaagaggtttagattctagttagggaaacagacaataaaccaatgtaaggtaagtcaagttccaggaagaaaaagcaggataagaaaacatgccaagagtgttgttttagacttggtgccaaggcagtggttcccttttggacaccacggactggttttgtggaaggcaatttttctacggatagaggggtgcgggggtggggggaatggtttggggataattcaagcacattccacttattgtgtactttattatcgcattgtaatggataatgaaacaattctataactcaccatcatgtagaatcagtgggagccctgagcttgttttcctgcaactaggtggtcccatctggaggtgatgggagacagtgacagatcatcaggcattagattctcataaggaggccaggcacggtggctcatgactgtagtcctagcactttgggaggccaaggtgggcggatcacctgaggtcaggaattcgagaccagcctggccggcatggtggaaccctgtctctactaaaaatgcaac

SEQ ID NO: 14014 - DNA, 1879 bp, Homo sapiens
aattgttagtcaagatggatgtagaaattttccatatgggatgtttctctttgaattcatgttgttaaaatgatttcttttggtggagtgctgatcttttttatgattgtttcatatagataagaacagactacaaaaaaatatgcctttcaatcctgaagagtaacctgaactatacactagttttgtgctttaattttcatttgtaatctgccttcaataaagagttaagctagtggaatttatgtcttagcttgttataacacaaacacgaatatttgtctgcttggcattaaagggtaaagatattccatagctgggaatcttaatctgaggtacgtgtaaacattcagggactatatgatctctgagaatttgtatgttgtaagtctttgtggcagtgtatacatttgtgttgcaacttattaacacatacaccgggctttttttttttttttagaagattcgtagctttcatcatattctcaaaaggtttctgtgacccatgagatggtttacagtatggggaagcatcaaagcacttgcatagttgatggttatatgtgtgtgttattatttcagccacccattatcatgtgcttaccaactgcctaacagtgcatacatatgtagaagttttattcttttctcctgttgccatattatacgtctcatttcacagcagaaaaacaactgcatgacagagacaatgtggttcaaaccattttacccttgtattcattgactgctacaaaacaggaacattaaatacctgattgtcaccaaattgggtagtctcagcacttctacactcgtaattgtgctggaaaagtggaatgctagcactaataattagattttggtttggagggttttttatttgtttattcttacttgtataaatttatggggtgcaagtgtagttttatcacatgcatagattgcattgtagtgaagtcaggacttttagggtgtccatcacccatgtaatcacgttgtacccattaagtaatctttcatcatccacctccttcccaccttctcaccctttggaatctccattgtctatcattccacactccatgtccatgtatacacattatctagctcccatttataattgagaagatgtactatttgtcttttatgtctgacttgttacacttaaggtaagggctatccatccattttgctgcaaatgacatgatttcattttgttttaatggctgagtaatcattcgttgtatatataccacattttctttattcagtcatctgctgatggacacttaggttgattccatatctttactattgtgaatagtgctgtaataaacacatagtgcaagattttggaaattttacttttgtggcacgttgttggtatttactcaggatctttggatttgcttggctgcatgtatatgaatcagtgtgtttatttactgaaatatgtgcaaaagtcttgtctttggtggattaatttataatataaatccacaaaagtcagattctgctcctaagtatattttacatttttaaatttaatgccagcaagaagttacagtactagaattgccttacccctgagagtatcaatgatcagatcatagtatcaggtgactgggctatagaagatgacttttattacttaacattatgaagttactagggctgatttagaaatcgaggaacactggtgaaaccccgtctctactaaaatacaaaaattagctgggcgtggtggtgggcacctgtagtcccagctactcagaaggctgagtcaggagaattgcttgagcccaggaggcagaggttgcagtgagccgagatcgtgccactgcactccagcctgggcgacagagtgagactccgtctc

SEQ ID NO: 14015 - DNA, 1991 bp, Homo sapiens
gttaaaaatgcagatttctggacttccacagtctaccaaaccaaaatagatggcaatgaggcctggcaatcagcactttaaaaattaaacaggagtttctggtagtgatatgaaattggggaggtgatggcaggaaagggaaagaggggaaagatggatttttctgataatatttggtaaaaagttggtatcatctcctaaaaatatataactgaaaggaagcaaggaggatggagttaaacaggctatttgtgaataaaaacaataataaaataaactttagaaaatctacatgtggaacttactagaggagcttagatccaaggttctatgtttttgaaaaatcacttttcctttttgtgtttggcgtcactgagtatgataggatggactaaatctttctatctaagagtgttctcttggaataaaactgggggttgagaaggtgtgggaactctttagggccccatcaggtgtgctagaatagtaacttgttaaacagaaacccacgaggtaaatacaatgttccaaagcaaacacttgctcccaggaaatagcttatgcactatgagaatctttcgagaatcatagaatgttggagctgcaagggacctcaagagatcatcaaatccaacctcttccttttaaggaggatggaattgaacttcccgtcaggcaagtgacctgctcagggtgtgacagcaagtccacattagaactgggactagaacccacgggtcctggtggcaagcctagtgctccctccgtgactcgctgctcagtctttttagtgcctgatcatatttcacatttgcttcttgagaaaacgtttcaccaatgattcagttacaaacacagaaggtttcaggcttcttcaaaggacgtagactgaagataaaatagtagtaattacctgatggaaagtctgaggacaaacagctccaaaaaggctgattcaataagtaatgtctgatcttctttggggagatcagtaaatcccggaatcttttctgcccagcttctggatacatcaatggaagctgtcaggaggttgtagaattgttgcacatgctcagcatctgtgcctgcagcagcctggtcagtgggacagtactagaatgcaaaccagagagagcagcattatcctgcttcagtggggatgatggcatcacttgcaaacaggcccttccaagaccatcaatgcctaaattcttacttttaggtgttacagtttataaaaccccttcacattcacagtctcatgtgattctcacaatggccctgtgatacaaatacagcaaattttatcgttatcacttaatagacaaggaaatttgcttaagccgaattggcaaagtggttttcacccttgactgtgcagtgcaatcacctggggagcttgaagaaacaactcttgtctgggtcctgcgcctagagattctcatttaattggtctggggtggagcccaggggtcaagaattttaaaagctccccaggtgactccaaagtggagtagcccaattgagaactactgccccaggagtttgtgtccaagtagatctcaagggtctactcatttcactatagcacagctgtctccccatgagatgctaaattaacccagtggttctcaaagtgtggtctccagactggcagcatcagcaacacccaggaatgtgttagaagtgataatttcggcctgggcggtggctcatgcctgtaattccaccactttgggaggctggggggtgggggggtggtggtgaatcacctgaggtcaggagttcgagaccagcctggccaacatggtgaaaccccatctccactaaaaatataaaaattagctgggtgtggtggcatgtgcctgtaatcccagctactcgggaggctgaggcacgagaatcgcttgaacctgcaaggtggaggttgcagtgagccaagatcgtgccactgcactccagcatgggtgccagagtggcactctgtctcc

SEQ ID NO: 14016 - DNA, 2248 bp, Homo sapiens
  CDS (63)..(1187)
ggcagccgcagaagcggcagcggcggcggcgcggcgcaggcaccggcccggggagaggcaccatgagcggatcacagaacaatgacaaaagacaatttctgctggagcgactgctggatgcagtgaaacagtgccagatccgctttggagggagaaaggagattgcctcggattccgacagcagggtcacctgtctgtgtgcccagtttgaagccgtcctgcagcatggcttgaagaggagtcgaggattggcactcacagcggcagcgatcaagcaggcagcgggctttgccagcaaaaccgaaacagagcccgtgttctggtactacgtgaaggaggtcctcaacaagcacgagctgcagcgcttctactccctgcgccacatcgcctcagacgtgggccggggtcgcgcctggctgcgctgtgccctcaacgaacactccctggagcgctacctgcacatgctcctggccgaccgctgcaggctgagcactttttatgaagactggtcttttgtgatggatgaagaaaggtccagtatgcttcctaccatggcagcaggtctgaactccatactctttgcgattaacatcgacaacaaggatttggacgggcagagtaagtttgctcccaccgtttcagacctcttaaaggagtcaacgcagaacgtgacctccttgctgaaggagtccacgcaaggagtgagcagcctgttcagggagatcacagcctcctctgccgtctccatcctcatcaaacctgaacaggagaccgaccccttgcctgtcgtgtccaggaatgtcagtgctgatgccaaatgcaaaaaggagcggaagaagaagaagaaagtgaccaacataatctcatttgatgatgaggaagatgagcagaactctggggacgtgtttaaaaagacacctggggcaggggagagctcagaggacaactccgaccgctcctctgtcaatatcatgtccgcctttgaaagccccttcgggcctaactccaatggaagtcagagcagcaactcatggaaaattgattccctgtctttgaacggggagtttgggtaccagaagcttgatgtgaaaggcatcgatgatgaagatgtggatgaaaacgaagatgacgtgtatggaaactcatcaggaaggaagcacaggggccactcggagtcgcccgagaagtaagtttgtgtgtaaggtggagtctcaccgtcccccaggctggagtgccgtggcgtgatctcagctcactgcaacctccacctcccgggttcaggctattctcctgcctcagcctcccgagtagctgggattacaggcacctgtcaccacacccagctaatttttgtatttttagtggggatggggtttcaccatgttggccaggctggtctcaaactcctgacctcaggtgatctgcctgccttggcctcccagattgctgggtttacaggcatgagccaccacgcccagccttcccttgcacttttaatgagggggttaagttcactgttttctctttctatggtattgggtaaaataggtctgcaagctttatatttgcccagggtatcattcattcttcagttgttgatttaggagtgttatttggaaggagtattatttgctcttcccctgagaactgaaagaggggaagggagtacatttgagggcacttaatacaaagttaatgtcagaatgtgtgccttgaaattcttgctttatacatacatctgtcattttcatttcacagggttcacagggtttcacagtctgatgagactgtgcctgttattgttttttatttttactctggattttccttgcatctgacttgccactagcacaggaagctcaggacgaaggcagcgttaggagaatagttgtggtatggtgacttctgtgtttatctgcaggagtgtgaatagccgtaacttgcctgcacctgctgccttaacagtggagttggccaggcgcagtggctcacacctgtaatcccagcactttgggacaccagggtgggtggatcacctgaggtcaggagttctagaccagcctgaccaacatggtgaaaccccttctctacgtataaaaaaatacaaaattagccaggcatggtggtgcatgcctgtaactccagatacttgggatgctgaggcaggagaatcgcttgaatatgagaggcggagccaagatgatgccattgcactccagcctgggcaacaagagagaaggtccttctc

SEQ ID NO: 14017 - protein, 375 aa, Homo sapiens
MSGSQNNDKRQFLLERLLDAVKQCQIRFGGRKEIASDSDSRVTCLCAQFEAVLQHGLKRSRGLALTAAAIKQAAGFASKTETEPVFWYYVKEVLNKHELQRFYSLRHIASDVGRGRAWLRCALNEHSLERYLHMLLADRCRLSTFYEDWSFVMDEERSSMLPTMAAGLNSILFAINIDNKDLDGQSKFAPTVSDLLKESTQNVTSLLKESTQGVSSLFREITASSAVSILIKPEQETDPLPVVSRNVSADAKCKKERKKKKKVTNIISFDDEEDEQNSGDVFKKTPGAGESSEDNSDRSSVNIMSAFESPFGPNSNGSQSSNSWKIDSLSLNGEFGYQKLDVKGIDDEDVDENEDDVYGNSSGRKHRGHSESPEK

SEQ ID NO: 14018 - DNA, 1835 bp, Homo sapiens
aaaaaaaaatggaaaaagagaaaaaagtaaaaagtaggtaagaaaaaatgaagaaattaggaagtatgtgtttgtatacagcctgccactaccgattatatttaatattcaaatgtgtaccttttaaaaatcaaagttcaaacttacagggtacttagagatttaaaagggaacaagtcatcagttcctatctcaaaactggcccatttacccttctttcctctttctcatttctgatcctggaaacaaaattattttctcatacaacatcgagagcattgcagacaatgtattatagtgagcaagtatgtgcggtagaggcagattctgagtttaaatcctgattctgctagtagttgttgactttggacaaattattaaccactaaggtttccgtcattcatctgtaaaatgaggataataacacttttcctgtaggagtattttttaaaacaacatgtaaaaagtatgtattgtagtgccagcgcataaaagtaatttgttaaaatcgtttcctccttttgtctgccctttcttttccaatcctactgctataacatgaattcggggatttatcgtcttgtatctactagacaccatggcagccttcataccaattgctaacttcccttctccattccattccaagcacttctattcaatatgtttcctttaatccagattttcatcagttttgaagcacatcataatcctttaaaaattcctcaggccaggcacaatggcagatttctataatcccagcactttgggaggccaaggtaggggatcacttgagcccaggagtttaagaacagcctgggcaacacagcaagaccctgcctctacaaaaacatttagaagaatttttttttaatagccgggtgtggtggctgtatgcctgtagttccagctactcaggaggctgaggaagaaggattgcttgagcccagaagttggaggctgtagtgagctatgatcatgacactgcattccggcctggatgacagagtgagaccatgtctttaaaaaaagaaaagtttctcaccatccatagataattaaacatttccaggccgactgaattcctccacggagaagacaggagagggattcagaaccaacctgagcccagggctgctccactccctgctctctaccttcttccccttgggtttgagcccagattttaggtgagatgagctttcagctggtggaacatctctcttccgttttgctgtgataacaactctagttcttatgtggagggaggggttaaagtgcattggagtgcactatccctccacagaagtgcttcaccctgcagcgcaaatgtgcttcctcctgggttgggcatctagcccaggtatttctgagtctgacgatcatggagtgaaggccgaagaatgtggataaagaaagggaaggagaatcaaataatgccccccaagttactaagtgtcttgctgaacttttgctttttctatgtgggtgaaggtaaaaagagataactcgagacagtgcaggaaaaatatcatttaaaacctaaccttgaggctgggcgtactggctcaggcctgtaatcctagcactttggaaggctgagactggtggatcacctgaggtcaggagttcaagaccagcctggccaatgtggcaaaaccccatctctactaaaaataccacaattagctgggcatggtggtgggcgcctgtaactccagccactcgggaggctgaggcaggagaatcacctgaatccggtggggcggaggttgcagtgagccgagattacgccatttcactccagcctgggcgaaagagcgaaactctgtctc

SEQ ID NO: 14019 - DNA, 2133 bp, Homo sapiens
  CDS (125)..(451)
ctcacaactgccccatgcccctcaatccacgctcatgcacctgccctgtctctgtctcctgcctccagaccttccgtcataagctggtggagcctgtctgtgctttctggaactacagtatcagatgagtttccatttccaggttcttttttttttttttttgagatggagtcttgctctgttgcctaggctggagttcaatagcacaatcttggctcaatacaacctccatctcccgggttcaagcaattctcctgtctcagcctcccgagtagctgagattacaggcgcccgccatcacgcccaactaatttttgtatttttagtagagacagggttttgccatgatggccaggctggtctcgaactcctggcctcaggtgatccacccacctcagcctcccaaagtgctaggattacaggtgtgaaccaccaaacccagccgttaagatgatttttttaaaaatatgtccactctgcttggggatgaggcaagacttacacatggttttgacctctgttcaccatctgcctttcagggtgactccaggctcctcccagctctaagacaagctgcagcgggaggatgtgttacccagggggtagtgagctccttgtcataggagtatgtgaaggaggaagcactcactctgtgaggtgcctaggaagagaatcatctgtcaaatgggcgttgaacttgatctatctgaggccggggcccgtggactcttgaaggagcagagcaggctccagggattatcctggctccctgccctggatctttagctgaggtagggaaccttggtcccagtggctcagtaattaattaagttgataaatgacagtcactgggatcagccctgccctcctaccatcctaagaatgtcaagcacattttacaggtgaaaaactgagacccaggaaggggcggtgactcgccaaggtcacctagctggttagaggcagggcagtgacaggccccaggctctggggaaagcctttcccctgcttgcttctggcccctcacccccttgtccaccttatctcaagagccccctgttccctccccatcccccaagcccatatacagggggtgcctgggccaccacgggctgctccgtggctgccctgtacctggactccaccgcctgcttctgcaaccacagcaccagcttttccatcctgctgcaaatctatgaagtacaggtgagtgcacggtgggaggggggtgtcaggagggggcttcttagctggaggtgaagagaagagccaataggtagccagaagaagcatctgagggatgccagctttcatagattgtcggggacagggctgcacgcagtagttcatgcctgttgtcccagcactttgggcggctgatcacttgagcccaggagttcaagaccagcctgggcaacatggcaaaaccccgtctctaccaaagatgcaaaaattagccaggtgtggtggctcgtgcctatagtcccaactattcaggaggctgaggcaggaggattgcttgagcccaggaagtcgaggctgcagtgagccaaggtcacaccactgcactccagcctgggtgacagagcaaaaacctgtctaaaaataaatgagtaaataataaattgtaaaaaaaattgttgggggaaaactctaagaggatgtcaggaggggtcggattcactggagctggaaagggccccggagtggttacttgctgagaagtcaggtgagatgggacgtgagcctcaggaacgctggggtcactacaaggaacaccttgtagtgttgaggggcacactacaaaaacatgttaccaaatgcatttttcctgtagagtcagggccaggcacggtggctcccacctgtaatccgaccactttgggaggccaaggcaggcggatcatttgaggtcaggacttggagaccatcctggccaacatggtgaaaccccatctctactaaaaatacaaacattagccgggcatggtggcccgtgcctgtggtcccagctactcgggaggctgaggcacaagaatcacttgaacccaggaggcggaggttgcagtgagctgtgagctgagattgcgccacttgcactccagcctgggtgacagactgtcttgaagcaac

SEQ ID NO: 14020 - protein, 109 aa, Homo sapiens
MSFHFQVLFFFFLRWSLALLPRLEFNSTILAQYNLHLPGSSNSPVSASRVAEITGARHHAQLIFVFLVETGFCHDGQAGLELLASGDPPTSASQSARITGVNHQTQPLR

SEQ ID NO: 14021 - DNA, 2404 bp, Homo sapiens
  CDS (97)..(2214)
gcaacccggaaggtccggcgtcccagccgcctacctcgctgggaccctggtcttgctgtcccccgctggcctcctgcccaagcgactgcggccaggatgggccggaaggtgaccgtggccacctgcgcactcaaccagtgggccctggacttcgagggcaatttgcaaagaattttaaagagtattgaaattgccaaaaacagaggagcaagatacaggcttggaccagagctggaaatatgcggctacggatgttgggatcattattacgagtcggacaccctcttgcactcgtttcaagtcctagcggcccttgtggagtctcccgtcactcaggacatcatctgcgacgtggggatgcctgtaatgcaccgaaacgtccgctacaactgcagagtgatattcctcaacaggaagatcctgctcatcagacccaagatggccttggccaatgaaggcaactaccgcgagctgcgctggttcaccccgtggtcgaggagtcggcacacagaggagtactttctgcctcggatgatacaggacctgacaaagcaggaaaccgtacccttcggagatgcggtgctggtgacatgggacacctgcattggaagtgagatctgtgaggagctctggacaccccacagcccgcacatcgacatgggcctggatggcgtggagatcatcaccaacgcctcgggcagccaccacgtgctgcgcaaagccaacaccagggtggatctcgtgactatggtcaccagcaagaacggtgggatttacttgctggccaaccagaagggttgcgacggggaccgcctgtactacgacggctgtgccatgatcgccatgaacggaagcgtctttgctcaaggatcccagttttctctggatgacgtggaagtcctgacggccacgctggatctggaggacgtccggagctacagggcggagatttcatctcgaaacctggcggccagcagggcgagcccctaccccagagtgaaggtggactttgccctctcgtgccacgaggacttgctggcacccatctctgagcccatcgagtggaaataccacagccctgaggaggagataagccttggacctgcctgctggctctgggattttttaagacgaagtcaacaggcagggtttttgctgcccttgagtggcggggtggacagcgcagccaccgcctgcctcatctactccatgtgctgccaggtctgcgaggccgtgaggagtggaaatgaggaagtgctggctgatgtccgcaccatcgtgaaccagatcagctacaccccccaggatccccgagacctctgtggacgcatactgaccacctgctacatggccagcaagaactcctcccaggagacgtgcacccgggccagagagttggcccagcagattggaagccaccacatcagtctcaacatcgatccagccgtgaaggccgtcatgggcatcttcagcctggtgacggggaagagccctctgtttgcagctcatggaggaagcagcagggaaaacctggcgctgcaaaatgtgcaggctcgaatacggatggtcctcgcctatctgtttgctcagttgagcctctggtctcggggtgtccacggtgggctcctcgtgctgggatccgccaacgtggatgagagtctcctgggctacctgaccaagtacgactgctccagtgcggacatcaaccccataggcgggatcagcaagacggacctcagggccttcgtccagttctgcatccagcgcttccagcttcctgccctgcagagcatcctgttggcgccggccaccgcagagctggagcccttggctgatggacaggtgtcccagaccgacgaggaagatatggggatgacatatgcggagctctcggtctatgggaaactcaggaaggtggccaagatggggccctacagcatgttctgcaaactcctcggcatgtggagacacatctgcaccccgagacaggtcgctgacaaagtgaagcggtttttctccaagtactccatgaacagacacaagatgaccacgctcacacccgcgtaccacgccgagaactacagccctgaggacaacaggtttgatctgcgaccatttctgtacaacacaagctggccttggcagtttcggtgcatagaaaatcaggtgctacagctcgagagggcagagccacagtccctggacggcgtggactgaggccggttccttcctggaggcctcctgtcctcggggaccccagcacctcatcatcagcattgctggagccaagggtaggagccctacactaggagcccaggatgggacggcgcatcagccgagagggagggaacttttcagtcaaattcctcaaaaagaggctggaataaagcctgggcttaaaaag

SEQ ID NO: 14022 - protein, 706 aa, Homo sapiens [sequence omitted]

SEQ ID NO: 14023 - DNA, 1942 bp, Homo sapiens
  CDS (282)..(1160)
atatttgaggcaccatccctgccattgccgggcactcgcggcgctgctaacggcctggtcacatgctctccggagagctacgggagggcgctgggtaacctctatccgagccgcggccgcgaggaggagggaaaaggcgagcaaaaaggaagagtgggaggaggaggggaagcggcgaaggaggaagaggaggaggaggaagaggggagcacaaaggatccaggtctcccgacgggaggttaataccaagaaccctgtgtgccgagcggctgggccagttcatgaccctggctttggtgttggccacctttgacccggcgcgggggaccgacgccaccaacccacccgagggtccccaagacaggagctcccagcagaaaggccgcctgtccctgcagaatacagcggagatccagcactgtttggtcaacgctggcgatgtggggtgtggcgtgtttgaatgtttcgagaacaactcttgtgagattcggggcttacatgggatttgcatgacttttctgcacaacgctggaaaatttgatgcccagggcaagtcattcatcaaagacgccttgaaatgtaaggcccacgctctgcggcacaggttcggctgcataagccggaagtgcccggccatcagggaaatggtgtcccagttgcagcgggaatgctacctcaagcacgacctgtgcgcggctgcccaggagaacacccgggtgatagtggagatgatccatttcaaggacttgctgctgcacgaaccctacgtggacctcgtgaacttgctgctgacctgtggggaggaggtgaaggaggccatcacccacagcgtgcaggttcagtgtgagcagaactggggaagcctgtgctccatcttgagcttctgcacctcggccatccagaagcctcccacggcgccccccgagcgccagccccaggtggacagaaccaagctctccagggcccaccacggggaagcaggacatcacctcccagagcccagcagtagggagactggccgaggtgccaagggtgagcgaggtagcaagagccacccaaacgcccatgcccgaggcagagtcgggggccttggggctcagggaccttccggaagcagcgagtgggaagacgaacagtctgagtattctgatatccggaggtgaaatgaaaggcctggccacgaaatctttcctccacgccgtccattttcttatctatggacattccaaaacatttaccattagagaggggggatgtcacacgcaggattctgtggggactgtggacttcatcgaggtgtgtgttcgcggaacggacaggtgagatggagacccctggggccgtggggtctcaggggtgcctggtgaattctgcacttacacgtactcaagggagcgcgcccgcgttatcctcgtacctttgtcttctttccatctgtggagtcagtgggtgtcggccgctctgttgtgggggaggtgaaccagggaggggcagggcaaggcagggcccccagagctgggccacacagtgggtgctgggcctcgccccgaagcttctggtgcagcagcctctggtgctgtctccgcggaagtcagggcggctggattccaggacaggagtgaatgtaaaaataaatatcgcttagaatgcaggagaagggtggagaggaggcaggggccgagggggtgcttggtgccaaactgaaattcagtttcttgtgtggggccttgcggttcagagctcttggcgagggtggagggaggagtgtcatttctatgtgtaatttctgagccattgtactgtctgggctgggggggacactgtccaagggagtggcccctatgagtttatattttaaccactgcttcaaatctcgatttcactttttttatttatccagttatatctacatatctgtcatctaaataaatggctttcaaac

SEQ ID NO: 14024 - protein, 293 aa, Homo sapiens
MTLALVLATFDPARGTDATNPPEGPQDRSSQQKGRLSLQNTAEIQHCLVNAGDVGCGVFECFENNSCEIRGLHGICMTFLHNAGKFDAQGKSFIKDALKCKAHALRHRFGCISRKCPAIREMVSQLQRECYLKHDLCAAAQENTRVIVEMIHFKDLLLHEPYVDLVNLLLTCGEEVKEAITHSVQVQCEQNWGSLCSILSFCTSAIQKPPTAPPERQPQVDRTKLSRAHHGEAGHHLPEPSSRETGRGAKGERGSKSHPNAHARGRVGGLGAQGPSGSSEWEDEQSEYSDIRR

SEQ ID NO: 14025 - DNA, 1913 bp, Homo sapiens
taggggtacttgaacacaagcactgcgatacagtcatctgataaccgagacagtcgatctgatcaccgagactgctactaagtgactaatgggtgagcagcatgaatatgctggacagagggaggatcacctccagggcagcaaggggcaagatctcatcatgctcctcagaatgctgtgcaattaaaatttatgaattgtttatttctggaatgttccatcaaatatttttggactgctgttgagcgtaactgaaaccatgaaaatgaagccatgggtaagaggggactactgtataccatttctttttttagtctccctgctactctccactaggagaataaaggtgggagaacaaaggggtctggcaggaaggagattgcaaactatgttgtcaattcttgaaacgaatccatgagccctgtgcggaaaccctctaggtctgttcctctcaggacattaaatcattctctttttatttctaatatagtcccatgaatttatttcctaagaaactttagaaagtttacagctttttaactatatgtccatccactatttgacatcctgggggtcatcggcccacccaggagctttcatgatcaagtcaaaatcacaatgtatccattgggcttcagggcagaacatgcgtcctcagatgattgttgtacacagaaaattagggaacacagctaagatcaataccagggagctcccaaatgggagttccattttcattccttcattaaaatcataaaatccataataattcctggttagcaataaacacaaccattgtgccacatcataaatcacaccttctgatcgacagaaaatgagaatgataatattataaaataaaataacaatgataataatgccataacttaagatctttcatgtagtccagctacagaatttttacaaaatggaataaattaatgcaaacaatactgctctttgtataaattaaacattttccttcatcctaagagctataaatcacagacactacattttaaatcaatgtatcaacataaagtgtaaacaaatggatcaaacaagcaaaaggaactctaaattccctcctgcctttcctttttggctgatgcaatcagtaaaacccagaggagcggcaacattttcatgtgcattggaaatggtttaacagctgtctgtgcaagtatttcctaacgtccaacatgatgcagtgtcaaagagtccagtgaatctagagaggttgtttgacggtaatctgtcttggagacagggacaggtactaggtcaacacctatttgtacataaaattctaaaaaaatttttccttaaggccaaggcaccatgaagtaccttggaatgcttttcagagcccatgaccctggagacaggcaggacctcatgcttttggcaatgtaaaaatccttcctatccctgctcagcatcccttgttctttccacaaatgttcaaatccagttatttaaaactgcattgatttggagtgaagtaaaagatattttacaagtagcattgaacaaaaatgctattgtgctgggagaggagttgccttttgcaagctgcttgtttttgcttttattctgacagtggtagccagtcattaagacttctaagataggccgggcacagtggctgatgcctgtaatcccagcactttgggaggctgaggcaggcggatcacctgaggtcaggagtttgagacaagcctggccaacatggtgaaaccccgtgtctactaaaaatacaaaattagccagacgtggttgcgggcgcctgtaatcccagctactcgggaggctgaggcaggagaatcgcttgaacctgggagatggaggttgcagtgaactgagattgtgccattgcactctagcctgggcagaaagagcaaaactctgtc

SEQ ID NO: 14026 - DNA, 2444 bp, Homo sapiens
  CDS (115)..(1890)
ggctccgggggtggcggtcggacagtgtctagcacgctcagtccgggcttggggccccgcggcggagaaggaggtagagggggcggcggcggcggcggcggtggtggcggcaccatgtttcttcactcagttaatctctggaacctggcgttttatgtcttcatggtctttctggcaaccctggggctgtgggatgtcttcttcggcttcgaggagaataagtgcagtatgagctacatgtttgagtacccggagtatcagaaaatagaacttccaaagaaactggcaaaacgctatcccgcatatgagttgtatctttatggagagggatcctatgctgaagaacacaaaattctccctttgacgggtattccagttctctttcttcctggtaatgctggaagttataagcaagttcgttctattggctccattgcacttagaaaagcagaggacattgacttcaagtaccactttgacttctttagtgtgaacttcaatgaagaactggtggctttgtatggtggaagtcttcagaagcagaccaagtttgtacatgaatgtattaaaacaattctcaaactctataagggtcaagaatttgctccaaaaagtgtggcaataattggtcattctatgggtggccttgttgcaagagcattgcttacactgaaaaattttaagcatgatctgataaatcttcttattacacaagccacacctcatgttgctcctgtgatgccattagatcgtttcattacagatttttatacgactgtaaacaactattggattctaaatgctcgacacataaatttaaccacactttctgtagctggaggattccgggattaccaagttcgttcaggattgacttttctaccaaaattaagccatcataccagtgccttatctgttgtgagttcagcagtgcctaagacctgggtctcaacagaccacctctccattgtgtggtgtaaacaattgcagttgactacagttcgagcattctttgatcttattggtgctgatactaaacaaataactcaaaattccaagaagaaactgtcagttttgtatcaccactttataagacacccatcaaaacattttgaggaaaatccagctataatttctgacttaacagggacatctatgtgggttctagtaaaagtgtccaaatggacctatgtagcttacaacgaatctgagaagatatattttacatttcctcttgaaaatcatagaaaaatctacactcatgtctattgtcagagcactatgctggatacaaatagttggatttttgcttgcataaacagcacttctatgtgcctgcaaggggttgatttatcatggaaagctgaactgctgccaacaattaagtatctgacattaagacttcaagactatccatctttgtctcatcttgttgtttatgtaccatctgttcgtggaagtaagtttgttgtagattgtgaattctttaaaaaagagaaaagatacatacagcttcctgtaactcatcttttttcctttggattgtcttcaaggaaagtggtgttaaatacaaatggcctatactacaatctagagcttctgaactttggacagatataccaagcttttaaaatcaacgtggtaagcaagtgctcagcagtcaaagaagaaataaccagtatctatagacttcatattccttggtcttatgaagattcactaaccattgcacaggctccatcttccacagaaatttctctgaaactccatattgctcaaccagaaaacaatacccatgtggcattatttaaaatgtacacgtcatcagactgtcggtacgaggtgacagttaagacttccttttcacaaatacttggacaggttgttgcttagaatatgctaccatgttggataaagaagccaaaccatacaaagttgatccttttgtaattatcattaagtttctgttggggtaagttttattatctgtgataatgattttaattgtgttttacatgtaacattatatttggttccataatgcaatataaattttcatacagatttggcagttgacttgtttcattaaatgaggtttttttttttctcttaggcaaaggtctaataagtatatcaatgtctacttcaatagtatcatttcaaaagtaattattcactttatgtatatcagtctaaacttagactgcctttaatgtttgtaaataggtgtatatggtccatgatctgtgagtatcctagattcaaacgcaaatcattacagggtattgatgaaacagtgcctctctgatcacttttaaaagtatattttagacctctctaccctagttaacattccattcttaatttagtcacattttcagatttttggttaagcatcaatatgtagatctttttttccatcattacaactaacttggctttct

SEQ ID NO: 14027 - protein, 592 aa, Homo sapiens
MFLHSVNLWNLAFYVFMVFLATLGLWDVFFGFEENKCSMSYMFEYPEYQKIELPKKLAKRYPAYELYLYGEGSYAEEHKILPLTGIPVLFLPGNAGSYKQVRSIGSIALRKAEDIDFKYHFDFFSVNFNEELVALYGGSLQKQTKFVHECIKTILKLYKGQEFAPKSVAIIGHSMGGLVARALLTLKNFKHDLINLLITQATPHVAPVMPLDRFITDFYTTVNNYWILNARHINLTTLSVAGGFRDYQVRSGLTFLPKLSHHTSALSVVSSAVPKTWVSTDHLSIVWCKQLQLTTVRAFFDLIGADTKQITQNSKKKLSVLYHHFIRHPSKHFEENPAIISDLTGTSMWVLVKVSKWTYVAYNESEKIYFTFPLENHRKIYTHVYCQSTMLDTNSWIFACINSTSMCLQGVDLSWKAELLPTIKYLTLRLQDYPSLSHLVVYVPSVRGSKFVVDCEFFKKEKRYIQLPVTHLFSFGLSSRKVVLNTNGLYYNLELLNFGQIYQAFKINVVSKCSAVKEEITSIYRLHIPWSYEDSLTIAQAPSSTEISLKLHIAQPENNTHVALFKMYTSSDCRYEVTVKTSFSQILGQVVA

SEQ ID NO: 14028 - DNA, 2496 bp, Homo sapiens
  CDS (329)..(1909)
aagccgaggagggctgtttaaaggcgcaggggccattttacctccaggttggccctgctcaggaccaggaggaaacacctccagcccgcgacctcctcccacagggggaaaaggaaagcaggaggaccacagaagctttggcaccgaggatccccgcagtcttcacccgcggagattccggctgaaggagctgtccagcgactacaccgctaagcgcagggagcccaagcctccgcaccggattccggagcacaagctccaccgcgcatgcgcacacgccccagacccaggctcaggaggactgagaattttctgaccgcagtgcaccatgggaagctctgaagtttccataattcctgggctccagaaagaagaaaaggcggccgtggagagacgaagacttcatgtgctgaaagctctgaagaagctaaggattgaggctgatgaggccccagttgttgctgtgctgggctcaggcggaggactgcgggctcacattgcctgccttggggtcctgagtgagatgaaagaacagggcctgttggatgccgtcacgtacctcgcaggggtctctggatccacttgggcaatatcttctctctacaccaatgatggtgacatggaagctctcgaggctgacctgaaacatcgatttacccgacaggagtgggacttggctaagagcctacagaaaaccatccaagcagcgaggtctgagaattactctctgaccgacttctgggcctacatggttatctctaagcaaaccagagaactgccggagtctcatttgtccaatatgaagaagcccgtggaagaagggacactaccctacccaatatttgcagccattgacaatgacctgcaaccttcctggcaggaggcaagagcaccagagacctggttcgagttcacccctcaccacgctggcttctctgcactgggggcctttgtttccataacccacttcggaagcaaattcaagaaggggagactggtcagaactcaccctgagagagacctgactttcctgagaggtttatggggaagtgctcttggtaacactgaagtcattagggaatacatttttgaccagttaaggaatctgaccctgaaaggtttatggagaagggctgttgctaatgctaaaagcatcggacaccttatttttgcccgattactgaggctgcaagaaagttcacaaggggaacatcctcccccagaagatgaaggcggtgagcctgaacacacctggctgactgagatgctcgagaattggaccaggacctccctggaaaagcaggagcagccccatgaggaccccgaaaggaaaggctcactcagtaacttgatggattttgtgaagaaaacaggcatttgcgcttcaaagtgggaatgggggaccactcacaacttcctgtacaaacacggtggcatccgggacaagataatgagcagccggaagcacctccacctggtggatgctggtttagccatcaacactcccttcccactcgtgctgcccccgacgcgggaggttcacctcatcctctccttcgacttcagtgccggagatcctttcgagaccatccgggctaccactgactactgccgccgccacaagatcccctttccccaagtagaagaggctgagctggatttgtggtccaaggcccccgccagctgctacatcctgaaaggagaaactggaccagtggtgatgcattttcccctgttcaacatagatgcctgtggaggtgatattgaggcatggagtgacacatacgacacattcaagcttgctgacacctacactctagatgtggtggtgctactcttggcattagccaagaagaatgtcagggaaaacaagaagaagatccttagagagttgatgaacgtggccgggtaggtgggagaccatagtcgctctgatgcctatgctcgttcagctctactacccgaaggatagtgcccgaagttgctgcttggcatagatgagcctcagcttccagggcactgtgggcctgttggtctactagggccctgaagtccacctggccttcctgttcttcactcccttcagccacacgcttcatggccttgagttcaccttggctgtcctaacagggccaatcaccagtgaccagctagactgtgattttgatagcgtcattcagaagaaggcgtccaaggagctgaaggcggtgaaatttgtcctgcaggtccctcgggagatcctggagctggagcatgagtgtctgacaatcagaagcatcatgtccaatgtccagatggccagaatgaatgtgatagttcagaccaatgccttccactgctcctttatgactgcacttctagccagtagctctgcacaagttagctctgtagaagtaagaacttgggcttaaatcatgggctatctctccacagccaagtggagctctgagaatacaacaagtgctcaataaatgcttgctgattgactgatggatt

SEQ ID NO: 14029 - protein, 527 aa, Homo sapiens
MGSSEVSIIPGLQKEEKAAVERRRLHVLKALKKLRIEADEAPVVAVLGSGGGLRAHIACLGVLSEMKEQGLLDAVTYLAGVSGSTWAISSLYTNDGDMEALEADLKHRFTRQEWDLAKSLQKTIQAARSENYSLTDFWAYMVISKQTRELPESHLSNMKKPVEEGTLPYPIFAAIDNDLQPSWQEARAPETWFEFTPHHAGFSALGAFVSITHFGSKFKKGRLVRTHPERDLTFLRGLWGSALGNTEVIREYIFDQLRNLTLKGLWRRAVANAKSIGHLIFARLLRLQESSQGEHPPPEDEGGEPEHTWLTEMLENWTRTSLEKQEQPHEDPERKGSLSNLMDFVKKTGICASKWEWGTTHNFLYKHGGIRDKIMSSRKHLHLVDAGLAINTPFPLVLPPTREVHLILSFDFSAGDPFETIRATTDYCRRHKIPFPQVEEAELDLWSKAPASCYILKGETGPVVMHFPLFNIDACGGDIEAWSDTYDTFKLADTYTLDVVVLLLALAKKNVRENKKKILRELMNVAG

SEQ ID NO: 14030 - DNA, 3537 bp, Homo sapiens
gattatcagctggagaactgaatggtacacaccttcccccttcttccaacaccatggcccccaagatgctgcacctgccgccgcctcatttagccctacaaccccctgccactcaacattatgcagagggcccaggagggtcttgcagtcatctacatacttccctgcgagttcttggtttggtccctagaaatggcagcctgcatgtggagaaggctgcatgcagcctcaggcctgcccacccgatacgaggtctgcatgtatgagttgtgtgcatcacatagctcctcaccatgctttcctacccaggaggataagctttcctacccaggaggataagctttcctacccaggaggagactcaaggcaaaacactggaaactgtgtttatacaaactccccaagtgattctggcagccagcacagaatgactgtgcacagacactcaggcatcactagctctgggcgccgcgcatttgcctgcttcatccaggacagtggctaacacttcaggtagggcccacatacactcagaataaagagctgcctggtcaggaggggggcagtcagcatgggctaagttttttacagatctctggcagacagtgttgtctgctttggctaaagagggaatgggaaggcaaatgacaaatggcctctaacgttgcaaagaataatgtgttatgtggaactcagacaagccagttctatggagaaagcagtacattgaggatgagatttctgcttgtttctttttgtttttggaggaaaagccagggctgtgggcctgacagaagttgatatttgggtcttgaatgtgttctcttccagaatcttctctttccagttttcccagcttactattgataccattcacagaagtcttgcattcagtgccctctctaggtggtacctccttataaactgggccttatgctggcatcttgggtccttggaaggatagtttcctggtgcgctggattagtcatagcctattgtagtgactctggcatggttacctcaggaacaccaccagacaaatatagaccctttaacactggctggcccttgtgtctccagacccctcccaggagttcctcacactaggaaccttgggctgctccactttgggtcacaaggacccctttgcctagcccaaagcaggcctctttggttgcttttctctggtccactctggctatgaccttcaggatcagagggcaagaagtcgagaaggacacgtctccaagatagagcactaagagctaatgggcagaactggctggagctgcttattcttggcctttttatgggtgagatgcctctagcagtgttggacatctcatcccagataccaccaggaggtgagcttgctctgggaggcatattgaaagggctgcaccatgcaaaggtcaggaactctctccactgcatgaaacatggcacaagctctggcccatctggctgtgaccagctgggcctttgctcagggctgtctgtgctgctcctcaccaggtgaggagtgaaggggaaagaagaaggagtcttgtgctcctttcagaggttggacagtgccatgacactgttcaaactgtttagtttctctggggcttctgcttggagtttaagagagacataatttattctgaagtttgccatggagagaatagcatctctattccaatgtagtcataatatatggtatcatcctgcctatttaaaaatatgtttggtagtaaaattttcagtcttattaaaattttagcccaaattcttttcctcctttcttgtttttccccaatcggaagattcggtcagtatttcccccaggggaaacacaagaacattacctaagaactttgaaattattttcagagaattcaggtgctgctggttttgaagatgcctaaaggagtttccaatgttctccaacctcgtctatggtaaaataaattccaagtaagagattccttccaacaaaaagtaaccaaaatgtgtatttgccccatcttaggtaattaaactccctaacagacttgcagatttaggcaaaaagagtggtagaatataaaagctcattaatcatcctggcatcatgagctcatattgttatgaaataaatatgcttactaaatggatccagatgccatcaaatacatgtttccaataaagactattttttgttcttgcccaggcaataaacacacgaggcttgtttataacacctcttttccgtgaatcacagtggtccatccaacacatattcttttcacctctttccctggtgaaaagtgggtacgttttctgatgaggattctggggaaaaccctaacgaggtaggagatgtttccctgtaacccagagctgatgggtgataggaaaatggaaatcacttggctaatcgtataccaacatggaagacatttgtctctattaatcttcttacccaacacatcaaagtaccaatttcaatccaagacagtaccagtccccagaggacagacttgagtctaagaggaccccctgcgatctactctgtaaggatggaatggtagaaagatgaagatatattcaattatcatcaaaccccaggctcttgatgtgggtgagctgtcttcccaagatcacccccaggagttggctcaggactggaaagcagagggggcccattggagggaggatggagttcatagtgagttgagggcagtagttaacgtggggttggagccagacacatacaagttcctatcctgattctgccacttaatagttatgaccttcaacggtattctacctctctgagtccgtttgctttattcaaaaactccaagttgctgggaggataaatgagattgttattgtaaactgcccagcacctaagatgcactaagatgtggtagctcttatcacccttcctagaaaggttattccggatggggactgatgctgtccaggagaaatggatgagtagagggaaagctgtttgttcttaatagtagaatgaaactcacatgtgtcactaaccaaggggcctgccctgctgggacaggcctccccttatagcccactccaaatctatccttctcgagttcccactcactggaatctccagccttccagattttctgggacctggagttggccagtcaccaccaccatcctatgcagctttccctttattactggaggaagtgtgaagataactttttccctcaaacgattgtaaagagcttaaaggcattaagatgagagacgggccaggcgcagtggttcatgtctgtaatcccagcactttgtgaggctgaggtgggcagatcacgaggtcaggagttcaagaccagcctggccaacatggcgaaacctcttctctactaaaaatgcaaaaatcagccgggcgtggtggtgggcacctgtaatcccagctactcgggaggctgaggcaggagaatcgcttgaacgtgggaggcagaagttgcagtgagccaagattgtgccattgcactccagcctgggtgataagagcaagactcttgcctc

SEQ ID NO: 14031 - DNA, 2108 bp, Homo sapiens
  CDS (151)..(1611)
gggggagagggtgtgaggctcggagtcgccggaggagccagtatctgtgtcgccgccgcccgcggcgtccccggtttggtgttgcggcgcccaccttcgggaggatcaggctgcttctgatgcttggaagatatcctctcagccacaaagatggtaataaatctttgcctcccacagttcagaccaagaattcactgcaacaagatatcagctgatggttacgaagtagaaaatctcatctctgaagatctcacaaagagaagtcatggtttcaggacagagtatttcattaagccaccagtctatgtgacagtttcatttccctttaatgtggaaatctgtaggatcaacatagacctcacagctgggggaggtcagaacgtcactggcctggaaatgtacacatctgcctcatctagcagagtgtcttggaatacgccccagtgccggaccctgggcccagctgagccatctgtcccagacaaggaggcgttcaccttggtaggcaaagtcttactgaaaaaccagagccaagtggtgtttagccacaggggcttcaaggccaggcccccttttggcgcgatggaagccacactcccctcccctgctgttgtggcccaggagctctggaataaaggggctctttcccttagccacgtggcccacttaaggatctgtatcacccatgtgacaggcggcggtatcccttgtatcaagcggttggaagtgtggggtcagccggccaagacctgctcccaggaagtgatagacagcatcctgctggtcacctcagagaacctgcctcaggatgtggctctgcaggctccagccttgcccatggaaagtgactgtgaccctggggaccagcctgagagccagcaggctccctccagcctgcagaagctggccgagatcattcaggatgtgcctgaggagttcctggatcccatcaccctggagatcatgccttgtcccatgctgctgccctcaggcaaggtcatcgaccagagcacactggagaagtgtaaccgcagtgaagccacatggggccgagtgcccagtgaccctttcacgggggtagcttttactccgcactctcagcccctgcctcacccctccctcaaggcccggattgaccatttcctgctccagcactccatccctggctgccacctgcttgggagagcacagacggcattggcagtgatcccttcttccattgttctgccctctcagaaaaggaagatagagcaggctgaacatgtcccagacagtaactttggtgtaaatgcttcctgtttttctgccacaagccctttggtcttacccactacctcagagcacactgctaagaaaatgaaagccaccaatgagcccagcctgacacatatggactgctcgacagagcagcctgggagcatcctgggccccgaatgtgcctcctgcaaaagagtattttctccctacttcaaaaaggagccggtgtaccagctgccctgcggccacctcctgtgccgaccctgcctgggtgagaagcaacgctccctgcccatgacgtgcacagcctgccagcggccggttgctagccaagacgtgctgcgggtccacttctgagtgactgacctccactggaggagacccattgctgggaggagctgagggggaacaggagcagggccacagcacccctgaggtctggccaggccccaggcacagagctgcctgctccctcccggggctcttcttcatcacctcacggtatagcacattgcttctgcgctggtggcaatagggcaacaaagccataggccagagggcggggggatgtccctgcctccctgccaccccccctgcctgagcccaggacccactggagccagccccaccctaggcaggaagacccctgctgagggcccccccgtgcagtccgcatacccccctgtccagcagggcactgtgggtggctcaccctagattgtggcccagatctcaggagtctctgccttcagggtcatccaaaagtggaccttgggagcagtgggggtgtctgtggagtgcatgactcagccccccgactcgcagccttaataaagcgatggttgacgtct

SEQ ID NO: 14032 - protein, 487 aa, Homo sapiens
MVINLCLPQFRPRIHCNKISADGYEVENLISEDLTKRSHGFRTEYFIKPPVYVTVSFPFNVEICRINIDLTAGGGQNVTGLEMYTSASSSRVSWNTPQCRTLGPAEPSVPDKEAFTLVGKVLLKNQSQVVFSHRGFKARPPFGAMEATLPSPAVVAQELWNKGALSLSHVAHLRICITHVTGGGIPCIKRLEVWGQPAKTCSQEVIDSILLVTSENLPQDVALQAPALPMESDCDPGDQPESQQAPSSLQKLAEIIQDVPEEFLDPITLEIMPCPMLLPSGKVIDQSTLEKCNRSEATWGRVPSDPFTGVAFTPHSQPLPHPSLKARIDHFLLQHSIPGCHLLGRAQTALAVIPSSIVLPSQKRKIEQAEHVPDSNFGVNASCFSATSPLVLPTTSEHTAKKMKATNEPSLTHMDCSTEQPGSILGPECASCKRVFSPYFKKEPVYQLPCGHLLCRPCLGEKQRSLPMTCTACQRPVASQDVLRVHF

SEQ ID NO: 14033 - DNA, 2022 bp, Homo sapiens
  CDS (355)..(1983)
agcgaaggaatttcgcagagctgaagatcaagcgcctgagaaagaagtttgcccaaaagatgcttcgaaaggcaaggaggaagcttatctatgaaaaagcaaagcactatcacaaggaatatattattgaccaggtcctgcaagggggcccaggtaagaccagcgacatcagtgagccatctccagaatcctccattttatcatccagaaaggagaacgggaggtccaactctttgccgatcaagaaaacagttcactttgaggctgacacctacaaggatcctttctgcagtaagaacctgtccctttgctttgaagggagcccaagagtggcaaaggaatcattgaggcaggatggacatgtcttggcagttgaggttgctgaggaaaaggaacagaaacaggaatcctcgaagattccagaatcctcctctgacaaggtcgctggtgacattttttttggtggagggcacaaacaataattctcagtcttcttcctgtaatggtgctttagagagtacagcccgccacgatgaagaaagtcactctctttcacccccaggagaaaatactgtgatggccgattccttccagatcaaggttaacctgatgactgtagaagctttagaggagggagactattttgaagccatcccattaaaagcctcaaaatttaacagcgacctaatagattttgcttctaccagccaggctttcaacaaagttccttcacctcatgagacaaaacctgacgaggatgctgaggcttttgagaatcatgctgaaaaactaggtaaaaggagtattaaatctgctcacaaaaagaaggattcgccagagcctcaagttaagatggacaaacatgaacctcatcaggactccggagaagaagctgaaggctgtccttcagccccagaagagacaccagtggataaaaagccagaggtgcatgaaaaggccaagagaaagtccacccgtcctcattatgaggaagagggagaagacgatgacctccagggtgtgggcgaggaattatcttccagccccccaagcagctgtgtcagcttggagacccttgggagtcacagcgaagagggcctggatttcaagccctccccacccctctcaaaggtttccgtcattccccacgacctcttctatttcccacactatgaggttcccctggctgcagttttggaggcttatgtagaagacccggaggatctaaaaaatgaagaaatggatctcgaagagccagagggctatatgccagacctggactccagggaggaggaggccgatggctctcagagcagctccagttcctcggtgccaggagagagcctccccagtgccagcgaccaggtgctgtatctcagcaggggtggtgtgggtaccacaccagcctcagaacccgctccactggccccccatgaggaccaccagcaaagggagaccaaagagaatgaccccatggacagccatcagtcccaggaatccccaaacctggaaaacatagcaaaccccctagaagaaaatgtaacgaaagaatcaatcagtagtaaaaaaaaggaaaaaaggaaacatgtggaccacgtagaaagttcactatttgtagcaccaggaagtgttcaatcctcagatgacctagaagaagacagtagcgactacagcattccttccaggactagtcacagtgactccagcatttaccttcgacgacatactcataggtcttcggaatcggatcattttagctatgttcagttgaggaacgcagcagatctggatgacagaagaaaccgaatattaaccaggaaggccaacagctcaggagaagccatgtcactggggagccacagcccgcagagtgactccctgacacagcttgtccagcagccggatatgatgtattttattctcttcctgtggctcctggtgtactgcttgctgctcttcccacaactggatgttagcaggctctgatacgtgtgtctggataataaaaaagacaggaccctg

SEQ ID NO: 14034 - protein, 543 aa, Homo sapiens
MDMSWQLRLLRKRNRNRNPRRFQNPPLTRSLVTFFLVEGTNNNSQSSSCNGALESTARHDEESHSLSPPGENTVMADSFQIKVNLMTVEALEEGDYFEAIPLKASKFNSDLIDFASTSQAFNKVPSPHETKPDEDAEAFENHAEKLGKRSIKSAHKKKDSPEPQVKMDKHEPHQDSGEEAEGCPSAPEETPVDKKPEVHEKAKRKSTRPHYEEEGEDDDLQGVGEELSSSPPSSCVSLETLGSHSEEGLDFKPSPPLSKVSVIPHDLFYFPHYEVPLAAVLEAYVEDPEDLKNEEMDLEEPEGYMPDLDSREEEADGSQSSSSSSVPGESLPSASDQVLYLSRGGVGTTPASEPAPLAPHEDHQQRETKENDPMDSHQSQESPNLENIANPLEENVTKESISSKKKEKRKHVDHVESSLFVAPGSVQSSDDLEEDSSDYSIPSRTSHSDSSIYLRRHTHRSSESDHFSYVQLRNAADLDDRRNRILTRKANSSGEAMSLGSHSPQSDSLTQLVQQPDMMYFILFLWLLVYCLLLFPQLDVSRL

SEQ ID NO: 14035 - DNA, 2260 bp, Homo sapiens
  CDS (268)..(1836)
aaacgattccccttggtagatgttcttcagtatgcattggaatttgcctcaagtaaacctgtttgcacttctcctgttgacgatattgacgctagttccccacctagtggttccataccatcacagacattaccaagcacaacagaacaacagggagccctatcttcagaactgccaagcacatcaccttcatcagttgctgccatttcatcgagatcagtaatacacaaaccatttactcagtcccggatacctccagatttgcccatgcatccggcaccaaggcacataacggaggaagaactttctgtgctggaaagttgtttacatcgctggaggacagaaatagaaaatgacaccagagatttgcaggaaagcatatccagaatccatcgaacaattgaattaatgtactctgacaaatctatgatacaagttccttatcgattacatgccgttttagttcacgaaggccaagctaatgctgggcactactgggcatatatttttgatcatcgtgaaagcagatggatgaagtacaatgatattgctgtgacaaaatcatcatgggaagagctagtgagggactcttttggtggttatagaaatgccagtgcatactgtttaatgtacataaatgataaggcacagttcctaatacaagaggagtttaataaagaaactgggcagccccttgttggtatagaaacattaccaccggatttgagagattttgttgaggaagacaaccaacgatttgaaaaagaactagaagaatgggatgcacaacttgcccagaaagctttgcaggaaaagcttttagcgtctcagaaattgagagagtcagagacttctgtgacaacagcacaagcagcaggagacccagaatatctagagcagccatcaagaagtgatttctcaaagcacttgaaagaagaaactattcaaataattaccaaggcatcacatgagcatgaagataaaagtcctgaaacagttttgcagtcggcaattaagttggaatatgcaaggttggttaagttggcccaagaagacaccccaccagaaaccgattatcgtttacatcatgtagtggtctactttatccagaaccaggcaccaaagaaaattattgagaaaacattactagaacaatttggagatagaaatttgagttttgatgaaaggtgtcacaacataatgaaagttgctcaagccaaactggaaatgataaaacctgaagaagtaaacttggaggaatatgaggagtggcatcaggattataggaaattcagggaaacaactatgtatctcataattgggctagaaaattttcaaagagaaagttatatagattccttgctgttcctcatctgtgcttatcagaataacaaagaactcttgtctaaaggcttatacagaggacatgatgaagaattgatatcacattatagaagagaatgtttgctaaaattaaatgagcaagccgcagaactcttcgaatctggagaggatcgagaagtaaacaatggtttgattatcatgaatgagtttattgtcccatttttgccattattactggtggatgaaatggaagaaaaggatatactagctgtagaagatatgagaaatcgatggtgttcctaccttggtcaagaaatggaaccacacctccaagaaaagctgacagattttttgccaaaactgcttgattgttctatggagattaaaagtttccatgagccaccgaagttaccttcatattccacgcatgaactctgtgagcgatttgcccgaatcatgttgtccctcagtcgaactcctgctgatggaagataaactgcacactttccctgaacacactgtataaactctttttagttcttaacccttgccttcctgtcacagggtttgcttgttgctgctatagtttttaacttttttttattttaataactgcaaaagacaaaatgactatacagactttagtcagactgcagacaataaagctgaaaatcgcatggcgctcagacattttaaccggaactgatgtataatcacaaatctaattgattttattatggcaaaactatgcttttgccaccttcctgttgcagtattactttgcttttatcttttctttctcaacagctttccattcagtctggatccttccatgactacagccatttaagtgttcagcactgtgtacgatacataatatttggtagcttgtaaatgaaataaagaataaagtttt

SEQ ID NO: 14036 - protein, 523 aa, Homo sapiens
MHPAPRHITEEELSVLESCLHRWRTEIENDTRDLQESISRIHRTIELMYSDKSMIQVPYRLHAVLVHEGQANAGHYWAYIFDHRESRWMKYNDIAVTKSSWEELVRDSFGGYRNASAYCLMYINDKAQFLIQEEFNKETGQPLVGIETLPPDLRDFVEEDNQRFEKELEEWDAQLAQKALQEKLLASQKLRESETSVTTAQAAGDPEYLEQPSRSDFSKHLKEETIQIITKASHEHEDKSPETVLQSAIKLEYARLVKLAQEDTPPETDYRLHHVVVYFIQNQAPKKIIEKTLLEQFGDRNLSFDERCHNIMKVAQAKLEMIKPEEVNLEEYEEWHQDYRKFRETTMYLIIGLENFQRESYIDSLLFLICAYQNNKELLSKGLYRGHDEELISHYRRECLLKLNEQAAELFESGEDREVNNGLIIMNEFIVPFLPLLLVDEMEEKDILAVEDMRNRWCSYLGQEMEPHLQEKLTDFLPKLLDCSMEIKSFHEPPKLPSYSTHELCERFARIMLSLSRTPADGR

SEQ ID NO: 14037 - DNA, 1617 bp, Homo sapiens
  CDS (151)..(1533)
gttgccgttacctgtttccggcagtcgacacgctcttcgcttctcggggcttgtctccgtgtcctccgtctcagttgtttctccctctctatcctcctctgtctcagtctccccagccttggggccggtgcctcttccgggcttcggcgaatgagacctgcggacctgcccccgcgccccatggaagaatccccggcgtccagctctgccccgacagagacggaggagccggggtccagtgcagaggtcatggaagaagtgacaacatgctccttcaacagccctctgttccggcaggaagatgacagagggattacctaccggatcccagccctgctctacataccccccacccacaccttcctggcctttgcagagaagcgttccacgaggagagatgaggatgctctccacctggtgctgaggcgagggttgaggattgggcagttggtacagtgggggcccctgaagccactgatggaagccacactaccggggcatcggaccatgaacccctgtcctgtatgggagcagaagagtggttgtgtgttcctgttcttcatctgtgtgcggggccatgtcacagagcgtcaacagattgtgtcaggcaggaatgctgcccgcctttgcttcatctacagtcaggatgctggatgttcatggagtgaggtgagggacttgactgaggaggtcattggctcagagctgaagcactgggccacatttgctgtgggcccaggtcatggcatccagctgcagtcagggagactggtcatccctgcgtatacctactacatcccttcctggttcttttgcttccagctaccatgtaaaaccaggcctcattctctgatgatctacagtgatgacctaggggtcacatggcaccatggtagactcattaggcccatggttacagtagaatgtgaagtggcagaggtgactgggagggctggccaccctgtgctatattgcagtgcccggacaccaaacaggtgccgggcagaggcgctcagcactgaccatggtgaaggctttcagagactggccctgagtcgacagctctgtgagcccccacatggttgccaagggagtgtggtaagtttccggcccctggagatcccacataggtgccaggactctagcagcaaagatgcacccaccattcagcagagctctccaggcagttcactgaggctggaggaggaagctggaacaccgtcagaatcatggctcttgtactcacacccaaccagtaggaaacagagggttgacctaggtatctatctcaaccagacccccttggaggctgcctgctggtcccgcccctggatcttgcactgtgggccctgtggctactctgatctggctgctctggaggaggagggcttgtttgggtgtttgtttgaatgtgggaccaagcaagagtgtgagcagattgccttccgcctgtttacacaccgggagatcctgagtcacctgcagggggactgcaccagccctggtaggaacccaagccaattcaaaagcaattaattggcttaggacccaatttccatagatgcaaatggcagttacagacaggttaacagaagctactgaagtctacagataatc

SEQ ID NO: 14038 - protein, 461 aa, Homo sapiens
MRPADLPPRPMEESPASSSAPTETEEPGSSAEVMEEVTTCSFNSPLFRQEDDRGITYRIPALLYIPPTHTFLAFAEKRSTRRDEDALHLVLRRGLRIGQLVQWGPLKPLMEATLPGHRTMNPCPVWEQKSGCVFLFFICVRGHVTERQQIVSGRNAARLCFIYSQDAGCSWSEVRDLTEEVIGSELKHWATFAVGPGHGIQLQSGRLVIPAYTYYIPSWFFCFQLPCKTRPHSLMIYSDDLGVTWHHGRLIRPMVTVECEVAEVTGRAGHPVLYCSARTPNRCRAEALSTDHGEGFQRLALSRQLCEPPHGCQGSVVSFRPLEIPHRCQDSSSKDAPTIQQSSPGSSLRLEEEAGTPSESWLLYSHPTSRKQRVDLGIYLNQTPLEAACWSRPWILHCGPCGYSDLAALEEEGLFGCLFECGTKQECEQIAFRLFTHREILSHLQGDCTSPGRNPSQFKSN

SEQ ID NO: 14039 - DNA, 3253 bp, Homo sapiens
  CDS (149)..(2164)
cttgttgttccccgccgccgccgtcgctgacccagcccgccaggcgctcctgaccgtcgcttcctccggtcccaggtccccggccctcgcctcagccccggcccctggtccccagccctcgtcgcagccccggccgcccgccgccgccatgtccaaggaggagcgccccggtcgggaggagatcctggagtgccaggtgatgtgggagcctgacagtaagaagaacacgcagatggaccgcttccgggcggctgtgggcgccgcctgcggcctggcgctggagagttatgatgacttgtaccattggtccgttgagtcatattcagacttctgggcagagttctggaaattcagtggaattgtcttctcacgtgtgtatgatgaggttgtggacacatcgaaaggaatcgcagatgtccccgagtggttcaaaggcagtcggctcaactatgcagaaaacctcctgcggcacaaagagaatgacagagttgccctttacattgtaagggaaggcaaagaggaaattgtgaaggtgacttttgaagagctgaggcaaggagtggctttgtttgcagcagcaatgaggaaaatgggtgcgaagaaaggagatcgggttgttggttatttacccaacagtgagcacgctgtcgaggcgatgctggctgcggcaagcattggtgccatctggagctccacgtccccggacttcggtgtgaatggtgtgctggaccggttttctcaaattcagccaaagctcatcttctctgtggaggctgttgtctataatggcaaagagcacaaccacatggaaaagctgcagcaggtggttaaaggcctaccagacttgaagaaagtggtggtgattccttatgtgtcctccagagagaacatagacctttcaaagattccaaacagtgtgtttctggatgactttcttgccaccggcaccagtgagcaggccccgcagctggagttcgagcagctgcccttcagccacccactgttcatcatgttctcatcgggcaccacgggcgcacccaagtgcatggtgcattccgctgggggcaccctcatccagcatctgaaggagcacctgctgcacggcaacatgaccagcagtgacatcctcctgtgctacaccacggtcggctggatgatgtggaactggatggtgtcccttctggccacaggagcggccatggtcttgtacgatggctcccccctggtgcccacgcccaatgtgctctgggacctggttgacaggataggcatcactgtcctggtaactggggccaagtggctgtcagtgctggaagagaaggccatgaagccggtggaaacccacagtctccagatgctccacacgatcctgtccactggctccccactgaaagcccagagctacgagtatgtctacaggtgcatcaagagcagcatcctcctgggctccatctcaggaggcaccgacattatctcctgcttcatgggccacaatttttctcttcctgtgtataaaggggagattcaggcccggaacctgggcatggccgtggaagcgtggaacgaggaaggaaaggcggtctggggagagagcggcgagctggtgtgtactaagccgatcccttgccagcccacacacttctggaacgatgagaacggcaacaagtacaggaaggcgtatttctccaaattcccaggtatctgggctcatggcgactactgcagaatcaaccccaagaccgggggcatcgtcatgcttggccggagtgacggcaccctcaaccccaacggggtgcggttcggcagctcggaaatctataacattgtggaatccttcgaggaggtggaggacagcctgtgtgtcccccagtataacaagtacagggaggagagggtgatcctcttcctgaagatggcctccgggcacgccttccagcctgacttggttaagaggatccgtgacgccatccgcatgggcttgtctgcgcgacacgtgcccagcctcatcctggaaaccaagggcatcccgtatacgctcaacggcaagaaagtggaagttgccgtcaaacagatcatcgctggaaaagccgtggagcaaggaggtgctttctcgaaccccgagaccctggatctgtaccgggacatccctgagctgcagggcttctgagtcagactggctggcgtgtcactcagccgcacccgtgtgcactgtaacttttgtgtgctcaagaaattatacagaaacctacagctgttgtaaaaggatgctcgcaccaagtgttctgtaggcttggggagggatcgtttctctgttttgttaaatctggtgggtacctggatcttccacacgagtgggattctggccttcagagaccaggagggagtgtctgggccgcaggtgtggcactgtggtgagagtgtgtgtctttgcacacacagtgcagtgggaacggtggggctggctggtgctgaagacagacacactcctgagccaaggtcttgtcttcaacctccccgtcccgttgtcccattttgctctgtgaaggtgcaaatccctttcttcccttcccatctcaggctctcctgttttccctcagggtccagtatgcctttgagctttagctgttagaaaggaacccccgtgacttgacacagctttcacagctggctgctaggaccggcgggctgggtgttcacgtgtgtctgtgtcatggatgcaatgcaggccctggaggactgtgcgtcacccgtcaaccagagcgtgcctccgggccagcttccctccaaggaatgagtggatttcatacaggatctctttattgcacagactgaatggctttacatgtttctaatgtgaattaggcatgtgaagcagtgggtgtccacccgtgtccctcatgggtgagccctccagctgtgagcccaggcagtgtggtcaccgagtgaggaccctcctcaccaggaaccgcatccctgtgctgcctccacctgagagttgctagggggttcttgtcgagatcatgtcatcagcacccctaagtcaagtcacgggtttccatagccaggcagttggtatgtacaattcagttcagcgtatgaacttgtatctctaatctgatgtccatttttatattttttgaaactgagcacaatgaaatcctttcttgaatcattttccttttggattataaaaatatgggggaaagtgctatgatgaattttatgcaataaatgtatacatgtgtgcacatgc

SEQ ID NO: 14040 - protein, 672 aa, Homo sapiens
MSKEERPGREEILECQVMWEPDSKKNTQMDRFRAAVGAACGLALESYDDLYHWSVESYSDFWAEFWKFSGIVFSRVYDEVVDTSKGIADVPEWFKGSRLNYAENLLRHKENDRVALYIVREGKEEIVKVTFEELRQGVALFAAAMRKMGAKKGDRVVGYLPNSEHAVEAMLAAASIGAIWSSTSPDFGVNGVLDRFSQIQPKLIFSVEAVVYNGKEHNHMEKLQQVVKGLPDLKKVVVIPYVSSRENIDLSKIPNSVFLDDFLATGTSEQAPQLEFEQLPFSHPLFIMFSSGTTGAPKCMVHSAGGTLIQHLKEHLLHGNMTSSDILLCYTTVGWMMWNWMVSLLATGAAMVLYDGSPLVPTPNVLWDLVDRIGITVLVTGAKWLSVLEEKAMKPVETHSLQMLHTILSTGSPLKAQSYEYVYRCIKSSILLGSISGGTDIISCFMGHNFSLPVYKGEIQARNLGMAVEAWNEEGKAVWGESGELVCTKPIPCQPTHFWNDENGNKYRKAYFSKFPGIWAHGDYCRINPKTGGIVMLGRSDGTLNPNGVRFGSSEIYNIVESFEEVEDSLCVPQYNKYREERVILFLKMASGHAFQPDLVKRIRDAIRMGLSARHVPSLILETKGIPYTLNGKKVEVAVKQIIAGKAVEQGGAFSNPETLDLYRDIPELQGF

SEQ ID NO: 14041 - DNA, 1790 bp, Homo sapiens
aaattgatggtaatgaaggagggttgtgccatgaaaatacaagagatttcctattgtaaccttgttgcactgtggattaaattgaagatgcacagtggactcctgggggtggaggagagtttggaggtcagagggctcttgtcttgagctccaagtggtgctctaagtctaggataaagattttacacagggtggggcaggtggacagccagatcttcatttattcttaccaagctcttattaagtcatgtgggtgggatttactgttaaggaaggcagagcctacctgtccccatagggctggcatcctattggaggtggcactagccacttaactagttaagtgagtgatatttgggtagggtgcccataactctgatacgatctgccttgcgattctgctcctgctagtggagtgtgggggaggcctggtcttggatcttgttcctcacagctggttcattcaggaggttagtgctctgctgaggaggctggaggcagagctccatcttggcctggctggctagtttctgttcaggactagagctagcacctgtagtcttggcaagccattttagaaatctaagttgttggtccatgtaatgtcctggtggttgaaccaacactcgttctttgccattcctgggcaggtgcttggagaaggctggtgagctgttcatgttttttgaagaatggtgcatcagtagcacaaggttttccctggttctgctgaggcctgttgctgagctttggggtgccctgtcccctgttttattcctgttttatttctcccacattgttagctgctcagagcaaatgggttttgctgcaggtgtaggtttgcctctggctgatcctgggcagtatggcatctggatgggagggtctgagggagccttagcccagagttaaggggtgccccccaacccctgcctggagtcatcctacatggagctaataggggcgagtctgggaaaagttgcatttgtttcctgctttaagactttagcttttggcccgacctcaggtgatccacccgcctcggcctcccaaagtgctgggattacaggcgtgagccaccgcgcccagccttccttttaactctttgtacctgttttttttccttgttaggatgaaatggtaacaactagctcataaggctgttgggaagataaatgagatagtgaatgtagtgtgcttaggaccttgccaggtgcatagtgagtgcttgacaaacattgaccatccttttacagtagtcacctctgcagtgaatcagaaatttccaaccctgcacacttagggtgtctggggactgataatgctaactttagttctttgctcctgatttcacctatctgtgacattctttgtcttgatacaagtgtctgtagtactacattcacttgcttaatggtttaggggcagccacagccagtggaatgctttccagaggtagctgggcaacttgggagagagaaggaggaggatgaggccaggcatggtgactcatgcctgtaatcccagcactttgggatgctgaaatgggaggatcacttgaggctaggactttgagaccagcctgggcaacatagtgagaccttgtctctacaaaaataaaaataaatttaaaaattagccaggcatggtggtgtaggcctgtagtcccaactactcgggaggctgaggtaggaggattgtttgagcccaggaattcgaggctacagtgagctataattgtgccactgccctactactgcagcctgggtgacagagcaagaccctgtctc

SEQ ID NO: 14042 - DNA, 3174 bp, Homo sapiens
  CDS (88)..(1233)
gagtgcatctcccagtctgcagtgaagaccaagtttgagcagcacacggtccgggccaagcagattgcagaggcggttcgactcatcatggactccctgcacatggcggctcgggagcagcaggtttactgcgaggaaatgcgtgaagagcggcaagaccgactgaaatttattgacaaacagctggagctcttggctcaagactataagctgcgaattaagcagattacggaggaagtggagaggcaggtgtcgactgcaatggccgaggagatcaggcgcctctctgtactggtggacgattaccagatggacttccacccttctccagtagtcctcagggtttataagaatgagctgcaccgccacatagaggaaggactgggtcgaaacatgtctgaccgctgctccacggccatcaccaactccctgcagaccatgcagcaggacatgatagatggcttgaaacccctccttcctgtgtctgtgcggagtcagatagacatgctggtcccacgccagtgcttctccctcaactatgacctaaactgtgacaagctgtgtgctgacttccaggaagacattgagttccatttctctctcggatggaccatgctggtgaataggttcctgggccccaagaacagccgtcgggccttgatgggctacaatgaccaggtccagcgtcccatccctctgacgccagccaaccccagcatgcccccactgccacagggctcgctcacccaggaggagttcatggtttccatggttaccggcctggcctccttgacatccaggacctccatgggcattcttgttgttggaggagtggtgtggaaggcagtgggctggcggctcattgccctctcctttgggctctatggcctcctctacgtctatgagcgtctgacctggaccaccaaggccaaggagagggccttcaagcgccagtttgtggagcatgccagcgagaagctgcagcttgtcatcagctacactggctccaactgcagccaccaagtccagcaggaactgtctgggacctttgctcatctgtgtcagcaagttgacgtcacccgggagaacctggagcaggaaattgccgccatgaacaagaaaattgaggttcttgactcacttcagagcaaagcaaagctgctcaggaataaagccggttggttggacagtgagctcaacatgttcacacaccagtacctgcagcccagcagatagtgggcacctgaggcggagtctgcgtggagaggggcggtgctgccagccctaagtgccatgtgggctcccccaggggcacgtgtggctcctgccccctggccactgccaagagaatgaagcacccagtctcgtaccattttgagccctccagcactacttattttcccccacctttgcctgctgttgctggaagagctggctcatacccccaaaggacactttcagcgacagctatggacagcatggtaccaaggagttaagttgaggctttttccagctttctctggttcatttgattgcttgataaggcctcaggatctcagcattgcacaatgcctcatggaagcctttgagggtatcacacagacacccccaccttcctccagcctgtgcgcacctgccctccttgcagcccagcacacctgcaggtgtaagggacgattggagtttcttcccagagagtctgtcccagaaggactgtggcttgtgtgtgtccatctcgcctgttggctcagtgcttcatcccatttgcagagcctcagacacgtcttggtggtgaggctcagttacccctgggcttaggctgaggcgggccctgtgctgggggtggtagaaaggatgctgctgaggcagctggaggagtgggagtagctcagaggggagggctgttggatgtatggggagctggcagagcaggtggcagtcactgggacaaggagggacttgcctctcttctcattattgtgtcctttgctttagtgtcagtcctggacttgtgcaggcctgttttgtgtagatctgttttggaagatggcatggtctaggtggttgaaggatgtagtagaaggatggatggtggaaggtggggacgttggtggctggctgaggtgcatgggccccacacaggacagctggagaatgggtcgtccacttggcctcgttctgcgaggggctcatgggtctgagagcccccacccactaggcttgattgcatccctgttgtgccctttaagagacatgtttccaccccacccccaaccttgtcccaagtgccctggactaaatttcctgtgccagtgactgcagttggccaagggacaatgtggaaaacccagtgtccatctttccaccctccctgatctccagaaccttcgactgacccccttgtctttatgctgatgttgagttttgggattgttactggttgaagtgggggcagatgcctgtcaccaaggtgttgactgtgtgagaaaagcagtttgggtgacaaatcctgtgtggcacaagttggatcgcttcctagaaataagcaacacctctcccaaaaagcagcccacaaggcaggggcccagcagcccagccatcactcatctttgaggaaatgagttggtagcctctgtgcactgtttggtggccacatcacaggtgatgtcctgttcacatacctgcttgtatttaaagccctcagtctgtcctgttgtgtggggcgaagtgatggactctgccaggtggacatgctgtgggtggatgttcccggcgtgtgccgggcctgaatggacaggggccacttcacagcatgtcagggaaaatcactgtcacacaattccaatggattttgtgctctttttgaaaaaaaaaaaattctttagcgtaaacatgaattttttttcaatgtagcccctggggaatgaatgaaattttgagcttcttcaatacgtaaaattaaatttataccactgagggagagaccctttctgaaagaagtatggccaaaagcactttaatgctgctgacattgttgtttttatgttcatttgctggagcgcaagacgtgctgacacagtgagttttctctgatgtatttagggtgatgtatttgcttgagttactcctgtatcattgctcataatattggaaactaaaataaaacctagttgg

SEQ ID NO: 14043 - protein, 382 aa, Homo sapiens [sequence omitted]

SEQ ID NO: 14044 - DNA, 1557 bp, Homo sapiens
tttactaaatgtttcatttactgaattgtttcatttattccttaaaacaactcagctctattctcggagccgttacttgcagctcagcattgttataaggaataaatgaaacaaaaagtacttaacatagtgcctccacataagatgtcacaagctgctaactactatttttgttatgcattgtctgaagataagtcacaaagttggttcttagctttcaggtaactaatagtgaagggagaaaagcaaccacttaaagaatttacaggccgggcgaggtagctcacacctgtaatcctagttctttgggaggcagaggctggtggattgcttgagctcaggagttcgagaccaacctggtcaacatggcaaaaccccatctatacaaaaaatttgcagggcgtggtggtgcgggcctgtagtcccagctacctggggggctgaggtgggaggattgcttgagcccaggaggtcgaggctgcagtgagccaggatcgagccactgcattccagactgggtagcaaagtgagaccctgtctcaaaaacaaaacaaaacaaaaaaagaatttatagtttccaaggtgaaacaaacaaaccagctgcttaggagaacacagctgattttaacatgttctgaggagcacaatttttcttgctggtactcatgaagaaaacatcttacttcatatttaaaggtatttttaatgtgaatagagtcaaaataatttataaaagtggtctttggggtccagattgatgtgttctaattatgagcctctgtgatcggacttaattcaaagatagatttttgaggggctagaggaatggattgaactttaggaatttctatggatattgtttctcttctctgtgcttttgaaatggcagtgagtgagtctggcattggtaggtgatgctcacacttatgcattccagtgataactttcgtcaagttcaagactgttttggaaaatttctgcataactttgttgagttttagaattctatttgcagttaaaatttttattttaattgtgaaataccaaatctgaagttgtattttaatattctttaagctatagaagtcagtacaacagttaatttttccttagtattaaacatccttataccatagtgtaaaaatgagaaatttggaatatctcacttttatttactatgttaaatgctccattccttctccccaccaggcacacccacataaaaaaagatttttggaaagatgttatagggcagagtgtgttaagagatgagccgggcataatggctcatgcctgtaatcccagcactttgggaggccaaggcaggcagatcacttgaggtcaggagtttgagagtagcctggccaacatggtgaaatcccgtctctactaaaaatacaaaaattagctaggtgtggtggtgggtatctgtaaacagcctggctaacttgcaaggctgaggcaggagaatcgcttgcacccgagatgtggaggttgcagtgagccgagatcgcaccactacagtccggcgtgggtgacagagcaagcctctgtctc

SEQ ID NO: 14045 - DNA, 1945 bp, Homo sapiens
  CDS (96)..(1367)
ataagaggcgtcattggcgcccgagctgtgaccgccgccactggggcagccagcacaatcgggcggaggtggcgctgccccttcagacctgaaagatgtctgaaaattccagtgacagtgattcatcttgtggttggactgtcatcagtcatgaggggtcagatatagaaatgttgaattctgtgacccccactgacagctgtgagcccgccccagaatgttcatctttagagcaagaggagcttcaagcattgcagatagagcaaggagaaagcagccaaaatggcacagtgcttatggaagaaactgcttatccagctttggaggaaaccagctcaacaattgaggcagaggaacaaaagatacccgaagacagtatctatattggaactgccagtgatgattctgatattgttacccttgagccacctaagttagaagaaattggaaatcaagaagttgtcattgttgaagaagcacagagttcagaagactttaacatgggctcttcctctagcagccagtatactttctgtcagccagaaactgtattttcatctcagcctagtgacgatgaatcaagtagtgatgaaaccagtaatcagcccagtcctgcctttagacgacgccgtgctaggaagaagaccgtttctgcttcagaatctgaagaccggctagttgctgaacaagaaactgaaccttctaaggagttgagtaaacgtcagttcagtagtggtctcaataagtgtgttatacttgctttggtgattgcaatcagcatgggatttggccatttctatggcacaattcagattcagaagcgtcaacagttagtcagaaagatacatgaagatgaattgaatgatatgaaggattatctttcccagtgtcaacaggaacaaggatcttttatagattataagtcattgaaagaaaatcttgcaaggtgttggacacttactgaagcagagaagatgtcctttgaaactcagaaaacgaaccttgctacagaaaatcagtatttaagaaagctcttcactgactttgttaatgatgttaaagattatcttagaaacatgaaggaatatgaagtagataatgatggagtatttgagaagttggatgaatatatatatagacacttctttggtcacactttttcccctccatatggacccagtcgacctgataaaaagcaacgtatggtaaatattgaaaactccaggcatcgaaaacaagagcagaagcaccttcagccacagccttataaaagggaaggtaaatggcataaatatggtcgcactaatggaagacaaatggcaaatcttgaaatagaattggggcaattaccttttgatcctcaatactgattcacaattgagttaaattagacaactgtaagagaaaaatttatgctttgtataatgtttggtattgaaactaatgaaattaccaagatgacaatgtcttttcttttgtttctaagtatcagtttgataactttatattattcctcagaagcattagttaaaagtctactaacctgcattttcctgtagtttagcttcgttgaattttttttgacactggaaatgttcaactgtagttttattaaggaagccaggcatgcaacagattttgtgcatgaaatgagacttcctttcagtgtaagagcttaaagcaagctcagtcatacatgacaaagtgtaattaacactgatgtttgtgttaaatttgcagcagagcttgagaaaagtacattgttctggaatttcatcattaacattttataatcttacactcacttcttgtctttttgtgggttcaggagccctctgacttgtgaagaatttgctgccctcttaagagcttgctgacttgttttcttgtgaaattttttgcacatctgaatatcgtggaagaaacaataaaactacaccatgag

SEQ ID NO: 14046 - protein, 424 aa, Homo sapiens [sequence omitted]

SEQ ID NO: 14047 - DNA, 1986 bp, Homo sapiens
  CDS (19)..(897)
aaactcattggcgccaagatggcgatggagatgaggcttccagtggctcgcaagcctcttagcgagagactgggccgcgacactaagaaacatctagtggtgccgggggatacaatcactacggacacaggattcatgcggggccatggaacgtatatgggagaagagaagctcattgcatctgttgctggctctgtggagagagtaaacaagttgatctgtgtgaaagctttgaagaccagatacattggtgaagtaggagacatcgtagtgggacgaatcacagaggttcaacagaagaggtggaaggtggagaccaactccaggctggattcggtcttgctgctctcgtccatgaaccttcctggaggagagctgaggagaagatctgcagaagatgagcttgcaatgagaggtttcttacaggaaggggaccttatcagtgctgaggtccaggcagtgttctctgacggagctgtctctttgcacacgaggagcctgaaatatggaaaactaggtcagggggttttggtccaggtttccccctccctggtgaaacggcagaagacccactttcatgatttgccatgtggtgcctcagtgattctcggtaacaacggcttcatctggatttacccaacacctgagcacaaagaagaggaagcagggggcttcattgcaaacctggagcctgtctctcttgctgatcgagaggtgatatcccggcttcggaactgcatcatctcgctggtaactcagaggatgatgctgtatgataccagcatcctgtactgctatgaagcatcccttccacatcagatcaaagacatcttaaagccagaaataatggaggagattgtgatggaaacacgccagaggcttttggaacaggagggataaggaggtgctccagaagcacgggactgtggaccttgcaggagtgaagactgtgatgtgtggtccccatatgtggctcagcaaagactcgagagatcatccctttgtctgcattgacggccctgtgacggcctccagcccacaggcctgctttctcctgtcctaacaccaagcctgggtggcagatgaacagtgcttccttgggttgccagctgagtcccggtattagggaatagtttcagctctttcaaagtgcacagtgttacagtcgaatgggctcccatcctggaataatatggagaatcctttgtcttccactcactgtcattcacaaggcacagtgccccatgaaattgccccaatagaaaacatggcatccctgacctccaaatggtctgttttggcctccattcctatatcctttaaatgactgagaatgcagctggtaaagttggaagaataaagttaaccaagcaggccaggcacggtggctcacgcctataatcccagcacttagggaggccaaggcgggcagatcacctgaggtcaatagttcgagaccagcctggccaacaaggtgaaaccccatctctactaagaatacaaaaaattagccaggtgtggtggtgtgcacctgtggtcccagctatttgggaggctgaggtgggagaatcacttgagcctgggaggcggaggttgcagtgagctgaaatcgcgtaccacactccagcctgggtgacagagcgagactgtgtttcaaagaaaaaaaaaaaacaagcagccttttgcttggttggaatctgattttctgttgcgtgttccttgtagccatagatgtgattatgtccacaccgggctgccttaatctgtcctgcttggagagtgacttgtaagatgctgaattattcatgataatacagtgaatgttctgggtccatgtactcagataaacatgaagaaaataagcaaagaaaaatggagactgggaaagcaaagctgttttcatcctataattgaagtagtgtggagcattaacttgtggatgattcagagttaaaagataaaaagacgccagagttctcgctgaag

SEQ ID NO: 14048 - protein, 293 aa, Homo sapiens; identical to SEQ ID NO: 12722

SEQ ID NO: 14049 - DNA, 1784 bp, Homo sapiens
taagtagcatgaaatctaaggaagacaggtaaaccagcagcactggcctaccaagaggagggtatgggagctgtggggtgtggggagacggggtagccacacaaatgggtagaaagaactcggctaacactttaagcaaattgctaaggccaaggatgggatcctgcaacccttggaagccactgactttataaagagatttacacccacttgcaggctgttctgcacaagcctccatcagcccctcacaacgaagtctgggggcaagtgggagacttgaggaaaccaccgtcagtggtgcaggccctgagggaaaactgttaggggaagctccaagctccacccagaccttctcccctataggaaagaaacaaaacatcttaagctcctctggaaaagggcaacaagccatgttatcccagggcacaggggaagtggaagaaaacaggaaaaatcctctatgcctagaggagtagcaagaaatgatcctgagtccagatcatccgcactttcctgctactggaaaaggggcaggatatttgagaaagccccaccccaaagcagtgcctgcccaaaactgaggctagactaggacaagaatcaaacccacccaacctccactgccaggctagcaatcacccagttacgaaaactgatctacgtgtgggtgaaggcatgagcctagaaagagaccctttcagagacacaaaagcacagcagcttgaagttgaaggtagattaggaacataaacaaaaaccccagtccacttagcccacagcagattatgccaggggaatttgaacctggtagtacactgaaggttaaccacagcagcagcaaaaccagctcaactcctggctgggttaactcaaacccccacactgatggtctatcagaataagagctatgcccatttctaggcataaacatttacctgtctgtactattgttttgtattcttttataatatggcccgtcaagtgtagccacaagaggagacacacagaaaggatgggggggcgtgggacaagaccaaagtgaattatattcacaggacctagagacaggaggcacatcattccatgcagggtcacagtaaagacaccaggtggtcaggaggcaaaagacaggagcaagaggaacacactaggccagagcctttattggggtttccatgggaaaggcaaggcagggcagggtgaacagcttagaactggcttgtttgaataatttcagagagacttaaactataggagcggcgcctagttgcctggtacctggccctgggatgactaagacagaggaatattgtctcctgtggtgtacaggcctgctagaggcggcatggagtctctggattggtcagtttgcagatcaagggcatactcctggctgagcccttgctatgcataagacttggctaaccccaggaggggcagtcattccccagctagaaaggttctttttcatttagttttgtttttaagatgtcaaaacatcataatataccgaacattaaaaagaacactcacagctagctgggtgtggtggctcacatctataattccagcactttgggaagccaaggcaggctgatgccttgagcccaggagttcaactccatctctgcaaaaattagccagccatggtggtgtgtgcctatggtcccagctacttggaaggctgaggtgggaggattgcttgagcctgggaggtggaggttgtggtggccgagatcacggcattgcactccatcctgggcaacagactgagaccctgtctc

SEQ ID NO: 14050 - DNA, 1709 bp, Homo sapiens
  CDS (4)..(1524)
aggatgaagcacaaaaggaaaaatttacagccattctttatcgtactttggaacggaggagacttgctgatgattatcagcaaaaaaagatggtcatggggaggctctgcaatggcgaattctgagagcaaaactgccaataaacgatctgcatctactgaaaaacttgaacagggtacttctgctttaatcagacaaatgcctttgtcatctgcaggccttcaaaattccgttgccaaaaggaaaacagacaaggagagaagctcatctttaaatagaagagatagtaacctacattcgtctactgataaagaacaagccgaaaggaagccacgtgttacaggcgtcaccaattatgtaatgcagtatgtcactgtacccttgcgtaaatgtactagcgacgaattgagggctgttatgtttcccatgtcgacaatgaaaatacctcctcaaacaaaagtagaagagtctcccttggagaaagtagaaacacctcccaaggcaagtgtggatgcacccccccaggtgaatgtggaagtattctgcaacacaagcatggaagcgtcccccaaggcaggtgtgggcatggcccctgaggtgagcacggactcattccctgtggtgagcgtggacgtgtcgcctgtggtgagcacatatgattctgagatgagcatggacgcatcccccgagttgagcatagaagcactcccgaaggtggacctggaaacagttcccaaggtgagcatagtagcatccccggaggcgagcctggaagcacccccggaagtgagtctggaagcactgccagaggtgagcgtggaagcagccccagaggggagcctggaagcacctcccaaggggagcgcagaagtagcccccaaggagagtgtgaaagggtcacccaaggagagcatggaggcatctcctgaggcgatggtgaaagcatcccccaagacatcccttgaagcaagcatggaagcatctcccaaggcaaaagcgagagacgctccaaagaaatcagaaatggacaaacaggccttaatccctattgccaagaagcgtctatcatcatacactgagtgttataaatggtcatcatctcctgaaaatgcttgtggtctgccgtctcccatcagcactaacaggcaaatccaaaagaactgccctccatcaccattaccacttatttcaaaacagtcaccacagacttcttttccttataaaataatgcctattcaacacaccctgtctgtgcaaagtgcatcaagtactgtcaaaaagaaaaaagaaacagtttctaaaaccactaacagatgtgaggctttgagccaaaggcatatgatctatgaagagtctggtaataagagtactgcaggtattatgaatgccgaggcggcaacaaaaattttgacagaattgcgccgccttgctgatgatggcggacggcgccgcagctggcgctggcggcagcccatccttgagagagctgcgggcacggatggttgctgcagcaaacgagattgctaaggaaaggaggaagcaagatgtggttaatcgtgttgcaacccattcctcaaatataagatcgacatttaaaccagtaatcgatggatccatgcttaaaaatgacataaaacaaagattagcaagagagcgcagagaggagaaaaggagacagcaagacgccaataaagaaacacaactacttg

SEQ ID NO: 14051 - protein, 507 aa, Homo sapiens
MKHKRKNLQPFFIVLWNGGDLLMIISKKRWSWGGSAMANSESKTANKRSASTEKLEQGTSALIRQMPLSSAGLQNSVAKRKTDKERSSSLNRRDSNLHSSTDKEQAERKPRVTGVTNYVMQYVTVPLRKCTSDELRAVMFPMSTMKIPPQTKVEESPLEKVETPPKASVDAPPQVNVEVFCNTSMEASPKAGVGMAPEVSTDSFPVVSVDVSPVVSTYDSEMSMDASPELSIEALPKVDLETVPKVSIVASPEASLEAPPEVSLEALPEVSVEAAPEGSLEAPPKGSAEVAPKESVKGSPKESMEASPEAMVKASPKTSLEASMEASPKAKARDAPKKSEMDKQALIPIAKKRLSSYTECYKWSSSPENACGLPSPISTNRQIQKNCPPSPLPLISKQSPQTSFPYKIMPIQHTLSVQSASSTVKKKKETVSKTTNRCEALSQRHMIYEESGNKSTAGIMNAEAATKILTELRRLADDGGRRRSWRWRQPILERAAGTDGCCSKRDC

SEQ ID NO: 14052 - DNA, 1491 bp, Homo sapiens
atccaacagttctgatttattccactcacacaacaagtcagttcttaacacaaaccacataggttcttccttaaataaaaagctgtggctatgaagaagtgagagttttttttttttttcctctccaaaccaccacgtgctcttgtgtgttattgtagtggcttcgcagagtatttatttggccagaaagtctatagtcaaattgctcttcattctcaagtgtagtatttatttctccagctcatgcagaattctgttttatatggaggttttaaatttgtgcagaaaagtattacgtgggtttcaaaggtactcttttttcttttttgagacagggtctcgctgtgttgcccatgctggagtgcagtggtgcgatcacagctttctgcagcattgaccttgtgggctcgagcagtcctcctgcctcggcctcccaggtggcttggaaccgcaggcatataccaccatacctggacatgtttttaactttaatttttatttttgtggagatgaggtctccctatgttgcccaggttgctctcgaactcctaggctcaagcagtcttcccgccctggcctcccaaagtgcaggcattttaggcatgacccatcgtgtccagcctaaatggcattcttggaagtaaaaccacaggggatctgttggaagtggcatgatggaggaattttaaaagaattgaacaaataaaatagtcagagctcaaaaattgagtactgcttcgtttctcccaaataaccatcaccagacaaacaggtgtgtgtgtgggtgggggaggtggcctggtggtacttcatgatcttggaagaaggaaggcgcccctccttcttagctgattgatgatgagatagaaagatagaaacagccccatcactatgagatggaaacccttctttccttcagctgacttccctctccttcattcccaaccaagtttgaccccgccgcagtggagattgtggcagatgggtcagatagcatgtgtcctgtcgctgtcacaactttttaataagggctgggggtcctcttgaagagcccaggaactgcagtccctcctctatgccttcccctgaacgcagtgcgccctcactaataaattctgagggctgacactgcctgagccggctggtctttgccctcaatttcattgagatgggccgtgagtgactaaagtaatgcattaatggttgaatggctggccaccgtgcctcatgcctgtaatcccagcactttgagaggccagggcgggcagattgcttgaggtcaggagttcgggatcagcctgggcaatatggtgaagccccgtctctactaaaaatagagaagttagccaggtgtggtggtgggcgcctgtggtcccggctacgtgggaggccggggcaggagagttgcttgaacccaggagggagaggttgcagtgagacaagatgatgccattgcactccagcctgggtcacagagcgagacttcatctg

SEQ ID NO: 14053 - DNA, 1842 bp, Homo sapiens
gaatttagtactatttatgtagtcctcagttgtgatgggcagacagttgaaccttgtacaccatatttagaaaaaaaacacaaaaaaccttttggccaggcgtggtggctcatgcctataatcccagcactttgggaggccaaggtgggcagatcacctgaggtcaggagaacatgacgaaacctcgtctctactaaaaatacgaaaattagccaggcgtggtggcagatgcctgtaatcccagctcctagggaggctgaggcaggggaatcgtttgaacctcagaggtggaggctgcagtgagccaagatctcaccactgcactccagcatggatgcccagcctggatgacagagcaagactccatctcaaaaacaaacaaccaacctactttttgtataggtatagtttgaacctagtattcagaccagtaaaatgaaaaccttgcagtaaatgcttcccagtctttattgggctaaaataggccacgtgtgcttttagaaagatggccgcataataacatgtttattgaatgcctttttacctaacatgcaggttctactttattttcccactttgtacaagacaagcagtttttgttcttataagtagtgaggaagtcaatatagtagatttacgacattgcattttcaagccactgggtgtaaaaataaaattactcaaaatatgtaaaaccactgaaaacaatgatttaattgaaccagtcaaacattatttaaaattgagagctggtgtcccatccaggtaggccacttttaaaagacagattttaagtttagtctttaaagttttcaggctgtaccatgttgtccttccattagatgtctgaaaacttgaaaaactgccgtatcatctcacagtgatgcttttttgtggtgtgggcagggaatttcaggcacacttttgccaatcccacaccagggaaagctatagtctttggttgcctgtggttaaggaattgagttaaaagtttcctttttatctcagggatttgcaggagttatttattcattcatcagatatttacttaactcttaactcatgccagaggcacttgaagatacctgattcctgtcctcaggaagtttagagttgagatgtggggaaacggagaagtaaataagtacagcagagggctaaaagtgctgttttaatagaagtttgcacaacccaaaggagacagaggtctatataggtccatcatgggaatcagaggttgaggatgcccaggttgatgaagcttaaattgagcttcccctttagaagagagctgccaccagtaaagacacagaagtgcaagacattaaaaagctattctagccagtagggtagagtagaagcaaggactttgtggtcagatgtgggtttgtttctggctagtggtttgtaacccctaggcaagttacttaatcttgctaagtaaaccttagtttcctcatctgtaaagccaggatgataataacacctccctcaaagttgttaattcattttgcaattcacgtgttgagtactttttaagggactgggaatacagcaatgaacagcacaggtctgaatgaggaaggtaggaccgggtcacgaaggtatgccaccagttaacaaagacactctcaaaacaggaaggatggcaagtcgttaaaataacatccagggctccatttttacctgaagaagaatagatgataagaattattttaggtgattaggttaagaatgagtttgcgctggtccgagtgcagtggtgtttacaactaattgatcacaactagttacagattatttgttccttctccactctcactgcttcacttgactagcttt

SEQ ID NO: 14054 - DNA, 2088 bp, Homo sapiens
  CDS (308)..(1102)
gtgtagtgcgagtggggcggacgcgcgcagcccgcccgcccggcgaccagcaagacggagtctcactctgtcgcccaggctggagtgcagcggcgtgatcttggctcactgcaaagtctgcttccctggttcaagcgattgtcctgcctcagcctcccgagtagctgggattacaggagttggcatcctttggaagagttcgtgaaagctttctgcccagagctcctggaccaatgcatcttcccaccaccttaaaccactgagcagttcagagccccagttgcagacgacttgtcctgccaccaccatgagttctgaatgtgatggtggttccaaagctgtgatgaatggcttggcacctggcagcaatgggcaagacaaagacatggatcctacaaaaatctgcactgggaagggagcggtgactctccgggcctcgtcttcctacagggaaaccccaagcagtagccctgcgagccctcaggaaacccggcaacacgaaagcaaaccaggtctggagccagagccttcttcagcagatgagtggaggctttcttccagtgctgatgccaatggaaatgcccagccctcttcactcgctgccaagggctacagaagtgtgcatcccaaccttccttctgacaagtcccaggatgccacttcctccagtgcagcccagccggaggtaatagttgtccctctctacctggttaatactgacagagggcaagaaggcactgccagacctccaacacctctggggcctcttggctgcgtccccacaatcccagcgactgcctctgccgcctcacctctgaccttcccgactctagatgatttcattccccctcatctgcagaggtggccccaccacagccagccagcccgcgcctctggctcctttgcccccattagccagacgccaccatccttctcaccaccacctccgctggtccctcctgccccggaggacctccgcagagtctcggagcctgacctcacgggagctgtttcgagtaccgtaagcttgctggactcccctcctcacggcttttctgaatgtctcctcccagcagtcacattccctttctcactgaagcactgagctctgaggacagcactggctgccgctgtgcctgtgtgatgactggagccgtgtcccctgtcgctagcgtgcatgcttcccgtgtgtcttccctgggtctctcggggctgttccccatctctgcagtgcctcatctgctctgtcctgttgggaatgcacatctttctccctcagaagacaacatctgtggcctttatgttgactggccatgcttttcacaggccaggtcgggggtcgtgtggtgagctgaggaaagctaagaattatgggggaaagcaacggcaggcgtggtgggtgctacttaccagggagcggggagatctcggggaggaagcgattctctgattctttttcattctcccagcagccccatgaagtaactcttcattttatcaatgaggaatatgaggttcagagagattaagtaatatatgcaagattacacagtaagtagcagaaccaggattcaaacctaggtgtttggggctccattaacacaggcttttactcaacgctgctatactgccctgcagattcctttccccttcctgactctgtgttcttgcttgtccccttcttgtccagaggctctctggtatctgactgcaggcattcagcttcccctgagtcagtcctgcctcagtctgctaagccagtacctcccagatggtgcctggaaatatatagttagggacccagcacggtggctcatgcctgtaatttcagcactttgggaggccgaggtgggcagatcacctgaggtcaagagttcgagaccagcctggccaacatagtgaaaccctgtctttactaaaaatacaaaaaaaaaaattagccagtgggcgtgatggcaggcgcctgtaatcccagctacttgggaggctgaggcaagagaatcacttgaatctgggatgcagaggttgcagtgagccgagatcgcaccactgcactccaccatgggcaacagagtgagtctctgtctc

SEQ ID NO: 14055 - protein, 265 aa, Homo sapiens
MSSECDGGSKAVMNGLAPGSNGQDKDMDPTKICTGKGAVTLRASSSYRETPSSSPASPQETRQHESKPGLEPEPSSADEWRLSSSADANGNAQPSSLAAKGYRSVHPNLPSDKSQDATSSSAAQPEVIVVPLYLVNTDRGQEGTARPPTPLGPLGCVPTIPATASAASPLTFPTLDDFIPPHLQRWPHHSQPARASGSFAPISQTPPSFSPPPPLVPPAPEDLRRVSEPDLTGAVSSTVSLLDSPPHGFSECLLPAVTFPFSLKH

SEQ ID NO: 14056 - DNA, 1924 bp, Homo sapiens
  CDS (46)..(1068)
acccgcggcaaccccggcaacccagggctcggcgtcgctgccaccatgacgggaagcaatatgtcggacgccttggccaacgccgtgtgccagcgctgccaggcccgcttctcccccgccgagcgcattgtcaacagcaatggggagctgtaccatgagcactgcttcgtgtgtgcccagtgcttccggcccttccccgaggggctcttctatgagtttgaaggccggaagtactgcgaacacgacttccaaatgctgtttgctccgtgctgtggatcctgcggtgagttcatcattggccgcgtcatcaaggccatgaacaacaactggcacccgggctgcttccgctgcgagctgtgtgatgtggagctggctgacctgggctttgtgaagaatgccggcaggcatctctgccggccttgccacaaccgtgagaaggccaaaggcctgggcaagtacatctgccagcggtgccacctggtcatcgacgagcagcccctcatgttcaggagcgacgcctaccaccctgaccacttcaactgcacccactgtgggaaggagctgacagccgaggcccgcgagctgaagggtgagctctactgcctgccctgccatgacaagatgggcgtccccatctgcggggcctgccgccggcccatcgagggccgagtggtcaacgcgctgggcaagcagtggcacgtggagcactttgtctgtgccaagtgtgagaagccattcctggggcaccggcactatgagaagaagggcctggcctactgcgagactcactacaaccagctcttcggggacgtctgctacaactgcagccatgtgattgaaggcgatgtggtgtcggccctcaacaaggcctggtgtgtgagctgcttctcctgctccacctgcaacagcaagctcaccctgaaggacaagtttgtggagttcgacatgaagcccgtgtgtaagaggtgctacgagaagttcccgctggagctgaagaagcggctgaagaagctgtcggagctgacctcccgcaaggcccagcccaaggccacagacctcaactctgcctgaaggccctcttgcgcagctgcctctcggcccctccgccttctcccctcctgctgtccatgcttggccccctcgtccccatccacctgtgccctccgcatcttaccctccctttctctttcctcattgccttctcccttcctgttccctcatctctgccttccccatgtctctcctctccttggccgtggcttctgtctgtgaggaggcaggagctggggagtgggagcctatgaccccacgtctgacagccatgtccacctgtgcccacagcttccgcccacagacctccagggacaggagcaaattgcaccacagctccccgcctggcctggccctccccaggcggctcggtggctcatgctgtcctgtgagagcccctgccccagagcggccccactaagcgcatgtggctcctgggctacccacagccagggcagcctgctggagccacagggccagggccatgcagatggaggcctctgggagccacctccaatccctcaccactcactcaaccagtggcacagtgtccttgtgcccacactgagccagcaagtcctgctgtccacacccacaagctacctggagggacaggacccacctccatccttcggaaggccttcctggaatcccaccttggcctccgccctcggttccgccccgcccctctccccccgaccttggggcttgtgtcgagcccttgggtggggccaggaggaggtgatggcgtcagaggaggtgtggtcagaggtgacttgttcccacctccagggaggacgcttcgtcttcggccagcgcagacctggtgtttgtttgttgggctcacgcttgcacaatgaaggcttgttcacac

SEQ ID NO: 14057 - protein, 341 aa, Homo sapiens [sequence omitted]

SEQ ID NO: 14058 - DNA, 1690 bp, Homo sapiens
  CDS (192)..(1304)
attgagctgtctgctcgctgtgcccgctgtgcctgctgtgcccgcgctgtcgccgctgctaccgcgtctgctggacgcgggagacgccagcgagctggtgattggagccctgcggagagctcaagcgcccagctctgcccgaggagcccaggctgccccgtgagtcccatagttgctgcaggagtggagccatgagctgcgtcctgggtggtgtcatccccttggggctgctgttcctggtctgcggatcccaaggctacctcctgcccaacgtcactctcttagaggagctgctcagcaaataccagcacaacgagtctcactcccgggtccgcagagccatccccagggaggacaaggaggagatcctcatgctgcacaacaagcttcggggccaggtgcagcctcaggcctccaacatggagtacatgacctgggatgacgaactggagaagtctgctgcagcgtgggccagtcagtgcatctgggagcacgggcccaccagtctgctggtgtccatcgggcagaacctgggcgctcactggggcaggtatcgctctccggggttccatgtgcagtcctggtatgacgaggtgaaggactacacctacccctacccgagcgagtgcaacccctggtgtccagagaggtgctcagggcctatgtgcacgcactacacacagatagtttgggccaccaccaacaagatcggttgtgctgtgaacacctgccggaagatgactgtctggggagaagtttgggagaacgcggtctactttgtctgcaattattctccaaaggggaactggattggagaagccccctacaagaatggccggccctgctctgagtgcccacccagctatggaggcagctgcaggaacaacttgtgttaccgagaagaaacctacactccaaaacctgaaacggacgagatgaatgaggtggaaacggctcccattcctgaagaaaaccatgtttggctccaaccgagggtgatgagacccaccaagcccaagaaaacctctgcggtcaactacatgacccaagtcgtcagatgtgacaccaagatgaaggacaggtgcaaagggtccacgtgtaacaggtaccagtgcccagcaggctgcctgaaccacaaggcgaagatctttggaactctgttctatgaaagctcgtctagcatatgccgcgccgccatccactacgggatcctggatgacaagggaggcctggtggatatcaccaggaacgggaaggtccccttcttcgtgaagtctgagagacacggcgtgcagtccctcaggtaactactctgtgatcggggctctgtgaaacggttttcctgtttatgacggtgttgttgaaattttgaaaaataccacacaggccgggcgtggtggctcacacctgcactttgggaggcagaggcaggtggatcacctgaggtcaggagttcaagaccagcctgaccagcatggtgaaagtccgtctctactaaaaatacaaaagttagccaggcgtggtggcaggcacctgtaatcccagctactctcaggtggctacggcagaagaaccgcttgaggccgaggcagaggttgcagtgagctaagatagtgtcactgcactccagcctggccaacacagcaaaactccgtctcaaaaaaaaaaaaaagaaaacaacaacaacaac

SEQ ID NO: 14059 - protein, 371 aa, Homo sapiens
MSCVLGGVIPLGLLFLVCGSQGYLLPNVTLLEELLSKYQHNESHSRVRRAIPREDKEEILMLHNKLRGQVQPQASNMEYMTWDDELEKSAAAWASQCIWEHGPTSLLVSIGQNLGAHWGRYRSPGFHVQSWYDEVKDYTYPYPSECNPWCPERCSGPMCTHYTQIVWATTNKIGCAVNTCRKMTVWGEVWENAVYFVCNYSPKGNWIGEAPYKNGRPCSECPPSYGGSCRNNLCYREETYTPKPETDEMNEVETAPIPEENHVWLQPRVMRPTKPKKTSAVNYMTQVVRCDTKMKDRCKGSTCNRYQCPAGCLNHKAKIFGTLFYESSSSICRAAIHYGILDDKGGLVDITRNGKVPFFVKSERHGVQSLR

SEQ ID NO: 14060 - DNA, 1768 bp, Homo sapiens
  CDS (146)..(658)
gtgcgttcctcgtctgccagccggcttggctagcgcgcggcggccgtggctaaggctgctacgaagcgagcttgggaggagcagcggcctgcggggcagaggagcatcccgtctaccaggtcccaagcggcgtggcccgcgggtcatggccaaaggagaaggcgccgagagcggctccgcggcggggctgctacccaccagcatcctccaaagcactgaacgcccggcccaggtgaaggtgagggcccggcaccccgcgtggagggcgaggggagggaggaggcggaaatgggggatcaggggcgtcccggggtcggcctggtcaggggaccattgggatagccagggacaggaagcctacgagccagagaggacctgggggtgccctgggacagggggtgacggagaaaagctgtgggcgccctcgcccccctttgctcacccgcactccacgctctgcggagaggctctgccggcagccccatgtgattccccgctctgcctagccggtttccattcttccgtgttgagcggctggggcttgccgccccaaaccccagagatgaccccagaaatctgggaaactccccttggttccccatctctcatcccctacctcccactccacccacctactcttgcgcctcaactctgctgttagggccgctcaagttcattcataagaacaagagctctgctcttaaaggagccgcgtccctcaggcatttgtctgaatgtggatgttcgcgcgggaacggtgctttgcgcatcgagaccatcgaccacatccccagccctggggacttattgaaggaccaaataaaatgaggcggccccctaggaaaggatctcaggcaatagataccttcgtgggaggtgactgccttttccttttaattttattaactgatctttggaaggagctgggtgagcaattatgctgttactatgtatgagtaatatctactttccctgggcaacccaacctccctagtgccccacccggagagggatcaggcctgaacctggaggcctttcctcccgtctccaaggtcctctaggagctcaggggtggagggcgatgggtcgggaagctggagagtaggacagttcctgggtccgcctgaagctctggctgcctatagtggtcagggatgctctgggataggtggaacagctgcgcctgcagccagctgggccgggcccccgtagctctctagagctctcaccaggagtaggcaggtggatcctgtctctgaggcagggtgggagcctgggctgggctcaggcagctcttggcagcaagcggattttcaggttgtggcagctggtgccgggtggggacaggtcggctgctggagcatgctccccctgaaacctggaaaggagcagtgcctgaggccttgggaggagttctttagggatggtgggctgataagtttccttagaatctccaggagggaggtggcttaggggctactttcacacaagtatggattccccttttccatgttcctaagaatggagaacacctttcttttgtataaagtgggatctcggagatcgagaccatgctggctaacatggtgaaaccccgtctctacttaaaatacaaaaaattagctgggtgtggtagtgggtgcctgtagtcccagctacttgggaggctgaggcaggagaatggcgtgaacccaggaggcggagcttgcagtgagccgagatggcaccactgcactccagcctgggcaacagagcaagactctgtctc

SEQ ID NO: 14061 - protein, 171 aa, Homo sapiens
MAKGEGAESGSAAGLLPTSILQSTERPAQVKVRARHPAWRARGGRRRKWGIRGVPGSAWSGDHWDSQGQEAYEPERTWGCPGTGGDGEKLWAPSPPFAHPHSTLCGEALPAAPCDSPLCLAGFHSSVLSGWGLPPQTPEMTPEIWETPLGSPSLIPYLPLHPPTLAPQLCC

SEQ ID NO: 14062 - DNA, 2579 bp, Homo sapiens
  CDS (18)..(2147)
actccggagactgagccatggggggaaagcagcgggacgaggatgacgaggcctacgggaagccagtcaaatacgacccctcctttcgaggccccatcaagaacagaagctgcacagatgtcatctgctgcgtcctcttcctgctcttcattctaggttacatcgtggtggggattgtggcctggttgtatggagacccccggcaagtcctctaccccaggaactctactggggcctactgtggcatgggggagaacaaagataagccgtatctcctgtacttcaacatcttcagctgcatcctgtccagcaacatcatctcagttgctgagaacggcctacagtgccccacaccccaggtgtgtgtgtcctcctgcccggaggacccatggactgtgggaaaaaacgagttctcacagactgttggggaagtcttctatacaaaaagcagcaacttttgtctgccaggggtaccctggaatatgacggtgatcacaagcctgcaacaggaactctgccccagtttcctcctcccctctgctccagctctgggacgctgctttccatggaccaacattactccaccggcgctcccagggatcaccaatgacaccaccatacagcaggggatcagcggtcttattgacagcctcaatgcccgagacatcagtgttaagatctttgaagattttgcccagtcctggtattggattcttgttgccctgggggtggctctggtcttgagcctactgtttatcttgcttctgcgcctggtggctgggcccctggtgctggtgctgatcctgggagtgctgggcgtgctggcatacggcatctactactgctgggaggagtaccgagtgctgcgggacaagggcgcctccatctcccagctgggtttcaccaccaacctcagtgcctaccagagcgtgcaggagacctggctggccgccctgatcgtgttggcggtgcttgaagccatcctgctgctggtgctcatcttcctgcggcagcggattcgtattgccatcgccctcctgaaggaggccagcaaggctgtgggacagatgatgtctaccatgttctacccactggtcacctttgtcctcctcctcatctgcattgcctactgggccatgactgctctgtacctggctacatcggggcaaccccagtatgtgctctgggcatccaacatcagctcccccggctgtgagaaagtgccaataaatacatcatgcaaccccacggcccaccttgtgaactcctcgtgcccagggctgatgtgcgtcttccagggctactcatccaaaggcctaatccaacgttctgtcttcaatctgcaaatctatggggtcctggggctcttctggacccttaactgggtactggccctgggccaatgcgtcctcgctggagcctttgcctccttctactgggccttccacaagccccaggacatccctaccttccccttaatctctgccttcatccgcacactccgttaccacactgggtcattggcatttggagccctcatcctgacccttgtgcagatagcccgggtcatcttggagtatattgaccacaagctcagaggagtgcagaaccctgtagcccgctgcatcatgtgctgtttcaagtgctgcctctggtgtctggaaaaatttatcaagttcctaaaccgcaatgcatacatcatgatcgccatctacgggaagaatttctgtgtctcagccaaaaatgcgttcatgctactcatgcgaaacattgtcagggtggtcgtcctggacaaagtcacagacctgctgctgttctttgggaagctgctggtggtcggaggcgtgggggtcctgtccttcttttttttctccggtcgcatcccggggctgggtaaagactttaagagcccccacctcaactattactggctgcccatcatgacctccatcctgggggcctatgtcatcgccagcggcttcttcagcgttttcggcatgtgtgtggacacgctcttcctctgcttcctggaagacctggagcggaacaacggctccctggaccggccctactacatgtccaagagccttctaaagattctgggcaagaagaacgaggcgcccccggacaacaagaagaggaagaagtgacagctccggccctgatccaggactgcaccccacccccaccgtccagccatccaacctcacttcgccttacaggtctccattttgtggtaaaaaagggttttaggccaggcgccgtggctcacgcctgtaatccaacactttgagaggctgaggcgggcggatcacctgagtcaggagttcgagaccagcctggccaacatggtgaaacctccgtctctattaaaaatacaaaaattagccgagagtggtggcatgcacctgtcatcccagctactcgggaggctgaggcaggagaatcgcttgaacccgggaggcagaggttgcagtgagccgagatcgcgccactgcactccaacctgggtgacagactctgtctccaaaacaaaacaaacaaacaaaaagattttattaaagatattttgttaactc

SEQ ID NO: 14063 - protein, 710 aa, Homo sapiens
MGGKQRDEDDEAYGKPVKYDPSFRGPIKNRSCTDVICCVLFLLFILGYIVVGIVAWLYGDPRQVLYPRNSTGAYCGMGENKDKPYLLYFNIFSCILSSNIISVAENGLQCPTPQVCVSSCPEDPWTVGKNEFSQTVGEVFYTKSSNFCLPGVPWNMTVITSLQQELCPSFLLPSAPALGRCFPWTNITPPALPGITNDTTIQQGISGLIDSLNARDISVKIFEDFAQSWYWILVALGVALVLSLLFILLLRLVAGPLVLVLILGVLGVLAYGIYYCWEEYRVLRDKGASISQLGFTTNLSAYQSVQETWLAALIVLAVLEAILLLVLIFLRQRIRIAIALLKEASKAVGQMMSTMFYPLVTFVLLLICIAYWAMTALYLATSGQPQYVLWASNISSPGCEKVPINTSCNPTAHLVNSSCPGLMCVFQGYSSKGLIQRSVFNLQIYGVLGLFWTLNWVLALGQCVLAGAFASFYWAFHKPQDIPTFPLISAFIRTLRYHTGSLAFGALILTLVQIARVILEYIDHKLRGVQNPVARCIMCCFKCCLWCLEKFIKFLNRNAYIMIAIYGKNFCVSAKNAFMLLMRNIVRVVVLDKVTDLLLFFGKLLVVGGVGVLSFFFFSGRIPGLGKDFKSPHLNYYWLPIMTSILGAYVIASGFFSVFGMCVDTLFLCFLEDLERNNGSLDRPYYMSKSLLKILGKKNEAPPDNKKRKK

SEQ ID NO: 14064 - DNA, 2621 bp, Homo sapiens
  CDS (49)..(423)
cgggcagatgtggtggatctgttcccagggacttttgaggttgtggagatggtggccagcaaccctgggacatggctgatgcactgccatgtgactgaccatgtccatgctggcatggagaccctcttcactgttttttctcgaacagaacacttaagccctctcaccgtcatcaccaaagagactgaaaaagcagtgccccccagagacattgaagaaggcaatgtgaagatgctgggcatgcagatccccataaagaatgttgagatgctggcctctgttttggttgccattagtgtcacccttctgctcgttgttctggctcttggtggagtggtttggtaccaacatcgacagagaaagctacgacgcaataggaggtccatcctggatgacagcttcaagcttctgtctttcaaacagtaacatctggagcctggagatatcctcaggaagcacatctgtagtgcactcccagcaggccatggactagtcactaaccccacactcaaaggggcatgggtggtggagaagcagaaggagcaatcaagcttatctggatatttctttctttatttattttacatggaaataatatgatttcactttttctttagtttctttgctctacgtgggcacctggcactaagggagtaccttattatcctacatcgcaaatttcaacagctacattatatttccttctgacacttggaaggtattgaaatttctagaaatgtatccttctcacaaagtagagaccaagagaaaaactcattgattgggtttctacttctttcaaggactcaggaaatttcactttgaactgaggccaagtgagctgttaagataacccacacttaaactaaaggctaagaatataggcttgatgggaaattgaaggtaggctgagtattgggaatccaaattgaattttgattctccttggcagtgaactactttgaagaagtggtcaatgggttgttgctgccatgagcatgtacaacctctggagctagaagctcctcaggaaagccagttctccaagttcttaacctgtggcactgaaaggaatgttgagttacctcttcatgttttagacagcaaaccctatccattaaagtacttgttagaacactgaaagactgaatttggtgatttttgacagtctctgtggcttctgtcactgtgattgaaacagaaaatacttagggggtgagtgagtatagtatgtatttgtctagcctttgtagaacctacaagtttttgttttagagatgaggaagctgttccagaggaagcatcaaagagtgctgggtaccaccctagaaaaggagctgtcgcataaatgacaaaaattttctgagtgtcaagaaaatttgccagagggaaatagaagtctgagacgagactcaaacctgtccagtgggccaggggaagtaggaccatatcttatggggcctttttggcagtggtggtgtgaaaggtctagttgcaactttgggggcttccttataggatggagtcattctttctggtattttacagcaatattcctttgttacatgcaaatttgagccaaatattggttagagagcacagataagtgataaattttagattgggtaagatggcccaccccactgcaatatccataatattgtaccacatggcaagtggagaacagaagaggtatcaaggagagaaaagatgataactatgtactgttttacactttaaaaagcattttaattcttgattgcgtttggattacctcagggcaagtcattttacatttgagtaatgttatccatttatacatttgagtgaacaaaagcttatggacattaagtaacttcatccaagatccctcaggtagaagttgagcagggattcatgtattcatctgtttgactccaaatacctatttcatcctcatatatcatggaaacatccactaatctccatccaccttacccatattgattccaacttttctgtctgtccagcaatctgtctgtctaggtagcaatctcttgaagataaaatgtagaaactcacagagctggtgttcagttacgatataagtttggaggagaaaacacaatccagaagctatgattcctcttgtttttccatggtcaacgggtttctggagagctttactgagaatctcagaaataaagtgtgggtggaagggggatttagatggctagttatccaagagttagtgtttaggccattgcagaatcaatgatttaacagcagcagaactgttttggcctgcagttaacatgaatgttaatgaagaccaagtacatgctaggaattccagtcaattaatggttataatttacatgcaactaggaggttcttagcttggtctcagttataactctaagagactaggagaggtagatgagatggaatgcatttcttcttattttgtaatcctgctccaggtcaaggaatagaaactcagagcccatgtatttaagaaagaaatgtatttttgtggtaagtttgctccaagtagggatacaagtatctatttttgacaatcaagtgacattgccatctattcagttgctcaagctggaaattatcagtgtcaacacatc

SEQ ID NO: 14065 - protein, 125 aa, Homo sapiens
MVASNPGTWLMHCHVTDHVHAGMETLFTVFSRTEHLSPLTVITKETEKAVPPRDIEEGNVKMLGMQIPIKNVEMLASVLVAISVTLLLVVLALGGVVWYQHRQRKLRRNRRSILDDSFKLLSFKQ

SEQ ID NO: 14066 - DNA, 1830 bp, Homo sapiens
ctagagagaggacatttcctgagtaaaatgaaaatcaaagctaggagctaatcatatttttaaagtcagatatgttgggggtataactggaagctaatttttaaaagaatcctgccatatctttgataaggaagttctatggcttaaagagtgtaaccactagttttagcagagatgtttcctttagttttgaaacattcttcaacatttcaggttcatgatgaaaaatggctgactggatttaagtcctttattttctatactcctgagcaaaattctgaaaaactggctggtctagtttagagaagaacgctgatgtgggagtattttcaccatgcattcctgctctaaatcctttgcttctactgatagactattctactttcgaaataagttcacattgctctaacacttcataagttcaatctttttctcattctgtttaaaataaccaccatgaccaccaaacgcctgaaattcactgtagttaaaattatgactgaaatagacagggaaaacctgagagtgaacgttacccagcaaatctgggttaaacaggttcgagtttttccagagcacactgtttaggatttcagcttcctgttcaaccatctcggaaacagggtgtttctctgctcctttgtgaggactaaccatgtgtccccgccactttgcaccaaagctgaatatcatcccaaactctggatccttctgacgggcatttgtgtggtacacaggaaggggtgcattatgaatatgcaattactggcatgtaatgttgtcttctgctaaaaatacaaaaagggtactctgatctcagagttgggagctgatttctgatttcagcctagacaggtctgcttaaaactataatcaagctgattgtattgccctggaattctaatttccaatttagggttttgctatataatctctagtagagtgtgtctaatctttatgaaacccagagtctttgtataaactctatggattttcttccatgcgtctaggctgagctgagctgtgtctttaggctgagctgtagagacattaaattactgagtaaatgaaggtaacgttgttatgtcactctgtttctgaaagaccaactcaaattctgtctgctgtagctttgatccttttcatttaattctaagtacacttgttattatagtaactgttgtttgtatgttattttagctttttacttaagtagctatttagcaatttaaatgaaaatgtaattaggttacatctgttttacatgcatgtaataccacgcagatgtaaacttctattaaagccatattttctttttggcaagaaaaggcagaaacaaaatcgtgccagtcgctggaatacgtcttgctctaaaaaaattaaaaaaaaggatatacagagcactgtgccattatttatatggtggttagagtacatcacttctattttttgaaaattaaaaaaaatattaacaagtgaaaaacaagcattctattccatgttccctcttacagtttatctggatacggtgtttaaaatgacaatacagccaggcgcggtggctcacgcctgtaatcccagcactttgggaggccgagacaggtggatcacctgaggtcagaagttcaagatcagcctagccaatgtggaaaaaccccatctctactaaaactacaaaaaattagctgggcatggtggcatgcgcctgtaatcccagctactcgggaggctgaggcaggaaaattgcttgaacccaggaggcggatgttacagtgaaccgagattgcgccactgcactcaagcctgggccacagagaaagactctgtctc

SEQ ID NO: 14067 - DNA, 1867 bp, Homo sapiens
  CDS (184)..(1023)
acagatagaacccaaagaaaggcaaagagtcctgcccggcaccggcgccgcgtgggccaaacctgcgcccgtggaggggcgcgcagagggcaccgggcgccgggagcaggcggcgcagcaccagcattgtgttagtgccgggaggccactgtgtcagcaagctgagagggaaactgaagcaagatgtcgggccggagtgggaagaagaaaatgtccaatctgtcccgttcagctagggcaggtgtcatctttccagtggggaggctgatgcgttatctgaagaaagggacgttcaagtaccggatcagcgtgggcgcccctgtctacatggcggcagtcattgagtacctggcagcggaaattctagaattggccggcaatgccgcgagggacaacaagaaggcccggatagccccgagacacatcttgctggcagttgccaatgacgaggagctcaaccagctgctaaaaggagtgaccatcgccagtggaggcgtcctgcccagaattcaccccgaactgctggccaaaaagcgagggaccaaaggcaagtcggaaacgatcctctccccacccccagagaaaagaggcaggaaggccacgtcaggcaagaagggggggaagaaatccaaggctgccaaaccacggacgtccaaaaagtccaaaccaaaggacagcgataaagaaggaacttcaaattccacctctgaagatgggccaggggatggattcaccattctgtcttctaagagccttgttctgggacagaagctgtccttaacccagagtgacatcagccatattggctccatgagagtggagggcattgtccacccaaccacagccgaaattgacctcaaagaagatataggtaaagccttggaaaaggctgggggaaaagagttcttggaaacggtaaaggagcttcgcaaatcccaaggccctttggaagtcgccgaagccgccgtcagccaatccagtggactcgcagccaaatttgtcatccactgtcacatccctcagtgaggctccgacaaatgtgaagaacagcttgaagagaccatcaaaaactgcctgtcagcggcggaggacaagaagctaaagtccgtcgcgttcccgcctttccccagcggcagaaactgctttcccaaacagactgcggcccaggtgaccctcaaagccatctcagcccactttgatgactcgagcgcgtcctcgctgaagaacgtgtacttcctgctcttcgacagcgagagcatcggcatctacgtgcaggagatggccaagctcgacgccaagtagccgccgcactttccagcagggatcggaggacgacccgagtcccaagagtggggttttgctttttaaaaggagagaggaggggtgatggcaggggagtggagggtggccgggcaggtcctgccggcgcagggagccctctgcccttcacactctcctccaaaagagcctccatctgtaaggaagcaggtctccgcgaggggtttctttccatgtgttttcctcctgttgttttagaacttttttaaaaaaacagacctcgttttagatttatagcattgacttttacacacattcacacaagaaaaaaatcctttcaaaattcttaaatcttctgttcctcctttttccaagggaagagggcaaaaagtggcctgggctctgttggtgtgcgtgttccgtggcggagagaagaaaatgggaaagacatctcactggtgcttttctcttttgttttagtgccccccgcccccatccctataatatctgtaactactcctaaaaaggttttgattcaggcttttttttttgtttcattttgtttttttaagaaaaagaaaatgaaagg

SEQ ID NO: 14068 - protein, 280 aa, Homo sapiens [sequence omitted]

SEQ ID NO: 14069 - DNA, 2306 bp, Homo sapiens
  CDS (274)..(1734)
atttgccctccttccccccttcgtccgctctcattggctctgctgccttcatgtgcttcagccctacgttgtttatgtccagaatcagatattggagctgactctgcctgtccagggcctgcagagtggctgagctcccttcgggcccatgttgtgcgcactggcattggacgagcccgggcagaactctttgagaagcagattgttcagcatggcggccagctatgccctgcccagggcccaggtgtcactcacattgtggtggatgaaggcatggactatgagcgagccctccgccttctcagactaccccagctgcccccgggtgctcagctggtgaagtcagcctggctgagcttgtgccttcaggagaggaggctggtggatgtagctggattcagcatcttcatccccagtaggtacttggaccatccacagcccagcaaggcagagcaggatgcttctattcctcctggcacccatgaggccctgcttcagacagccctttctcctcctcctcctcccaccaggcctgtgtctcctccccaaaaggcaaaagaggcaccaaacacccaagcccagcccatctctgatgatgaagccagtgatggggaagaaacccaggttagtgcagctgatctggaagccctcatcagtggccactaccccacctcccttgagggagattgtgagcctagcccagcccctgctgtcctggataagtgggtctgtgcacagccctcaagccagaaggcgaccaatcacaacctccatatcacagagaagctggaagttctggccaaagcctacagtgttcagggagacaagtggagggccctgggctatgccaaggccatcaatgccctcaagagcttccataagcctgtcacctcgtaccaggaggcctgcagtatccctgggattgggaagcggatggctgagaaaatcatagagatcctggagagcgggcatttgcggaagctggaccatatcagtgagagcgtgcctgtcttggagctcttctccaacatctggggagctgggaccaagactgcccagatgtggtaccaacagggcttccgaagtctggaagacatccgcagccaggcctccctgacaacccagcaggccatcggcctgaagcattacagtgacttcctggaacgtatgcccagggaggaggctacagagattgagcagacagtccagaaagcagcccaggcctttaactctgggctgctgtgtgtggcatgtggttcataccgacggggaaaggcgacctgtggtgatgtcgacgtgctcatcactcacccagatggccggtcccaccggggtatcttcagccgcctccttgacagtcttcggcaggaagggttcctcacagatgacttggtgagccaagaggagaatggtcagcaacagaagtacttgggggtgtgccggctcccagggccagggcggcggcaccggcgcctggacatcatcgtggtgccctatagcgagtttgcctgtgccctgctctacttcaccggctctgcacacttcaaccgctccatgcgagccctggccaaaaccaagggcatgagtctgtcagaacatgccctcagcactgctgtggtccggaacacccatggctgcaaggtggggcctggccgagtgctgcccactcccactgagaaggatgtcttcaggctcttaggcctcccctaccgagaacctgctgagcgggactggtgacccatggctgggggtgctgaggagagccgagttggactggctacccctcctggccacccagtactccctccagcctcagctggctgaacctcgccgctccaaccaccagcttcctcagcgagcagggcccagggctctgggcctgaagcaagagccagcccggctcccagtgtctgcccggctcccagtgtctgcccagccctctcccagacaggagcaggctgccaccctttctacctcaccactgcccctcgaagaattttgcaaatggccccttgccccattttaagcaggagcaggtggctggtttgaagccccaggtatcccccttccctgctatgggaaaggccaagctgctgggtggggacagaagctgcaggggagagggaagcagccgtgctgtcaacatcatccggcaccctctggggtaggagaacagccattccacatgtgttccctctatccgtcctgcttcctgggcagctggtggtgctgggaatggggtgccccagccttggtgaggacagtgttgggaggcccaggggcccagtaaagtgcatttgacattg

SEQ ID NO: 14070 - protein, 487 aa, Homo sapiens
MDYERALRLLRLPQLPPGAQLVKSAWLSLCLQERRLVDVAGFSIFIPSRYLDHPQPSKAEQDASIPPGTHEALLQTALSPPPPPTRPVSPPQKAKEAPNTQAQPISDDEASDGEETQVSAADLEALISGHYPTSLEGDCEPSPAPAVLDKWVCAQPSSQKATNHNLHITEKLEVLAKAYSVQGDKWRALGYAKAINALKSFHKPVTSYQEACSIPGIGKRMAEKIIEILESGHLRKLDHISESVPVLELFSNIWGAGTKTAQMWYQQGFRSLEDIRSQASLTTQQAIGLKHYSDFLERMPREEATEIEQTVQKAAQAFNSGLLCVACGSYRRGKATCGDVDVLITHPDGRSHRGIFSRLLDSLRQEGFLTDDLVSQEENGQQQKYLGVCRLPGPGRRHRRLDIIVVPYSEFACALLYFTGSAHFNRSMRALAKTKGMSLSEHALSTAVVRNTHGCKVGPGRVLPTPTEKDVFRLLGLPYREPAERDW

SEQ ID NO: 14071 - DNA, 2559 bp, Homo sapiens
gaaacgatgaatgtttgagatgatgaaaatgctaaataccctaatttgatcatttcacaatgtgtatatgtattgagacatctcactgtacccccaaaatatgtacagttattattatgtgtcgattaaaaatttaatttttttttgagatggagtctcactctgtcacccagggttagaatatcaaaatatctaatttatatctaatcatatgggttaggatatctaacccatatgattatgcaatttaggctctctagtgtgattccaggccttctggtttgcttatattgatccctaccctagctagagagaaagagccattctaatgaagatttttgcagttagatacttagttattggtttttccaaaaggaatccaatttacttttgctgtgagctattttgacaaatagtgagaactctgaaagttaatagtttgtatcttctttaggggtatcgctggagaatttccccctctgtaaagaattgctcattccacctggaacccaaaactatatggtgagaatgcgactctatgacgtcaaccgtcggcagctgaacctcaccatccggattgtgtgtcgagcagaaggatccttaaagatcttcatttctgctccatattggctgattaacaaaacaggtacatacaggggctgctcaagtaggtctttggcgttagtcatgggaattcagatttatttgcttagctaactaaatggagccaatgcaaatagattacttcaacagtctgagctgctgaaacattcctgcttccatcataaatgcttaatcatgctcaaaactgtctttttaggcaagaaactgagcccactaaatagattcagttttcactcttttcccgcttgatggttttattcattcaccatttgcatctctttcagatagactgggtggtattgatgtaaacttttctctccttcctaaagggttgccactgatcttcagacaggacaatgccaagacagatgctgcaggccagtttgaggagcatgagctggcccgtagcctgagtcctctcttattctgctatgctgacaaagagcagccaaacctgtgagtacagttatttatgggaaggggaaataagctcccagggaagggaagaaattagtaaaggctataatatatccgtgtaagtagaaatatactgtagataacaatcctgacttggcaggggaatagaaccatgacctaatgggatttttggggatctaatttctatgttatttgatactgaaaataaaccatttggttggtttataatgaaagctagttttattttacatgcattgaagtagttttcctattcataactctgccaacgaagagaaagccacgagttctccttctctgctctgcagtttttcttcccctgtaaacttggagcacaggcacaggagctgtcatcagaatggacatatgctggttctttggtgaagccgtcagcctcattaatccaatccaggatttgtatcacatttggaaattcatcccttttacctttgaagtaaaatgtgccattttatggtctcagagcactcattgcatgtttaaaagcagggacaaaaaacaactgtgaggattagatgacatgtgcttttaatgtatggtaggagcattaattcacttttgttcttggttttgacattttgctttttacaagagtcttttaatagagctctaatcaaagataaatgggtgtatccaataatgctaaaatgccataccgtgttatcggtagaatcgtgctgacagcttaacagaaagtcttctggggtaccacacttcagtgggtactgatgtgtttacaagggaaggttggagtgtagattaccgtttgaggcatggaaagaggattgatgagagttctggatattgtaggggatgcagccagcctcttggcatgtgcagccagcccagtctcattcttctcctgaaatgatttggacagttttagatttaggacttgacatgtgtcacacagtgtgttttatctgtgaattccacagttcccaaagcatttcacatagaccatctcattggattcttcccaccatcccaatggtttaggcagggcaggaaatattgttatattttaagatgaggaaacaggctcagagagattgctacctgcccaagtttacatcgcttgttagtggtagagctggaacacacattcaggaattatgttgtcgaaatccatgacaggacactggcccactaaacagtgctttgctattgtaatagtatcaggccggctgggtacggtggctcatgcctgtaatcccagcactttgggagaccgaggcgtatcccaaggtcaggggtttgagaccagcctggccaacgtggtgaaaccccttctctactaaaaatgcaaaaattagccgggtgtggtggcgctcgcctgtagtcccagctacttgggaggctgaggcaggagaatcacttgaacctgggaggcggaggttgcagtgatcctagactgtaccattgcactccagcctgggcgacagagcaagattccacctc

SEQ ID NO: 14072 - DNA, 1842 bp, Homo sapiens
agaaaataaatatatcttacccttcaactaatatgtttctgaatcttagaaaattactatgatattagtattcaatttcttatattctctgtctccctcttctctcatttcctttccccttttcttcccctctgttccttcccccaatcattctcttctctattctatgtctctgaagctatcctggccttttagtcgtacctcaagctgtacaggacagtagtttaccaagagtagctcgctgctatcgacacaatcgcctgcctgttgtatgttggaagaactcaagaagtggtactctgctcctccgatctggaggaaccataagtggcagctcttcccgttcaagacccgagtattttagaattactgcctccaacaggatgtattcactctgccggaggtaagtgtgtcagtgggctccaaaaagaggtcttccttcctttcttcttatttgaatctttaataggccatttgcatccatagccctgagatagataaaaatgcctgaaaataagaacaaggtctccaggatacgagcaagcatctcattggcattctcggaacaattaccttactgaaagtacctctagtaggtgagaaggtgaaaggtaaagtactcaccccctatgaatttctcttgtctttctcttcccagtttgcttcttttctagcatgactaaagataacttgaagaacaggattttcccagcccaatagaggacatgaaagtcttttgtaggctggggagccacaaactctttctataaagggtcagttggtaaatattttcagtttatgagccatagagtctcttgttgcagctattcaactgtgccgcaaaagcagccacagacagtaaggaaatgagtaggcatggccagttttggcccacaggctataatttgctgacccaggtgtaggcaaggctttcttatgcggtctaattggaatgttttcaagggaatattacttaaaggatgtaaataaagaggcattttcttttttcagttcttgtcatctctcactgtttttcaaatatgttgagtcttattccatgctttactatatgtaaatatatattttctaaaattacattttcaccatccacaagtttagtcattttcatctccaggtaagatttttctttgcatttataaattcctgcttaaacagctctgaaatcactttgtaaattgtaagctttgtacatattttagaaagttatcttaatgttactttcaaccctgttgctcttgaagatagatatgtcattttaaatggcaatttaagtttacaaatattaatatgaaacttcagaaacaagttgggaatatagttttgagattgtggccaaataaacattttgcatgaagttctgaaaaattggcactctgagtatgcagtaatttttctggaattctccgtcattctaactaaattttctctgaagatgagtcatgttgtcggggtgtgatgtcctgctgtttggaaagtttgctatcaaaattatgccagccattgagaaaacagactcatttatcattccaatctgtcagaagtaaaataaaattttaatagatgacttattagaacactggttataaagcatttatgatggtaaaaagtaatatatatccattaagttattagcaggaaggaaatggaataataaaaaataatccaaaagaaggcaagaaaggaaaaaaaaggggacatagaacaaatggaataaataacaagtagtaagatggtagatttaaattcaaatatatccataattgcattaattattaattgactaaatgttccaattcaaagaaagagatcagggtttgcttt

SEQ ID NO: 14073 - DNA, 2146 bp, Homo sapiens
  CDS (9)..(1139)
cttgtaagatggcggcgcccaggtggagcgcgtcgggcccctggatccggggaaacggccaaggttgcgggagtctcttcactctcgtctcagagccattttgtgccgctgccgctgcctctacggccataaatgcccggagattagcggagaagctccgagcccagaaacgggaacaagacacaaagaaggagccggtgtccacaaacgctgttcagcggagagtgcaagaaatagtgcggttcacacggcagctgcagcgagtccaccccaacgtgcttgctaaggcactgacccgaggaattctccaccaggacaagaaccttgtggtcatcaataagccctacggtctccctgtgcatggtggccctggggtccagctctgcatcactgatgtactacctatcctggcaaagatgcttcatggccacaaggcagagcccttgcatctgtgccaccggctggacaaggaaaccacaggtgtaatggtgttggcttgggacaaggacatggcacatcaagtccaagagttgtttagaacccgtcaggtggtgaagaagtactgggccatcactgtgcatgtccccatgccctcagcaggagtcgtggacatccccattgtggagaaggaggcgcaaggccagcagcaacaccacaagatgacattgtccccgagctaccgcatggacgatgggaaaatggtgaaagtgcggcgcagccggaatgcgcaagttgctgtaactcagtaccaggtgctcagcagcactctctcctccgccctcgtggagctccagcccatcactggaataaaacatcagcttcgagttcacttgtcctttggattggattgtccaatccttggtgatcacaagtactcagactggaataggttggccccccagaagctgtctgtgggcaccctgaagaagctggggctagaacagtcgaaggcccgctacatcccccttcacctgcacgcccggcagctgatcctgcctgccctggggtccgggaaggaggaactcaacttggtctgcaaacttcctcgcttctttgtgcattccctgcaccgcctgcgtttagagatgccaaatgaggatcaaaatgagaacaatgaagccaagtgtctgggagcacagtgaagaccatgggagcaccctggcacctgggagcacagtgaagaccctgagagcatcctggcacctgggagcgcaggttggcccctgaactgttctttgtttacaggactctgctaacttctcacttggaacagactgcgtaagagccaggtgggataaggtaaagcaactcagctgctacagggcttttaatggagaacaaagtctatttactgatagtttggctgcactgtggaaaagcctgctggaagtctccctgccgtgggctctcattgccaatatggaacagagcccagggccaggcagactggggcagtgactggaaaaggaaaactaaaggtcagaatccgggatcaggaactgtttttatccagcagtgaagctcttgagctcttaggaaggttcccgtggttggaaagaacataatggttaacaaatatcacagcatccagggattgcccagctatagtgtgggtgccctactgaactctgattagggaacctgtataagggtattgagtgtgaggttgaggtgggacatttgctgagcaaggagaaccgatgtgaatggcaggcagataacatgcacacatgaagctggttgggtgtaaggcagtagcggggagcagcatgctgtctaacagctgttagctccagctggttgttgccatgtgggaatggattttctcatttcttcagagaagctggaaacctagatatttatgtgaaacctcccagtgtattgccaactaaatcaaatttttaaagatgcttaggcacctaagcaaataatacttagaggttgaatttggtctacaggctagcagtttgcagtctatgtttaatgaatggtatagaagtttggggaaaggtgccatcttgaaaattctggatcagtggttggcattttcgctgcgtgtagtatgtatcctttctaggcttggagatggctttggttggtccgtgaatgtagttatgagagtgctgccattaaaaaatcaaaaatc

SEQ ID NO: 14074 - protein, 377 aa, Homo sapiens
MAAPRWSASGPWIRGNGQGCGSLFTLVSEPFCAAAAASTAINARRLAEKLRAQKREQDTKKEPVSTNAVQRRVQEIVRFTRQLQRVHPNVLAKALTRGILHQDKNLVVINKPYGLPVHGGPGVQLCITDVLPILAKMLHGHKAEPLHLCHRLDKETTGVMVLAWDKDMAHQVQELFRTRQVVKKYWAITVHVPMPSAGVVDIPIVEKEAQGQQQHHKMTLSPSYRMDDGKMVKVRRSRNAQVAVTQYQVLSSTLSSALVELQPITGIKHQLRVHLSFGLDCPILGDHKYSDWNRLAPQKLSVGTLKKLGLEQSKARYIPLHLHARQLILPALGSGKEELNLVCKLPRFFVHSLHRLRLEMPNEDQNENNEAKCLGAQ

SEQ ID NO: 14075 - DNA, 1618 bp, Homo sapiens
tcctaaataggagcgaggagggggacaatctttcccttcacccccacatcttcctttcctcttccctacctccctgtattaatactgagaaaccacacctgaacaatgaaatgactaggaactacggtttctggttgtgttcccaagtgggaatatgggctgttcacgacctcggaatgtagaatgccctcattatttattcagtagacatccaataaatgcggatcaacagcttgcctatctttgatagtttttggcagtgtgtgctggttttaatctttgtacttgtcccataagtgaccccatgactagagagtgggctcttccatcttgtaagagccttctgttcacgttctgttctttttatgagaaggaagttccagtgcatatcccaacataaagagaaacgttgaatacgtactgtttttctcttatatatatgctcaaaataacgactgtagtaaacagtcgtcatgattataggatgaattacgcagccattcatagatttttgtagttgtcatttacaagtggactatgcaatagttcataggcttatgaatacataatctaacaatattagctgggtgcagtggctcacacctgaaatcccagcacttagcgaggccaaggtagcttgattgctagagcccaggagttcaagactagcccgggcaaagggcaaaaccccatctctacaaaaactacaaaaagaaattagccgggcatggtggtgcttcccggtagtcccagctacttgggaggcaaaggtgggaaggtcacctgagcctgggggtgtcaaggctgcagtgagctgtgattgcaccactgcacccgagcctgggcgacagagtgagaccctgtctcaaaaacaaacaaacaatattatacttgtagtatttaaaaaacataattatctggtattcccatagctaatggaatgaaaggggagactttatctccctagacaggaagcacggtacctcctacactctcttctccccacatcaactggataggtgtgtgaacgcatttcaaagtcaagtatggttagtaattacttgatctttttccagccccttcagataagctgaattgaacacccaaaagtgatagtaacatcattttcctttgcaattacaaagaccattaacccaacagaatctccatgctttacctgtttgtgatgtttttgttccattttattaagtctgactcctgataaatgaatcactacacaattaattttttctcattctttagattcatacacacagacacatatatcaagcaaactataaattgctaaaatgacaggccagcagtgactacttgttatcacgtgtgtaacatctcttgagggctgctttgtaattcatttgtatggtgttgttgtaccagtgtaactgctaagtggtttctctggttccatgttcatttgtacatgaagttgtgcaatctccacataccagcagtttcaaagaatgacagtttgcatgaggccatcttaatagcaggtagcatgtaaccaacccatctgaattaagccaccattgcagaataaaacatttgacactaagccaggtatttcagtggatgagttgtattttggatttcc

SEQ ID NO: 14076 - DNA, 1520 bp, Homo sapiens
tactgaaaatgtggctttcataattgtcttagcttagaccattcatagcattattacccaccttgggagtgggaatggtaggaggaggataatgaactggggaagcttcctttagctccccagtaccaaaaccacactaaataagttttgatttcctgggcttccttgttttatgttgaaattggtggtgaggctcagtaatagtttcttaaatgttaaggctagaagttgtacaccacctagtggctgtgtacattaaaacaggaagcagaaaccggccaggaagagggagccggatctggatgtgtctattggagtgactgcagcactccatatagaacctgggcattgctctctttatttttaattgaagtaaaatttgtgatagcattttacaaattgaaaatagctgtgtcatttaaaaaattcccattaaatttgttcccagtacccctcatgtttccagtgatttccttctactctgtcagtgtgcggttaagccgtatagactcattttaatactaatgtcagccaaataaaattaataagttaaacttatttcccttatcattatatacatcctaaagccaatgtattttaaaattgcttgtaccattgcctgctctcctttgataaaaattgtagtttcacttagcatatgtttattgattatagtcacaaaatagaccttgggtgtattgcataaaacatgatcctagcatagaggaggagatggacatgtaaatacataattgcaacaggttataacatgtatgactcttacaatagacgtctctatagcagttaatgctggccggatgcggtggctcatgcctgtaatcccagcactttggaaggccaaggcaggcggatcacctgttggtagttcgagaccagcctggccaacatggtgaaaccccgtctttactaaaaatacaaaactagccaggcatggtggtgtgcacgtgtagtcccagctactccggaggctgaggcaggagaattgcttgaacctgggaggtggaggttgcagtgagccaagatcatgccaccacactccatcctgggtgacagagcaagactttgtctcaaacaaacaaacaaaaaaacaacaacaactctatagcagttagggagagaggatacaaaggaaggagtggttgatctgccaagggagatttagaagactatttggaggaatgatacctgagttctgtcctaaaagttgagaaattgttcacaaggttgacagaaagtgagctactccaggcagaaggaacagcttagacaaaagctcagtggtataaaacaacatggtatatttcaggaactacagctgattcagtgagatatatctgactagagaagtgggtaggggccagaaagtaggctttgtatgcagcacttctacttgggaggctgaggcaggagaattgcttgaacccgggaggtggaggttgcagtgagctgagatcgttccactgtactccagcctgggcgacagagtgagactctgtctc

SEQ ID NO: 14077 - DNA, 1468 bp, Homo sapiens
  CDS (195)..(500)
gaaaaagaaagaggcagtaattcctcttgtgggcaaggttctgcagaatgatttggctcctgcaggttaagtgcccagtcataggtgtgggatagagcagactcctacggatgccagtggagacgttgtgggcctgggtctgctgcccactccccagtgggtcaggactccggcagggtctcctgggctaaagcatggaggtgactgtgtcccaaggcactggcagctctgcccagcctgttcctttcccaccctctggccctcagcgactttggctgcatgtgcctctggcagggcagaaccagaagtgggggcctagtggccttccaatttggggttcttggagaaggagcctggcgtgccctccttggggagcaggtggacagactggatgttttatggagtctgggggagtcctgcggcagctatatctgttaaatgccaagaagccaagttggtttaatatgattgtagctgctgctttgataaatcaaaataattaaaaataataaatttgattcctcaaccaacaggctgtgtgtgggcgcagggcctgggctgccgagtcagggccgaggaggtgggagtgggcacggggacacaggaaggcctgtcttgtgggatcctaaatggggagtggacggcaacagggcggaaggggagactgcgaaccagtcgggggaggaacatctctcacttagcagagccgagccctgctgtccacaagcctgggctggggccccagctgggcctgcccctggccctgtggcattgggccagcctcagtttcctcatctgtcaaatgggaaggcagttccacccacctcccagggatgtgtgaagtcaggctttgctgagtgtgtctgcccagtgttgaatgggcctccgtagccccctcggcccgtccctgcacccgctttggtcgctgaggcgaccaggcgtgctcgcagcggctgcacagccttaaaggcccaccagcctgcccggactcttcctcccactgatggctgttgtcctaccacaggattgttctgtttatgaggacgtcctccggtgcaggacgtctctattcatagctcccttcggcttccagagttgggtcaggaagccccatgccacgccctgggaccgagttcagggtgccggcagctctgacatcagttgggggggaattggcaagggttttctacctccgcccctgtcccctgccccctgccccccatccatgtcctcaggagccgtatttggtgtctgatcccaaagtgtctgagcagctggaaatctgaactggttggagggggcaggggctggtgaggagggagggacagggtgtctgtctctttaaatgcactttgtgtcagtgcgataaggaatttgatggctttatcagaaataccaaagctttatttagcagggtgaggctcacaccactcagctccacacaacctgctgataaatagcaaaaaag

SEQ ID NO: 14078 - protein, 102 aa, Homo sapiens
MEVTVSQGTGSSAQPVPFPPSGPQRLWLHVPLAGQNQKWGPSGLPIWGSWRRSLACPPWGAGGQTGCFMESGGVLRQLYLLNAKKPSWFNMIVAAALINQNN

SEQ ID NO: 14079 - DNA, 1986 bp, Homo sapiens
  CDS (109)..(438)
gtaacgccttcaaccgcccgccgcgatagagtgcccacgaccctgcctcgggaatcccgctctgcaccgccccaccagacccggactcggagccgcgagcggcccgagatgagcagcaatgactcctcccttatggctgggatcatttactatagccaggaaaagtacttccaccatgtgcagcaggctgcagctgtgggcctggaaaaattcagcaatgaccctgtgttgaagttctttaaagcctatggagtcctcaaagaaggcaatgtacttcatgatgcagcagaactactcagaggccctggaggtggtgaaccagatcactgtgacttcagggagcttcctgccagccctcgtcctgaagatgcagctgttcttagctcggcaggactgggagcagacagtagaaatgggacacagaatcctagaaaaagatgagagcaatattgatgcctgccaaattctaaccgtgcatgagcttgcaagagaaggaaacatgaccacagtaagttctttgaagactcagaaggtgatccttgaaacagaatcaaggaggaacccttcatgacctgtgcacctgacccaaagcccttgtagggagctcctggatctcagcttcctcttttctaccccacccctatactcgctgccaaggaggcctgctctggtttgactctttgagttgtgtagcttgggagtcaggcagcatcaggcagtgagattgattctaggctctgccatgtgctatctgtggaagcctgggcaggtgtccccacctggataagccgcaggcttcctgtttgtaaaatagacagaattccacacaggactaaatgtgataagaagtgggagagtttggaacagtccctggcacactacagtaattccatcaatgttaactgatagtagaagtcgtggtagtatttctgaattcaggaaatgccttttttttaggggatagttggaactgctcaggcattggccaggtaatactgggccccaaacatgctcgtaagtcttgtagttttccaaagaaaccaaaaatagccctcaaatgcagtcagaaacacctagaattcttagtgaaacctcaatacccagacaggttctcattttcagaaaggtttgtttttagccaaagcattgccttttagatcagtgaaatatattgcctctatggagagcatggcaaaccaggagtctctaaggggtcatggtgggaaggggaagcttctggtttcttctgcacagctctgagattgtggattttgtgggatggggtgaggtagaggggagagtccatatttgggagaaaaaggccccagcccttttcgtctctgggtaggaataagagaataggactatcctcagctccctgtgactccagatccctaagcaggccttcctggggcctggcctgaaagttaatcccaggggcagacttagcatttagctaactgagatttagcattagccccttttttactcccacttcaaaccttgggacctccccaccgaccccgggctggctacccagttctaattttgttcatacttactgaacagagtggacccataccatccttggttttgcttttggcacttctctgcagctgggaactaagaattccttactcctgggtggggagtgggaaagaacctaagctttggaatctgtcagtgacctaggtggctgggtgacctcagaccaattgcctaacctttctaacctttcatgtgttggacaggaaggtttggaaagttcgaatagttatactgacttacatttgattcatatcaaaatggagcagaggcttctgggccagcactagttagtttgctgctggcctggcaggctgcactgtggacacagtgagggctagctcctggctctgcctgggtgggtctgaaaaggcaacttctcttcacaaactcaggaacagggctactctatgggttagccctgctccataaggagcagtc

SEQ ID NO: 14080 - protein, 110 aa, Homo sapiens
MSSNDSSLMAGIIYYSQEKYFHHVQQAAAVGLEKFSNDPVLKFFKAYGVLKEGNVLHDAAELLRGPGGGEPDHCDFRELPASPRPEDAAVLSSAGLGADSRNGTQNPRKR

SEQ ID NO: 14081 - DNA, 1939 bp, Homo sapiens
  CDS (189)..(1550)
agcaccggaagccgctcccctgtgaggctgcggaccgggagcagcggccgcaggtccgggcgccatggctgcagagcggacccggccgctgcaaggctctggcggtccgagcgtgcctagtagctgtgaacccggcgcgaggtcccgggccccggggcgctcgctcaggtaaatttttccataaccttatggagagaaaggactttgagacatggcttgataacatttctgttacatttctttctctgacggacttgcagaaaaatgaaactctggatcacctgattagtctgagtggggcagtccagctcaggcatctctccaataacctagagactctcctcaagcgggacttcctcaaactccttcccctggagctcagtttttatttgttaaaatggctcgatcctcagactttactcacatgctgcctcgtctctaaacagtggaataaggtgataagtgcctgtacagaggtgtggcagactgcatgtaaaaatttgggctggcagatagatgattctgttcaggacgctttgcactggaagaaggtttatttgaaggctattttgagaatgaagcaactggaggaccatgaagcctttgaaacctcgtcattaattggacacagtgccagagtgtatgcactttactacaaagatggacttctctgtacagggtcagatgacttgtctgcaaagctgtgggatgtgagcacagggcagtgcgtttatggcatccagacccacacttgtgcagcggtgaagtttgatgaacagaagcttgtgacaggctcctttgacaacactgtggcttgctgggaatggagttccggagccaggacccagcactttcgggggcacacgggggcggtatttagcgtggactacaatgatgaactggatatcttggtgagcggctctgcagacttcactgtgaaagtatgggctttatctgctgggacatgcctgaacacactcaccgggcacacggaatgggtcaccaaggtagttttgcagaagtgcaaagtcaagtctctcttgcacagtcctggagactacatcctcttaagtgcagacaaatatgagattaagatttggccaattgggagagaaatcaactgtaagtgcttaaagacattgtctgtctctgaggatagaagtatctgcctgcagccaagacttcattttgatggcaaatacattgtctgtagttcagcacttggtctctaccagtgggactttgccagttatgatattctcagggtcatcaagactcctgagatagcaaacttggccttgcttggctttggagatatctttgccctgctgtttgacaaccgctacctgtacatcatggacttgcggacagagagcctgattagtcgctggcctctgccagggtacaggaaatcaaagagaggctcaagcttcctggcaggcgaagcatcctggctgaatggactggatgggcacaatgacacgggcttggtctttgccaccagcatgcctgaccacagtattcacctggtgttgtggaaggagcacggctgacaccatgagccaccaccgctgactgactttgggtgccggggctgcgggttttgggtgcaacctctgcggcagccgactgcatgaaccaaagttctcacctaatggtatcatcacgcagtgcacaatcatttatctatgttttgccaggggccagggctcggggtgggggagggcttgttttattgacatacaacgcagcatgctaatggggtacaccattgacttcatttgtacttagttatgttggtcagtgttagaggatgcattttgggttcatctttcttgagtggagtattggttttaagtaaagaaagttaaatgatccattaatctgctaattggttgcctatgaaatcacattgtctgttattaaagctttttaccat

SEQ ID NO: 14082 - protein, 454 aa, Homo sapiens [sequence omitted]

SEQ ID NO: 14083 - DNA, 2021 bp, Homo sapiens
tttccctggaaaaacaatgatttgaattcaaggaggggaggagaacaggtttcccccaactccaagcttgaggactttcttttccttttgaagtaggaatggagttctgtccccggcccccgaaggcgtccttacagctgatatttttccagctgcctatctccccagagcgtggagcggcctccagagtggggtcagggatggggcgagagggccagacctgcctgggccgggcagctcagcatctctctgagctgctgaacacctatggaggctgtgctcatgttcactggtggtgtgactttgtgtgaccttgccacttcactctttcacagcctcgtttcctttatctgtcaaatggggatcatgagtccactgggtggcttttgaagaacgtgccacaatcagagaaggtctgagctgggaaatgcaacagaggccttctcctccttgaccagtggggaaacagaggctcttaaaactggcatagatccagcttcctgcccctagtctctgtctttcccattccatcaggaccagatctcagaataggggattggcattttcatgctggggagctgggtatcattttcttttcagagacttagtagaaaataaaaggatccctgagaaattctttatgtgcaggtgcttgtcgatggtaggggtgacctcaggaccgcactgtctgcccatgaccaaggagtgagactgcttggacattgtccttgtgtcccccctgggggtctggatcaaagcccaccctgaaggtgacaacactaacctacagatgtttgttctctctcatgccctccaggggtttcctggagtctttggggaaagaggccctcctggactggatggaaatcctgtgagtatttcaagtctttgggaacaggagcgagattctgagtgaacacacagcagattttaggagcccacgctttagggtcagacagacctgggtcaaatcccagccctgtgaagtaccagctgggcacccttggacaaattacatgacgtctctaaacgctaggctcctgtctactgcggctgcaccgtcgcccccctgtaagagtccccagcccactgagcccctgggtccaaagctccaggctgcaccccatttccaggactttggaaggttcatgggtcactccccactggagaggccccagctgctgccatcttacacagcatcagcaatgtttatgggccggcagaggcatggggaagcaaacggtctgcaggccgtgtttggagaaaaggaagagctgagttccaaaggaatctccaccacaggcatgtttatagagtttgtaaataattagaggcccaggctctgttccccgaggagccaggtcagcctgccctggggagccgagtctgtctttcccttcccggctccaggccctggtgggagaaggtgttcatggttccccatctccccctggggcttcctgcctgagcagctgtgccagctgtgccctctgcagtggtggctgctgcgttcataaccagcacccgattaggcgctaattcagttccacaaatgctccctgagcctgacccagccaggctcccttggggattatagccttgacctcagaaccctgcggacctgggtttgaattttgttgtaccacttgtcaggtgtgtgagcttggaaaaatccattcacctccctgaatctcagtttccttgtctgcaaattggggggatcagaattccagcctgaggccgggcgcagtggctcacgtctgtaatcccagcactttgggaggccgaggcggctagatcacttgaggccaggagttcaagaccaccctggccaacatggcaaaaccccgtctctactaaaaatacaaaaaattagctgggcgtggtggcaggcatctgtaatcccaggtacttgggaggctgatgggggagaattgcttgaacccgggaggtggaggttgcagtgagccaagatcacgccactacactccagcctgggcaagagagtgagactctgtctc

SEQ ID NO: 14084 - DNA, 2058 bp, Homo sapiens
tgtggaaatgaagcatctctttctgttttctctttgagatggtttgagttagattgtgtctcttccaagcttgccacaccccagtgcctccagtcatctgctttcttgaaggatggccacgctggtgaattctagacaaattctaacccggggagagggctggagaatttctggtcctggttgggagatactccctgttaaaccttcggatatgctgacctagctgaggtagccaggggctatttaaaaattcaaaatctcagatctggctgtggataaacccccaaggtggtacgtgcagtacttggaggcgtgagggcagaaggtcctccccagcagtttgtacgggacacatcatctatgggatattagtaaatatccttaaggaaaggcttctgtggtcaaaaccaggttcagcaggttatttcactatggggcttctcaggacgcttaacctactcatccccctctgggctttgcaaacgaggccgccattgctttctttctgctatgtagaaatagattgaggcgtaagggtcggatgtcctttctccattcatcaggctccctcttcctgaggagctgctgtcagaacagcctggggctgctgtgttgcaggttatggtggcatatccttggcggtggaaggccccagcaaagtggacatccagacggaggacctggaagatggcacctgcaaagtctcctacttccctaccgtgcctggggtttatatcgtctccaccaaattcgctgacgagcacgtgcctgggagcccatttaccgtgaagatcagtggggagggaagagtcaaagagagcatcacccgcaccagtcgggccccgtccgtggccactgtcgggagcatttgtgacctgaacctgaaaatcccaggtgggcgtcggggactagtagggtggggaagccttggctccagccttcagggcagtgggtgcttttgggaaccaagtttaggcatggcccagaacacagtatccaagtcggctgtgctgaccttttcatttcacttcatttcattatgttcttctatgtttattttcacagagtctcatccaagaaaaacaaatgtttaccttgctacctttttcctcttccaaataaaaatagctttattgtgtcacatgggggaaacgtagatatgcttttagatttttagattaactatctgtcaaatagaatcatgtcagtgaaagaactggccctgccgatgccagggtctggaagtatttaagaggtggcagcccagcggcatccttctagtatttctctttcattcctgaaattagaacgagggctgtgctgcagaactcgctgggccacatctagccctttggtggtgaattgttcctcttgggccccgattagccagtcaacaggtcacacagtctgtctgaaatgtgttccaagttctttctataaagaatccttccagagggaagccactgtgagtgaaaattttgaggctcctctgcccagaagttggcatgtcctgtggaattgcacaaattctacagagaagggaaatctaaatcgtcttcagatggagcttgtgttgcgagctctggagagggggttgtctttctacactgcatctcccatccttcctaacgagtcacggagctgtcgactccgccttcttggctttagttaacaggttcttcttgtgtagtcacatcaacgtcgggtcacatgggaatgtggtaaagcctcattactgtagagttcagacatgatcacttaaaaagagctttattgggccgggcgcggtggcttactcctataatcccagcactttggggggccgaggcaggcagatcacctgaggtcaggagttcgagaccagcctggctaacatggcaaaaccctatctcttctaaaaatacaaaaataagcagggcgtggtggcgggcacctgtaatcccacctactcaggaggctgaggcacaagaattgcgtaaacctgggaggtggaggttgcagtgagctgaaattgcaccgctgcactccagcctgggcaacaaagtgagactccttctc

SEQ ID NO: 14085 - DNA, 2742 bp, Homo sapiens
gaaaaaagtcgtggggactgagttcaggacaccctgaaactatgcgaccagtaatttttttaaggtactttttcctacaagtaaggtatctgaaaagtcaacgttttgagggtggaatcaagacttttcacttctcctggcaaagagcaacaaggctcttgtctcgtgtccttctgtgtgtctctgtcaggatcacagcagctgtgctcttggtctgcttactcctctgtaatccacgtatgcagaagggagttaataaggtgatcaccatctccccagaattcaaaggtctttgcctctataaggtctgcccctatggggccaggaaaatgtaaacctatataaggacttgcaagagagcataaagaaggtagaaaaggtttacttgttgggttttcaagccttcaagttgaatgagtcttagcttttgctgggcagttgttctggacaagtcatcagtttcatgtggagaactcagtgtaagcccaaggctaatgaatgagaggggtcccatggaaacacagctgaaatgaaatgggactttatccatcttctttgagaatggaagagcttttgtgaagcagtacatcattgctcaagataatggttgataagcattagattttatagatctaataaggaaaatattttattatctcaagttaacaaaacatttttttacctctcgagtgcctcataggaccaactattactctttggcttttatttttctttttgtattatttttatatattctttaaccttgctgagctagtattgactgaaatctttagaactttgcctctgggcaatgaagtaatgtttctctaccctaagatatctatttgtataatctctggctgtaatgatcactttggaagatttcctttgcatctctaattatttctttttaatggaataaggcataagggggaataaatatattgtaaccaatgttatgtaaacccatatccatacaggccaggaaagccaaatgaagtcatttccagaattctagtgtgaaaaacctatttttgaaaagtggggagatggctttgtgtagaactgggtgggttttctctgcagactaagtctagccatgagcttccagatcctttagttttatcagccttgtgcttaccccattttcataaatgctactttaacagccagtcttcataagtcatggttcctaggttttcctgtcacctcattgtattcatctgtggtaggatattaacgggctcattcaaccaaatgtaatgtgtgcctcagacctatttagcatggttggggggcatcagcaggacaaaccaacaggtactccgcaagtgtactggcacagcaagcccaccaattattagcagctcttcatcagcctgctgtctactcagacgcttgcctactgaagggacctgtccagagatcttctggaatcccaggttgggaatctctgcagaatgtcgcgacagttgtggcccaactagcttctgagtagaaacaaggaagctaccctgagatatagtcagctgcccacctgccatagtatttgctactgaatgccagccttttaacataccatttcagatttgtccttcaacaaaaatataaattgcaagtcataccatttaagggtcttttacaaatatgtctaaattgtgtgtcatttttaagttccaaaggtctactggactaagtactatcagaccagctgtagaacctgatggcgctgatccggggtggaataaccctcagtactggtgtgtagaagatgaattgtaggcaggttttgctgatcagcagcctaaggattgatgggctctcttttggcctctgatcctgagcactatggaggcagcatcagagaatggggacctgagctacataggttctcaatgttaaaacaactctgttcggagtgacatataagagcaagaaatctacagctggtgtaaaatacctttgccttttctatcccgaaagtaacaaatggcatctgtacatgtaggggtaaaaactcagatgtctactcctccaggccatggacaagaaaaagtacagcagtcagaacagtggaacaagtgatttgcattctcttcttcacgctttcctagatctgccattggtagcgcagccctcgccctccagacataatgcatcgagcccagttgcagggaacatcactgtgtgtgtgtgatgtcatggtgttatatgtgttgagtttaatgttgagctgaagcaagttggtgaccttcctctttgctctttgtaaagaagacaccaatgtttgtcagagaaaaatccccagcagtcgtgttgaagaggcagtgtcatccacctactgtcccctttggaacagttcaactgcagaaaggtcggattgaggttttgtgctttgtcgtttttcttttttaaacaaaacatgacaaccttggcttttccgatatggaacacttttgttgttgtggagttccctcttgctgtatcttctatgcaattccttttctaaaaaaaccccccggcagaggcagagtgccctccggatatctgtccggcgccttgctgagtggtggaggtgagggataccagctccgggtgtgcctcttttctctccctggctgccaatcctgattttccctgcagtccccttggtttgtaaattgcctgcatttattctgtcagccaacatgtacaaaatgtaagaaagaatttttaaacaggtaataaattatatttataagc

SEQ ID NO: 14086 - DNA, 1770 bp, Homo sapiens
  CDS (120)..(944)
gtgacggagcggcggccccgcccggtgcgctggaggtcgaagcttccaggtagcggcccgcagagcctgacccaggctctggacatcctgagcccaagtcccccacactcagtgcagtgatgagtgcggaagtgaaggtgacagggcagaaccaggagcaatttctgctcctagccaagtcggccaagggggcagcgctggccacactcatccatcaggtgctggaggcccctggtgtctacgtgtttggagaactgctggacatgcccaatgttagagagctggctgagagtgactttgcctctaccttccggctgctcacagtgtttgcttatgggacatacgctgactacttagctgaagcccggaatcttcctccactaacagaggctcagaagaataagcttcgacacctctcagttgtcaccctggctgctaaagtaaagtgtatcccatatgcagtgttgctggaggctcttgccctgcgtaatgtgcggcagctggaagaccttgtgattgaggctgtgtatgctgacgtgcttcgtggctccctggaccagcgcaaccagcggctcgaggttgactacagcatcgggcgggacatccagcgccaggacctcagtgccattgcccgaaccctgcaggaatggtgtgtgggctgtgaggtcgtgctgtcaggcattgaggagcaggtgagccgtgccaaccaacacaaggagcagcagctgggcctgaagcagcagattgagagtgaggttgccaaccttaaaaaaaccattaaagttacgacggcagcagcagccgcagccacatctcaggaccctgagcaacacctgactgagctgagggaaccagctcctggcaccaaccagcgccagcccagcaagaaagcctcaaagggcaaggggctccgagggagcgccaagatttggtccaagtcgaattgaaagaactgtcgtttcctccctggggatgtggggtcccagctgcctgcctgcctcttaggagtcctcagagagccttctgtgcccctggccagctgataatcctaggttcatgacccttcacctcccctaaccccaaacatagatcacaccttctctagggaggagtcaaatgtaggtcatgtttttgttggtactttctgttttttgtgacttcatgtgttccattgctccccgctgccatgctctctcccttgtttccttaagagctcagcatctgtccctgttcattacatgtcattgagtaggtgggtagccctgatgggggtcgctctgtctggagcataacccacaggcgttttttctgccaccccatccctgcatgcctgatccccagttcctataccctacccctgacctattgagcagcctctgaagagccatagggcccccacctttactcacaccctgagaattctgggagccagtctgccatgccaggagtcactggacatgttcatcctagaatcctgtcacactacagtcatttcttttcctctctctggcccttgggtcctgggaatgctgctgcttcaaccccagagcctaagaatggcagccgtttcttaacatgttgagagatgattctttcttggccctggccatctcgggaagcttgatggcaatcctggaagggtttaatctccttttgtgagtttggtggggaagggaagggtatatagattgtattaaaaaaaaaaaggtatatatgcatatatctatatataatatgacgcagaaataaatctatgagaaatctatctac

SEQ ID NO: 14087 - protein, 275 aa, Homo sapiens
MSAEVKVTGQNQEQFLLLAKSAKGAALATLIHQVLEAPGVYVFGELLDMPNVRELAESDFASTFRLLTVFAYGTYADYLAEARNLPPLTEAQKNKLRHLSVVTLAAKVKCIPYAVLLEALALRNVRQLEDLVIEAVYADVLRGSLDQRNQRLEVDYSIGRDIQRQDLSAIARTLQEWCVGCEVVLSGIEEQVSRANQHKEQQLGLKQQIESEVANLKKTIKVTTAAAAAATSQDPEQHLTELREPAPGTNQRQPSKKASKGKGLRGSAKIWSKSN

SEQ ID NO: 14088 - DNA, 1880 bp, Homo sapiens
  CDS (360)..(1160)
aggatgcaagagtcagagtgagggatctgtccctggatggggacaataaggggtcagttcagggggacttccttgagctctgaagtttcacctgagaatgggagattcagaacttggtgacagagtttgtggagctcactgtgtctttgctgatccttcagcaaaggaagtgagattgtttctagcttttctgtttggggtgcttctctgtcaactaaaagtcttcatcctttaaatattgcatcatttgtgtatacttcattcattcacttactcatgacccactcctcgagtgcctgcaatgggcaagcgtctgtcctaggagccgtgtgctgggccacagttaaatctgagagatcatgtgtggcatttctcatggattgagatgtctgagtgtcattgttttgagagagctagtggcatggtttataaagctgtttttcattttctccatacaggacaacagctttgagcagttcattattaattattgtaacgaaaagctgcaacaaatcttcattgaacttactcttaaagaagagcaggaggagtatatacgggaggatatagaatggactcacattgactacttcaataatgctatcatttgtgacctaatagaaaataacacaaatggaatcctggccatgctggatgaagagtgcctcagacctggcacagtcactgatgagaccttcttagaaaagctgaaccaagtatgtgccacccaccagcattttgaaagcaggatgagcaagtgctctcggttcctcaatgacacgtctctgcctcacagctgcttcaggatccagcattatgctggaaaggtgctgtaccaggtggaaggattcgttgacaaaaacaatgaccttctctatcgagacctgccccaagccatgtggaaggccagccatgccctcatcaagtctttgttccccgaagggaatcccgccaagatcaacctgaaaaggcctcctacagcaggctcacagttcaaggcatccgtggccactctgatgaaaaacctacagaccaagaacccaaactatattaggtatttttggcacatgaaactttcacagttcaaatgtgagagcaccccgaaggaatatcatttttccctttgcttcaatctgagtgtagcccaagcagagggtaactaaaatacttacagattaaataataccttatctgggattggcttaaaaaatgctccactatcctttcccctaaaataagaaagtaaaaaagtaaagtgtggtggagaagatagtagatatttaatgaagctcagtggttgagacctaggggttttcaactttctgtatgtttattattatttttttaacggcaagttaaaaaacaaaatgcaagtgttttttctggtcagtgttttgcagaaaactcttgttggcttcatttgggattcttgttctattagcttagagcacagcattgaagcaagtgctttagttaactgctctggcacttcttaggagacatgcacttttttcttccctgtgagaggtgtaggcctggagaaagtaatgattcctaaagcaatctgaattttttccaaggcagtagaaagaccttcttaaaaagggctgggcgtggtggctcacacctataatcccaacacttagggaggcggaggcaggtggatcacctcaggtcaggaattcgagactagcctggccaacatggcaaaaccctgtctctactaaaaatataaaaattagctgggcgtggtggcagggacctataatcccaactacttgggaggctgaggcaggagaatcgcttggaggcagaggttgcagtgagccgaggtcacgccactgcactccagcccgggtgacaatacaagactccatctc

SEQ ID NO: 14089 - protein, 267 aa, Homo sapiens
MCGISHGLRCLSVIVLRELVAWFIKLFFIFSIQDNSFEQFIINYCNEKLQQIFIELTLKEEQEEYIREDIEWTHIDYFNNAIICDLIENNTNGILAMLDEECLRPGTVTDETFLEKLNQVCATHQHFESRMSKCSRFLNDTSLPHSCFRIQHYAGKVLYQVEGFVDKNNDLLYRDLPQAMWKASHALIKSLFPEGNPAKINLKRPPTAGSQFKASVATLMKNLQTKNPNYIRYFWHMKLSQFKCESTPKEYHFSLCFNLSVAQAEGN

SEQ ID NO: 14090 - DNA, 2126 bp, Homo sapiens
  CDS (81)..(1307)
gtctgtgagggcagactgatccgagcacccaaaccctcggcggacagcggagccagtggtagccgcacggccctaaaaccatggaggagggcggcagcactggcagtgctggcagtgacagcagcaccagcgggagtggcggggcgcagcaaagggagctggagcgcatggctgaggtcttggtcaccggggaacagctacggctcaggctgcacgaagaaaaggttattaaagatagacgtcatcatctcaagacctacccaaactgttttgtcgcaaaagaactgattgactggctgattgaacacaaagaggcttctgacagagagacggcaattaaactcatgcagaaattagcagaccggggcattattcaccatgtgtgtgatgagcataaggaattcaaggatgtcaaactcttctaccgctttagaaaggatgacggcaccttcccattggataatgaagtgaaggcctttatgagaggacagaggctatatgaaaagctgatgagccctgaaaacacactcctgcagcccagggaggaggaaggggtcaagtatgagcgcaccttcgtggcatctgaattcctggactggctggttcaggaaggtgaggccaccacgaggaaagaggcagagcagctttgccaccggcttatggagcatggcatcatccagcatgtgtccagcaagcacccatttgtggacagcaatcttctctaccagttcagaatgaacttccggcggaggcgaagactgatggagctgctcaatgaaaagtccccctcctcccaggaaactcatgacagtcccttctgcctgaggaagcagagccatgacaatcggaaatctaccagctttatgtcagtgagccccagcaaggagatcaagatcgtgtctgcagtgaggagaagcagcatgagcagctgtggcagcagcggctacttcagcagcagccccaccctcagcagcagcccccctgtgctctgcaaccccaagtccgtgctgaagagacctgtcacctctgaggaactccttactcccggggctccgtatgcaaggaagacattcacgattgttggtgacgcggttggctggggttttgtggtgcgaggaagtaagccatgccacatccaggctgtagaccccagtggccctgcagccgcagcaggaatgaaggtctgtcagtttgtcgtctctgtcaacgggctcaatgtcctgcatgtagactaccggaccgtgaacaatctgattctgacgggcccacggacgattgtcatggaagtcatggaggagttagagtgctgagctcctgggcctcccagccctccagtggcctgtgggtgagggaagccagaatgacacaaagcaatgcaaagacaagattgccatgcaaatggatggttttggacatacgagtcttctccgcacatacatgtctgaagttgagttttatacactgaatgtggaagaaccgggtatcatatcttttttaaaaaatgtcagtgtagaaaacatttgggaaaccattttcctacatgatagaactgccttactagatttctatttgtagctctcattcattgttttttatcttagtttgcagaaaggtgttgaaatgcttctctagcccaaacagcgacatgctaaagtccccttcttcagagtcaatagagtagttgttaaaggttttaaattgtactttctccaaaattagcatgcagctatttaatagggaatctagatttcaccaagattcaaatcaaagcaacatttaaaggaataagacctgttcactagcattttcaagggggttctaaagcattcaagtgcttaaaagccataaaaaatgacttcttaattcctgcctttagtgtcaacttttaagttaatacaggtttcaattgtggcattaggaaaaaaaaaaaccttgtgatgctatggttgggggtagttagggagagactacatgaaattgtgtgcccctattttctttctgatcctaaatcattttgttttataaatcagctatagcatctttctagaattaatcctgaatatgttgaatgttaaaatagagaagtttgtatatacacataattaaaaatcaacccttctggcaag

SEQ ID NO: 14091 - protein, 409 aa, Homo sapiens [sequence omitted]

SEQ ID NO: 14092 - DNA, 2168 bp, Homo sapiens
  CDS (399)..(1391)
gtgcggatgcggggaggctgcgtgtgtgcgcagggagagaacgccggccaccttcccgcttccgagctgggtgcgcgccgagcacaggagattgcctgcgtttaggaggtggctgcgttgtgggaaaagctatcaaggaagaaattgccaaaccatgtctttttttctgttttcagagtagttcacaacagatctgagtgttttaattaagcatggaatacagaaaacaacaaaaaacttaagctttaatttcatctggaattccacagttttcttagctccctggacccggttgacctgttggctcttcccgctggctgctctatcacgtggtgctctccgactactcaccccgagtgtaaagaaccttcggctcgcgtgcttctgagctgctgtggatggcctcggctctctggactgtccttccgagtaggatgtcactgagatccctcaaatggagcctcctgctgctgtcactcctgagtttctttgtgatgtggtacctcagccttccccactacaatgtgatagaacgcgtgaactggatgtacttctatgagtatgagccgatttacagacaagactttcacttcacacttcgagagcattcaaactgctctcatcaaaatccatttctggtcattctggtgacctcccacccttcagatgtgaaagccaggcaggccattagagttacttggggtgaaaaaaagtcttggtggggatatgaggttcttacatttttcttattaggccaagaggctgaaaaggaagacaaaatgttggcattgtccttagaggatgaacaccttctttatggtgacataatccgacaagattttttagacacatataataacctgaccttgaaaaccattatggcattcaggtgggtaactgagttttgccccaacgccaagtacgtaatgaagacagacactgatgttttcatcaatactggcaatttagtgaagtatcttttaaacctaaaccactcagagaagtttttcacaggttatcctctaattgataattattcctatagaggattttaccaaaaaacccatatttcttaccaggagtatcctttcaaggtgtcccctccatactgcagtgggttgggttatataatgtccagagatttggtgccaaggatctatgaaatgatgggtcacgtaaaacccatcaagtttgaagatgtttatgtcgggatctgtttgaatttattaaaagtgaacattcatattccagaagacacaaatcttttctttctatatagaatccatttggatgtctgtcaactgagacgtgtgattgcagcccatggcttttcttccaaggagatcatcactttttggcaggtcatgctaaggaacaccacatgccattattaacttcacattctacaaaaagcctagaaggacaggatactttgtggaaagtgttaaataaagtaggtactgtggaaaattcatggggaggtcagtgtgctggcttacactgaactgaaactcatgaaaaacccagactggagactggagggttacacttgtgatttattagtcaggcccttcaaagatgatatgtggaggaattaaatataaaggaattggaggtttttgctaaagaaattaataggaccaaacaatttggacatgtcattctgtagactagaatttcttaaaagggtgttactgagttataagctcactaggctgtaaaaacaaaacaatgtagagttttatttattgaacaatgtagtcacttgaaggttttgtgtatatcttatgtggattaccaatttaaaaatatatgtagttctgtgtcaaaaaacttcttcactgaagttatactgaacaaaattttacctgtttttggtcatttataaagtacttcaagatgttgcagtatttcacagttattattatttaaaattacttcaactttgtgtttttaaatgttttgacgatttcaatacaagataaaaaggatagtgaatcattctttacatgcaaacattttccagttacttaactgatcagtttattattgatacatcactccattaatgtaaagtcataggtcattattgcatatcagtaatctcttggactttgttaaatattttactgtggtaatatagagaagaattaaagcaagaaaatctg

SEQ ID NO: 14093 - protein, 331 aa, Homo sapiens [sequence omitted]

SEQ ID NO: 14094 - DNA, 1937 bp, Homo sapiens
  CDS (80)..(1936)
aggacaagagaaaccaagcccagctacagtcagaagcacagatcctgtcacgacaaaggagactaaagcagtctcagaaatgtctactgaaataggaacaatgatctcggtatcatctgcagaatatggtactaatgcaaaggagtctgtaacagactatactacaccctcttcttctttgcctaacaccgtggctactaataatacaaagatggaggatactttggttaataatgtgcccctgcccaacacccttcccctccctaagagggagactatacaacagagctccagcctaacttcagttcctcccactactttcagcctcaccttcaagatggagtctgcacgcaaagcatgggagaattctccaaatgtaagggaaaaggggtctccagtaacttccacagcacctccaattgcaactggagtcagcagtagtgccagtggaccaagcactgctaattacaattcgttctcaagtgcatccatgccccagattcctgttgcttcagtcactcctacagcatcactatcaggagctggtacatacactacctcttctttgagcacaaaatctacaaccacatcggaccctccaaatatttgtaaagtgaaacctcagcagttacagacaagcagcctgccttctgcaagtcatttttcacagttaagctgtatgccttcccttattgcccagcagcaacagaatccgcaagtttatgtgtctcagtctgcagcagctcaaatcccagccttctatatggacacaagtcatttattcaatacccaacatgcacgattggctccgccatccttggctcaacaacagggtttccaaccaggtctctctcagccaacttcagttcagcagattccaatccctatttatgcaccactgcaagggcagcatcaagtccaactgagtttgggggctggccctgctgtttcccaggctcaggaattgttcagctcctcacttcaaccatatagatctcagccagcttttatgcaaagcagtttatcccagccatctgtggtcctttctggtactgctattcacaactttccaactgtccaacaccaagaacttgccaaggcacaatccggtcttgcctttcagcaaacatcaaatactcagcccattcctatattgtatgaacatcaactggggcaggcatcaggactaggaggttcccagctgattgacacacatcttctccaggccagagcaaatcttacccaggcctcaaatctttattctggacaagtacaacagcctggtcagacaaatttttataacactgcccagtcaccaagtgctctccagcaggttacagtacctttaccagcatcccagctttccttgcctaattttggatctacagggcaacctctaattgctttgcctcagactcttcagcccccattacagcataccactccccaagcacaggctcagagtctgagtcgtcctgcacaagtaagccagcctttcagaggattaattcctgctggaacacagcatagcatgattgcaaccacaggaaaaatgtctgaaatggaactaaaagcctttggaagtggcattgatataaaaccaggcacacctccaatcgctggtagaagcaccacaccaacatctagtcccttccgggctacttctacaagtccgaacagccagtccagcaaaatgaacagcattgtctaccagaagcagttccagtcagcccctgccactgtgagaatgacacaaccatttcctacacagtttgcaccccaggcaaagcagagagcagaggttcttcagtccacgcaacggttcttctctgaacagcaacagagcaaacagataggaggaggcaaagcccagaaagtggacagtgattcaagtaaacctcctgaaacactgaccgaccctcctggggtctgtcagg

SEQ ID NO: 14095 - protein, 619 aa, Homo sapiens
MSTEIGTMISVSSAEYGTNAKESVTDYTTPSSSLPNTVATNNTKMEDTLVNNVPLPNTLPLPKRETIQQSSSLTSVPPTTFSLTFKMESARKAWENSPNVREKGSPVTSTAPPIATGVSSSASGPSTANYNSFSSASMPQIPVASVTPTASLSGAGTYTTSSLSTKSTTTSDPPNICKVKPQQLQTSSLPSASHFSQLSCMPSLIAQQQQNPQVYVSQSAAAQIPAFYMDTSHLFNTQHARLAPPSLAQQQGFQPGLSQPTSVQQIPIPIYAPLQGQHQVQLSLGAGPAVSQAQELFSSSLQPYRSQPAFMQSSLSQPSVVLSGTAIHNFPTVQHQELAKAQSGLAFQQTSNTQPIPILYEHQLGQASGLGGSQLIDTHLLQARANLTQASNLYSGQVQQPGQTNFYNTAQSPSALQQVTVPLPASQLSLPNFGSTGQPLIALPQTLQPPLQHTTPQAQAQSLSRPAQVSQPFRGLIPAGTQHSMIATTGKMSEMELKAFGSGIDIKPGTPPIAGRSTTPTSSPFRATSTSPNSQSSKMNSIVYQKQFQSAPATVRMTQPFPTQFAPQAKQRAEVLQSTQRFFSEQQQSKQIGGGKAQKVDSDSSKPPETLTDPPGVCQ

SEQ ID NO: 14096 - DNA, 1902 bp, Homo sapiens
  CDS (71)..(658)
agatctgaatccagaggctctcggaggaagagctcaggccactgaggcggctcccagctgcgttggcgacatggccgacacccccagagatgccgggctcaagcaggcgcctgcatcacggaacgagaaggccccggtggacttcggctacgtggggattgactccatcctggagcagatgcgccggaaggccatgaagcagggcttcgagttcaacatcatggtggtcgggcagagcggcttgggtaaatccaccttaatcaacaccctcttcaaatccaaaatcagccggaagtcggtgcagcccacctcagaggagcgcatccccaagaccatcgagatcaagtccatcacgcacgatattgaggagaaaggcgtccggatgaagctgacagtgattgacacaccagggttcggggaccacatcaacaacgagaactgctggcagcccatcatgaagttcatcaatgaccagtacgagaaatacctgcaggaggaggtcaacatcaaccgcaagaagcgcatcccggacacccgcgtccactgctgcctctacttcatccccgccaccggccactccctcaggcccctggagcagaaagtgcctttatctcagccatccgcagactgctcggccagatgcggggacaggctggaatgagggaggcgtcttcatctccctgccatccccctctcacgccacccccgcccccaccgggctgcaggtgctgctgatgcgctgggatctgattgaggataaaaaggaaggagagatgacccctaccccctcatcccccagttttgaaaaggtctaagcaagtgagtctggtggaggagctgagggagggagccatggaaggtgccagaaggaaggttggcgggggcacgtgtgggccgtggcttgggctggtcagagtggcgtgagctgcccggcgcctgccctgcccaagtgaccagggaagtgtgtgtgtgtccatgtgtatgcgtgtccgtctgtctgtctagtgtctgggtttggcccaagactgggctgtagttacattaatgcccagccagccacccctgccactcacccctcctggcccaggccttgctgactctctgagctggggaggtgggaggccaggcgagcctgactctgttgatctacccgtgcctgggcccctcccctcagagcccatggtaacgaacccctagaaaggagagaacgggcgtcaggggtgcacagtccacagctgaagagcaaggtttcgtggcagcacggcccggcccctcaccctctgtccccacgaggggacccatgggggctgtctttgcagggcacagatgaccaaagtcccttcctgcttcctgttacctgtcttgctcctggggagaaagaggggcctgatgagactccactcaggtgcacacatcaccaggtgcatctgcaggcaccgggctggctgcttgcagccaggagaaggtcagcgagaaggagtgtatgagtgtgagtgtgtgtgcatggaagttggggcactgggcgtctgactccctccccacccaagagaggaaggacccctcaccacccccactggcgagacagtttactttgccgacttgccatgtttttgccaaaaccaagattttgaaggaaatgagtggccagcgccagggcccaggccatgtggcctgcccagcctcaatgtcacttggtggcggggtggggtgggggtgggcagcagcatcccagccttgagatgcttcactttccttctctgtaaccagactttgaaaaattgttcgtttcatcaggctctgttcctcaatggccttttgctacgtgcctcccgagaaatttgtctttttgtataaatgacaaagtgttgaaaatgtatttcctgaaataaatgtttcaaatgc

SEQ ID NO: 14097 - protein, 196 aa, Homo sapiens [sequence omitted]

SEQ ID NO: 14098 - DNA, 1485 bp, Homo sapiens
  CDS (240)..(854)
gttatggcggccgcctaagtcccacagagacgggagtcgggtgggatcccaggctgggccccgcggcggctggattctcttccctggccaagtctctgagatcttctcccagggcgatgcaaagctactcgctaccagcttggacctgtctgcagtatctcctctgggacctgccatgctgaggacccattctcacctctgagggactcctgtcctaggactaaggtggagcctgggccatggtacagctggctcctgcggcagccatggacgaggtcacctttaggagcgacactgtgctgtcagatgtccacctctataccccgaaccatagacatctcatggtacggctgaacagcgtggggcagccagttttcctgtcccaattcaagcttctatggagccaagactcttggacagattcaggagccaagggtggcagtcacagagatgttcacacaaaggagcctccttctgctgagacaggcagcacagggtcccctccaggaagtggccatggtaatgagggtttctccctccaggccgggactgacaccactggccaggaagtggctgaagctcagctggatgaggatggggatttggacgtggtgagaagaccacgagccgcctctgattccaacccagcagggcctctgagagacaaggtacatcccatgattctagcacaggaagaagacgacgtcctgggagaggaagcacaaggcagcccgcacgatatcatcagaataggtgtggcggggcgccctgctcctggcagactacatcctgttccgacaggacctcttccgaggatgtacagcgctggagctcggggccggcacggggctcactagcatcatcgcagccaccatggcacggaccgtttattgtacagatgtcggtgcagatctcttgtccatgtgccagcgaaacattgccctcaacagccacctggctgccactggaggtggtatagttagggtctaagaactggactggctgaaggacgacctctgcacagatcccaaggtccccttcagttggtcacaagaggaaatttctgacctgtacgatcacaccaccatcctgtttgcagccgaagtgttttacgacgacgacttgactgatgctgtgtttaaaacgctctcccgactcgcccacagattgaaaaatgcctgcacagccatactgtcggtggagaagaggctcaacttcacactgagacacttggacgtcacatgtgaagcctacgatcacttccgctcctgcctgcacgcgctggagcagctcacagatggcaagctgcgcttcgtggtggagcccgtggaggcctccttcccacagctcctggtttacgagcgcctccagcagctggagctctggaagatcatcgcagagccagtaacatgacccatcgcctccaccaggcgcggcgtctcgactgttcttagagtgtatttctagtaaaatcagaagctcacc

SEQ ID NO: 14099 - protein, 205 aa, Homo sapiens [sequence omitted]

SEQ ID NO: 14100 - DNA, 3230 bp, Homo sapiens
  CDS (429)..(3086)
actttccgggatggcagcaaggtgacttcggctgaggatgaccctgactgaaaggctgcgtgagaagatatctcgggccttctacaaccatgggctcctctgtgcatcctatcccatccccatcatcctcttcacagggttctgcatcttagcctgctgctacccactgctgaaactccccttgccaggaacaggacctgtggaattcaccacccctgtgaaggattactcgcccccacctgtggactctgaccgcaaacaaggagagcctactgagcagcctgagtggcgagattttcccctaccttgtggtggttattgggttagagaatgtgttggtgctcaccaagtctgtggtctcaaccccggtagacctggaggtgaagctgcggatcgcccaaggcctaagcagcgagagctggtccatcatgaagaacatggccacggagctgggcatcatcctcatcggctacttcaccctagtgcccgccatccaggagttctgtctctttgctgtcgtggggctggtgtctgacttcttccttcagatgctgtttttcaccactgtcctgtccattgacattcgccggatggagctagcagacctgaacaagcgactgccccctgaggcctgcctgccctcagccaagccagtggggcagccaacgcgctacgagcggcagctggctgtgaggccgtccacaccccacaccatcacgttgcagccgtcttccttccgaaacctgcggctccccaagaggctgcgtgttgtctacttcctggcccgcacccgcctggcacagcgcctcatcatggctggcaccgttgtctggattggcatcctggtatacacagacccagcagggctgcgcaactacctcgctgcccaggtgacggaacagagcccattgggtgagggagccctggctcccatgcccgtgcctagtggcatgctgccccccagccacccggaccctgccttctccatcttcccacctgatgcccctaagctacctgagaaccagacgtcgccaggcgagtcacctgagcgtggaggtccagcagaggttgtccatgacagcccagtcccagaggtaaccagggggcctgaggatgaggaactttggaggaaattgtccttccgccactggccgacgctcttcagctattacaacatcacactggccaagaggtacatcagcctgctgcccgtcatcccagtcacgctccgcctgaacccgagggaggctctggagggccggcaccctcaggacggccgcagtgcctggcccccaccggggcccatacctgctgggcactgggaagcaggacccaagggcccaggtggggtgcaggcccatggagacgtcacgctgtacaaggtggcggcgctgggcctggccaccggcatcgtcttggtgctgctgctgctctgcctctaccgcgtgctatgcccgcgcaactacgggcagctgggtggtgggcccgggcggcggaggcgcggggagcagccctgcgacgactacggctatgcgccacccgagacggagatcgtgccgcttgtgctgcgcggccacctcatggacatcgagtgcctggccagcgacggcatgctgctggtgagctgctgcctggcaggccacatctgcgtgtgggacgcgcagaccggggattgcctaacgcgcattccgcgcccagggcagcgccgggacagtggcgtgggcagcgggcttgaggctcaggagagctgggaacgactttcagatggtgggaaggctggtccagaggagcctggggacagccctcccctgagacaccgcccccggggccctccgccgccttccctcttcggggaccagcctgacctcacctgcttaattgacaccaacttttcagcgcagcctcggtcctcacagcccactcagcccgagccccggcaccgggcggtctgtggccgctctcgggactccccaggctatgacttcagctgcctggtgcagcgggtgtaccaggaggaggggctggcggccgtctgcacaccagccctgcgcccaccctcgcctgggccggcgctgtcccaggcccctgaggacgagggtggctcccccgagaaaggctccccttccctcgcctgggcccccagtgccgagggttccatctggagcttggagctgcagggcaacctcatcgtggtggggcggagcagcggccggctggaggtgtgggacgccattgaaggggtgctgtgctgcagcagcgaggaggtctcctcaggcattaccgctctggtgttcttggacaaaaggattgtggctgcacggctcaacggttcccttgatttcttctccttggggacccacactgccctcagccccctgcagtttagagggaccccagggcggggcagttcccctgcctctccagtgtacagcagcagcgacacagtggcctgtcacctgacccacacagtgccctgtgcacaccaagaacccatcacagccctgaaagccgctgctgggcgcttggtgactgggagccaagaccacacactgagagtgttccgtctggaggactcgtgctgcctcttcacccttcagggccactcaggggccatcacgaccgtgtacattgaccagaccatggtgctggccagtggaggacaagatggggccatctgcctgtgggatgtactgactggcagccgggtcagccatgtgtttgctcaccgtggggatgtcacctcccttacctgtaccacctcctgtgtcatcagcagtggcctggatgacctcatcagcatctgggaccgcagcacaggcatcaagttctactccattcagcaggacctgggctgtggtgcaagcttgggtgtcatctcagacaacctgctggtgactggcggccagggctgtgtctccttttgggacctaaactacggggacctgttacagacagtctacctggggaagaacagtgaggcccagcctgcccgccagatcctggtgctggacaacgctgccattgtctgcaactttggcagtgagctcagcctggtgtatgtgccctctgtgctggagaagctggactgagcgcagggcctccttgcccaggcaggaggctggggtgctgtgtgggggccaatgcactgaacctggacttgggggaaagagccgagtatcttccagccgctgcctcctgactgtaataatattaaacttttttaaaaaacc

SEQ ID NO: 14101 - protein, 886 aa, Homo sapiens
MKNMATELGIILIGYFTLVPAIQEFCLFAVVGLVSDFFLQMLFFTTVLSIDIRRMELADLNKRLPPEACLPSAKPVGQPTRYERQLAVRPSTPHTITLQPSSFRNLRLPKRLRVVYFLARTRLAQRLIMAGTVVWIGILVYTDPAGLRNYLAAQVTEQSPLGEGALAPMPVPSGMLPPSHPDPAFSIFPPDAPKLPENQTSPGESPERGGPAEVVHDSPVPEVTRGPEDEELWRKLSFRHWPTLFSYYNITLAKRYISLLPVIPVTLRLNPREALEGRHPQDGRSAWPPPGPIPAGHWEAGPKGPGGVQAHGDVTLYKVAALGLATGIVLVLLLLCLYRVLCPRNYGQLGGGPGRRRRGEQPCDDYGYAPPETEIVPLVLRGHLMDIECLASDGMLLVSCCLAGHICVWDAQTGDCLTRIPRPGQRRDSGVGSGLEAQESWERLSDGGKAGPEEPGDSPPLRHRPRGPPPPSLFGDQPDLTCLIDTNFSAQPRSSQPTQPEPRHRAVCGRSRDSPGYDFSCLVQRVYQEEGLAAVCTPALRPPSPGPALSQAPEDEGGSPEKGSPSLAWAPSAEGSIWSLELQGNLIVVGRSSGRLEVWDAIEGVLCCSSEEVSSGITALVFLDKRIVAARLNGSLDFFSLGTHTALSPLQFRGTPGRGSSPASPVYSSSDTVACHLTHTVPCAHQEPITALKAAAGRLVTGSQDHTLRVFRLEDSCCLFTLQGHSGAITTVYIDQTMVLASGGQDGAICLWDVLTGSRVSHVFAHRGDVTSLTCTTSCVISSGLDDLISIWDRSTGIKFYSIQQDLGCGASLGVISDNLLVTGGQGCVSFWDLNYGDLLQTVYLGKNSEAQPARQILVLDNAAIVCNFGSELSLVYVPSVLEKLD

SEQ ID NO: 14102 - DNA, 3119 bp, Homo sapiens
  CDS (94)..(1212)
aagtaactcgggaagacgaccaagcgggagcgggagcgggagcgggagccggagcgagagcgcgcgggcgcggccgacagtgcctgatttgagatggggtcccaggtctcggtggaatcgggagctctgcacgtggtgattgtgggtgggggctttggcgggatcgcagcagccagccagctgcaggccctgaacgtccccttcatgctggtggacatgaaggactccttccaccacaatgtggctgctctccgagcctccgtggagacagggttcgccaaaaagacattcatttcttactcggtgactttcaaggacaacttccggcaggggctagtagtggggatagacctgaagaaccagatggtgctgctgcagggtggcgaggccctgcccttctctcatcttatcctggccacgggcagcactgggcccttcccgggcaagtttaatgaggtttccagccagcaggccgctatccaggcctatgaggacatggtgaggcaggtccagcgctcacggttcatcgtggtggtgggaggaggctcggctggagtggagatggcagcagagattaaaacagaatatcctgagaaagaggtcactctcattcactcccaagtggccctggctgacaaggagctcctgccctccgtccggcaggaagtgaaggagatcctcctccggaagggcgtgcagctgctgctgagtgagcgggtgagcaatctggaggagctgcctctcaatgagtatcgagagtacatcaaagtgcagacggacaaaggcacagaggtggccaccaacctggtgattctctgcaccggcatcaagatcaacagctccgcctaccgcaaagcatttgagagcagactagccagcagtggtgctctgagagtgaacgagcacctccaggtggagggccacagcaacgtctacgccattggtgactgtgccgacgtgaggacgcccaagatggcctatcttgccggcctccacgccaacatcgccgtggccaacatcgtcaactctgtgaagcagcggcctctccaggcctacaagccgggtgcactgacgttcctcctgtccatggggagaaatgacggtgtgggccaaatcagtggcttctatgtgggccggctcatggttcggctgaccaagagccgggacctgttcgtctctacgagctggaaaaccatgaggcagtctccaccttgatggagaggccaggcgggagaactaccgcagcaggtgggcgtacggactgcttggcgcatggcacccgcctggcaagtgctagaactaatgctattcttctggaataagatgccaatgatgtggtggctagaaatgcaacttgtataaaacaaaaatgggagagagagaggtattaaacaaataccccccttagaggatactttctgggtttggaaggtgtgcttgctgtggtactgggtgagcggctcatgtgtgctggctgcatggtgctggggaggccacagccagcccttcctctgcacctgcctcctctgggatgtgcatgtgtgtgtatgtgcttgtggtcatgacgcgtgccatttagagctctcagagcagggcagattgctgggctctggtggccagtgtctgtctgtgagggcaggaaggagagctgcacattgagaacaaaggagggacctgaggtggagagaggcccagcaccccaaatctctgccatcacacggtcggggagcccatacattctgcaacaaccagggacttcacaggagccttgttttcaatttgctaacaggtgcataatccctgtgctccttaagcctcatggccttcctacatttccactttatttgtttgtttgtttatttatttttgagacagtctcgccctgtcacccaggctggagtgcagtggcacgatctcagctcactgcaacctacgccttctgggttcacgtgattctcttgccttagcctcccaagtagctgggactacaggcacgtgccaccatgcctggctaatttttgtattttttaaatagagacggggtttcactgtgttggccaggctggtctcgaacacctgacctcaggtgatccattcgtcttggcctctcgaagtgctgggattccaggcgtgagccactgcggccagcacatttccacttttagatcctactccataccacaggtttcatttaagaagaaagagctagataaatgtgctcttctggttaccccaccctgacagagtgcatttttacacggctagcaggggttgagactgcagcctggcctgccagccattggaggtgtttaaggaagggcagataatgtgactctttgcggggtgccatctgcttacccattagcgagcagagggggtttctgcgggtgacccccagcatatttctaggttacttatgggcagatttgtaagtgacaaaactccagctgatgctgggaatggggagagggcccttgagggactttgtggttttgtgcttctggtttcctggccaaccccagggtcacttgtctggaggcccagctgggcactaatgtctgccaccgactatgttacagtgtataaatgattcctctatttgggagagatcttccaatccagaggagcccctcttggactgcctgggttaaatctgcatagcagaagtggttgatgagttcatctgaagaaattcaggccccacctccccaccctgcccctccctgctcccttttgatggtggcctctgggtactcgggcagagtccttgggacaccagcctctctggggttctcaggccatcccgttggggctgtcgcccaggcctaagtgagtcgtgtgcctctattggaggatggctgttcccctggtggttgcatccaagtatctgtctttctttatggaccacgaagggaagcccaccttcctggaggcaggaccttcggcctaagaaacacaggccctggtgctatctgacctggggtccagcgaggtgggaatcccagtgtgtgagcgacaggccttcttctattgacttacaatattctagaaggacctacgtgtggggacacagttttccaaactgaggaaaatgttgcaataaaagaatatgttgtaag

SEQ ID NO: 14103 - protein, 373 aa, Homo sapiens
MGSQVSVESGALHVVIVGGGFGGIAAASQLQALNVPFMLVDMKDSFHHNVAALRASVETGFAKKTFISYSVTFKDNFRQGLVVGIDLKNQMVLLQGGEALPFSHLILATGSTGPFPGKFNEVSSQQAAIQAYEDMVRQVQRSRFIVVVGGGSAGVEMAAEIKTEYPEKEVTLIHSQVALADKELLPSVRQEVKEILLRKGVQLLLSERVSNLEELPLNEYREYIKVQTDKGTEVATNLVILCTGIKINSSAYRKAFESRLASSGALRVNEHLQVEGHSNVYAIGDCADVRTPKMAYLAGLHANIAVANIVNSVKQRPLQAYKPGALTFLLSMGRNDGVGQISGFYVGRLMVRLTKSRDLFVSTSWKTMRQSPP

SEQ ID NO: 14104 - DNA, 3111 bp, Homo sapiens
  CDS (39)..(2762)
attataattacgatgatgaagatgaagatgaaaatgcaatggatgctgatggtggtgatgatgatgatcaagggagtgatgatgaatacagtgatgatgatgacatgagttggaaagtgagacgtgcagctgcgaagtgcttggatgccgtagttagcacaaggcatgaaatgcttccagaattctacaagaccgtctctcctgcactaatatccagatttaaagagcgtgaagagaatgtaaaggcagatgtttttcacgcatacctttctcttttgaagcaaactcgtcctgtacaaagttggctatgtgaccctgatgcaatggagcagggagaaacacctttaacaatgcttcagagtcaggttcccaacattgttaaagctcttcacaaacagatgaaagaaaaaagtgtgaagacccgacagtgttgttttaacatattaactgagctggtaaatgtattacctggggccctaactcaacacattcctgtacttgtaccaggaatcattttctcactgaatgataaatcaagctcatcgaatttgaagatcgatgctttgtcatgtctatacgtaatcctctgtaaccattctcctcaagtcttccatcctcacgttcaggctttggttcctccagtggtggcttgtgttggagacccattttacaaaattacatctgaggcacttcttgttactcaacagcttgtcaaagtaattcgtcctttagatcagccttcctcgtttgatgcaactccttatatcaaagatctatttacctgtaccattaagagattaaaagcagctgacattgatcaggaagtcaaggaaagggctatttcctgtatgggacaaattatttgcaaccttggagacaatttgggttctgacttgcctaatacacttcagattttcttggagagactaaagaatgaaattaccaggttaactacagtaaaggcattgacactgattgctgggtcacctttgaagatagatttgaggcctgttctgggagaaggggttcctatccttgcttcatttcttagaaaaaaccagagagctttgaaactgggtactctttctgcccttgatattctaataaaaaactatagtgacagcttgacagctgccatgattgatgcagttctagatgagctcccacctcttatcagcgaaagtgatatgcatgtttcacaaatggccatcagttttcttaccactttggcaaaagtatatccctcctccctttcaaagataagtggatccattctcaatgaacttattggacttgtgagatcacccttattgcaggggggagctcttagtgccatgctagactttttccaagctctggttgtcactggaacaaataatttaggatacatggatttgttgcgcatgctgactggtccagtttactctcagagcacagctcttactcataagcagtcttattattccattgccaaatgtgtagctgcccttactcgagcatgccctaaagagggaccagctgtagtaggtcagtttattcaagatgtcaagaactcaaggtctacagattccattcgtctcttagctctactttctcttggagaagttgggcatcatattgacttaagtggacagttggaactaaaatctgtaatactagaagctttctcatctcctagtgaagaagtcaaatcagctgcatcctatgcattaggcagcattagtgtgggcaaccttcctgaatatctgccgtttgtcctgcaagaaataactagtcaacccaaaaggcagtatcttttacttcattccttgaaggaaattattagctctgcatcagtggtgggccttaaaccatatgttgaaaacatctgggccttattactaaagcactgtgagtgtgcagaggaaggaaccagaaatgttgttgctgaatgtctaggaaaactcactctaattgatccagaaactctccttccacggcttaaggggtacttgatatcaggctcatcatatgcccgaagctcagtggttacggctgtgaaatttacaatttctgaccatccacaacctattgatccactgttaaagaactgcataggtgatttcctaaaaactttggaagacccagatttgaatgtgagaagagtagccttggtcacatttaattcagcagcacataacaagccatcattaataagggatctattggatactgttcttccacatctttacaatgaaacaaaagttagaaaggagcttataagagaggtagaaatgggtccatttaaacatacggttgatgatggtctggatattagaaaggcagcatttgagtgtatgtacacacttctagacagttgtcttgatagacttgatatctttgaatttctaaatcatgttgaagatggtttgaaggaccattatgatattaagatgctgacatttttaatgttggtgagactgtctaccctttgtccaagtgcagtactgcagaggttggaccgacttgttgagccattacgtgcaacatgtacaactaaggtaaaggcaaactcagtaaagcaggagtttgaaaaacaagatgaattaaagcgatctgccacgagagcagtagcagcactactaaccattccagaagcagagaagagtccactgatgagtgaattccagtcacagatcagttctaaccctgagctggcggctatctttgaaagtatccagaaagattcatcatctactaacttggaatcaatggacactagttagatgtttgttcaccatggggaccattacatatgaccatacaatgcactgaattgacaggttaatcataagacatggaaagagaagtgtctaaaagcttcaaaatgttccacttttttttccttcatggagactgtttgtttggctttcttccattgttgtttttgtagcatttatttcagaaatgtgtatttccataatccagaggttgtaaaaccactagtgttttagtggttacagcaacatttgaaatggaaactagaagttaggattttatggagtatggagatagggtccagtatctatctaccctgtaatgtttaggattaaaatgttaaaattttgtgac

SEQ ID NO: 14105 - protein, 908 aa, Homo sapiens [sequence omitted]

SEQ ID NO: 14106 - DNA, 3145 bp, Homo sapiens
  CDS (89)..(2194)
aaaagggaagcctgcaacaagttaagctgaagaccgaagcaagagctggttcagcctgccagtggagacactgggcccggcatccaggatggacccagaatctgagagagccctgcaggcccctcacagcccctccaagacagatgggaaagaattagctgggaccatggatggagaagggacgctcttccagactgaaagccctcagtctggcagcattctaacagaggagactgaggtcaagggcaccctggaaggtgatgtttgtggtgtggagcctcctggcccaggagacacagtagtccagggagacctgcaggagaccaccgtggtgacaggcctgggaccagacacacaggacctggaaggccagagccctccacagagcctgccttcaacccccaaagcagcttggttcagggaggagggccgctgctccagcagtgacgatgacaccgacgtggacatggagggtctgcggagacggcggggccgggaggccggcccacctcagcccatggtgcccctggctgtggagaaccaggctgggggtgagggtgcaggcggggagctgggcatctccctcaacatgtgcctccttggggccctggttctgcttggcctgggggtcctcctcttctcaggtggcctctcagagtctgagactgggcccatggaggaagtggagcggcaggtcctcccagaccccgaggtgctggaagctgtgggggacaggcaggatgggctaagggaacagctgcaggccccagtgcctcctgacagtgtccccagcctgcaaaacatgggtcttctgctggacaagctggccaaggagaaccaggacatccggctgctgcaggcccagctgcaggcccaaaaggaagagcttcagagcctgatgcaccagcccaaagggctagaggaggagaatgcccagctccggggggctctgcagcagggcgaagccttccagcgggctctggagtcagagctgcagcagctgcgggcccggctccaggggctggaggccgactgtgtccggggcccagatggggtgtgcctcagtggggatagaggcccacagggtgacaaggccatcagggagcaaggccccagggagcaggagccagaactcagcttcccgaagcagaaggaacagctggaggctgaggcacaggcattaaggcaagagttagagaggcagcgacggctgctggggtctgtacagcaggatctggagaggagcttgcaggatgccagccgcggggacccagctcatgctggcttggctgagctgggccacagattggcccagaaactgcagggcctggagaactggggccaggaccctggggtctctgccaatgcctcaaaggcctggcaccagaagtcccacttccagaattctagggagtggagtggaaaggaaaagtggtgggatgggcagagagaccggaaggctgagcactggaaacataagaaggaagaatctggccgggaaaggaagaagaactggggaggtcaggaggacagggagccagcaggaaggtggaaggagggcaggccaagggtggaggagtcggggagcaagaaggagggcaagcgacagggcccgaaggaacccccaaggaaaagtggtagcttccactcctctggagaaaagcagaagcaacctcggtggagggaagggactaaggacagccatgaccccctgccatcctgggcagagctgttgaggcccaagtaccgggcaccccagggctgctcaggtgtggacgagtgtgcccggcaggagggcctgactttctttggcacagagctagccccagtgcggcaacaggagctggcctctctgctaagaacatacttggcacggctgccctgggctgggcagctgaccaaggagctacccctctcacctgctttctttggtgaggatggcatcttccgtcatgaccgcctccgcttccgggattttgtggatgccctggaggacagcttggaggaggtggctgtgcaacagacaggtgatgatgatgaagtagatgactttgaggacttcatcttcagccacttctttggagacaaagcactgaagaagaggtcagggaagaaggacaagcactcacagagcccaagagctgcggggcccagggaggggcacagccatagccaccaccaccaccaccggggctgacaccctgccccacagggaatggccttggcctggcccagcccaagatcccagcgttatctaactcctggagggtggactctgtcctggcttgtttggtgtcctcagatatctttcacacagtagagcaaaatcaccagccctgcactgatgtcactttatgtagaaaaaggccttagctggacctgtgttgccgtctatgcaaatgcatgcaaatactccaggccctgggatgtgggcttgtgttttgtcactgtgaagggggagatgggagaggagcctgttttggggtggggtctggggaaggcaatctgattctgaagctaaagagctttcatcctcttgagtgtatgtccccatagtgggccccttgacccacatgctgaccggtgccttgggatttgactagagttgctggctcgaggcccagcacgaggacttaccctggggttttgttaggtttggaagcagctgtccctagggggtgaagtcccccccctttttttttttacccctgcttctcccacggcttcacctccctatgtgaactgtagactcagatcccaataaagtgctgttgcagctatgatgctaggtggtttctaagcacaggggacaccccacaccccctgcctgaatggatgggtccatcccaggcactggtacttgcccccttgttctgtatccccctttgcccttgccttgcccttccaacaaaccctaggcccttgagaagctgatacttctccttttgctcacagctgccttggccccacccctgggagatgtagcaaattgagtgtgggttttggagtctgagcctcaggctcaaatccaggccaagtgatcttgggcaagttaatctctggggactttgggtttcttatcctcaaaaaaggcgatggaagggctggggaagtgattaaataaaagcaacgcaagaaaaatgcc

SEQ ID NO: 14107 - protein, 702 aa, Homo sapiens [sequence omitted]

SEQ ID NO: 14108 - DNA, 1378 bp, Homo sapiens
  CDS (239)..(1144)
agacgattggtcgggccacgccagcccaggcccaagccagcccggagagaaaagacctgaggaggtggccctggggctgcaccaccgcctcccagcactgggaagagccctggggcacagcattcagcaacgagcgacctccacagccaagacttggtgggacagatatgaagagtttgttggactcaacgaggttcgagaggcccagggaaaggtgacagaggctgagaaagtgttcatggtggctcgagggcttgtccgagaggctcgggaggacttggaagttcaccaggccaagctgaaggaggtgagggaccgcttggaccgtgtctccagggaggacagtcagtacttggaactggctactctcgagcacaggatgctgcaggaggagaagaggcttcgcacagcctatctgcgtgcagaagactctgagcgagagaagttctccctcttctctgcagctgtgcgggaaagtcatgagaaggagcgcacaagggctgagaggaccaagaactggtccctcattggctcagtcctgggggccctgattggtgtggctggctccacctatgtgaaccgtgtgcgactacaggagctgaaggctttactcctggaggcgcagaaggggcctgtgagtctccaagaggccattcgagaacaggcgtctagctactcccgccagcagagggacctccacaatctcatggtggacctgaggggcctggtacatgctgctgggccagggcaggactctgggtcacaggcaggtagtcccccgaccagagacagagatgtagatgtcctttcagctgccttgaaagagcagcttagtcattccaggcaagtccattcatgtctagaaggcttacgagagcagcttgatggcctagaaaagacttgtagccaaatggctggggtggttcagcttgtaaagtctgcagcacacccaggcctggtggaaccagcagacggggctatgcccagcttcttgctggagcaggggagcatgatcttggcactgtcagacacggagcagagactagaagcccaagtcaacaggaacaccatctatagcaccctggtcacctgtgtgacatttgtggccacactgcctgtgctctacatgctattcaaagccagctaacccctggcccctcctccagagggtctgaggcaatagctgtgaatgtggatttaagtagagaatcgtagcaatgaagcgagcctttgggggcatgtacaacctcaatctgaaggagcagtatctgtgtggctcaccagcaggcatgcttcgctttgtagacaaggttcatttacattaattatcaaaactttgtgctaatgtccaattaaaatatcctgagttttattattt

SEQ ID NO: 14109 - protein, 302 aa, Homo sapiens
MVARGLVREAREDLEVHQAKLKEVRDRLDRVSREDSQYLELATLEHRMLQEEKRLRTAYLRAEDSEREKFSLFSAAVRESHEKERTRAERTKNWSLIGSVLGALIGVAGSTYVNRVRLQELKALLLEAQKGPVSLQEAIREQASSYSRQQRDLHNLMVDLRGLVHAAGPGQDSGSQAGSPPTRDRDVDVLSAALKEQLSHSRQVHSCLEGLREQLDGLEKTCSQMAGVVQLVKSAAHPGLVEPADGAMPSFLLEQGSMILALSDTEQRLEAQVNRNTIYSTLVTCVTFVATLPVLYMLFKAS

SEQ ID NO: 14110 - DNA, 3122 bp, Homo sapiens
  CDS (188)..(898)
tttacgatatccaaataaactggacaccatcacatggacgtggcaaggacctggagcgctggaaatcctgtggctcacgctgtgtcagtttcacaaccaagtggaaatcgagttccttcctgtgtacagcccttctgaggaggagaagaggaaccccgcgctgtatgccagcaacgtgcggcgagtcatggccgaggccttgggtgtctccgtgactgactacacgttcgaggactgccagctggccctggcggaaggacagctccgtctccccgctgacacttgccttttagaatttgccaggctcgtgcggggcctcgggctaaaaccagaaaagcttgaaaaagatctggacagatactcagaaagagccaggatgaagggaggagagaagataggtattgcggagtttgccgcctccctggaagtccccgtttctgacttgctggaagacatgttttcactgttcgacgagagcggcagcggcgaggtggacctgcgagagtgtgtggttgccctgtctgtcgtctgccggccggcccggaccctggacaccatccagctggctttcaagacgtacggagcgcaagaggacggcagcgtcggcgaaggtgacctgtcctgcatcctcaagacggccctgggggtggcagagctcaccgtgaccgacctattccgagccattgaccaagaggagaaggggaagatcacattcgctgacttccacaggtttgcagaaatgtaccctgccttcgcagaggaatacctgtacccggatcagacacatttcgaaagctgtgcagagacctcacctgcgccaatcccaaacggcttctgtgccgatttcagcccggaaaactcagacgctgggcggaagcctgttcgcaagaagctggattaggacccagggttgcggagagacgcggcccctcccgcgtggacatcaccgccatgagcctctttgcgagtgacctctgggctccgctcctcactcctgctgtacaggcactgtcttcagcccgagttccaggggcctcgggggctgtttgtatcttgttcctttgtgaagtgtgttgcagaaccgacgcttactgtgcgagaatcggagggcgcgcacgcggatcccccgcctggcctggaccccgtggggtcaggttccctgccgggcggggggcaccggtgccgccccgtgttctcccacggggccctggtttcgagtctctgtcacagcctcttccggcggcagcgtgcaccgggcgggcctccgtgcacactcagcacacgcctgccacacagcgtgcgcttgcgtgtcactctggcacgaaacctgtctgcctctgtggatccacagcctggcagagccgagccgtcacctgatttttcagtgtttctacctgtgtgctggagctcatgagtattttataaactccatttaggtacttcaggaaacatgcagcattttttaaaaaatgaaaattgtttttctacttcatttttccttttagagtcaaaggatatttatttataggccttttttttttaatatagaatctgaggctgtttgggctttgacttaaatttccatcaggcctctctccagcaggtaatccctctgcttccgctgggtcccctggggaggtgtgaactcaagggcctagccccaaaacactttttctgcttttcttaatccttttccagtcccctctttttttataaacgttggcagtttgatgtttctgtttcggcataacgtaatccatttcactgtagcctaaactccagtccgaggttggatattgttcaaatgagcagggcccgagctggaagcgcaaggcagccgccgccgtgccgctcctcccttgccctcaggccaggtccctgctggaagcggctgcatcttcctgtcagccctggtttccatggtgactggcgtgacgcagccacctgagtatggctgaccttcctgcagagagaggagccgcagtcttttgcttgtggaaggagacgctgggctgtgcggtgcggagggtgatgaggatgtctggtgacagccgtgcggacaccactcctctctgcagcactgcctcccagcgccagggtcgcgggcacatcccactgagagcgggggtcctgccccatcttagagtcaaaggcagaggggcttccaggccctggatggggtattttggtgtcacctgaagtccctctgacatcaccttgtttcatcattttttatgacagaattagaaacccatccttcaagcacaataatcatcacagacttgagtttgcttcctaaagcaaaggctccgggtttgtttggaaaatttttttgatttctgaaatgaattgatttttatatttggggcatctctatagaaagtgaccaccaaggccagtaagtacgggaaaaaatgtttactaacttcctcagagattcgtgatacgcgtttctccactgacagacatttaaaaacaaccttcagctccgtttcaatcaatcacctcgacttgttttttagcatggacactgccagcaggacagacagggatggagtaaaccgaagtcaatttcagggctcttggcgtgttggacacagaagaaatcctagtgcagcctttggtagctaacagtcactgattttataattggagaatgcgtaaagattcatttttcaaggagaagagcctgcaaatggccaatgaaggaggtaaataaactaagatattccgagggaagggacccaggccacctcccttccgcaggtctgcagatgaagggttttttgaatgaaatgccactgcgcattttcagaaaaaaaaatctctgataaacagactttgaatggatgtttgttcctcctgattctcttttctcttcgtggcgacttagagttggcggatattcggaactgtgaatgtacatagcgttgagttaaaccccttgtgtgtgagacaggacgcagcgggcccctggtggcctgggggccagacccgtgggcaggtggggcatgggccctggcctgcggggacctgctggggtgtgagggcagagggagggttgccatgaaggaacttgggattttcaatggaataaataaaacataaagtctatacttggg

SEQ ID NO: 14111 - protein, 237 aa, Homo sapiens
MAEALGVSVTDYTFEDCQLALAEGQLRLPADTCLLEFARLVRGLGLKPEKLEKDLDRYSERARMKGGEKIGIAEFAASLEVPVSDLLEDMFSLFDESGSGEVDLRECVVALSVVCRPARTLDTIQLAFKTYGAQEDGSVGEGDLSCILKTALGVAELTVTDLFRAIDQEEKGKITFADFHRFAEMYPAFAEEYLYPDQTHFESCAETSPAPIPNGFCADFSPENSDAGRKPVRKKLD

SEQ ID NO: 14112 - DNA, 1575 bp, Homo sapiens
  CDS (174)..(1337)
aaaagaccaatcaagacggccggccgaggcccctggaacggcttaggcggctgcggctgctacggcggcgcatgctaggggattctgccgggtagaagagctgggcctggaacccagccctgaggacatcctgcggcccaggggcaagtgacacctgctgagagaggcccaggatggtggaggctgaggaactggcacagctgcggctgctcaatctggagctcctgaggcagctgtgggtggggcaggatgctgtgcggcggtcagtggccagggcagcctcggagtcaagcctggaatccagcagcagctacaactcagagactccatcgaccccagagacgtcctcaacttccttgagcacctcctgcccacggggccggtcctccgtgtggggcccaccagatgcctgtcgaggggacctccgtgatgtggccagatcgggggtggcctctctcccacctgccaattgccagcaccaggagtccctgggccgaccgagaccccactcagcaccctcgctgggcacctcaagcctgagggacccagagccctcagggaggctgggtgatccaggaccccaggaggcacagaccccgaggtccatcctggctcaacagagcaagctgtccaagcccagggtgaccttctctgaggagtctgcagttcctgagaggagctggcgcctcaggccatacctgggctatgactggattgcagtgtctctggacaccagctcttccatcaccagccagcctgaggccttcttctccaagctgcaggagtttcgggaaaccaacaaggaggagtgtatctgcagccatcctgagccccagttgccaggcctgcgtgagagcagtggcagcggcgtggaggaagaccatgaatgcgtgtactgttaccgtgtcaaccggcgcctgttcccggtgcctgtggatcccggtaccccctgccgcctgtgcaggacaccgcgagaccagcagggccctgggaccctggcgcagccagcgcacgtcagggtgagcatcccgctgtcgatcctggagcccccgcaccggtaccacatccaccggcgaaagagctttgacgcctctgacacactggccctgccccggcactgcctgctgggctgggacatttttcctccgaagtctgagaaaagctcagcccccaggaacctggacctctggtcctctgtctccgctgaggcccagcaccagaagctgtccggcaccagcagcccttttcacccggcctcaccaatgcagatgctgcccccgaccccgacctggtcagtgccccaggtccctcggccccacgtcccacggcagaagccctgaggactgactcctgggggagaacagcattcccgccgcctccagcctctcccctctggcaggcgcacccaggagatggaatcccctgcccgcccagctcaggcccagctgtcctaggttgggcaggtgggtggacccaagcttgtctgctgcctgagttccagagagggaggaccctggggtggagggtgagggattctgtggaagtttgtaaataaagctcagtgctctgcagctc

SEQ ID NO: 14113 - protein, 388 aa, Homo sapiens
MVEAEELAQLRLLNLELLRQLWVGQDAVRRSVARAASESSLESSSSYNSETPSTPETSSTSLSTSCPRGRSSVWGPPDACRGDLRDVARSGVASLPPANCQHQESLGRPRPHSAPSLGTSSLRDPEPSGRLGDPGPQEAQTPRSILAQQSKLSKPRVTFSEESAVPERSWRLRPYLGYDWIAVSLDTSSSITSQPEAFFSKLQEFRETNKEECICSHPEPQLPGLRESSGSGVEEDHECVYCYRVNRRLFPVPVDPGTPCRLCRTPRDQQGPGTLAQPAHVRVSIPLSILEPPHRYHIHRRKSFDASDTLALPRHCLLGWDIFPPKSEKSSAPRNLDLWSSVSAEAQHQKLSGTSSPFHPASPMQMLPPTPTWSVPQVPRPHVPRQKP

SEQ ID NO: 14114 - DNA, 1614 bp, Homo sapiens
  CDS (41)..(733)
tccgccggctcacgtgaccgtctttgggccggcgcgaaccatggccggcatggtggacttccaggatgaggagcaggtcaagtcctttttggagaacatggaggtggagtgcaactaccactgctaccacgagaaggacccggacggttgctatcggctggtggactatttggaagggatccggaagaattttgatgaggctgccaaggtgttgaagtttaactgtgaagagaaccagcacagtgatagctgctacaaactgggggcccactatgtgactggaaaaggtggtctgacccaggacctgaaagctgccgccaggtgctttttgatggcgtgtgagaagcctggaaagaagtcaatagcagcatgtcacaacgttggcctcctggcacatgatggacaggttaatgaggatggccagcctgacttgggaaaggccagggactactacacaagggcctgtgatggtggctatacttccagttgcttcaacctcagtgccatgttcctgcagggtgccccaggctttcccaaggacatggacctggcatgtaaatactccatgaaagcctgtgacctgggtcatatctgggcctgtgccaatgccagtcgcatgtacaagctgggggatggtgttgataaggatgaggccaaggccgaggtgctaaaaaatcgagcccagcagctacacagagaacagcagaaaggtgtccaacccttaacatttgggtaatgtggtccaccctccctcccaggcaacaaactgcttgaggctggcagctcctgtttctgaagactgatgcagcccttgaaggtcaacctgctggagcaaaaaaacttgggacttgaatttgtagctccatttacatggatccattgccccagctactggagtatagcctacaatgtttatttcagtcaatattcctttatctgggtgttctgtacaatgtttattacagtcaatattccttcatctggatgttctgtgaagatagccatgtttatgggggtcttagttttcaaactctggcaactctgtgaaaaataggagcaaactagagagccctggagattggtggtagggaagggaggatagcaggaagtttgaaaaattagcagccccggggcctaaaggaatcagctgtcatcattttcatcattattattttggttaggatggcttgaaaatcagaacgtatcttggtttacgtaattgaggtcttaaagaactaagaacagttaaatagtcacaactaccaccctctgacttacataatcattggtgtgggcttcgttttgcctttagagtcacatctttcagtaaattcacagagatcaagagggacgtgcaacatacagcttaaaggctgttatgcttcagggttgctgaagaagatgaaacatcagcctgccatcgtctagaagagacattggcagttaaaaattagcacctccagtgtagtcgcctggcactgcccatcatgctgagggagcagattcttcccaaggcagcttcagctaggagtttgtaagcaaggactttgtgacacatttgtcccctggaactgagcctttttaactgtccctgtgaatgaacaattttgagtg

SEQ ID NO: 14115 - protein, 231 aa, Homo sapiens
MAGMVDFQDEEQVKSFLENMEVECNYHCYHEKDPDGCYRLVDYLEGIRKNFDEAAKVLKFNCEENQHSDSCYKLGAHYVTGKGGLTQDLKAAARCFLMACEKPGKKSIAACHNVGLLAHDGQVNEDGQPDLGKARDYYTRACDGGYTSSCFNLSAMFLQGAPGFPKDMDLACKYSMKACDLGHIWACANASRMYKLGDGVDKDEAKAEVLKNRAQQLHREQQKGVQPLTFG

SEQ ID NO: 14116 - DNA, 3001 bp, Homo sapiens
  CDS (272)..(2692)
gtaacttttaagtggtcggaacacgccccgcgctgctgggtcccgccagacacgccgccgccgcaggaaagtctacagtttggtaccccaggactcgctggtcaggaaagccctgcaggacatgagtgttaggcccgacgcctggcccttggcagcttgggaggtggctggggctgcttttgcctttgccagagacagctccaactgaggacctctccaacgggcccatccacagtccttccttcccctagtgtctgggaagacaggcgcgatgatggactccccgttcctggagctgtggcagtccaaggcagtgtccatcagggagcagctgggactcggggaccggcccaacgactcctattgctacaactcggccaaaaacagcaccgtgctccagggggtcacctttggtggcatccccactgtcctgctcatagacgtcagctgcttcctgttcttaatcttggtgttttctattataagaagaagattctgggactatggccgcattgccctggtgtcagaagcagacagcgagtccagatttcagagattgtcatcgacttcctcctcaggtcaacaagactttgaaaatgagctgggatgctgtccctggctgactgccatcttccgtctgcatgatgaccagatcctggaatggtgtggggaggacgccatccactacctgtccttccagaggcacatcatcttcctgttggtggtggtcagctttttgtccctgtgtgtcatcctgcctgtcaacctctcaggggatttgctggacaaagacccgtatagttttgggaggacaacaatagcaaacctacagactgacaatgacctcctttggctgcacaccatctttgctgtcatttacctcttcttcactgtgggtttcatgcggcaccacactcagtccattaagtacaaagaggagaacctggtgaggcggaccctgttcatcacaggactccccagagatgccaggaaggagactgtggagagccactttcgggacgtgtatcccacgtgtgaggtggttgatgtgcagctgtgctacaacgtggccaaactgatctacctgtgcaaggagaaaaagaagactgagaagagcctgacctattacacaaacctgcaggtgaagacaggccagcggaccctcatcaaccccaagccatgtggccagttttgctgctgtgaagtgctgggctgtgagtgggaagacgccatctcttactacacacggatgaaggacaggctgctggagaggatcacagaggaagaacgccacgtccaggaccagcccctgggaatggccttcgtcaccttccaggagaagtccatggccacctacatcctgaaagatttcaatgcctgcaagtgtcagagccttcagtgcaaaggtgagccccagccgtcctcccatagcagggagctctatacctccaagtggacagtcacctttgctgctgaccctgaggacatctgctggaagaacctctctatccagggcctccgctggtggctacagtggctgggcatcaacttcaccctcttcctggggctatttttcctgaccacaccctccatcatcctgtccaccatggacaagtttaatgtcaccaaacccatccatgcgctgaataacccgatcatcagccagttcttccccacccccctgctctggtccttctcggccctgctcccctccattgtctactattctacactgctggagtctcactggaccaagtcgggggaaaaccagatcatgatgaccaaagtctacatattcttgatcttcatggtgctgatcctgccctccctgggtctcaccagtctagattttttcttccggtggctctttgacaaaacttcctcggaggcctccatcaggttggagtgtgtcttcctgcctgaccagggtgccttctttgtgaactatgtcatcgcctcggccttcatcggcaatggcatggagctgctgcggctgccaggtctcatcctctataccttccgcatgatcatggccaagacggctgctgaccgcaggaatgtcaagcagaaccaggccttccagtacgagtttggagccatgtatgcatggatgctgtgtgtcttcactgccatcgtggcctacagcatcacttgtcccatcatcgcgccatttggcctcacctacatcctgctcaagcacatggtggaccggcacaacctctacttcgtctacctcccagccaagctggagaaggggatccactttgccgctgtgaaccaggccttggcagcccccatcctgtgcctcttctggctctacttcttttccttcctgcgcctgggtatgaaggcccccgccactctgttcaccttcctggtgctgctgctcaccatcctggtctgcctggctcacacctgctttggatgcttcaagcacctcagccctctgaactacaaaacagaagagcctgcaagtgacaaaggaagtgaggcagaggcccacatgcccccaccgttcacaccctacgtgcctcggattctgaacggcttggcctcggagaggacagcactgtctccgcagcagcagcagcagcagacctatggtgccatccacaacatcagcgggactatccctggacagtgcttggcgcagagcgccgcgggcagtgtggctgctgccccccaggaggcctgaggctgggtctcactgctctgaaaagacacaaccagaatggcctggggctcaggcccttggctgagtgggaatgcgttgggactgcccagctgagctatcaggtgcccatctcttctggtcccagcagtggtgaggagagcacaggcaggcctcgcccctcccttgctcacccagtttcccctccggcacaagcttccagctctgcagctggggtgacatccccagtggtttgtcgccaagaccatgtggtggacttttcgccccccaaactgatgagtccgggagaatatatggagagagagatgt

SEQ ID NO: 14117 - protein, 807 aa, Homo sapiens [sequence omitted]

SEQ ID NO: 14118 - DNA, 525 bp, Homo sapiens
  CDS (20)..(391)
aaaaggccagcggcgcaaaatggcggcggcgatgaccttctgccggctgctgaaccggtgtggcgaggcggcgcggagcctgcccctgggcgccaggtgtttcggggtgcgggtctcgccgaccggggagaaggtcacgcacactggccaggtttatgatgataaagactacaggagaattcggtttgtaggtcgtcagaaagaggtgaatgaaaactttgccattgatttgatagcagagcagcccgtgagcgaggtggagactcgggtgatagcgtgcgatggcggcgggggagctcttggccacccaaaagtgtatataaacttggacaaagaaacaaaaaccggcacatgcggttactgtgggctccagttcagacagcaccaccactagagcgtgtggcacgccgggggtcccgcagcatcctgtgagcatttccgcggggaagctgagcacgtgaagctcgctggttctgtgcgaagggtattcctggtgctgaataaagggtgttgctgtcaaggctg

SEQ ID NO: 14119 - protein, 124 aa, Homo sapiens
MAAAMTFCRLLNRCGEAARSLPLGARCFGVRVSPTGEKVTHTGQVYDDKDYRRIRFVGRQKEVNENFAIDLIAEQPVSEVETRVIACDGGGGALGHPKVYINLDKETKTGTCGYCGLQFRQHHH

SEQ ID NO: 14120 - DNA, 1598 bp, Homo sapiens
  CDS (57)..(1514)
gtcggagggcggcgggcgccgacctcagcgcgcacctatgggctcgctaccaggacatgcggagactggtgcacgacctcctgccccccgaggtctgcagtctcctgaacccagcagccatctacgccgacaacgagatcagcctgcgtgacgttgaggtctacggctttgactacgactacaccctggcccagtatgcagacgcactgcaccccgagatcttcagtaccgcccgtgacatcctgatcgagcactacaagtacccagaagggattcggaagtatgactacaaccccagctttgccatccgtggcctccactatgacattcagaagagccttctgatgaagattgacgccttccactacgtgcagctggggacagcctacaggggcctccagcctgtgccagacgaggaggtgattgagctgtatgggggtacccagcacatcccactataccagatgagtggcttctatggcaagggtccctccattaagcagttcatggacatcttctcgctaccggagatggctctgctgtcctgtgtggtggactactttctgggccacagcctggagtttgaccaagcacatctctacaaggacgtgacggacgccatccgagacgtgcatgtgaagggcctcatgtaccagtggatcgagcaggacatggagaagtacatcctgagaggggatgagacgtttgctgtcctgagccgcctggtggcccatgggaaacagctgttcctcatcaccaacagtcctttcagcttcgtagacaaggggatgcggcacatggtgggtcccgattggcgccagctcttcgatgtggtcattgtccaggcagacaagcccagcttcttcactgaccggcgcaagcctttcagaaaactcgatgagaagggctcacttcagtgggaccggatcacccgcttggaaaagggcaagatctatcggcagggaaacctgtttgacttcttacgcttgacggaatggcgtggcccccgcgtgctctacttcggggaccacctctatagtgatctggcggatctcatgctgcggcacggctggcgcacaggcgccatcatccccgagctggagcgtgagatccgcatcatcaacacggagcagtacatgcactcgctgacgtggcagcaggcgctcacggggctgctggagcgcatgcagacctatcaggacgcggagtcgaggcaggtgctggctgcctggatgaaagagcggcaggagctgaggtgcatcaccaaggccctgttcaatgcgcagttcggcagcatcttccgcaccttccacaaccccacctacttctcaaggcgcctcgtgcgcttctctgacctctacatggcctccctcagccgcctgctcaactaccgcgtggacttcaccttctacccacgccgtacgtcgctgcagcacgaggcacccctctggatggaccagctctgcaccggctgcatgaagacccccttccttggtgacatggcccacatccgctgagggcacctttattgtctgggacaggccctcagcccctcctgccccatccacccagacaagcaataaaagtggtctcctccc

SEQ ID NO: 14121 - protein, 486 aa, Homo sapiens [sequence omitted]

SEQ ID NO: 14122 - DNA, 3122 bp, Homo sapiens; identical to SEQ ID NO: 14110
  CDS (188)..(898)

SEQ ID NO: 14123 - protein, 237 aa, Homo sapiens; identical to SEQ ID NO: 14111

SEQ ID NO: 14124 - DNA, 1602 bp, Homo sapiens
  CDS (137)..(859)
cttgtgggtggaaacgcgctggctgactggggtcggcgtttagttcagcgcagcgactcggggacctggagctgacgcctagacacttgtattagctttaatagaagagaaatggaggagccatagaatattaaggatgaattcaggaaggcctgagaccatggaaaacttgcctgctctctacactattttccaaggagaggttgctatggtgacagactatggggcctttatcaaaatcccaggctgtcggaagcaaggtctggtccatcgaactcatatgtcatcctgtcgggtggataagccctctgagatagtagatgttggagataaagtgtgggtgaagcttattggccgagagatgaaaaatgatagaataaaagtatccctctccatgaaggttgtcaatcaagggactgggaaagaccttgatcccaacaatgttatcattgagcaagaagagaggcggaggcgatccttccaggattacactgggcagaagatcacccttgaggctgtcttgaacactacctgcaagaagtgtggctgtaaaggccactttgcaaaagattgtttcatgcaaccaggtgggactaaatactctctgatacctgatgaggaagaggaaaaggaagaggcaaagtcagcagagtttgagaagcctgaccctacaaggaatccttctagaaaaagaaagaaggagaagaagaaaaagaaacatagagataggaagtcatctgactctgacagctcagactctgagagtgatacaggcaagagggcaaggcacacatcaaaagacagcaaggcagcaaagaagaagaaaaagaagaagaagcacaagaagaagcacaaggagtgagagtataaagagtgtagggggtggttgagagtaagaaaccaggagccttgtgccttgagactcctggaaagactcaatagtgagaatatagcctcccaccccattaacttcgctcccatgggagatggcttcccctcatgcaacaggcaggtttgggagttagaggtcaaaagcagctgcctgaatgagttgttgtttccttatcactcctggtccctttgcaagtgaaccctgcagctcacccattcattcacccaacttccttcattcagcaggaggccctattaccctctccagctgccactgccagagctggattcctgtaaaggagtccaggctagagccacagagactgttgtggaggtgagttcggctgtagttagagtgattggacccttcctattggtctgtcctgggccaactggtgggtgatctctgctgcatccaacatgggagcagagactggcagcaggaggggggaacatggtgagaagtggtgctcacttttcccattcctcctaacatagttctactatgctagaagtggcatccagcggccacagctagaaaacagtctgcagtgtgacttaacttgtgtattgcattccagcagaccactgaaccagacagcgaagccaagatcattgttctactttgtatttactactgtgtgaatcagttgattctacttcaggtccttgcttaaattcctgtcactaaatggaaatgtgtttggtttt

SEQ ID NO: 14125 - protein, 241 aa, Homo sapiens; identical to SEQ ID NO: 12748

SEQ ID NO: 14126 - DNA, 2476 bp, Homo sapiens
  CDS (263)..(1297)
tgttaccactacggtgaccagcccagttctgtgtaataacaacatctccgagggcgaagggtatgtggagtctccagatctggggagccccgtcagccgcaccctggggctcctggactgcacttacagcatccatgtctaccctggctacggcattgagatccaggtgcagacgctgaacctgtcacaggaagaagggctcctggtgctggctggtgggggatccccaggcctggccccccgactcctggccaactcatccatgcttggagaaggacaagtccttcggagcccaaccaaccggctgcttctgcacttccagagcccacgggtcccaaggggcggtggcttcaggatccactatcaggcctacctcctgagctgtggcttccctccccggccggcccatggggacgtgagtgtgacggacctgcaccctgggggcactgccacctttcactgtgattcgggctaccagctgcagggagaggagaccctcatctgcctcaatggcacccggccatcctggaacggtgaaacccccagctgcatggcatcctgtggtggcaccatccacaatgccaccctgggccgcatcgtgtccccagagcctgggggagccgtagggcccaacctcacctgccgttgggtcattgaagcagctgaggggcgccggctgcacctgcactttgaaagggtctcgctggatgaggacaatgaccggctgatggtgcgctcagggggcagccccctatcccccgtgatctatgattcggacatggacgatgtccccgagcggggtctcatcagtgacgcccagtccctctacgtggagctgctgtcagagacacctgccaatcccctgctgttaagccttcgatttgaagcctttgaggaggatcgctgcttcgcccccttcctggcacatggaaatgtcactaccacggaccctgagtatcgcccaggggcactggcaaccttctcgtgcctcccaggatatgccctggagccccctgggccccccaatgccatcgaatgtgtggatcccacagaaccccactggaacgacacagagccggcctgcaaagccatgtgtggaggggagctgtcggaaccagctggcgtggtcctctctcccgactggccccagagctatagcccgggccaagactgcgtgtggggcgtgcacgtccaggaagagaagcgcatcttgctccaagttgagatattgaatgtgcgggaaggggacatgctgacgctgttcgacggggacggtcccagcgcccgagtcttggcctagctgcggggacctcagccgcgccgccgccttctctcctctgggcccgacctcacactgcagtttcaggcaccgcccgggcccccaaatccaggcctgggccagggcttcgtattgcacttcaaagaggtcccgaggaacgacacgtgccccgagctgccacctccggagtggggctggagaacggcatcccacggggacctgatccggggcacggtgctcacctaccagtgcgagcctggctacgagctgctaggctccgacattctcacttgccagtgggacctgtcttggagcgccgcgccgcccgcctgccaaaagatcatgacttgtgctgaccctggcgagattgccaacgggcaccgcaccgcctcggacgccggcttccccgttggctcccacgtccagtaccgctgcctgccagggtacagcctcgagggggcagccatgctcacctgctacagccgggacacaggcacacccaagtggagcgatagggtccccaaatgcgccttgaagtacgagccgtgcctgaacccgggggttcccgagaatggctaccagacgctgtacaagcaccactaccaggcgggcgagtctctgcgcttcttctgctatgagggctttgagcttatcggcgaggtcaccatcacctgtgtgcccggccacccctcccagtggaccagccagcccccactctgcaaagttgcctatgaggagctcctggacaaccgaaaactggaagtgacccagaccacagatccatcacggcagctggaaggggggaacctggccctggccatcctgctgcctctaggcttggtcattgtcctcggcagtggcgtttacatctactacaccaagcttcagggaaagtcccttttcggcttctcgggctcccactcctacagccccatcaccgtggagtcggacttcagcaacccgctgtatgaagctggggatacgcgggagtatgaagtttccatctgaaccccaagactacagctgcaggacccaggacgcccctcccctcctcattcgggcagagggaaatacgggacccggtctctgcctcctggctgccctcctccctggctgtgtaaatagtctccctatcccacgagggggctttgatggccctggagatcctacagtaaataaaccagcatcctgccgccc

SEQ ID NO: 14127 - protein, 345 aa, Homo sapiens
MLGEGQVLRSPTNRLLLHFQSPRVPRGGGFRIHYQAYLLSCGFPPRPAHGDVSVTDLHPGGTATFHCDSGYQLQGEETLICLNGTRPSWNGETPSCMASCGGTIHNATLGRIVSPEPGGAVGPNLTCRWVIEAAEGRRLHLHFERVSLDEDNDRLMVRSGGSPLSPVIYDSDMDDVPERGLISDAQSLYVELLSETPANPLLLSLRFEAFEEDRCFAPFLAHGNVTTTDPEYRPGALATFSCLPGYALEPPGPPNAIECVDPTEPHWNDTEPACKAMCGGELSEPAGVVLSPDWPQSYSPGQDCVWGVHVQEEKRILLQVEILNVREGDMLTLFDGDGPSARVLA

SEQ ID NO: 14128 - DNA, 1387 bp, Homo sapiens
agttgctgcagggaatcttttaaacgagagcgagaaggactgcgggcaggaccggcgggctcctggggttcagccgtgccgcctcgttacgatgaccagtgtggttaagacagtgtatagcctgcagcccccctctgcgctgagcggcggccagccggcagacacacaaactcgggccacttctaagagtctcttacctgttaggtccaaagaagtcgatgtttccaaacagcttcattcaggaggtccagagaatgatgttacaaaaatcaccaaactgagacgagagaatgggcaaatgaaagctactgacactgccaccagaaggaatgtcagaaaaggtacaactattattacagctacaaaccactgagtaagcaaaaatcagaggaagagctcaaggacaagaaccagctgttagaagccgtcaacaagcagttgcaccagaagttgactgaaactcagggagagctgaaggacctgacccagaaggtagagctgctggagaagtttcgggacaactgtttggcaattttggagagcaagggccttgatccagctttaggcagtgagaccctggcatcacgacaagaatccactactgatcacatggactctatgttgctgttagaaactttgcaagaggagctgaagctttttaacgaaacagccaaaaagcagatggaggagttacaggccttaaaggtaaagctggagatgaaagaggaaagagtccgattcctagaacagcaaaccttatgtaacaatcaagtaaatgatttaacaacagcccttaaagaaatggagcagctattagaaatgtaagaagaagcaagtggccagatggctccctcttgggcataaaatctcagaggaagctacttaggacatcatcttggccatgatcttctgggactcaccatctccagaatgaaaacaatttctacagtagacttaaggacagtttatgctgaaatggcaattcctcatttaagcaagttttcccaaccttcaggttggtcagccctcctgagcctcacaggtggataattgaggcctacaagagaggggagcctaggagcttgattgaccttctagtcaaccacctgacttcagcacaccattacaatcgggagactaagccaacaaccagaggatctaaaatgtcacattcagattttcaggaagaaaatcttcattacagtggagcacaaatgttccatacaagacatcattgaggagccatgctgtccccttctaacctgaaacacattctttcccatcctggttgggcttctgtacctccttattaatttatgaacctgaagttgcttgaagtgttttgggcttaataaatggggtgaaagtataggtagcagtaacacct

SEQ ID NO: 14129 - DNA, 3532 bp, Homo sapiens
  CDS (20)..(2215)
gtgcggccggcgcatcccgatggagcgcggcggcggcggctccgggacgggatcccggcctgaggggactgcgcggggaacctctctcccagggaagatcgcagaaccgggcgcggtgcggacctctcagcccaactaccggcctcaaggcatggagggatttttgaaatcagatgagaggcagagattggccaaagaaagacgagaagaaagagaaaaatgtctggctgctcgggagcaacagatcctggagaaacagaaaagagccaggctgcagtacgaaaagcaaatggaggagcgatggcgaaaactggaagagcagcggcagcgggaggaccaaaagagagctgctgtggaagagaaaaggaaacagaagctccgggaggaggaggaacggctggaggcgatgatgcgccggtccctggagcgcacacagcagctggagctgaaaaagaagtattcgtggggagcaccactggccattggacccggaggacatgatgcatgtgacaaactttcaacatcaactatgagtttgccaaagccaacggagcctcccatgaataaacgcctgtcttcatccaccgtggcaatatcctattccccagaccgagtattccatgtctgtcctcgtttagctcctcttggccctcttaacccttcttacaagtcttcacccactcgaaacattgagaagaagaaagctacatctacgtctacatctggtgcaggagatgttgggaaagaagccctttcaggaggagaggcctctctggtggagaaggtgaagcgggggcaacgaacagcaacttctcttcctgttgtgaacttcgggtcccctctgagaagatgtgagttttctggaggcattcctaagagaccatcttctcctgtgatatccaagacagctactaaagcttatccacagtctccaaagacaacgaaacctccctacccagggtctcctgtgaagtaccgcttacctgccctttctggccaagacatgcccaagaggaaagcggagaaagagaagagcaacaaggaaagggaaggtaccttggctcagcaggctgctggcccgcaaggagaggaagccctagagaagcatgtagtggacaagcatgccagcgagaagcatgctgctgccgcaggagggaaagccgaaaacagcgcagccttggggaagcccacagcaggcaccactgatgcaggagaggctgcgaagatcttggctgaaaagagaagacaggcccggctgcagaaggaacaggaggagcaagaacgagtggagaaggaagaacaagataggctggagagagaggaattgaaaagaaaggcagaggaggaaaggcttcgcctagaagaggaagcccgaaagcaggaagaagaaaggaagcggcaggaagaggaaaagaaaaaacaggaaggggaagagaaaagaaaggcaggcgaggaggccaagcggaaggctgaggaggagctgttgttgaaagaaaagcaagaacaagaaaaacaagagaaagccatgattgaaaagcagaaagaagcagcagaaacaaaggcccgggaggtagctgaacagatgcgtctcgagagagaacagattatgctgcagattgagcaggagagactggagagaaagaagagaatagatgaaatcatgaagagaacaaggaaaagtgatgtgcctccacaagtgaagaaagaagaccccaaagtgggggtccagcctgctgtgtgtgtggaaaagaagacaaaactggttgtccccaacaaaatggaaatcaatggattgaacacctgccaggaagttaatggtgtggatcacgctgccccagaaacttatccccaagacattttctctaatgggcttaagccagctgggggactcattcatctggatgcccttgatgggaaatcaaatagcctggatgattcaactgaagaagttcagtctatggatgtgagtcctgtttcaaaagaagagcttatctctatcccggaattttcaccagtgagtgaaatgattcctggggtgtctctggaccaaaatggaactggtaatgcccgagcacttcaagatctcttagatttcactggtcccccgacattccccaagagatccagtgaaaatctcagcctggacgactgtaacaaaaaccttatcgaaggatttaacagtcctggccaagaaactcctctcaacaccttctgttgacaaatacagcatccctttaataaaaggtgtttggagaacccgtaaagctgctgatagtcaaatccgagctactagctgcttgaagaagcttctgtcacccttaccgctggatcccaaattattagctcggaatgtaactgtattcctaggtagtatgtcaaacactggccactcttggtagaaaccttgaaactttcaccttgctgggctttagcaaagtttccttttacagttctgtttatgagcttcagctactgataaagcacttcctgaacttctctattatcatagtgaccctctgaataacctgagtgactggctcggcaattcgctttataaccattcttattcccaaagttggagcacataaacatttagatgtcttttcctgtaaaatattctagacatttacccaaactctagttcaacatatactcaacttgcactgtatatctccctgtcttttttgagacagagaagaaattcaggaggttccccatctccagagtttctctgttggaaagcagtatcaagaagcctttaaaaaattgttgttaagctttgccacctgcagaaatgcattgccccacattattcttctggggttaaagtagtaagtttggttgaggaaggaagtcaaaacagtcagtaatgatttctgttctcttatgcatattcgtgtatacatgggcaactgaatctagcaaggactctttcgtgtcacaccttaaaatcttcatgctgtagtcactccagaccatggagtggctttccagctgaatgaatcctatgtctcgcgtgcaggtggttggttttcaatgttcttgctaattttttttctattggatcttgggagttttctttgtttgctcctgtgtttgcccagctttaataaaaccaggcgcaaacaaaaaccatagcattctgaaacaatagggggcccacattggacccagtatgtcactttaatggacttcaagaaaaaatctgaatgggaaaaatgacactagaatgtatactccacacattttatgccatataatggtgtgttttcttaattttgtttcttgtggcgaaatgtggctttcaaattaaaatggccttttcttctttgaaactttttgttttgacttgtataattaagggtttggaaagattcataattctgagagaggtttgcaaccaggagatacaaagaagtctcagtagtaatcttgttcatgtgcttttacagccagctacatttaagaatgtattagttacagaaattatatgtctgtgtatgtgtctctactcaataaagtacatgcctcc

SEQ ID NO: 14130 - protein, 732 aa, Homo sapiens
MERGGGGSGTGSRPEGTARGTSLPGKIAEPGAVRTSQPNYRPQGMEGFLKSDERQRLAKERREEREKCLAAREQQILEKQKRARLQYEKQMEERWRKLEEQRQREDQKRAAVEEKRKQKLREEEERLEAMMRRSLERTQQLELKKKYSWGAPLAIGPGGHDACDKLSTSTMSLPKPTEPPMNKRLSSSTVAISYSPDRVFHVCPRLAPLGPLNPSYKSSPTRNIEKKKATSTSTSGAGDVGKEALSGGEASLVEKVKRGQRTATSLPVVNFGSPLRRCEFSGGIPKRPSSPVISKTATKAYPQSPKTTKPPYPGSPVKYRLPALSGQDMPKRKAEKEKSNKEREGTLAQQAAGPQGEEALEKHVVDKHASEKHAAAAGGKAENSAALGKPTAGTTDAGEAAKILAEKRRQARLQKEQEEQERVEKEEQDRLEREELKRKAEEERLRLEEEARKQEEERKRQEEEKKKQEGEEKRKAGEEAKRKAEEELLLKEKQEQEKQEKAMIEKQKEAAETKAREVAEQMRLEREQIMLQIEQERLERKKRIDEIMKRTRKSDVPPQVKKEDPKVGVQPAVCVEKKTKLVVPNKMEINGLNTCQEVNGVDHAAPETYPQDIFSNGLKPAGGLIHLDALDGKSNSLDDSTEEVQSMDVSPVSKEELISIPEFSPVSEMIPGVSLDQNGTGNARALQDLLDFTGPPTFPKRSSENLSLDDCNKNLIEGFNSPGQETPLNTFC

SEQ ID NO: 14131 - DNA, 3024 bp, Homo sapiens
  CDS (111)..(2156)
agctggagcccgcggagcccacggagcccacggaggagcccacggaggagccccagcgtccgaacgggcagaccccctcgagccgcgaaggagcccgagaagcagccacgatgtgcggaatctttgcctacatgaaccacagagtcccccggacgaggaaggagatcttcgaaaccctcatcaagggcctgcagcggctggagtacagaggctacgactcggcaggtgtggcgatcgatgggaataatcacgaagtcaaagaaagacacattcagctggtcaagaaaagggggaaagtcaaggctctcgatgaagaactttacaaacaagacagcatggacttaaaagtggagtttgagacacacttcggcattgcccacacgcgctgggccacccacggggtccccagtgctgtcaacagccaccctcagcgctcagacaaaggcaacgaatttgttgtcatccacaatgggatcatcacaaattacaaagatctgaggaaatttctggaaagcaaaggctacgagtttgagtcagaaacagatacagagaccatcgccaagctgattaaatatgtgttcgacaacagagaaactgaggacattacgttttcaacgttggtcgagagagtcattcagcagttggaaggtgcattcgcgctggttttcaagagtgtccactacccaggagaagccgttgccacacggagaggcagccccctgctcatcggagtccggagcaaatacaagctctccacagaacagatccctatcttatacaggacgtgcactctggagaatgtggagaatatctgtaagacacggatgaagaggctggacagctccgcctgcctgcatgctgtgggcgacaaggccgtggaattcttctttgcttctgatgcaagcgctatcatagagcacaccaaccgggtcatcttcctggaggacgatgacatcgccgcagtggctgatgggaaactctccattcaccgggtcaagcgctcggccagtgatgacccatctcgagccatccagaccttgcagatggaactgcagcaaatcatgaaaggtaacttcagtgcgtttatgcagaaggagatcttcgaacagccagaatccgttttcaatactatgagaggtcgggtgaattttgaaaccaacacagtgctcctgggtggcttgaaggaccacttgaaggagattcgacgatgccgacggctcatcgtgattggctgtggaaccagctaccacgctgccgtggctacgcggcaagttttggaggaactgactgagcttcctgtgatggttgaacttgctagtgattttctggacaggaacacacctgtgttcagggatgacgtttgctttttcatcagccagtcaggcgagaccgcggacaccctcctggcgctgcgctactgtaaggaccgcggcgctctcaccgtgggcgtcaccaacaccgtgggcagctccatctctcgcgagaccgactgcggcgtccacatcaacgcagggccggagatcggcgtggccagcaccaaggcttataccagtcagttcatctctctggtgatgtttggtttgatgatgtctgaagaccgaatttcactacaaaacaggaggcaagagatcatccgtggcttgagatctttacctgagctgatcaaggaagtgctgtctctggaggagaagatccacgacttggccctggagctctacacgcagagatcgctgctggtgatggggcggggctacaactatgccacctgcctggaaggagccctgaaaattaaagagataacctacatgcactcagaaggcatcctggctggggagctgaagcacgggcccctggcactgattgacaagcagatgcccgtcatcatggtcattatgaaggatccttgcttcgccaaatgccagaacgccctgcagcaagtcacggcccgccagggtcgccccattatactgtgctccaaggacgatactgaaagttccaagtttgcgtataagacaatcgagctgccccacactgtggactgcctccagggcatcctgagcgtgattccgctgcagctgctgtccttccacctggctgttctccgaggatatgacgttgacttccccagaaatctggccaagtctgtaactgtggaatgaggctgagaccgtgacaagaccatcaccacctttcatctgattccagacctgtcccaacagcagggatgctacatgggaagagaagtggacatcccacatgttctgcgtgctcctgtagagcttgacagcttccacgtgccttctacccaagtgcttttgcttacagcagatactgtttctctgtgtcctgaagtcgccagaggagaagggaatcattgtttacacatggggatcagagcagacttctccactactgtgcaatagagatacagctctcttcagagtaactgtgaaccttttataaccaacactagagttagttttaaaagacaagatatttataatgacgactgtatagcttttaagttatttttctagtatgtggctttctgtagccgtggtaacggccaaactgttcatcctagctacccatgctctgtgtccaggcttgctcctggcaggtggcattcatctcagatgtgagcacaaggcattggccctctggactcctttctccttttctttcctctctaggctgctcctgaatcctgttctctgacatccgtggagcccctcctgcatccacctatgcctcctataggtccagttgaaatctcagcctccttcaacattttcttctcgtgtgtggcccacatccctccacttctccaacttctgtttaatctgatcacggctctttttaagccctggcagcattttggtccctgctccttgcccatagtaaaacagcttgaaatatcccatgcaagagagtagtttcaggtgggcaactctgctctctatttaaaagcgtgcacaatcaaaagtactatgcaattttaggacaataaagaacatacagttt

SEQ ID NO: 14132 - protein, 682 aa, Homo sapiens [sequence omitted]

SEQ ID NO: 14133 - DNA, 3464 bp, Homo sapiens
  CDS (105)..(3032)
aagtgccaaaatggcgatgcctaccacctagaactggattgtgcgctccatttctttcacctcaaagctggccgccaccgctgccacctgctcagagtgaaataatgaaggtggtcaacctgaagcaagccattttgcaagcctggaaggagcgctggagtgactaccaatgggcaatcaacatgaagaaattctttcctaaaggagccacctgggatattctcaacctggcagatgcgttactagagcaggccatgattggaccatcccccaatcctctcatcttgtcctacctgaagtatgccattagttcccagtttgatgacttttctcgggacctgtgtgtccaggcattgctggacatcatggacatgttttgtgaccgtctgagctgtcacggcaaagcagaggaatgcatcggactgtgccgagcccttcttagcgccctccactggctgctgcgctgcacggcagcctctgcagagcggctgcgggaggggctggaggccggcactccagccgctggggagaagcagcttgccatgtgccttcagcgcctggagaaaaccctcagcagcaccaagaaccgggccctgctgcacatcgccaaactagaggaggcctcttcttggactgccatcgagcattctctcttgaaacttggagagatcctggccaatctcagcaacccgcagctccggagtcaggccgagcagtgtggcaccctcattaggagcatccccacgatgctgtctgtgcatgcggagcagatgcacaagaccggcttccccactgtccacgccgtgatcctgctcgagggcaccatgaacctgacaggcgagacgcagtccctggtggagcagctgacgatggtgaagcgcatgcagcatatccccaccccactttttgtcctggagatctggaaagcttgcttcgtggggctcattgagtctcccgagggtacggaggagctcaagtggacagctttcactttcctcaagattccacaggttttggtgaagttgaagaagtactctcatggagacaaggacttcactgaggatgtcaactgtgcttttgagttcctgctgaagctcacccccttgttggacaaagctgaccagcgctgcaactgtgactgtacaaacttcctgctccaagaatgtggcaagcaggggcttctgtctgaggccagcgtcaacaaccttatggctaagcgcaaagcggaccgagagcacgcaccccagcagaaatcgggagagaatgccaacatccagcccaacatccagctgatcctccgggcggagcccactgtcacaaacatcctcaagacgatggatgcagaccactctaagtcaccggagggactgctgggagtcctgggccacatgctgtccgggaagagtctggacttgctgctggctgccgccgccgccactggaaagctgaaatccttcgcccggaaattcatcaatttgaatgaattcacaacctatggcagcgaagaaagcaccaaaccggcctccgtccgggccctgctgtttgacatctccttcctcatgctgtgccatgtggcccagacctatggttcagaggtgattctgtccgagtcgcgcacaggagctgaggtgcccttcttcgagacctggatgcagacctgcatgcctgaggagggcaagatcctgaaccctgaccacccctgcttccgccccgactccaccaaagtggagtccctggtggccctgctcaacaactcctcggagatgaagctagtgcagatgaagtggcatgaggcctgtctcagcatctcagccgccatcttggaaatcctcaatgcctgggagaatggggtcctggccttcgagtccatccagaaaatcactgataacatcaaagggaaggtatgcagtctggcggtgtgtgctgtggcttggcttgtggcccacgtccggatgctggggctggatgagcgtgagaagtcgctgcagatgatccgccagctggcagggccactgtttagtgagaacaccctgcagttctacaatgagagggtggtgatcatgaactcgatcctggagcgcatgtgtgccgacgtgctgcagcagacagccacgcagatcaagtttccctccaccggggtggacacaatgccctactggaacctgctgccccccaagcggcccatcaaagaggagctgacggacatttttgccaaggtgctggagaagggctgggtggacagccgctccatccacatctttgacaccctgctgcacatgggcggcgcctactggttctgcaacaacctgattaaggagctgctgaaggagacgcggaaggagcacacgctgcgggcagtggagctgctctactccatcttctgcctggacatgcagcaagtgaccctggtcctgctgggccacatcctacctggcctgctcactgactcctccaagtggcacagcctcatggaccccccgggcactgctcttgccaagctggccgtgtggtgtgccctcagttcctactcctcccacaagggacaggcgtccacccgccagaagaagagacaccgcgaagacattgaggattatatcagcctcttccccctggacgatgtgcagccttcgaagttgatgcgactgctgagctctaatgaggacgatgccaacatcctttcgagccccacagaccgatccatgagcagctccctctcagcctctcagctccacacggtcaacatgcgggaccctctgaaccgagtcctggccaacctgttcctgctcatctcctccatcctggggtctcgcaccgctggcccccacacccagttcgtgcagtggttcatggaggagtgtgtggactgcctggaacagggtggccgtggcagcgtcctgcagttcatgcccttcaccaccgtgtcggaactggtgaaggtgtcagccatgtccagccccaaggtggttctgcccatcacggacctcagcctgcccctgggccgccaggtggctgctaaagccattgctgcactctgaggggcttggcatggccgcagtgggggctggggactggcgcagccccaggcgcctccaagggaagcagtgaggaaagatgaggcatcgtgcctcacatccgctccacatggtgcaagagcctctagcggcttccagttccccgctcctgactcctgacctccaggatgtctcccggtttcttctttcaaaatttcctctccatctgctggcacctgaggagtgtgagcaacctggaccacaagcccagtggtcacccctgtgtgcgcccgccccagcccaggagtagtcttacctctgaggaactttctagatgcaaagtgtgtatatgtgtgtgtgtgtgtgtgtgtgtgtgtgtgtgtgtttatgtgtattttgtaatatgtgagggaaatctaccttcgttcatgtataaataaagctcctcgtggc

SEQ ID NO: 14134 - protein, 976 aa, Homo sapiens [sequence omitted]

SEQ ID NO: 14135 - DNA, 3089 bp, Homo sapiens
  CDS (84)..(2969)
aagaaggcggcgggggaagatggcggtcctggggtagagtttgcaagctttctgactaggctagtcgagtaactattcgggtcatggcgtcaaactcaactaagtctttcctggcagatgccggctatggcgaacaggaactggatgccaactctgcccttatggaattggacaaaggcctaagatctggcaaacttggtgaacagtgtgaagcagttgttcgctttcccagactttttcagaagtatccattccctattcttatcaattctgcattcctaaagttagctgatgttttcagagttggaaataatttcctgaggctatgtgttcttaaagttacccaacaaagtgagaaacatttggagaagattctaaatgtggatgaatttgtgaagagaattttttctgtgattcatagtaatgatcctgtggcaagagccatcaccctccggatgttgggaagtctggcatcaataattcctgagaggaagaatgctcatcatagtattcgtcagagtttagattcacatgataatgtagaagttgaagctgctgtttttgctgctgcaaacttctctgcacagtcaaaggattttgctgtaggaatctgtaacaaaatcagtgaaatgattcaaggtttagcgacaccagtagacttgaagctaaaattgatacccattctacagcacatgcaccatgatgcaatcttggcttccagtgctcgtcagcttttacaacagctggtcacatcctatccgtccaccaaaatggtgattgtgtctttgcacactttcactctgcttgcagcgtcatctttggttgatacacctaagcagattcagcttctgttgcagtatttgaagaatgatcccaggaaggcagtaaagagacttgctattcaagatctgaaattacttgctaataaaacaccacatacttggagtagggagaatattcaggcactttgtgagtgtgccctccagactccttatgacagcttaaaactagggatgttgtctgtcctttccacactatcagggaccatcgccatcaaacattacttcagtatagttccaggaaatgtgagttcttctcccagatcttctgatttagtcaaattagcccaagagtgctgttaccataataacaggggcattgcagctcatggagttagagtcctaactaatataactgtttcttgtcaagaaaaggatcttttggcactggaacaagatgctgtctttggcctggaatccctactggtactttgtagtcaagatgatagtccaggtgctcaggccactttaaagattgctctaaactgtatggtgaagttggccaagggcaggccccatcttagccagtcagtagttgagaccttgttgactcaattgcacagtgctcaagacgctgcccggattttgatgtgccactgcctggcagccattgccatgcaactgccggtgctgggtgatgggatgcttggtgacctcatggagctgtacaaggtgattggacgatcagccacagacaagcaacaagaacttctggtgagtttggctactgtgatttttgttgcaagtcagaaggcattgtctgtggaaagtaaggcagtaattaagcagcagcttgaaagtgtctccaatggatggactgtataccgtattgccagacaggcttccagaatgggtaatcatgacatggccaaagagctttatcagagtttgctgactcaggttgcctcagaacatttctacttctggctaaatagtttgaaggagttttcacatgcagaacagtgtctcactgggttgcaagaggaaaattatagttcagcactttcttgcattgctgaatctttaaaattctatcacaaagggattgcttccttaacagcagctagtacaccactgaatcctttaagctttcagtgtgaatttgtaaaactcaggattgaccttttacaagccttctctcaacttatctgtacttgtaatagcctgaagacaagcccaccacctgcaattgccacaacaattgccatgaccttaggaaatgacctccagaggtgtggtcgcatctccaatcagatgaaacagtccatggaagaatttcgaagccttgcttctcgatatggagatctttaccaggcatcttttgatgctgactcagcaactttgaggaatgttgaactacagcagcagagctgtttactgatatctcatgcaatagaagccctgattttggatccagaatcagcaagtttccaggaatatggatctactggaacagcccatgctgatagtgaatatgaaagaagaatgatgtctgtatataatcatgtcttggaggaggtagaatcactcaatcggaaatatacccctgtttcttatatgcacacagcatgcctctgcaatgccatcattgctttgctgaaagttcccctttctttccagagatattttttccagaaactacagtctaccagcatcaagcttgctctgtcaccatcgccccggaatcctgcagagcccattgctgtccagaataaccagcagctggcgctaaaggtagagggagtggttcagcacggatctaaaccaggactcttccgcaaaattcagtctgtctgtctgaatgtttcttccacactgcagagtaaatctggacaagactacaagatacccattgacaacatgaccaatgagatggagcaaagggttgaacctcataatgattacttcagtactcaatttctgttgaactttgctatccttggaacacacaacattacagtggaatcttctgtgaaagatgccaatggtatagtatggaagactggtcccagaactaccatatttgtaaaatccctggaagacccttattcccagcaaattcgcttacaacagcagcaagcccagcagccattacagcagcagcagcaacgcaatgcctacacacggttttaaccatggaatgaatgcactgcagactctcaagagatcaatcaaattgccagaaacagtttggtttttcatatggaataagtattaaagttacagtgtagttcaaaaaaaaaaaaaata

SEQ ID NO: 14136 - protein, 962 aa, Homo sapiens; identical to SEQ ID NO: 11985

SEQ ID NO: 14137 - DNA, 1920 bp, Homo sapiens
  CDS (24)..(809)
acaatcctttgcggtggttcaagatggcggcgcccagtggcactgtgagcgattcggaaagtagtaacagcagtagcgatgcggaggagctggagcggtgccgcgaggcggcaatgccggcttggggcttggagcaacgcccgcacgtggcagggaagccaagagccggtgctgcaaatagccagttgtcaacctcccaaccgagcctcaggcataaggtgaatgagcatgaacaagatggcaacgagcttcagaccacccctgaattccgagcccacgtagccaagaagctgggagccctgctggacagcttcattaccatctcagaagcagcaaaggagccagcaaaagctaaggtacagaaagtcgctttggaggatgatggtttccgccttttcttcacatctgtccctggaggccgtgagaaggaagagtctccccaaccccgccgaaagcgacagccctccagctccagtgaggacagtgacgaggagtggcggcggtgccgggaggcagctgtgtcggcgtccgacatcctacaggagtcagccatccacagccctggaactgtggagaaggaggcaaagaagaaaaggaagttgaaaaagaaagccaagaaggtggccagtgtcgactcggctgtcgctgccaccacccccaccagcatggccacagtccagaagcagaagtcaggtgagctcaacggggaccaggtgtcgcttgggaccaaaaagaagaaaaaggcaaagaaggccagcgagacctctccattcccaccagcaaagagtgctacagctatacctgcaaactgaacccagccatgggcacagggctcagccagctccaaggacaaggtgtcccccccaccctggggacaaggcatttccaagccccacctccctctccaagttcaaggactgggctggcaaacccagactgcccatgagaccctgatggtgatgaaggcttgctcgagagttgggccaaaaaagtggctgtagggtgagaagaccaatcaaggcctgcccctctgtgctcccacggagggctggcgggggcgctgtggttccagaacatttcatgacctcaggaaaaaaggaaccttccagttatttgagactagtggccaagtggtgaaacctccatctccctagaactgtctgaggtgggcaggggaagggagaccttccccaccacctccttagcctggtgtgagaaacagtttttagaaaatgagagaagggatccccaagaggccaaggcccagagaaacttttgttcttctctccttggcccacatagacttcacagaatcgtctgagaaaggagagctttttcacccctggctttctagaattttctttgtctgcatttgtgaatataccacacatgatggtgtctctgagccgaccagattatggaaactcaattgtcagaggacccaaaacaaaacttagagtgatttggatattgcctctctgtcaatgctgaaccttaagacattttaagtaaacatcctcctcctctctacacccccaggatttgtgcgttcaccccacccaagacttcaggaagtgtcatagcactcgtggactaggtttcatgggacaaaggcattctgcaagaagtagaagcttgtggccgggtgcagtggctcatgcctgtaatccaagcattttgagaggccaaggaggtggatcaattgaggccaggagtttgagaccagcctggccaacatggcgagaccccatctctactaaaaatacaaaaattagctgagcatgttgacacacgcccgtaatcccagctactcaggaggctgaggtgggagaatcgcttgaacccaggaggtgcaggttgcagtgagccgagattgcgccactgcactctagcctaagcaatggagcaagaccctatctc

SEQ ID NO: 14138 - protein, 262 aa, Homo sapiens
MAAPSGTVSDSESSNSSSDAEELERCREAAMPAWGLEQRPHVAGKPRAGAANSQLSTSQPSLRHKVNEHEQDGNELQTTPEFRAHVAKKLGALLDSFITISEAAKEPAKAKVQKVALEDDGFRLFFTSVPGGREKEESPQPRRKRQPSSSSEDSDEEWRRCREAAVSASDILQESAIHSPGTVEKEAKKKRKLKKKAKKVASVDSAVAATTPTSMATVQKQKSGELNGDQVSLGTKKKKKAKKASETSPFPPAKSATAIPAN

SEQ ID NO: 14139 - DNA, 4349 bp, Homo sapiens
  CDS (47)..(4249)
agagccgcgggtgagatccccagccctgtgagcctgtaggagtagaatggctccccaaatgtatgagttccatctgccattatccccagaggagttgttgaaaagtggaggggtgaatcagtatgttgtgcaagaggtactgtccatcaaacatcttccaccacagcttagagcttttcaggctgcctttcgagctcaggggcccctggctatgctgcagcactttgatactatctacagcattttgcatcactttcgaagtatagatcctggcctcaaagaagatactctggaattcctgataaaagtggtatcccgccactcccaggagcttccagctatcctggatgatacaactttgagtggatcagatagaaacgcccatctaaatgccctcaaaatgaactgttatgctctgatacgtctcctggaatcctttgagaccatggccagccagacaaaccttgtggacctggaccttggtgggaagggtaagaaagctcggaccaaggcagcccatggctttgactgggaagaagagaggcaaccaattcttcagcttttaacacagctacttcagttggacatccgtcacctgtggaaccactcaataattgaagaagaatttgtcagtttggttactggctgttgctaccgccttctggagaatcccaccattaatcaccagaagaaccgccccactcgggaagccataacacacctgcttggtgtagccttgacccgttataaccatatgctcagtgctacagtgaagatcatccagatgctgcagcactttgaacacctggcacctgtactggttgcagccgtgagtctatgggcaactgactatggaatgaagagcatagtgggagagattgtaagagagattggacaaaagtgtccccaagagctgagtcgagacccttcagggacaaagggctttgcagcattcctgacagaactagcagaacgtgtcccagctatcctgatgtccagcatgcgcattttgctagatcacctggatggagaaaattacatgatgcgtaatgctgtgctggcagccatggcggagatggtgctgcaggttctcagtggcgatcaactggaagcagcagcccgagacaccagagaccagttcttggatactttacaagcccatggccatgatgtcaactcctttgtgcggagccgtgttttgcagctcttcacccgaattgtccagcagaaggctctccccctgacacgtttccaggcagtggtggctttagctgtgggacgtctggcagacaagtcagtgctagtatgtaaaaatgccatccagctgctggccagttttctagccaataatcctttctcctgcaagcttagtgatgctgaccttgccggaccactgcagaaggagacccagaaattacaagagatgagggcccagaggcgaactgcagcagcttctgcagtgctggacccagaggaggagtgggaagccatgctgccagagttgaagtctaccctgcagcagcttctacagcttccccagggagaggaggagattcctgagcaaattgccaatacagagacaactgaagatgtgaaaggacgcatctatcaactgcttgccaaagctagttacaaaaaggccatcattctcactcgagaagccacaggccacttccaggagtccgaacccttcagtcatatagacccagaggagtcagaggagaccaggctcttgaatatcttaggacttatcttcaaaggcccagcagcttccacacaagaaaagaatccccgggagtctacaggaaacatggtcacaggacagactgtctgtaaaaataaacccaatatgtcggatcctgaggaatccaggggaaatgatgaactagtgaagcaggagatgctggtacagtatctgcaggatgcctacagcttctcccggaagattacagaggccattggcataatcagcaagatgatgtatgaaaacacaactacagtggtgcaggaggtgattgaattctttgtgatggtcttccaatttggggtaccccaggccctgtttggggtgcgccgtatgctgcctctcatctggtctaaggagcctggtgtccgggaagccgtgcttaatgcctaccgccaactctacctcaaccccaaaggggactctgccagagccaaggcccaggctttgattcagaatctctctctgctgctagtggatgcctcggttgggaccattcagtgtcttgaggaaattctctgtgagtttgtgcagaaggatgagttgaaaccagcagtgacccagctgctgtgggagcgggccaccgagaaggtcgcctgctgtcctctggagcgctgttcctctgtcatgcttcttggcatgatggcacgaggaaagccagaaattgtgggaagcaatttagacacactggtgagcatagggctggatgagaagtttccacaggactacaggctggcccagcaggtgtgccatgccattgccaacatctcggacaggagaaagacttctctgggcaaacgtcacccccccttccggctgcctcaggaacacaggttgtttgagcgactgcgggagacagtcacaaaaggctttgtccacccagacccactctggatcccattcaaagaggtggcagtgaccctcatttaccaactggcagagggccccgaagtgatctgtgcccagatattgcagggctgtgcaaaacaggccctggagaagctagaagagaagagaaccagtcaggaggacccgaaggagtcccccgcaatgctccccactttcctgttgatgaacctgctgtccctggctggggatgtggctctgcagcagctggtccacttggagcaggcagtgggtggagagctctgccggcgccgagttctccgggaagaactggagcacaagaccaaagatcccaaggagaagaatacgagctctgagaccaccatggaggaggagctggggctggttggggcaacagcagatgacacagaggcagaactaatccgtggcatctgcgagatggaactgttggatggcaaacagacactggctgcctttgttccactcttgcttaaagtctgtaacaacccaggcctctatagcaacccagacctctctgcagctgcttcacttgcccttggcaagttctgcatgatcagtgccactttctgcgactcccagcttcgtcttctgttcaccatgctggaaaagtctccacttcccattgtccggtctaacctcatggttgccactggggatctggccatccgctttcccaatctggtggacccctggactcctcatctgtatgctcgcctccgggaccctgctcagcaagtgcggaaaacagcggggctggtgatgacccacctgatcctcaaggacatggtgaaggtgaaggggcaggtcagcgagatggcggtgctgctcatcgaccccgagcctcagattgctgccctggccaagaacttcttcaatgagctctcccacaagggcaatgcaatctataatctccttccagatatcatcagccgcctgtcagaccccgagctgggggtggaggaagagcctttccacaccatcatgaaacagctcctctcctacatcaccaaggacaagcagacagagagcctggtggaaaagctgtgtcagcggttccgcacatcccgaactgagcggcagcagcgagacctggcctactgtgtgtcacagctgcccctcacagagcgaggcctccgtaagatgcttgacaattttgactgttttggagacaaactgtcagatgagtccatcttcagtgcttttttgtcagttgtgggcaagctgcgacgtggggccaagcctgagggcaaggctataatagatgaatttgagcagaagcttcgggcctgtcataccagaggtttggatggaatcaaggagcttgagattggccaagcaggtagccagagagcgccatcagccaagaaaccatccactggttctaggtaccagcctctggcttctacagcctcagacaatgactttgtcacaccagagccccgccgtactacccgtcggcatccaaacacccagcagcgagcttccaaaaagaaacccaaagttgtcttctcaagtgatgagtccagtgaggaagatctttcagcagagatgacagaagacgagacacccaagaaaacaactcccattctcagagcatcggctcgcaggcacagatcctaggaagtctgttcctgtcctccctgtgcagggtatcctgtagggtgacctggaattcgaattctgtttcccttgtaaaatatttgtctgtctctttttt

SEQ ID NO: 14140 - protein, 1401 aa, Homo sapiens [sequence omitted]

SEQ ID NO: 14141 - DNA, 3227 bp, Homo sapiens
  CDS (97)..(3141)
atagaagactcctcggagagcgctgcctctgggttggcgggctggcaggctgtagccgagcgcgggcaggactcgtcccggcagggttccagagccatgggagcggaaaggaggctgctgtcgattaaggaggcctttcggctggcgcagcagccgcaccagaaccaggcgaagctggtggtggcgctgagccgcacctaccgcacgatggatgataagacagtttttcatgaggagttcattcattaccttaaatatgttatggtggtctataaacgtgaaccagctgtggagagggtaatagaatttgcagcaaagtttgttacctcatttcaccaatcagatatggaagatgatgaggaagaggaagatggtggccttttaaattatttgtttacttttctcttaaagtctcatgaagcaaacagcaatgcagtgggatttagagtgtgcctgctcataaacaagcttttgggaagtatgccagaaaatgctcagattgatgatgatgtgtttgataaaattaataaagccatgcttattagattgaaagataagattccaaatgtgagaatacaggcagttctggcgctttcacgacttcaggatcccaaggatgatgaatgcccagtggttaatgcatatgctactttgattgaaaatgattcaaatccagaagttagacgggcagtgttatcatgtattgcaccatcagcaaagactttgccaaaaattgtagggcgcaccaaggatgtgaaagaggctgtcagaaagctggcttatcaggttttagctgaaaaggttcatatgagagctatgtccattgctcagagagtaatgctccttcaacaaggtcttaatgacagatcagacgctgtgaaacaagctatgcagaagcatcttcttcaaggctggttacggttctctgaaggaaatatcttagagttgctccatcggttggatgtagaaaattcttctgaagtggcagtctctgttctcaatgccttgttttcaataactcctctcagtgaactggtgggactctgtaaaaacaatgatggcaggaaattgattccagtggaaacattaactcctgaaattgctttgtattggtgtgccctttgtgaatatttgaaatcaaaaggagatgaaggtgaagaatttttagagcagattttgccagagcctgtagtatatgcagactatttattgagttacatccagagcattccagttgttaatgaagaacacagaggtgatttttcctatattggaaatttgatgacaaaagaattcataggtcaacaattgattctaattattaagtctttggataccagtgaagaaggaggaagaaaaaaactgctggctgttttacaggagattcttattttacccacaatcccaatatccctggtttcttttcttgttgaaagactactccacatcattatagatgataataagagaacacaaattgttacagaaattatctcagagattcgagcgcccattgttactgttggtgttaataacgatccagctgatgtaagaaagaaagaactcaagatggctgaaataaaagttaagcttatcgaagccaaagaagctttggaaaattgcattaccttacaggattttaatcgggcatcagaattaaaagaagaaataaaagcattagaagatgccagaataaaccttttgaaagagacagagcaacttgaaattaaagaagtccacatagagaagaatgatgctgaaacattgcagaaatgtcttattttatgctatgaactgttgaagcagatgtccatttcaacaggcttaagtgcaaccatgaatggaatcatcgaatctttgattcttcctggaataataagtattcatcctgttgtaagaaacctggctgttttatgcttgggatgctgtggactacagaatcaggattttgcaaggaaacacttcgtattactattgcaggttttgcaaattgatgatgtcacaataaaaataagtgctttaaaggcaatctttgaccaactgatgacgttcgggattgaaccatttaaaactaaaaaaatcaaaacacttcattgtgaaggtacagaaataaacagtgatgttgagcaagaatcaagagaagttgaagagactgctacagctaagaatgttctgaaactcctttctgatttcttagatagtgaggcatctgaacttaggactggagctgcagaaggactagccaagctgatgttctctgggcttttggtcagcagcaggattctttctcgtcttattttgttatggtacaatcctgtgactgaagaggatgttcaacttcgacattgcctaggcgtgttcttccccgtgtttgcttatgcaagcaggactaatcaggaatgctttgaagaagcttttcttccaaccctgcaaacactggccaatgcccctgcatcttctcctttagctgaaattgatatcacaaatgttgctgagttacttgtagatttgacaagaccaagtggattaaatcctcaggccaagacttcccaagattatcaggccttaacagtacatgacaatttggctatgaaaatttgcaatgagatcttaacaagtccgtgctcgccagaaattcgagtctatacaaaagccttgagttctttagaactcagtagccatcttgcaaaagatcttctggttctattgaatgagattctggagcaagtaaaagataggacatgtctgagagctttggagaaaatcaagattcagttagaaaaaggaaataaagaatttggtgaccaagctgaagcagcacaggatgccaccttgactacaactactttccaaaatgaagatgaaaagaataaagaagtatatatgactccactcaggggtgtaaaagcaacccaagcatcaaagtctactcagctaaagactaacagaggacagagaaaagtgacagtttcagctaggacgaacaggaggtgtcagactgctgaagccgactctgaaagtgatcatgaagttccagaaccagaatcagaaatgaagatgagactaccaagacgagccaaaaccgcagcactagaaaaaagtaaacttaaccttgcccaatttctcaatgaagatctaagttaggaaagacgatggaggtggaatcctttaagattatgtccagttatttgctttaataaagaagaagttacccttgtcaaaatcag

SEQ ID NO: 14142 - protein, 1015 aa, Homo sapiens
MGAERRLLSIKEAFRLAQQPHQNQAKLVVALSRTYRTMDDKTVFHEEFIHYLKYVMVVYKREPAVERVIEFAAKFVTSFHQSDMEDDEEEEDGGLLNYLFTFLLKSHEANSNAVGFRVCLLINKLLGSMPENAQIDDDVFDKINKAMLIRLKDKIPNVRIQAVLALSRLQDPKDDECPVVNAYATLIENDSNPEVRRAVLSCIAPSAKTLPKIVGRTKDVKEAVRKLAYQVLAEKVHMRAMSIAQRVMLLQQGLNDRSDAVKQAMQKHLLQGWLRFSEGNILELLHRLDVENSSEVAVSVLNALFSITPLSELVGLCKNNDGRKLIPVETLTPEIALYWCALCEYLKSKGDEGEEFLEQILPEPVVYADYLLSYIQSIPVVNEEHRGDFSYIGNLMTKEFIGQQLILIIKSLDTSEEGGRKKLLAVLQEILILPTIPISLVSFLVERLLHIIIDDNKRTQIVTEIISEIRAPIVTVGVNNDPADVRKKELKMAEIKVKLIEAKEALENCITLQDFNRASELKEEIKALEDARINLLKETEQLEIKEVHIEKNDAETLQKCLILCYELLKQMSISTGLSATMNGIIESLILPGIISIHPVVRNLAVLCLGCCGLQNQDFARKHFVLLLQVLQIDDVTIKISALKAIFDQLMTFGIEPFKTKKIKTLHCEGTEINSDVEQESREVEETATAKNVLKLLSDFLDSEASELRTGAAEGLAKLMFSGLLVSSRILSRLILLWYNPVTEEDVQLRHCLGVFFPVFAYASRTNQECFEEAFLPTLQTLANAPASSPLAEIDITNVAELLVDLTRPSGLNPQAKTSQDYQALTVHDNLAMKICNEILTSPCSPEIRVYTKALSSLELSSHLAKDLLVLLNEILEQVKDRTCLRALEKIKIQLEKGNKEFGDQAEAAQDATLTTTTFQNEDEKNKEVYMTPLRGVKATQASKSTQLKTNRGQRKVTVSARTNRRCQTAEADSESDHEVPEPESEMKMRLPRRAKTAALEKSKLNLAQFLNEDLS

SEQ ID NO: 14143 - DNA, 1599 bp, Homo sapiens
  CDS (156)..(623)
agtagccgcctctgccgccgcggagcttcccgaacctcttcagccgcccggagccgctcccggagcccggccgtagaggctgcaatcgcagccgggagcccgcagcccgcgccccgagcccgccgccgcccttcgagggcgccccaggccgcgccatggtgaaggtgacgttcaactccgctctggcccagaaggaggccaagaaggacgagcccaagagcggcgaggaggcgctcatcatcccccccgacgccgtcgcggtggactgcaaggacccagatgatgtggtaccagttggccaaagaagagcctggtgttggtgcatgtgctttggactagcatttatgcttgcaggtgttattctaggaggagcatacttgtacaaatattttgcacttcaaccagatgacgtgtactactgtggaataaagtacatcaaagatgatgtcatcttaaatgagccctctgcagatgccccagctgctctctaccagacaattgaagaaaatattaaaatctttgagaagaagaagttgaatttatcagtgtgcctgtcccagagtttgcagatagtgatcctgccaacattgttcatgactttaacaagaaacttacagcctatttagatcttaacctggataagtgctatgtgatccctctgaacacttccattgttatgccacccagaaacctactggagttacttattaacatcaaggctggaacctatttgcctcagtcctatctgattcatgagcacatggttattactgatcgcattgaaaacattgatcacctgggtttctttatttatcgactgtgtcatgacaaggaaacttacaaactgcaacgcagagaaactattaaaggtattcagaaacgtgaagccagcaattgtttcgcaattcggcattttgaaaacaaatttgccgtggaaactttaatttgttcttgaacagtcaagaaaaacattattgaggaaaattaatatcacagcataaccccaccctttacattttgtgcagtgattattttttaaagtcttctttcatgtaagtagcaaacagggctttactatcttttcatctcattaattcaattaaaaccattaccttaaaatttttttctttcgaagtgtggtgtcttttatatttgaattagtaactgtatgaagtcatagataatagtacatgtcaccttaggtagtaggaagaattacaatttctttaaatcatttatctggatttttatgttttattagcattttcaagaagacggattatctagagaataatcatatatatgcatacgtaaaaatggaccacagtgacttatttgtagttgttagttgccctgctacctagtttgttagtgcatttgagcacacattttaattttcctctaattaaaatgtgcagtattttcaatgtcaaatatatttaactatttagagaatgatttccacctttatgttttaatatcctaggcatctgctgtaataatattttagaaaatgtttggaatttaagaaataacttgtgttactaatttgtataacccatatctgtgcaatggaatataaatatcacaaagttgttt

SEQ ID NO: 14144 - protein, 156 aa, Homo sapiens
MVKVTFNSALAQKEAKKDEPKSGEEALIIPPDAVAVDCKDPDDVVPVGQRRAWCWCMCFGLAFMLAGVILGGAYLYKYFALQPDDVYYCGIKYIKDDVILNEPSADAPAALYQTIEENIKIFEKKKLNLSVCLSQSLQIVILPTLFMTLTRNLQPI

SEQ ID NO: 14145 - DNA, 3285 bp, Homo sapiens
aagagctgctccggccgcggccctgggagctggaggaaccgcgtctgggcccgcaggcaagccgcttcttgccctctgcccggagctctcccgcatcctccccagagctgccctggcgacctcgaggtctcctcaaccttccccgaagccgctcacagccttgtgatctggatgcccgcaaaactggggtcaagcggcgccacgaggaagacccccggcgtctgcggccttcgttggactttgacaagatgaatcagaaaccatactcaggaggtctttgtctccaagaaacagcccgggaaggcagcagcatctctccaccatggttcatggcctgtagccccccacccctctctgcttcctgcagccccactgggggttcctcccaggtgctgagtgaaagcgaagaggaggaggagggggctgtgcggtggggtcggcaggcgctgagcaagcggacactgtgccagcgggactttggggacctggacttgaatttgattgaggaaaactaaaactgagaggctacttcctggggccacacagactgactctctcatggctactaacaagtgtcgaggccccaaggctgggggccgagcctgggaatgggggtgagtggagggctccgactcagggcagctggaaatcttctcgctccagcaagctcgaccatgccaagagactggccgggacaagataaacggagctggtggcgggagggacagccccagagcagacccttcctatggcggccctgagtgtgagtatccctgccaccaagagagcaatgggcagggaaggaaggggtctgccgaccccagctcggggaatttcactagcccctttgcttcaaagggcacttgtgtcttagaatttggccagggtggggggttgagtcagcctcctcagagaaactgcgtgagagtgtgtgcgtgcatgggagtgtacttgtggaaaggtgtgtttgcgtagccttagggaaggaaggcaattgctccttaacagcagagtatcatgatacccccaggatcttgagttttttacaggatgttgggtttgctcaaggagtcaagaggagggcaccaagttttccttttttctaaatagctctggaaccaggcttgtaatccatagcatcaccgactctgcaaaggatttcattttggggcacagcagggtgttttaagtgctgtgacttcagctaatgatcttttcttcagccccaccccctccccactagctcgatctagtatattggggtatgcaggtggggggtgtcaccatattttttctgagctggcctttttttctcatcagattgtccaggctatattccacctgcctcttttgccctcttgagtagagttgcacacagcacatgggcaactgaagcagggttgaggggctctatctctctctctcctctgctgatgggacccttttcccctcaccctctgcccttctaagtcatagactaggtaggagggccctatattggtccccagcatctactgaggcagacctgcaacagaagtggcattcagtccccagcagacatgggtgagctcaccccagcactgctgttgggaaggtgactgcaggaaaccaattcttacaagatccaggcccagcctttttgacctgcttgagagggaagaaggggtgtttagcatttaatagtttgcttgtcttccactcctgccaggaagtgtttatttgcctctaattgggcctgagagaccatagggaggttggggctcactgagggattggctgaggatgtataaagcaaaggctgtgagaagcagttgggagtttggttgtcattggattgaatttacttttttgtttctcacccgcaacttgagccaggacagctggtccaagtggccacagtgatgggtttaagtaccttggtagggctggcaccagtggaaacacatactgaagctgccaccacaatagcttgtgaggttttatccagctttggttagaccctgcatgaccaaatttgacctgcccttgtttatggcaagaagggcatttttctcttcaatttccagggtttcctaggacccagttcctcatgtaagggaggaagaccaaggtctttgtgttttcttcctcatggaattgaacctgacattttctggatctcctgcatgtcaggagcatcagtgaggcttcagcctccttgtctccactccagagaggaggtggctatgtcttcttaagcctctggccctcagaggctcctccctatctcctggctagttaccactaggctaccaggtctctaggggcctgagagaggccctctagagaatccagggaaactgtgagcccaggagttgcccatctacggtttcattcctcccctggctcttctccctcttcaggccataatttccctggtgccaatttcttttcctcctggggcatcctcatcccagggctctctgctgtagattggctgtgccagcttccaacaggttactggcaatgccagtgagtttctgtaggccctaagctgaagaagtgaggcagtgattctgcctccatcctggtttccccaaagccccagggcaccatccttaagggagaaggtctacagttatcattattttaattccattactttcagtctggaaaactaagctagtcagaactgtcatcttgcttcccaatctaagaacctgtggccctggaacacttttcaagaattggttcattttgctttacacagtagatctgttccaacagttctgtgtaaaccaaatgctatttttcaatgcatttggactgctgaccatttaaaagcagcctatgattgcttctttttgtaaagcaagcaacctccctccactttagctgttttgactatttgaattttcacatattgggcttacccagagtggagcacacctccagggcatgtggctgacactgggtcaatgtctgcatctgtgctgtgtgtgtagtgtggttggccagtaggtgagtatccctgtgtgtgtgagtgaagccactccccaggctggtgctctcctcctgggcccagtgactgcccagtggcagctcagctgcccttcactcccacctgctgccaaagtccctgtgctaatgggattacaaatacaaaaagtggaaaaaaattttcgtaaactttgttttatattaaaagaaaaatccataagtctgtgtgtgttaaacatgaggttctgcctctgtggctgtgtttgaaaaaataaagttttattagaataatccattttcccaagc

SEQ ID NO: 14146 - DNA, 1007 bp, Homo sapiens
  CDS (325)..(744)
aactatgttgctgctggagatcaatgaagccgagtggatgggggctgaatgtgcgagtccatagctgaagaggagcgccagatggtggaggaatacacttatttatgaagtggacttagtagttttaagcagaaccatgaaaacctctgtgacaactccctccagctccaagagtgccgggaggtggggggcggcgcatccgcggcctcgagcttgctacctcagcccatccccaccacccctgacatcgagaacgctgagctcacccccatcttgcccttcctgttccttggcaatgagcaggatgctcaggacctggacaccatgcagcggctgaacatcggctacgtcatcaacgtcaccactcatcttcccctctaccactatgagaaaggcctgttcaactacaagcggctgccagccactgacagcaacaagcagaacctgcggcagtactttgaagaggcttttgagttcattgaggaagctcaccagtgtgggaaggggcttctcatccactgccaggctggggtgtcccgctccgccaccatcgtcatcgcttacttgatgaagcacactcggatgaccatgactgatgcttataaatttgtcaaaggcaaacgaccaattatctccccaaaccttaacttcatggggcagttgctagagttcgaggaagacctaaacaacggtgtgacaccgagaatccttacaccaaagctgatgggcgtggagacggttgtgtgacaatggtctggatggaaaggattgctgctctccattaggagacaatgaggaaggaggatggattctggttttttttctttctttttttttgtagctgggagtaagtttgtgaatggaaacaaacttgtttaaacactttacttttaacaagtgtaagaagactataacttttgatgccattgagattcacctcccacaaactgacaaattaaggaggttaaagaagtaatttttttaagccaacaataaaaatataatac

SEQ ID NO: 14147 - protein, 140 aa, Homo sapiens
MQRLNIGYVINVTTHLPLYHYEKGLFNYKRLPATDSNKQNLRQYFEEAFEFIEEAHQCGKGLLIHCQAGVSRSATIVIAYLMKHTRMTMTDAYKFVKGKRPIISPNLNFMGQLLEFEEDLNNGVTPRILTPKLMGVETVV

SEQ ID NO: 14148 - DNA, 966 bp, Homo sapiens
  CDS (133)..(822)
ctccaggctgccgagacctataaaggcgccaggttttctcaatgaagccgggacgcactccggagcgcactgcgtggtcgcaccctacccgggctgccttggaagtcgtccccgccgcccctccgcaccggcatgaagcttatcgtgggcatcggaggcatgaccaacggcggcaagaccacgctgaccaacagcctgctcagagccctgcccaactgctgcgtgatccatcaggatgacttcttcaagccccaagaccaaatagcagttggggaagacggcttcaaacagtgggacgtgctggagtctctggacatggaggccatgctggacaccgtgcaggcctggctgagcagcccgcagaagtttgcccgtgcccacggggtcagcgtccagccagaggcctcggacacccacatcctcctcctggaaggcttcctgctctacagctacaagcccctggtggacttgtacagccgccggtacttcctgaccgtcccgtatgaagagtgcaagtggaggagaagtacccgcaactacacagtccctgatccccccggcctcttcgatggccacgtgtggcccatgtaccagaagtataggcaggagatggaggccaacggtgtggaagtggtctacctggacggcatgaagtcccgagaggagctcttccgtgaagtcctggaagacattcagaactcgctgctgaaccgctcccaggaatcagccccctccccggctcgcccagccaggacacagggacccggacgcggatgcggccacagaacggccaggcctgcagcgtcccagcaggacagcatgtgagcgtttccctatgggggtgtctgtacgtaggagagtggaggccccactcccagttgggcgtcccggagctcagggactgagccccaagacgcctctgtaacctcgctgcagcttcagtagtaaactgggtcctgttttttt

SEQ ID NO: 14149 - protein, 230 aa, Homo sapiens; identical to SEQ ID NO: 12144

SEQ ID NO: 14150 - DNA, 3237 bp, Homo sapiens
  CDS (76)..(2712)
tactggatccggtctccgttttggaagacccgcctcggcacagccaggctcagtccggccttgcgctgagaaaagatgacagcaatcaagcatgcattacaaagagacatttttacaccaaatgatgaacgcctgctgagcattgtgaatgtctgcaaagcaggaaaaaagaaaaagaactgttttttatgtgccacagtgacaactgaacgccctgtgcaggttaaggtggtcaaagtcaagaaatccgataagggagatttctacaaaaggcagattgcatgggcccttcgaggtcttgctgtggtagatgccaaagatgctatcaaagaaaatcctgaatttgatttacactttgaaaaaatatataaatgggttgccagcagcactgctgaaaagaatgcatttatttcatgcatttggaaattgaatcagcgatatctccggaagaaaattgattttgtcaatgttagctcacagcttttggaagaatctgttccaagtggagaaaatcagagtgtgacaggaggtgatgaagaagtagtagatgaataccaagagttaaatgcaagagaagaacaggatatcgaaataatgatggaaggctgtgaatatgcaatctcgaatgcggaagcctttgcagaaaaattgtccagagagctgcaggtgctagatggggctaacatccagtcaatcatggcatctgaaaaacaagtcaacatcctgatgaaattgctagatgaggctctaaaggaggtagatcagattgaattgaaactgagcagttatgaggaaatgctccaaagtgtaaaagaacaaatggatcagatctctgaaagcaaccacctaattcatcttagtaacactaataatgtaaaactcctatctgagatagagttccttgtgaaccacatggacttggccaaaggtcatataaaggcccttcaggaaggagatcttgcttcttccaggggcattgaggcctgcaccaatgctgctgatgcccttctgcagtgcatgaatgtagctcttcgaccaggccatgacttgcttctggcagtcaaacagcaacagcagcgattcagtgatttgcgagagctttttgcccggagactggccagtcacctcaacaatgtttttgttcaacagggtcatgatcagagttcgactcttgcccaacactctgttgaactgactttacccaatcatcatccatttcatagagatttgctccgatatgccaagctgatggagtggctaaagagtacagattatggaaaatatgaaggactaacaaagaattacatggattatttatcccgactatatgaaagagaaatcaaagatttctttgaagttgcaaagatcaagatgactggcacaactaaagaaagcaagaagtttggtcttcatggaagttcggggaaattaactggatctacttctagtctaaataagctcagtgttcagagttcagggaatcgcagatctcagtcatcttccctgttggatatgggaaacatgtctgcctctgatctcgatgttgctgacaggaccaaatttgataagatctttgaacaggtactaagtgaactggagcccctatgtctggcagaacaggacttcataagtaaatttttcaaactacagcaacatcaaagtatgcctggaactatggctgaagcagaggacctggatggaggaacattatcacggcaacataattgtggcacaccactgcctgtttcatctgagaaagatatgatccgccaaatgatgattaaaatatttcgctgcattgagccagagctgaacaacctaattgcattaggagacaaaattgatagctttaactctctttatatgttagtcaaaatgagtcatcatgtgtggactgcacaaaatgtggaccctgcttctttcctaagtactacattgggaaatgttttggtgactgtcaaaaggaactttgacaaatgcattagtaaccaaataaggcaaatggaagaagtaaagatctcaaaaaagagtaaagttggaattcttccatttgttgctgaatttgaagaatttgctggacttgcagaatcaatcttcaaaaatgctgagcgtcgtggagacctggataaagcatacaccaaacttatcagaggagtatttgttaatgtggagaaagtagcaaatgaaagccagaagacccccagggatgtggttatgatggaaaactttcaccatatttttgcaactctttctcgattgaaaatctcatgtctagaagcagaaaaaaaagaagccaaacaaaaatacacagatcaccttcagtcttatgtcatttactctttaggacaacctcttgaaaaactaaatcatttctttgaaggtgttgaagctcgcgtggcacagggcataagggaggaggaagtaagttaccaacttgcatttaacaaacaagaacttcgtaaagtcattaaggagtaccctggaaaggaagtaaaaaaaggtctagataacctctacaagaaagttgataaacatttatgtgaagaagagaacttacttcaggtggtgtggcactccatgcaagatgaatttatacgccagtataagcactttgaaggtttgatagctcgctgttatcctggatctggtgttacaatggaattcactattcaggacattctggattattgttccagcattgcacagtcccactaaaccttgtgaaagaagaaaagataactgaatgaagcatttgagtataacagacactataccaaaataccaagcaactgttttgagaacccagacttaaaattttatgtattattaaatgttagataaatgggtagtaccatactacaaatatttaaatgcaaaattaccaacctatatagcagttttatttgccctataggttgcatactaacttaagcattcatgtcaccataaaatgcctttagcatttctcaatgaccggatgggaaattttcctttattgcctagctgcttgtgtttgagtggttgtcctatgagcaatgcatttggagttcttcagctttcactacttctctgttgcttgctaatcatgtaactactaaaatactgtacaaaattgttttttcacactaacaaatgtgtatatggagaagagggctcatgtgatgatcatttgtgaacttagatttttgaggattatgtgactagtaataaatgtgaaataaattttcaaaaaagttg

SEQ ID NO: 14151 - protein, 879 aa, Homo sapiens [sequence omitted]

SEQ ID NO: 14152 - DNA, 1958 bp, Homo sapiens
  CDS (33)..(1016)
ggggaaaaaaaatatgttttggccgcttcaagatggcggtgcaggagtcggcggctcagttgtccatgaccctgaaggtccaggagtacccgaccctcaaggtgccctacgagacgctgaacaaacgctttcgcgccgctcagaagaacattgaccgggagaccagccacgtcaccatggtggtggccgagctggagaagacgttgagcggctgccccgccgtggactccgtggtcagcctgctggacggcgtggtggagaagctcagcgtcctcaagaggaaggcggtggaatccatccaggccgaggacgagagcgccaagctgtgcaagcgccggatcgagcacctcaaagagcatagcagcgaccagcccgcggcggccagcgtgtggaagaggaagcgcatggatcgcatgatggtggagcacctgctgcgttgcggctactacaacacggctgtcaagctggcgcgccagagcggcatcgggacatgcaagaaggcacttcagccaagcagaagggagccagctggacgaggtgcgccaggccatgggcatgctggccttcccgcccgacacgcacatctccccgtacaaggaccttctgggccctgcacggtggcggatgctgatccagcagttccggtacgacaactaccgactacaccagctgggaaacaattctgtgttcaccctcaccctgcaggctggcctctcagccatcaagacacctgctacaaggaggacggcagctccaagagccctgactgccctgtgtgcagccgctccctgaacaagctggcgcagcccctgcccatggcccactgtgccaactcccgcctggtctgcaagatttctggcgacgtgatgaacgagaacaatccgcccatgatgctgcccaacggctacgtctacggctacaattctctgctttctatccgtcaagatgataaagtcgtgtgcccgagaaccaaagaagtcttccacttctcacaagccgagaaggtgtacatcatgtaggccccacgtcgtgaagcgcacgcctcggggacgggctgcagtgggcggggaggccacgccttcctcctgtcccacgctccagcctgccgcggcgtttctgtttcttgcgaccaaagatccgtgagcaacgataaatactcttaggaagagagaaaataaggtttcataagtttgtacttgaaaacatttggattggtaggattttgtaacacgtcaaccatttgatgcttctgaaaagtactttcaacttgcgaaggaaactcttctttaaagactgacctaaacaccgagggaaacttaagaacgtttaaaatataggagtccgtgatttccctgtgttttcagtttctttccttctgtgaacgatgagacttggagaacgggctggtccttcaccacttcctgttggccctggcctggccggggaaggtggcagcggcaccggactgacctgcagtgacccgcgatgccgcgccacgagggacacttatggcttcattcgagagctgctgccaaaacgcctggcgccgccaccgtcgggggctggcttcgaggacgcccgcctgcctcgcgggtcgtgtccgcgggactgtgttcgtacgtgcatagtttcgatatcacatcgcggggctgtgttcgtagctgcgtcgtttcgatatcacaccctctgtgtgccgccttacttcctgcttcgagaatgtataacgtggaaatccacgggaccaaatttctgcagaggccttgccggatggttccataactgtagagtctaattgctatccattacagaaattaatcgttcagttgaaagaagtactgatgacttttcaaaacaaatgaaccaccgtagctgacagagaaccgtatcgtagaggtttgtagttagtgcttatttttgcatgttgatgttgactagctaataaactgtaaatgtaaacc

SEQ ID NO: 14153 - protein, 328 aa, Homo sapiens [sequence omitted]

SEQ ID NO: 14154 - DNA, 3206 bp, Homo sapiens
  CDS (29)..(2329)
gctggagagggggcgctgagctgttgggatgagctttgatccaaaccttctccacaacaatggacataatgggtaccctaatggtacttcagcagcactgcgtgaaactggggttattgtaaaactgttaacctcttacggatttattcagtgttcagaacgtcaagctagacttttcttccactgttcacagtataatggcaacctgcaagacttaaaagtaggagatgatgttgaatttgaagtatcatcggaccgacggactgggaaacccattgctgttaaactggtgaagataaaacaagaaatcctccctgaagaacgaatgaatggacaagaagtgttttatctgacttacacccctgaagatgtcgaagggaacgttcagctggaaactggagataaaataaactttgtaattgataacaataaacatactggtgctgtaagtgctcgcaacattatgctgttgaaaaagaaacaagcccgctgtcagggagtagtttgtgccatgaaggaggcatttggctttattgaaagaggtgatgttgtaaaagagatattctttcactatagtgaatttaagggtgacttagaaaccttacagcctggcgatgatgtggaattcacaatcaaggacagaaatggtaaagaagttgcaacagatgtcagactattgcctcaaggaacagtcatttttgaagatatcagcattgaacattttgaaggaactgtaaccaaagttatcccaaaagtacccagtaaaaaccagaatgacccattgccaggacgcatcaaagttgactttgtgatccctaaagaacttccctttggagacaaagatacgaaatccaaggtgaccctgctggaaggtgaccatgttaggtttaatatttcaacagaccgacgtgacaaattagagcgagcaaccaatatagaagttctgtcaaatacatttcagttcactaatgaagcccgagaaatgggtgtgattgctgccatgagagatggttttggtttcatcaagtgtgtggatcgtgatgttcgtatgttcttccacttcagtgaaattctggatgggaaccagctccatattgcagatgaagtagagtttactgtggttcctgatatgctctctgctcaaagaaatcatgctattaggattaaaaaacttcccaagggcacggtttcatttcattcccattcagatcaccgttttctgggcacggtagaaaaagaagccactttttccaatcctaaaaccactagcccaaataaaggcaaagagaaggaggctgaggatggcattattgcttatgatgactgtggggtgaaactgactattgcttttcaagccaaggatgtggaaggatctacttctcctcaaataggagataaggttgaatttagtattagtgacaaacagaggcctggacagcaggttgcaacttgtgtgcgacttttaggtcgtaattctaactccaagaggctcttgggttatgtggcaactctgaaggataattttggatttattgaaacagccaatcatgataaggaaatctttttccattacagtgagttctctggtgatgttgatagcctggaactgggggacatggtcgagtatagcttgtccaaaggcaaaggcaacaaagtcagtgcagaaaaagtgaacaaaacacactcagtgaatggcattactgaggaagctgatcccaccatttactctggcaaagtaattcgccccctgaggagtgttgatccaacacagaatgagtaccaaggaatgattgagattgtggaggagggcgatatgaaaggtgaggtctatccatttggcatcgttgggatggccaacaaaggggattgcctgcagaaaggggagagcgtcaagttccaattgtgtgtcctgggccaaaatgcacaaactatggcttacaacatcacacccctgcgcagggccacagtggaatgtgtgaaagatcagtttggcttcattaactatgaagtaggagatagcaagaagctctttttccatgtgaaagaagttcaggatggcattgagctacaggcaggagatgaggtggagttctcagtgattcttaatcagcgcactggcaagtgcagcgcctgtaatgtttggcgagtctgtgagggccccaaggctgttgcagctcctcgacctgatcggttggtcaatcgcttgaagaatatcactctggatgatgccagtgctcctcgcctaatggttcttcgtcagccaaggggaccagataactcaatggggtttggtgcagaaagaaagatccgtcaagctggtgtcattgactaaccacatccacaaagcacaccattaatccactatgatcaagttggggggaatctggtgaagggttctgaatatctccctcttcatccctcccgaaatctggaatacttattctattgagctattacaccagttttaacaccttcctcgtgttatgtttaaaaaaataaataaatttaagaaaaccattttaaataatgcacagttgcagcctggaaaaacttaaggtggcgccttatagtatcaattttaggagctttatttggtgcatttaacgcaactggtaattgcagaatccacttcgcctgtgtaagtgaaaaatatagactgttatcttgttggccctatgaaattctgcacttttcattatatactctaccttcattaattacttctggcaagatgttctgccttagcactcagttgcattcttttcctttttcttcctgttcattatgctttaattctgaggaccatatgagggtagaatatattatcttttaaaaattacaaaaatttgtataggcaaaccatttcttaaagttgatggccaaattttaaaatgttatttttcatatcatttataatcttgtcacaatccacttaaagaagtttggttatatttcagtgaaaattttcttccagagtaggttttttttcgtgggttggggggtaactttactacaattagtaagtatggtgcagaatttcatgcaaatgaggagtgccagcagtgtgataatttaaacatatttaaacaaaaacaaaaaaaatgaatgcacaaacttgctgctgcttagatcactgcagcttctaggacccggtttcttttactgatttaaaaacaaaacaaaaaaaaataaaaaagttgtgcctg

SEQ ID NO: 14155 - protein, 767 aa, Homo sapiens [sequence omitted]

SEQ ID NO: 14156 - DNA, 2123 bp, Homo sapiens
  CDS (25)..(1599)
tagctgatcatgtgacaatccaagatggcggtgcccggcgaggcggaggaggaggcgacagtttacctggtagtgagcggtatcccctccgtgttgcgctcggcccatttacggagctattttagccagttccgagaagagcgcggcggtggcttcctctgtttccactaccggcatcggcctgagcgggcccctccgcaggccgctcctaactctgccctaattcctaccgacccagccgctgagggccagcttctctctcagacttcggccaccgatgtccggcctctctccactcgagactctactccaatccagacccgcacctgctgctgcgtcatctcggtaagggggttggctcaagctcagaggcttattcgcatgtactcgggccgccggtggctggattctcacgggacttggctaccgggtcgctgtctcatccgcagacttcggctacctacggaggcatcaggtctgggcccctttcccttcaagacccggaaggaactgcagagttggaaggcagagaatgaagccttcaccctggctgacctgaagcaactgccggagctgaacccaccagtgctgatgcccagagggaatgtggggactcccctgcgggtctttttggagttgatccgggcctgccgcctaccccctcggatcatcacccagctgcagctccagttccccaagacaggttcctcccggcgctacggcaatgtgccttttgagtatgaggactcagagactgtggagcaggaagagcttgtgtgtacagcagagggtgaagaaataccccaaggaacctacctggcagatataccagccagcccctgtggagagcctgaggaagaagtggggaaggaagaggaagaagagtctcactcagatgaggacgatgaccggggtgaggaatgggaacggcatgaagcgctgcatgaggacgtgaccgggcaggagcggaccactgagcagctctttgaggaggagattgagctcaagtgggagaagggtggctctggcctggtgttttatactgatgcccagttctggcaggaggaagaaggagattttgatgaacagacagccgatgactgggatgtggacatgagtgtgtactatgacagagatggtggagacaaggatgcccgagactctgtccaaatgcgtctagaacagagactccgagatggacaggaagatggctctgtgatcgaacgccaggtgggcacctttgagcgccacaccaagggcattgggcggaaggtgatggagcggcagggctgggctgagggccagggcctgggctgcaggtgctcaggggtgcctgaggccctggatagtgatggccaacaccccagatgcaagcgtggattggggtaccatggagagaagctacagccatttgggcaactgaagaggccccgtagaaatggcttggggctcatctccaccatctatgatgagcctctaccccaagaccagacggagtcactgctccgccgccagccacccaccagcatgaagtttcggacagacatggcctttgtgaggggttccagttgtgcttcagacagcccctcattgcctgactgaccgggttgggggcttcctttcatagctacatgatgaaaaccctctgccctggcctcatctaccactgaagcagaaaggagtctgggagcagcagtcttcgtggctggttcagggtgttttgttccgagcctgcctgcctgccggttctatacctcaggggcatttttacaaaaagccccctcccgtcccctccccttggatattaggggtaacgaccgcttgtctttggtctctaaccctaatctctgggcttgccctttgcctcctgcagaactttgaaaagctgggttgagtgaggctatcagcacagccttccttggggactctgaaggtgtccccacgaaggccagaaagggggaaagggacctgggcgaggagaggatttgtggtgcttggaagagccggccttgggtgggccctccaccgcctctaccctcactgggtgggactgccagcggagagtccgcgggaggtggcttgggtgtgcgacgtcacggaagaataaagacgtttactactgg

SEQ ID NO: 14157 - protein, 525 aa, Homo sapiens
MAVPGEAEEEATVYLVVSGIPSVLRSAHLRSYFSQFREERGGGFLCFHYRHRPERAPPQAAPNSALIPTDPAAEGQLLSQTSATDVRPLSTRDSTPIQTRTCCCVISVRGLAQAQRLIRMYSGRRWLDSHGTWLPGRCLIRRLRLPTEASGLGPFPFKTRKELQSWKAENEAFTLADLKQLPELNPPVLMPRGNVGTPLRVFLELIRACRLPPRIITQLQLQFPKTGSSRRYGNVPFEYEDSETVEQEELVCTAEGEEIPQGTYLADIPASPCGEPEEEVGKEEEEESHSDEDDDRGEEWERHEALHEDVTGQERTTEQLFEEEIELKWEKGGSGLVFYTDAQFWQEEEGDFDEQTADDWDVDMSVYYDRDGGDKDARDSVQMRLEQRLRDGQEDGSVIERQVGTFERHTKGIGRKVMERQGWAEGQGLGCRCSGVPEALDSDGQHPRCKRGLGYHGEKLQPFGQLKRPRRNGLGLISTIYDEPLPQDQTESLLRRQPPTSMKFRTDMAFVRGSSCASDSPSLPD

SEQ ID NO: 14158 - DNA, 1835 bp, Homo sapiens
  CDS (23)..(1270)
gtgcagttgcggctccagggccatggcggaggagcagggccgggaacgggactcggttcccaagccgtcggtgctgttcctccacccagacctgggcgtgggcggcgctgagcggctggtgttggacgcggcgctggcgctgcaggcgcgcgggtgtagcgtgaagatctggacagcgcactacgacccgggccactgtttcgccgagagccgcgagctaccggtgcgctgtgccggggactggctgccgcgaggcctgggctggggcggccgcggcgccgccgtctgcgcctacgtgcgcatggttttcctggcgctctacgtgctgttcctcgccgacgaggagttcgacgtggtagtgtgcgaccaggtgtctgcctgtatcccagtgttcaggctggctagacggcggaagaagatcctattttactgtcacttcccagatctgcttctcaccaagagagattcttttcttaaacgactatacagggccccaattgactggatagaggaatacaccacaggcatggcagactgcatcttagtcaacagccagttcacagctgctgtttttaaggaaacattcaagtccctgtctcacatagaccctgatgtcctctatccatctctaaatgtcaccagctttgactcagttgttcctgaaaagctggatgacctagtccccaaggggaaaaaattcctgctgctctccatcaacagatacgaaaggaagaaaaatctgactttggcactggaagccctagtacagctgcgtggaagattgacatcccaagattgggagagggttcatctgatcgtggcaggtggttatgacgagagagtcctggagaatgtggaacattatcaggaattgaagaaaatggtccaacagtccgaccttggccagtatgtgaccttcttgaggtctttctcagacaaacagaaaatctccctcctccacagctgcacgtgtgtgctttacacaccaagcaatgagcactttggcattgtccctctggaagccatgtacatgcagtgcccagtcattgctgttaattcgggtggacccttggagtccattgaccacagtgtcacagggtttctgtgtgagcctgacccggtgcacttctcagaagcaatagaaaagttcatccgtgaaccttccttaaaagccaccatgggcctggctggaagagccagagtgaaggaaaaattttcccctgaagcatttacagaacagctctaccgatatgttaccaaactgctggtataatcagattgtttttaagatctccattaatgtcatttttatggattgtagacccagttttgaaaccaaaaaagaaacctagaatctaatgcagaagagatcttttaaaaaataaacttgagtcttgaatgtgagccactttcctatataccacacctccctgtccacttttcagaaaaaccatgtcttttatgctataatcattccaaattttgccagtgttaagttacaaatgtggtgtcattccatgttcagcagagtattttaattatattttctcgggattattgctcttctgtctataaattttgaatgatactgtgccttaattggttttcatagtttaagtgtgtatcattatcaaagttgattaatttggcttcatagtataatgagagcagggctattgtagttcccagattcaatccaccgaagtgttcactgtcatctgttagggaatttttgtttgtcctgtctttgcctggatccatagcgagagtgctctgtattttttttaagataatttgtatttttgcacactgagatataataaaaggtgtttatc

SEQ ID NO: 14159 - protein, 416 aa, Homo sapiens
MAEEQGRERDSVPKPSVLFLHPDLGVGGAERLVLDAALALQARGCSVKIWTAHYDPGHCFAESRELPVRCAGDWLPRGLGWGGRGAAVCAYVRMVFLALYVLFLADEEFDVVVCDQVSACIPVFRLARRRKKILFYCHFPDLLLTKRDSFLKRLYRAPIDWIEEYTTGMADCILVNSQFTAAVFKETFKSLSHIDPDVLYPSLNVTSFDSVVPEKLDDLVPKGKKFLLLSINRYERKKNLTLALEALVQLRGRLTSQDWERVHLIVAGGYDERVLENVEHYQELKKMVQQSDLGQYVTFLRSFSDKQKISLLHSCTCVLYTPSNEHFGIVPLEAMYMQCPVIAVNSGGPLESIDHSVTGFLCEPDPVHFSEAIEKFIREPSLKATMGLAGRARVKEKFSPEAFTEQLYRYVTKLLV

SEQ ID NO: 14160 - DNA, 966 bp, Homo sapiens
  CDS (37)..(771)
actccctgaggcagtggcgacagcggcggcgagaggatgaacaacaagttcgacgctttgaaagatgatgacagtggggaccatgatcagaatgaagaaaacagcacacagaaagatggtgagaaggaaaaaacggaacgagacaagaatcagagcagtagcaagagaaaggctgttgtccctggaccggcagagcatcccctgcagtacaactacactttttggtactccaggagaacccccggccgtcccacgagctcacagagctatgaacagaatatcaaacagattggcacctttgcctctgtggagcagttctggaggttttatagccacatggtacgtcctggggacctgacaggccacagtgacttccatctcttcaaagaaggaattaaacccatgtgggaggatgatgcaaataaaaatggtggcaagtggattattcggctgcggaagggcttggcctcccgttgctgggagaatctcattttggccatgctgggggaacagttcatggttggggaggagatctgtggggctgtggtgtctgtccgctttcaggaagacattatttcaatatggaataagactgccagtgaccaagcaaccacagcccgaatccgggacacacttcggcgagtgcttaacctacctcccaacaccattatggaatacaaaactcacaccgacagcatcaaaatgccaggcaggctgggcccccaaaggctcctttttcaaaacctctggaagccgcggttgaatgtgccatgaccctctccctctctggatggcaccatcattgaagctggcgtcatcggagtctcttgttctgttggcgtgctacctggaagatccttctgtcctggacaagaggaattggaagagcattttatgttttaagaacaggctgacacgcagcagctacaacaacagctgagatcacttaataaatggtgctaaact

SEQ ID NO: 14161 - protein, 245 aa, Homo sapiens
MNNKFDALKDDDSGDHDQNEENSTQKDGEKEKTERDKNQSSSKRKAVVPGPAEHPLQYNYTFWYSRRTPGRPTSSQSYEQNIKQIGTFASVEQFWRFYSHMVRPGDLTGHSDFHLFKEGIKPMWEDDANKNGGKWIIRLRKGLASRCWENLILAMLGEQFMVGEEICGAVVSVRFQEDIISIWNKTASDQATTARIRDTLRRVLNLPPNTIMEYKTHTDSIKMPGRLGPQRLLFQNLWKPRLNVP

SEQ ID NO: 14162 - DNA, 3459 bp, Homo sapiens
  CDS (76)..(702)
cctttgccttcggacttctccggggccagcagccgcccgaccaggggcccggggccacgggctcagccgacgaccatgggctccgtgtccaaccagcagtttgcaggtggctgcgccaaggcggcagaagaggcgcccgaggaggcgccggaggacgcggcccgggcggcggacgagcctcagctgctgcacggtgcgggcatctgtaagtggttcaacgtgcgcatggggttcggcttcctgtccatgaccgcccgcgccggggtcgcgctcgaccccccagtggatgtctttgtgcaccagagtaagctgcacatggaagggttccggagcttgaaggagggtgaggcagtggagttcacctttaagaagtcagccaagggtctggaatccatccgtgtcaccggacctggtggagtattctgtattgggagtgagaggcggccaaaaggaaagagcatgcagaagcgcagatcaaaaggagacaggtgctacaactgtggaggtctagatcatcatgccaaggaatgcaagctgccaccccagcccaagaagtgccacttctgccagagcatcagccatatggtagcctcatgtccgctgaaggcccagcagggccctagtgcacagggaaagccaacctactttcgagaggaagaagaagaaatccacagccctaccctgctcccggaggcacagaattgagccacaatgggtgggggctattcttttgctatcaggaagttttgaggagcaggcagagtggagaaagtgggaatagggtgcattggggctagttggcactgccatgtatctcaggcttgggttcacaccatcaccctttcttccctctaggtggggggaaagggtgagtcaaaggaactccaaccatgctctgtccaaatgcaagtgagggttctgggggcaaccaggaggggggaatcaccctacaacctgcatattttgagtctccatccccagaatttccagcttttgaaagtggcctggatagggaagttgttttccttttaaagaaggatatataataattcccatgccagagtgaaatgattaagtataagaccagattcatggagccaagccactacattctgtggaaggagatctctcaggagtaagcattgtttttttttcacatcttgtatcctcatacccacttttgggatagggtgctggcagctgtcccaagcaatgggtaatgatgatggcaaaaagggtgtttgggggaacagctgcagacctgctgctctatgctcacccccgccccattctgggccaatgtgattttatttatttgctcccttggatactgcaccttgggtcccactttctccaggatgccaactgcactagctgtgtgcgaatgacgtatcttgtgcattttaactttttttccttaatataaatattctggttttgtatttttgtatattttaatctaaggccctcatttcctgcactgtgttctcaggtacatgagcaatctcagggatagccagcagcagctccaggtctgcgcagcaggaattactttttgttgtttttgccaccgtggagagcaactatttggagtgcacagcctattgaactacctcatttttgccaataagagctggcttttctgccatagtgtcctcttgaaaccccctctgccttgaaaatgttttatgggagactaggttttaactgggtggccccatgacttgattgccttctactggaagattgggaattagtctaaacaggaaatggtggtacacagaggctaggagaggctgggcccggtgaaaaggccagagagcaagccaagattaggtgagggttgtctaatcctatggcacaggacgtgctttacatctccagatctgttcttcaccagattaggttaggcctaccatgtgccacagggtgtgtgtgtgtttgtaaaactagagttgctaaggataagtttaaagaccaatacccctgtacttaatcctgtgctgtcgagggatggatatatgaagtaaggtgagatccttaacctttcaaaattttcgggttccagggagacacacaagcgagggttttgtggtgcctggagcctgtgtcctgccctgctacagtagtgattaatagtgtcatggtagctaaaggagaaaaagggggtttcgtttacacgctgtgagatcaccgcaaacctaccttactgtgttgaaacgggacaaatgcaatagaacgcattgggtggtgtgtgtctgatcctgggttcttgtctcccctaaatgctgccccccaagttactgtatttgtctgggctttgtaggacttcactacgttgattgctaggtggcctagtttgtgtaaatataatgtattggtctttctccgtgttctttgggggttttgtttacaaacttctttttgtattgagagaaaaatagccaaagcatctttgacagaaggttctgcaccaggcaaaaagatctgaaacattagtttggggggccctcttcttaaaggggggatcttgaaccatcctttcttttgtattccccttcccctattacctattagaccagatcttctgtcctaaaaacttgtcttctaccctgccctcttttctgttcacccccaaaagaaaacttacacacccacacacatacacatttcatgcttggagtgtctccacaactcttaaatgatgtatgcaaaaatactgaagctaggaaaaccctccgtcccttgttcccaacctcctaagtcaagaccattaccatttctttctttctttttttttttttttttaaagtggagtctcgctgtgtcacccaggcagaggttgcagtgagctgagatcgcaccactgcactccagcctggttacagagcgagactctgtctcaaacaaaacaaaacaaaacaaaaacacactactgtattttggatggatcaaacctccttaattttaatttctaatcctaaagtaaagagatgcaattgggggccttccatgtagaaagtggggtcaggaggccaagaaagggaatatgaatgtatatccaagtcactcaggaacttttatgcaggtgctagaaactttatgtcaaagtggccacaagattgtttaataggagacgaacgaatgtaactccatgtttactgctaaaaaccaaagctttgtgtaaaatcttgaatttatggggcgggagggtaggaaagcctgtacctgtctgtttttttcctgatccttttccctcattcctgaactgcaggagactgagcccctttgggctttggtgaccccatcactggggtgtgtttatttgatggttgattttgctgtactgggtacttcctttcccattttctaatcattttttaacacaagctgactcttcccttcccttctcctttccctgggaaaatacaatgaataaataaagacttattggtacgc

SEQ ID NO: 14163 - protein, 209 aa, Homo sapiens
MGSVSNQQFAGGCAKAAEEAPEEAPEDAARAADEPQLLHGAGICKWFNVRMGFGFLSMTARAGVALDPPVDVFVHQSKLHMEGFRSLKEGEAVEFTFKKSAKGLESIRVTGPGGVFCIGSERRPKGKSMQKRRSKGDRCYNCGGLDHHAKECKLPPQPKKCHFCQSISHMVASCPLKAQQGPSAQGKPTYFREEEEEIHSPTLLPEAQN

SEQ ID NO: 14164 - DNA, 1425 bp, Homo sapiens
tatgccttgatgactaaaaggcactagaaaggttgtgtctactaacttcagccctaatcagaacagatgcctagaaggagcatttttgtgacaacttcatagtgattagaatcagtggagaactccatcttagtggcaggaatataatgaaactacccacgcaagaacatggttgaatcacatttgcttgacttagggcaaagtacgaaagagagacaaaagggttctcttggaaacaagaagagtgactccagatgtggcctgaataattgccatgttaagttaatgcaaaagatcagaacagggctacatttgcacaggcagtttctctccgggccgtagttttcactgatgatcacctttcacagcattttccccaaccagcatttcacttagtcttctctatacccagcacctcccccggcacccccggcaagcccactatcacttccgacttccaacgtggcatccgtgagatctgtccacattaggcgaagcaggagaacactgagagcagcaggatgggtttggaaagagcatgcctctggaaacacagcttcctgggaattcacatgaggccagtcctacagagagcaagatgcaccccaggatttcttcattttctaatagatgtgggagtgctccattttccccgacagcgaatttcccctgagaaacgatactagaccctgggtttgcccaccttgtaactcttccttatctcctccttttcatccctaattcatcctccctctggcatggaattgacgcccgtgcagtacatttgccaagtggcaccttctttcaatttatgttttattttgctatggtggtgattctttatttgctggttgtcttttctcacacatctttctctctgtctctctctttcctgctctttgtttttctgcccagaaaaacctgacttcgataccaaaaaagatgaaactacagaaactcaaatttaaaaaaaactttaaaagaaacaaaaaaatactcaacgattctttcagctttattaacattttccattgtttcttgcgacttgtgtctcgttctttgtagtattgatgatgaacatttgataatgaatgttcttgtatattcagataaagaaaaaaaaaaccaaaaaagcggtctgaatttaatagtgtttataataaaaattttaaaaatgaccctcatagcacgcaaaacaggatggggaatttcccctcttctttctgtgacaatgcgcatcattcctgcattagtttttaacaccagactacctacattcatcatttccctcatttttcttttattttcttgcatttgtgaattagttcaagaatgctagaaaagtgtcgagttgtgcacatccatttcttgtttcacaatgtttaaaagtgacagtaattcattttgtaaactaaaaaaaaaaag

SEQ ID NO: 14165 - DNA, 3104 bp, Homo sapiens
  CDS (262)..(1470)
tctttgccaagactggaaaccctagtagctgaggttcaggcttggaaagaatgtgctgttaatacattcttgactgagaattctccatattctctcttagaggtgctgtgtcctcgatgtgatattggccttttgggattgaaagggaagcagagaaagttaaaggagcccttgccaaatggaaagaaaaaaagcaccaaattagagagtctgagtgacctggagagagctttaactgaaagcaaggagactgcttcagctatggcaactcttggggaagctcgcctaagggaaatggaagccttgcagtctctcagactcgccaatgaagggaaattgctgtcgcctctccaagatgtggatataaaaatctgcctatgtcagaaggccccagctgcccctatgattcaatgtgaactctgcagggatgctttccacaccagttgtgtggcggtacccagtatttcacagggcctgcgaatctggctttgtccccattgtcggaggtcagagaaacctccattagagaaaattctgcccctgctcgcctcccttcagcgtatccgagttcgccttcctgagggagatgcacttcgatatatgattgaaagaaccgtgaactggcagcacagagcccagcaactgctttcgtcagggaatcttaaatttgtgcaagatcgagtgggctcaggactgttatatagcagatggcaagcctcagcaggacaggtgtcagacacaaacaaggtatctcaacctcctggcacaacatcattttctttgcctgatgactgggacaacagaacctcatatttgcactcccctttctcaactggacgaagttgtatccccctccatggtgttagtccagaagtgaatgaactattgatggaagcccagctgctccaggtatcccttcctgaaattcaggaactttaccagactttacttgcaaagccaagccctgctcagcagactgaccgaagctcaccagtgagacccagcagtgagaagaatgactgttgccgagggaagcgagatggaattaacagtcttgagagaaaactgaagagacgcctggaaagagagggcctctccagtgagcggtgggaacgagttaagaaaatgcggacccccaaaaagaagaaaatcaaactgagccaccccaaggacatgaacaatttcaagttagagagagagcgtagctatgaattagttcgttctgctgaaactcattccctgccctcagacacatcctattccgaacaggaagactctgaggatgaagatgccatctgcccagctgtgagctgcctgcagccagaaggagatgaggtggactgggtccagtgtgatggcagctgcaatcagtggtttcatcaggtctgtgttggtgtctccccagagatggcagagaaagaagactacatctgtgtgcgctgtactgtgaaggacgcaccaagccgaaagtaaaaacacaaaaacagatacccccctacttaatgtaattcaggactccaaccaagaggatttcttcaaatctcagcaaagctacaggactggtactcaagccagcctgtaaacggtgctatttctattccttatgggatcatttttccaggactctttgaagaaaagaaaaaacaactaaaaaaatttttgacactttttgtattttttccttaagagctatttgtggttgttgaggtttgaaaagctgactgttttttttgcaggggttcccaccaatttggaaggcattgaagcttgcaccttttcatgtacagcattaaaattttacctctctctgggatttaccagcttaagagtccaactcacttccagtgcccaaaagggcacccaccagaaattccagtaaatcctcatttgaggaagctctcccttgtttactctgttaccacattggggaaatttttaagtttttcactttgggagtttttgtttgtttcttcttttcctttatccacttttcttcttcctggtagactaggtttatttatctgagcaataacttctatgttggtttcagtggctggaattaaaacaaaacaaaacaaacttccaaacagtgtgttggtgctttagcgattgattgatgtacagaacacaaatgtctagtttctagtgtcactgatgaactagtgatgtagaaaagagacttctctgtaagtaattgccacagctgtattttggctttctccctgtcccttcctttctcccctattttttggtagcttgtatcaaatgttacagtttatattgtggaataaatccttcgtcctaacataacactaaatgctgattatttagagccattagagcacagcttcttctgcccctctactgttgcacagccagaaggggctgcttgcttttgcctctgcccaaccaggttgcagtagcagtggatgttagcctgcaaacaacattaggggattcttcttttgtgtcctgctctgtttggtgggccatatgcctacagccctcactaacaaagaacccctctgtcttcaaggactagaacctatctttaaagccgtgctcttttaaaataagctttctcagaatgttggcaaatcacttcaatcctcaaatcagtcttccttgtggaatgctgcctttattatatttgaattgacaggggaacttggtttagggttaagacgttggaaggaaatctaaggaaaattaatcctcacagaggtccgggtttagtatatgtcttgagaggagacttgtgaattcccagactctgcctcctggtttcctttctcatttctttctaactgtagctatcattactggctgtggatagcccatagctattttccttgcttttcttttttaaaggggtccgttctgcagtggagaagacattctggtgaccagacttttgcttaccttttcctattctgttgccaatttttgttttccccacattctatagccataaacctgaagatgagtaaaactggtgggtctttaataaaacaacaacaaaaacagcagtttgtgatatagcagaggtttaaatgtaccctccccttttatgcacttcaaataattaaatctctttaagaatg

SEQ ID NO: 14166 - protein, 403 aa, Homo sapiens
MATLGEARLREMEALQSLRLANEGKLLSPLQDVDIKICLCQKAPAAPMIQCELCRDAFHTSCVAVPSISQGLRIWLCPHCRRSEKPPLEKILPLLASLQRIRVRLPEGDALRYMIERTVNWQHRAQQLLSSGNLKFVQDRVGSGLLYSRWQASAGQVSDTNKVSQPPGTTSFSLPDDWDNRTSYLHSPFSTGRSCIPLHGVSPEVNELLMEAQLLQVSLPEIQELYQTLLAKPSPAQQTDRSSPVRPSSEKNDCCRGKRDGINSLERKLKRRLEREGLSSERWERVKKMRTPKKKKIKLSHPKDMNNFKLERERSYELVRSAETHSLPSDTSYSEQEDSEDEDAICPAVSCLQPEGDEVDWVQCDGSCNQWFHQVCVGVSPEMAEKEDYICVRCTVKDAPSRK

SEQ ID NO: 14167 - DNA, 2217 bp, Homo sapiens
cttttattacaacattcacagacacagcattaaaggaatgaatatgccaaagttaaaaaagtttttgtgctatttatctcaagcaggctttcgagtaagccgaactcattttgacccaatgggtgtacgcacagatgcacctctgatgcagtttaaatctatccttttaaagtacagcacccccacctacactggaggacagtcagaaagccgtgtccagtcagcatctgaagatacagtaactgaaagagttgaaatgtcagtgaatgacaaagcagaagcaagtggctgcagaagatggtaaacgtagagaagaattggttctcaggtgtctgtatagatggcctaatagttctctataccaactgtagttctttttctgttctttcaattcagtagagtaaaaataaaaaacagtgtcattttcattcagaaactgagcagtttctaacttagctggtttgggagctttgctttccaagttttttttgttttaaggcaaacttaaaattttaatggaaacatttcatatgaagccaagtctcactgagatcaccctactgcttaataattcagaaaattttcacatgcaaagtgtttggaattttatgtatgttatgaaagccatcttttacaattcttaatcacatctctgcctaaactgattcatgatgtttatgttttcctgtttgtagtgtacaaaatgaagctgaaggctcacatgttaaaatgaccctgaatagaataggaagaacagtgttcttacaggtcataatgtatttcacaattaaaaaactaaaatatgtgcccatttttaagaaatcatacttctctccacattgatcttttcatttcttactagcttttaagaaattaaatacttgcctgagatagaaatactttatttttgtaactttaaggtctaaatgactaaacttcaaagtaagattttgtcagaataaattgagaccattaatctaatataatacttgttcatgagcactgaaatcctgaagaggagagatttggttataaattaaaaaggttgggtgatcttaagtgcctcagttaatgcacgtacagtattcatttggttggttgtactacctctcagaagtaaaatttgtcaccttatggaatgagagtttttgggtttgggggttgtttttttgttgttgcttggtttggtatttttggttttgtgtgtatttgtataaattttctgtataattagcccaggctgatgtaactataaaaattagttgaaaaaaaaaatattgtttccttaatggaattctcacttcatttgaatataagattttggatgaaaggatttggtataaagtttgggtttttgtctcaaggatttgatccatatttatccctaaatatttcttaagggatgtaactttttataaccattaagtggggggaagggggtggagggggtggtaataattataactgaaaggtttaaatatactacctaagaaaaaagtacttctgtgacatatacaaaaaaatctagtggataggcattagatgaatagagaatattaattttgcagaaatgaaggaaaatctcttcgtgctagtacagcgtattcccaagagagtttattttcctttctccaattaatgtggtcataaatttcggtaaaatcaagaaataggtgaagtgcaagctagtttctataatgaccattaaaaaaattctgctgtgtaattcttgccagttaaaattataacttgcaaatgagcagaataaatgaggtttttttcaattaaaaattactataaatccaggaggcaaactattatagcactcagattatctgatttaatacatattattgaatatcagtctcaaattttgctaaatgcttatcagcatgaaatatgttgatcagtgatgagttgggcttaatgcaaagatcctaatttaataaagaaacctgtaaattactgttacctaaaatatatgtgtatattaatttcacatataaaggtagatttttcaaagaaaaatttggtaggcggtagtttagaactctgatcaggtactacatcaaccaaaagaggaaatactttaaaaattccttttagcaacctgagcaatcttattctcgtaacaatagtagtaatttgggacattgcaaatgtttatcatgttgtaaagtagcatcagttgtatcctttcattaaaacttgataaac

SEQ ID NO: 14168 - DNA, 1338 bp, Homo sapiens
agagaaaaatgttaaagaggtattggaagattttgctgaagatggtgagaagaagattaaattgcttactggtaaacgcgttcaactggcggaagacctcaagaaagttagagaaattcaagaaaaacttgatgctttcattgaagctcttcatcaggagaaataaattaaaatcgtactcataatcagctctgcatacatctgaagaacaaaaacatcaacgtcttttgtccagcctctttttcttctgctgttccacctttctaaacgtacaataaagtcatgggataaaaataatcgatgtatgttacgggcgctttaaccatcagctgcctctcgaatggaagaacagtggtaatggattaacatcctattttgttgtactaaagtgacaaatcggaataatataattggtatggccattaggttcagtccttgaagataagaagcttgttctctgtttgttgtcttatttgtggtggcactcgtttaatggattaactgaggttgctcaatgttcagtttcttttccagaaatacaatgctaggtgttttgaaataaaacttatatagcaattgtttaaagttatcaattgtatataaaatcacagtagcctgctaaatcattgtatgtgtctgtagtattctattcccagaaactatttgaccatgataattcagtttatattcaccacatgaaagaaaaatgggtaacagaagaacccctaaaacaggttaatttggattgtaacgttcagtgaaagaaatttcaacccttcatagccagcgaagaaatttgccttggaagccaagtcagtaccagcttacctatttgattcagttgctgttttctcactctctatatccatttgaaattgatttattttagatgttgtatacttacgttaggctttctgttaatagtggtttttctcctgttgacagagccaccggattatgacacaggatgaggaaggttaaggataatcaattgactaatttcatttagaatattatcaaacatttcaactaggtatcagaaaaaggctttctttcataagactattttaaatagaaattatttcaacaattaaagtaatgttgaccatccccctctcagctgaataaagaaaaatttagttcaatttattgcaatttaattacaatactaccttcacaacattttcatgtgttttaaataaatattttttaattggctaaaggacattcaagcaaagaaatgctttctttacttaaaatgtctatctcatttgctgctttttcactaagcctttactttgttaataaaagtgtccattgtgtgatgtttttgatttt

SEQ ID NO: 14169 - DNA, 3994 bp, Homo sapiens
  CDS (259)..(2826)
agatccccacgcggcacctggccatgctctcagctctcccgccgcgggatggtgccttgagtgaatgacccccttggagaacattcttccgcatccctcgcctcaagccagcctcagacagaaaactgaagattcagcagatccagtgcttcctgctcctcttctgcccaggaacacgcttgccttccccaaggcttccagaagctctgaggcaggaggcaccaagttctacctcatgtttggaggatcttgctagctatggccctcgtactcggctccctgttgctgctggggctgtgcgggaactccttttcaggagggcagccttcatccacagatgctcctaaggcttggaattatgaattgcctgcaacaaattatgagacccaagactcccataaagctggacccattggcattctctttgaactagtgcatatctttctctatgtggtacagccgcgtgatttcccagaagatactttgagaaaattcttacagaaggcatatgaatccaaaattgattatgacaagattgtctactatgaagcagggattattctatgctgtgtcctggggctgctgtttattattctgatgcctctggtggggtatttcttttgtatgtgtcgttgctgtaacaaatgtggtggagaaatgcaccagcgacagaaggaaaatgggcccttcctgaggaaatgctttgcaatctccctgttggtgatttgtataataataagcattggcatcttctatggttttgtggcaaatcaccaggtaagaacccggatcaaaaggagtcggaaactggcagatagcaatttcaaggacttgcgaactctcttgaatgaaactccagagcaaatcaaatatatattggcccagtacaacactaccaaggacaaggcgttcacagatctgaacagtatcaattcagtgctaggaggcggaattcttgaccgactgagacccaacatcatccctgttcttgatgagattaagtccatggcaacagcgatcaaggagaccaaagaggcgttggagaacatgaacagcaccttgaagagcttgcaccaacaaagtacacagcttagcagcagtctgaccagcgtgaaaactagcctgcggtcatctctcaatgaccctctgtgcttggtgcatccatcaagtgaaacctgcaacagcatcagattgtctctaagccagctgaatagcaaccctgaactgaggcagcttccacccgtggatgcagaacttgacaacgttaataacgttcttaggacagatttggatggcctggtccaacagggctatcaatcccttaatgatatacctgacagagtacaacgccaaaccacgactgtcgtagcaggtatcaaaagggtcttgaattccattggttcagatatcgacaatgtaactcagcgtcttcctattcaggatatactctcagcattctctgtttatgttaataacactgaaagttacatccacagaaatttacctacattggaagagtatgattcatactggtggctgggtggcctggtcatctgctctctgctgaccctcatcgtgattttttactacctgggcttactgtgtggcgtgtgcggctatgacaggcatgccaccccgaccacccgaggctgtgtctccaacaccggaggcgtcttcctcatggttggagttggattaagtttcctcttttgctggatattgatgatcattgtggttcttacctttgtctttggtgcaaatgtggaaaaactgatctgtgaaccttacacgagcaaggaattattccgggttttggatacaccctacttactaaatgaagactgggaatactatctctctgggaagctatttaataaatcaaaaatgaagctcacttttgaacaagtttacagtgactgcaaaaaaaatagaggcacttacggcactcttcacctgcagaacagcttcaatatcagtgaacatctcaacattaatgagcatactggaagcataagcagtgaattggaaagtctgaaggtaaatcttaatatctttctgttgggtgcagcaggaagaaaaaaccttcaggattttgctgcttgtggaatagacagaatgaattatgacagctacttggctcagactggtaaatcccccgcaggagtgaatcttttatcatttgcatatgatctagaagcaaaagcaaacagtttgcccccaggaaatttgaggaactccctgaaaagagatgcacaaactattaaaacaattcaccagcaacgagtccttcctatagaacaatcactgagcactctataccaaagcgtcaagatacttcaacgcacagggaatggattgttggagagagtaactaggattctagcttctctggattatgctcagaacttcatcacaaacaatacttcctctgttattattgaggaaactaagaagtatgggagaacaataataggatattttgaacattatctgcagtggatcgagttctctatcagtgagaaagtggcatcgtgcaaacctgtggccaccgctctagatactgctgttgatgtctttctgtgtagctacattatcgaccccttgaatttgttttggtttggcataggaaaagctactgtatttttacttccggctctaatttttgcggtaaaactggctaagtactatcgtcgaatggattcggaggacgtgtacgatgatgttgaaactatacccatgaaaaatatggaaaatggtaataatggttatcataaagatcatgtatatggtattcacaatcctgttatgacaagcccatcacaacattgatagctgatgttgaaactgcttgagcatcaggatactcaaagtggaaaggatcacagatttttggtagtttctgggtctacaaggactttccaaatccaggagcaacgccagtggcaacgtagtgactcaggcgggcaccaaggcaacggcaccattggtctctgggtagtgctttaagaatgaacacaatcacgttatagtccatggtccatcactattcaaggatgactccctcccttcctgtctatttttgttttttacttttttacactgagtttctatttagacactacaacatatggggtgtttgttcccattggatgcatttctatcaaaactctatcaaatgtgatggctagattctaacatattgccatgtgtggagtgtgctgaacacacaccagtttacaggaaagatgcattttgtgtacagtaaacggtgtatataccttttgttaccacagagtttttttaaacaaatgagtattataggactttcttctaaatgagctaaataagtcaccattgacttcttggtgctgttgaaaataatccattttcactaaaagtgtgtgaaacctacagcatattcttcacgcagagattttcatctattatactttatcaaagattggccatgttccacttggaaatggcatgcaaaagccatcatagagaaacctgcgtaactccatctgacaaattcaaaagagagagagagatcttgagagagaaatgctgttcgttcaaaagtggagttgttttaacagatgccaattacggtgtacagtttaacagagttttctgttgcattaggataaacattaattggagtgcagctaacatgagtatcatcagactagtatcaagtgttctaaaatgaaatatgagaagatcctgtcacaattcttagatctggtgtccagcatggatgaaacctttgagtttggtccctaaatttgcatgaaagcacaaggtaaatattcatttgcttcaggagtttcatgttggatctgtcattatcaaaagtgatcagcaatgaagaactggtcggacaaaatttaacgttgatgtaatggaattccagatgtaggcattccccccaggtcttttcatgtgcagattgcagttctgattcatttgaataaaaaggaacttggaaaac

SEQ ID NO: 14170 - protein, 856 aa, Homo sapiens [sequence omitted]

SEQ ID NO: 14171 - DNA, 1061 bp, Homo sapiens
  CDS (11)..(610)
aaacttcaacatggccgaagcaagtagcgccaatctaggcagcggctgtgaggaaaaaaggcatgaggggtcgtcttcggaatctgtgccacccggcactaccatttcgagggtgaagctcctcgacaccatggtggacacttttcttcagaagctggtcgccgccggcagctaccagagattcactgactgctataagtgcttctaccagttgcagcctgcgatgacacagcaaatctatgacaagtttatagctcagttgcagacatctatccgggaggaaatctctgacatcaaagaggaggggaacctagaagctgtcttgaatgccttggataaaattgtggaagaaggcaaagtccgcaaagagcagcctggcgccccagcgggatcccagagaaggatctgcacagtgttatggcaccctacttcctgcagcaacgggacaccctgcggcgccatgtgcagaaacaggaggccgagaaccagcagctggcagatgccgtcctggcagggcggaggcaggtggaggagctgcagctacaggtccaggcccagcagcaggcctggcaggctctacacagagaacagagggagctggttgctgtgctgagggagcctgagtgaggagaccgccagccccagaagcagagggcagtcaaggtcaagagcctgtggtccagcatgcctggcctgggcgggctacctctgagaacggctgaaatggtgcccagtccatcagcagtgatggaatttgctggaggactaggccagagcaagcctcactgccactgtgcctttggggcacccttggggttggacatacaccccctttagattcctctgtttcttctacctggataattcttggccatgttctctcttctctaggttcaggtcagctctgcccctccgcccccctcctgctggttccccagcccttttccctggccctggcttggagaatctgttttcaatctccactgattgcccccttgctggccagcccaggggcctttaccatgttctctccacatccgtaaataaacttccttcactac

SEQ ID NO: 14172 - protein, 200 aa, Homo sapiens
MAEASSANLGSGCEEKRHEGSSSESVPPGTTISRVKLLDTMVDTFLQKLVAAGSYQRFTDCYKCFYQLQPAMTQQIYDKFIAQLQTSIREEISDIKEEGNLEAVLNALDKIVEEGKVRKEQPGAPAGSQRRICTVLWHPTSCSNGTPCGAMCRNRRPRTSSWQMPSWQGGGRWRSCSYRSRPSSRPGRLYTENRGSWLLC

SEQ ID NO: 14173 - DNA, 1292 bp, Homo sapiens
  CDS (89)..(598)
cacggagtggctacatgaagttctgaaggatgttcagccccgggtcactccacttggctatgtcttgcccagccacgtgactgaggagatgctatgggagtgcaagcagcttggggctcactccccctccaccttgctgaccaccctcatgttctttaataccaagtacttcctattgaagacagtggaccagcacatgaagctggccttctccaaggtcttgcgacagacaaagaagaacccctctaatcccaaggataaaagcacgagtatccggtacttgaaggcccttggaatacaccagactggccagaaagttacagatgacatgtatgcagaacagacggaaaatccagagaatccattgagatgtcccatcaagctctatgatttctacctcttcaaatgcccccagagtgtgaaaggccggaatgacaccttttacctgacacctgagccagtggtggcccccaacagcccaatctggtactcagtccagcctatcagcagagagcagatgggacaaatgctgacgcggatcctggtgataagagaaattcaggaggccatcgcagtggccaatgcaagcactatgcactgagatgccttggccatggcacaagagaaaccagccaggaaaaaccagacagactttcacactaaagaagaggcctccatttttttttttcctttttttattggtgtagttacgaagcctttcaggctgcttctgtttaaaatataaaagaaagctttgccccctttgcatcttcataaacctgctgcggcagactcctcagccgatggtggctctgggtttccttgagtgtcatatgtcctagaaagttgctggctgactcttttttgtctggggcctggggaaagggcttggactgtgaaaagaaatgtggcccctttccatcttcaagagagatggaattaatgatggatggaccctggagggaatctccccagccgacttccactgggctgacagactttgctgaccacaggggaacgatgttcttttctttcttcatgatcagacataaacttggcatcttaatggaagaaaaatgaggggaacttcaattatgatttattaaagacaatttctattacaccctcctttatgacaagtgacattttagatgtaaaagtaaaaactttaccatgcctttttttttttgttggcctaacattgaggccttaaaacctgaggctcctgtgcctgatggaattcttgtaacatacacttgtgtatcatataaagataccactctgtttctctt

SEQ ID NO: 14174 - protein, 170 aa, Homo sapiens
MLWECKQLGAHSPSTLLTTLMFFNTKYFLLKTVDQHMKLAFSKVLRQTKKNPSNPKDKSTSIRYLKALGIHQTGQKVTDDMYAEQTENPENPLRCPIKLYDFYLFKCPQSVKGRNDTFYLTPEPVVAPNSPIWYSVQPISREQMGQMLTRILVIREIQEAIAVANASTMH

SEQ ID NO: 14175 - DNA, 3837 bp, Homo sapiens
  CDS (207)..(2798)
attgcttttgctgcttttctggctttccctttcggacatgcgcgctcggagcaaggcgccctcgcactcagcttaccgcgcatgtacgttgccaggggtaacgcaggtagccaaagtggcttgtggagtggcgaccgttagtgaggcggttgctgagacagacgctgaggcgggtaggaggagcccgagccgtaagggaagccgtgatgagagccgtgttgacgtggagagataaagccgagcactgtataaatgacatcgcatttaagcctgatggaactcaactgattttggctgccggaggcagattactggtttatgacacctctgatggcaccttacttcagcccctcaagggacacaaagacactgtgtactgtgtggcatatgcgaaggatggcaagcgctttgcttctggatcagctgacaaaagcgttattatctggacatcaaaactggaaggcattctgaagtacacgcacaatgatgctatacaatgtgtctcctacaatcctattactcatcaactggcatcttgttcctccagtgactttgggttgtggtctcctgaacagaagtctgtctccaaacacaaatcaagcagcaagatcatctgctgcagctggacaaatgatggtcagtacctggcgctggggatgttcaatgggatcatcagcatacggaacaaaaatggcgaggagaaagtaaagatcgagcggccggggggctccctctcgccaatatggtccatctgctggaacccttcaagagaggaacgtaatgacatcctggctgtggctgactggggacagaaagtttccttctaccagctgagtggaaaacagattggaaaggatcgggcactgaactttgacccctgctgcatcagctactttactaaaggcgagtacattttgctggggggttcagacaagcaagtatctcttttcaccaaggatggagtgcggcttgggactgttggggagcagaactcctgggtgtggacgtgtcaagcgaaaccggattccaactatgtggtggtcggctgccaggacggcaccatttccttctaccagcttattttcagcacagtccatgggctttacaaggaccgctatgcctacagggatagcatgactgacgtcattgtgcagcacctgatcactgagcagaaagttcggattaaatgcaaagagcttgtcaagaagattgccatctacagaaatcgattggctatccaactgccagagaaaatcctcatctatgagttgtattcagaggacttatcagacatgcattaccgggtaaaggagaagattatcaagaagtttgagtgcaacctcctggtggtgtgtgccaatcacatcatcctgtgccaggagaaacggctgcagtgcctgtccttcagcggagtgaaggagcgggagtggcagatggagtctctcattcgttacatcaaggtgatcggtggccctcctggaagagaaggcctcttagtggggctgaagaatggacagatcctgaagatcttcgtggacaatctctttgctatcgtcctgctgaagcaggccacagctgtgcgctgcttggacatgagtgcctcccgtaagaagctggccgtggtagatgaaaatgacacttgcctggtgtatgacatcgacaccaaggagctgctttttcaggaaccaaacgccaacagtgtagcttggaacacccagtgtgaggacatgctctgcttctcgggaggaggctacctcaacatcagagccagcaccttccctgtgcaccggcagaagctgcagggctttgtggtcggctacaatggctccaagatcttctgcctccatgtcttctccatttctgccgtggaggtgccgcagtccgctcccatgtaccagtacctggataggaaactgttcaaggaagcctaccagattgcttgcttgggtgtcacagacactgattggcgtgaactggccatggaagcgctagaaggtttagattttgaaacagcaaagaagtccttcatcagagtgcaagacctccgatatttagagctcatcagcagcattgaggagaggaagaagcggggagagaccaacaatgacctgtttctggcagatgtgttttcctaccaggggaagttccatgaggccgccaaactgtacaagaggagtgggcacgagaacctcgcgcttgaaatgtacaccgacctctgcatgtttgagtatgccaaggatttccttggatctggagaccccaaagaaacaaagatgctaatcaccaaacaggctgactgggccagaaatatcaaggagcccaaagccgccgtggagatgtacatctcagcaggagagcacgtcaaggccatcgagatctgtggtgaccatggctgggttgacatgttgatcgacatcgcccgcaaactggacaaggctgagcgcgagcccctgctgctgtgcgctacctacctcaagaagctggacagccctggctatgctgctgagacctacctgaagatgggtgacctcaagtccctggtgcagctgcacgtggagacccagcgctgggatgaggcctttgctttgggtgagaagcatcctgagtttaaggatgacatctacatgccgtatgctcagtggctagcagagaacgatcgctttgaggaagcccagaaagcgttccacaaggctgggcgacagagagaagcggtccaggtgctggagcagctcacaaacaatgccgtggcggagagcaggtttaatgatgctgcctattattactggatgctgtccatgtagtgcctcgatatagctcaagatcctgcccagaaggacacaatgcttggcaagttctaccacttccagcgtttggcagagctgtaccatggttaccatgccatccatcgccacacggaagatccgttcagtgtccatcgtcctgaaactcttttcaacatctccaggttcctgctgcacagcctgcccaaggacaccccctcgggcatctctaaagtgaaaatactcttcaccttggccaagcagagcaaggccctcggtgcctacaggctggcccggcacgcctatgacaagctgcgtggcctgtacatccctgccagattccaaaagtccattgagctgggtaccctgaccatccgcgccaagcccttccacgacagtgaggagttggtgcccttgtgctaccgctgctccaccaacaacccgctgctcaacaacctgggcaacgtctgcatcaactgccgccagcccttcatcttctccgcctcttcctacgacgtgctacacctggttgagttctacctggaggaagggatcactgatgaagaagccatctccctcatcgacctggaggtgctgagacccaagcgggatgacagacagctagagattgcaaacaacagctcccagattctgcggctagtggagaccaaggactccatcggagatgaggacccgttcacagctaagctgagctttgagcaaggtggctcagagttcgtgccagtggtggtgagccggctggtgctgcgctccatgagccgccgggatgtcctcatcaagcgatggcccccacccctgaggtggcaatacttccgctcactgctgcctgacgcctccattaccatgtgcccctcctgcttccagatgttccattctgaggactatgagttgctggtgcttcagcatggctgctgcccctactgccgcaggtgcaaggatgaccctggcccatgaccagcatcctggggacggcctgcaccctctgcccgccttggggtctgctgggctgtgaaggagaataaagagttaaactgtc

SEQ ID NO: 14176 - protein, 864 aa, Homo sapiens [sequence omitted]

SEQ ID NO: 14177 - DNA, 2779 bp, Homo sapiens
  CDS (697)..(2097)
acctaagcaagcctgggcaatggcgggcgcccctcccccagcctcgctgccgccttgcagtttgatctcagactgctgtgctggcaatcagcgagactccgtgggcgtaggaccctccgagccaggctgctatccatgtccagggccaaacatgaatcctattgctcttgggagccgctggcttgcttatgcagaaaacaagttgattcgatgtcatcagtcccgtggtggagcctgtggagacaacattcagtcttatactgccacagtcattagtgctgctaaaacattgaaaagtggcctgacaatggtagggaaagtggtgactcagctgacaggcacactgccttcaggtgtgacagaagatgatgttgccatccacagtaattcacggcggagtcctttggtcccaggcatcatcacagttattgacaccgaaaccgttggagagggccaggtgcttgtgagtgaggattctgacagtgatggcattgtggcccacttccctgcccatgagaagccagtgtgctgcatggcttttaatacaagtggaatgcttctagtcacaacagacacccttggccatgactttcatgtcttccaaattctgactcatccttggtcagtactctccggggtacttcccacgttttccccatcaacccttatggtggccagccttgtgttcgtacacatatgtcaccacgagtagtgaatcgcatgagccgtttccagaaaagtgctggactggaagagattgaacaagaactgacgtctaagcaaggaggtcgctgtagccctgttccaggtctatcaagcagcccttctgggtcacccttgcatgggaaactgaacagccaagactcctataacaattttaccaacaacaaccctggcaaccctcggctctctcctcttcccagcttgatggtagtgatgcctcttgcacaaatcaagcagccaatgacattggggaccatcaccaaacgaaccggcaaagttaaacctcctccacaaatttcacccagcaaatcgatgggcggagaattttgtgtggctgctatcttcggaacatccaggtcatggtttgcaaataatgcaggtctgaaaagagaaaaagatcagtccaaacaagttgtagttgagtccctgtacattatcagttgctatggcaccttagtggaacacatgatggagccgcgacccctcagcactgcacccaagattagtgacgacacaccactggaaatgatgacatcgcctcgagccagctggactctggttagaacccctcaatggaatgaattgcggccaccgtttaatgcaaaccaccctctgctcctcgctgcagatgcagtacagtattatcagttcctgcttgctggcctggttccccctggaagtcctgggcccattactcgacatgggtcttacgacagtttagcttctgaccatagtggacaggaagatgaagaatggctttcccaggttgaaattgtaacacacactggaccccatagacgtctgtggatgggtccacagttccagttcaaaaccatccatccctcaggccaaaccacagttatctcatccagttcatctgtgttgcagtctcatggtccgagtgacacgccacagcctcttttggattttgatacagatgatcttgatctcaacagtctcaggatccagccagtccgctctgaccccgtcagcatgccagggtcatcccgtccagtctctgatcgaaggggagtttccacagtgattgatgctgcctcaggtacctttgacaggagcgtgaccctgctggaggtgtgcgggagctggcctgagggcttcgggctgcggcacatgtcctccatggagcacacggaggagggcctccgggagcgacttgccgacgccatggccgagtcacctagccgggacgtcgtgggatccggaacagaacttcagcgagagggaagcatcgagactctgagtaacagctcaggctccaccagcggcagcataccaagaaactttgatggctaccgatctccgctgcccaccaatgagagccagcccctcagcctcttcccgactggcttcccgtaggtaccagcaacctgcttctgactggccagccccctcccctgctggaggaggggagaagccccgctctggtcctacccttcagtctctgctcttccttcatcaaccaccttccccaagcttagtgacagcagccgcccatcctacctggatggagaagagacccttctccaagcacctcagcgcacttgccctctgccacaccagtcggtggaggctgtggccaggagagactgtagaagctcggtccctgtgtatgtttgcatatgacatcctgcattggatccgcttttgtattttttaaccatacccacggtggggcgggtggggggagcctggaacagtgaccagatctgggggcctgagtggggacagagttgatcgtccacctggccattttgaccctgagtggacagtcacagcctcagctcatgtctggctgtgacacacactgcccccagcttcccttggtcagccccactccagcacggggtgaacggaggcccagagtactagggaaggaggaagggaggacatgcctcttcttcctcctttctttccccatctgttcctgggaagagtttgtctttcttatctttaagcccctttaccctggtcctgtactgatcagtgaaggaaaccgtggttactgaggccctgttgaaaagtgcacgtcttgtcc

SEQ ID NO: 14178 - protein, 467 aa, Homo sapiens [sequence omitted]

SEQ ID NO: 14179 - DNA, 3170 bp, Homo sapiens
  CDS (116)..(1201)
aggcgctcaggagcgctagggtttgaggcctgctttctgctcgcgccagcagagcactacctgaggcagcgaggcgcagcgagcctagcctccccgcgccctgggcagtgtggccatggagaatcaggtgttgacgccgcatgtctactgggctcagcgacaccgcgagctatatctgcgcgtggagctgagtgacgtacagaaccctgccatcagcatcactgaaaacgtgctgcatttcaaagctcaaggacatggtgccaaaggagacaatgtctatgaatttcacctgaagttcttagaccttgtgaaaccagagcctgtttacaaactgacccagaggcaggtaaacattacagtacagaagaaagtgagtcagtggtgggagagactcacaaagcaggaaaagcgaccactgtttttggctcctgactttgatcgttggctggatgaatctgatgcggaaatggagctcagagctaaggaagaagagcgcctaaataaactccgactggaaagcgaaggctctcctgaaactcttacaaacttaaggaaaggatacctgtttatgtataatcttgtgcaattcttgggattctcctggatctttgtcaacctgactgtgcgattctgtatcttgggaaaagagtccttttatgacacattccatactgtggctgacatgatgtatttctgccagatgctggcagttgtggaaactatcaatgcagcaattggagtcactacgtcaccggtgctgccttctctgatccagcttcttggaagaaattttattttgtttatcatctttggcaccatggaagaaatgcagaacaaagctgtggttttctttgtgttttatttgtggagtgcaattgaaattttcaggtactctttctacatgctgacgtgcattgacatggattggaaggtgctcacatggcttcgttacactctgtggattcccttatatccactgggatgtttggcggaagctgtctcagtgattcagtccattccaatattcaatgagaccggacgattcagtttcacattgccatatccagtgaaaatcaaagttagattttccttttttcttcagatttatcttataatgatatttttaggtttatacataaattttcgtcacctttataaacagcgcagacggcgctatggacaaaaaaagaaaaagatccactaaaaagaaagatttagatggcttcttgccagtttgagcctaatctgattcttacagttttaccttcttgaaccaatgtaaaagtttttttaatgttaaatgattaaattctcagtgaggctatcttccttttccccagtaacattcctgaatttactgttatcttattgtagtacttgcatgacatggattcctgatatctgatgagaggttcattcttgtgtattcagttaatgacaccaaaaggctcagcccaccccaaccctatctcatgttcagtctgtctaatacatgccagagatttttttttcaaaaagtgctttatccctacaatgtactgacagttcttacagttgagatttgttcttttcagctattgcttgtgaaaaaaagcaagactatgtcactctatagaaggctgttaaagtgactcaggcaggaattaattattctgtacctaaggggttacttgtttaatgggatggcattgactttttgaaaatcaagtggactgagtcattgataaaacatttctaagagtggggctagagaacatactttacatctgacatcctttggcctaacaacatctattattatagtgctcagcagtgtgggcattgaagaggcgcagaatgctttgaaagaaactaatcagaatcttggaacatcatgatcatgccattcttaagtaaatcaactattttcaacactgaagaaaaatgaaacattatttagaaaacaatgagattacaagttccaaactcagccaggaatgtggctcacacctgtaatcccagcactttgggacacctaggtgggagcatcgcttgaagccaggagttcaagaccagcttgggcaacgtagtgagacccctatctctacaaaaaataaaaaaattagctgggtgtgatggcacacacctgttgtcccagctactcaagaagctgagatgggaggatcctgagctcaggaggtcaaggctgcagtgagccgagattgtgccactgcactgcagctggggtgacagtgcaagaccctgtctcaaaccaaaccaaaccacacacacacaaacacacatacacacacacacacacgaggtccaaatggtagcagggatccaaagggaacacagtatgtaggtcaaactggcagtaacagtgtacagcctttgacaaactagaaatattagagtaggccaaacacacctccaaactgtaaggctgtgcacaaacataaaaaatggcagccttccatctcctgcactggctgagtccatttacttgtgtacttgttctagtgagtggtgggactgtacatttttgaatagacctcaaaaatacttcattctgctgctgttcagttggctttttaaacctgtctgcagtaggacactgaaaacagcaagaacttcggggtgaacacccgctgatcctttaacaaggatttctggcaggaaactcacaaaaaggagaactgaaaatttagacatacagttggccattgtaaaaaacatcagtttcctctcatacattccaagtaaaccaagtaaaataagtgttggagtaacacttgcataaaagaatttaaggagtgatagctctttctgttctgccattcccaacattcctgggggaaaggagactcaatgagttaatactatttcactgagcccaagatggaaacttggtttgacctaaaacatctgattaatataggctagctgatttcttaaaaattcgttgcattgaaggatattttgcatgtctgtaacacctgtcaatacttgtttgtattgatttctgatattcttgcagctgactacgtgtaattgggcagatcagctttgcagtagattatgctgcatcctcgtggcaaaattctgtattcttagtgattgttacaaacccctttattgctgtctgagaaagtgaaagattgtgtatttctattaaaacatttacaatc

SEQ ID NO: 14180 - protein, 362 aa, Homo sapiens [sequence omitted]

SEQ ID NO: 14181 - DNA, 3714 bp, Homo sapiens
  CDS (69)..(2852)
aacctccaggagctagcagcgggcgcggaccgggcagtttccgcgctcagcacaggcagctcgcggtcatgggcggctcagcctccagccagctggacgagggcaagtgcgcttacatccgagggaaaactgaggctgccatcaaaaacttcagtccctactacagtcgtcagtactctgtggctttctgcaatcacgtgcgcactgaagtagaacagcaaagagatttaacgtcacagtttttgaagaccaagccaccattggcgcctggaactattttgtatgaagcagagctatcacaattttctgaagacataaagaagtggaaggagagatacgttgtagttaaaaatgattatgctgtggagagctatgagaataaaggggcctatcagagaggagctgctcctaaatgtcgaattcttccagccggtggcaaggtgttaacctcagaagatgaatataatctgttgtctgacaggcatttcccagaccctcttgcctccagtgagaaggagaacactcagccctttgtggtcctgcccaaggaattcccagtgtacctgtggcagcccttcttcagacacggctacttctgcttccacgaggctgctgaccagaagaggtttagtgccctcctgagtgactgcgtcaggcatctcaatcatgagtacatgaagcagatgacatttgaagcccaagcctttttagaagctgtgcaattcttccgacaggagaagggtcactatggttcctgggaaatgatcactggggatgaaatccagatcctgagtaacctggtgatggaggagctcctgcccactcttcagacagacctgctgcctaagatgaaggggaagaagaatgacagaaagaggacgtggcttggtctcctcgaggaggcctacaccctggttcagcatcaagtttcagaaggattaagtgccttgaaggaggaatgcagagctctgacaaagggcctggaaggaacgatccgttctgacatggatcagattgtgaattcaaagaactatttaattggaaagatcaaagcgatggtggcccagccggcggagaaaagctgcttggagagtgtgcagccattcctggcatccatcctggaggagctcatgggaccagtgagctcgggattcagtgaagtacgtgtactctttgagaaagaggtgaatgaagtcagccagaacttccagaccaccaaagacagtgtccagctaaaggagcatctagatcggcttatgaatcttccgctgcattccgtgaagatggaaccttgttatactaaagtcaacctgcttcacgagcgcctgcaggatctcaagagccgcttcagattcccccacattgatctggtggttcagaggacacagaactacatgcaggagctaatggagaatgcagtgttcacttttgagcagttgctttccccacatctccaaggagaggcctccaaaactgcagttgccattgagaaggttaaactccgagtcttaaagcaatatgattatgacagcagcaccatccgaaagaagatatttcaagaggcactagttcaaatcacacttcccactgtgcagaaggcactggcgtccacatgcaaaccagagcttcagaaatacgagcagttcatctttgcagatcataccaatatgattcacgttgaaaatgtctatgaggagattttacatcagatcctgcttgatgaaactctgaaagtgataaaggaagctgctatcttgaagaaacacaacttatttgaagataacatggccttgcccagtgaaagtgtgtccagcttaacagatctaaagccccccacagggtcaaaccaggccagccctgccaggagagcttctgccattctgccaggagttctgggtagtgagaccctcagtaacgaagtattccaggagtcagaggaagagaagcagcctgaggtccctagctcgttggccaaaggagaaagcctttctctccctgggccaagcccacccccagatgggactgagcaggtgattatttcaagagtggatgaccccgtggtgaatcctgtggcaacagaggacacagcaggactcccgggcacatgctcatcagagctggagtttggagggacccttgaggatgaagaacccgcccaggaagagccagaacccatcactgcctcgggttctttgaaggcgctcagaaagttgctgacagcgtccgtggaagtaccagtggactctgctccagtgatggaagaagatacgaatggggagagccacgttccccaagaaaatgaagaagaagaggaaaaagagcccagtcaggcagctgccatccaccccgacaactgtgaagaaagtgaagtcagcgagagggaggcccaacctccctgtcccgaggcccatggggaggagttggggggatttccagaggtaggcagcccagcctctccgccagccagtggagggctcaccgaggagcccctggggcccatggagggggagctcccaggagaggcctgcacactcactgcccatgaaggaagagggggcaagtgtaccgaggaaggggatgcctcacagcaagagggctgcaccttaggttctgaccccatctgcctcagtgagagccaggattctgaggaacaagacgagatgggagggcaaagcagcgcggcccaggccacggccagtgtgaatgcagaggagatcaaggtagcccgtattcatgagtgtcagtgggtggtggaggatgctccaaacccggatgtcctgctgtcacacaaagatgacgtgaaggagggagaaggtggtcaggagagtttcccagagctgccctcagaggagtgaaagggacaatttggctgaagtctttctctgaaaaaagccaaagggttataggggtacacttaggggttgcatgcaagctgttaccaaaaaatttttaagtattttcttaatttgaataataaaaccagaggaaatgcatacagggcatgagcaactgaggcaaacctttgtggacatgaattgttctacgatgaatttttgctttagtattttaataagaattacaaagacaatggcatacttggggtgagagggagctgaggatgtctgaggagggaatagtattgcagggaagactgagaaaacagtaggatgacagttttgagtatactccgcacttttcaattgtgcaatcttcttgtgcactttaaggctttttaattttgtttgagaatgcaaatgtatactgtaagtctacctttactatctactatgcctacttcaccatctcttaaggactcggcatttgtccacagtcagactgcaagagagggtaggtcatgaacagtcacccgtgctggctgtagcccccacagaggcaatcatgcccaatagattcaagagaagctaagcggaaatggagggtggaaggtgtgatctgtgggactgtctgggcctgttactcatcctgctatcaatttcttattaattaatcttgatgattcttattaattaatcacatttgcaggaaattcagatgaggcaagaaaattttattggcctgggtaagactgaaagcattccaaattaggcttagactgtgcaaagggcttagctaagttatcgagcttaaaacccgtcaattaaacaaacattatttgaacagttactgcatgccacgcactgtgttgggcttagt

SEQ ID NO: 14182 - protein, 928 aa, Homo sapiens [sequence omitted]

SEQ ID NO: 14183 - DNA, 4010 bp, Homo sapiens
  CDS (281)..(2848)
gcgatctttaagtgactgaggcagatccccacgcggcacctggccatgctctcagctctcccgccgcgggatggtgccttgagtgaatgacccccttggagaacattcttccgcatccctcgcctcaagccagcctcagacagaaaactgaagattcagcagatccagtgcttcctgctcctcttctgcccaggaacacgcttgccttccccaaggcttccagaagctctgaggcaggaggcaccaagttctacctcatgtttggaggatcttgctagctatggccctcgtactcggctccctgttgctgctggggctgtgcgggaactccttttcaggagggcagccttcatccacagatgctcctaaggcttggaattatgaattgcctgcaacaaattatgagacccaagactcccataaagctggacccattggcattctctttgaactagtgcatatctttctctatgtggtacagccgcgtgatttcccagaagatactttgagaaaattcttacagaaggcatatgaatccaaaattgattatgacaagattgtctactatgaagcagggattattctatgctgtgtcctggggctgctgtttattattctgatgcctctggtggggtatttcttttgtatgtgtcgttgctgtaacaaatgtggtggagaaatgcaccagcgacagaaggaaaatgggcccttcctgaggaaatgctttgcaatctccctgttggtgatttgtataataataagcattggcatcttctatggttttgtggcaaatcaccaggtaagaacccggatcaaaaggagtcggaaactggcagatagcaacttcaaggacttgcgaactctcttgaatgaaactccagagcaaatcaaatatatattggcccagtacaacactaccaaggacaaggcgttcacagatctgaacagtatcaattcagtgctaggaggcggaattcttgaccgactgagacccaacatcatccctgtccttgatgagattaagtccatggcaacagcgatcaaggagaccaaagaggcgttggagaacatgaacagcaccttgaagagcttgcaccaacaaagtacacagcttagcagcagtctgaccagcgtgaaaactagcctgcggtcatctctcaatgaccctctgtgcttggtgcatccatcaagtgaaacctgcaacagcatcagattgtctctaagccagctgaatagcaaccctgaactgaggcagcttccacccgtggatgcagaacttgacaacgttaataacgttcttaggacagatttggatggcctggtccaacagggctatcaatcccttaatgatatacctgacagagtacaacgccaaaccacgactgtcgtagcaggtatcaaaagggtcttgaattccattggttcagatatcgacaatgtaactcagcgtcttcctattcaggatatactctcagcattctctgtttatgttaataacactgaaagttacatccacagaaatttacctacattggaagagtatgattcatactggtggctgggtggcctggtcatctgctctctgctgaccctcatcgtgattttttactacctgggcttactgtgtggcgtgtgcggctatgacaggcatgccaccccgaccacccgaggctgtgtctccaacaccggaggcgtcttcctcatggttggagttggattaagtttcctcttttgctggatattgatgatcattgtggttcttacctttgtctttggtgcaaatgtggaaaaactgatctgtgaaccttacacgagcaaggaattattccgggttttggatacaccctacttactaaatgaagactgggaatactatctctctgggaagctatttaataaatcaaaaatgaagctcacttttgaacaagtttacagtgactgcaaaaaaaatagaggcacttacggcactcttcacctgcagaacagcttcaatatcagtgaacatctcaacattaatgagcatactggaagcataagcagtgaattggaaagtctgaaggtaaatcttaatatctttctgttgggtgcagcaggaagaaaaaaccttcaggattttgctgcttgtggaatagacagaatgaattatgacagctacttggctcagactggtaaatcccccgcaggagtgaatcttttatcatttgcatatgatctagaagcaaaagcaaacagtttgcccccaggaaatttgaggaactccctgaaaagagatgcacaaactattaaaacaattcaccagcaacgagtccttcctatagaacaatcactgagcactctataccaaagcgtcaagatacttcaacgcacagggaatggattgttggagagagtaactaggattctagcttctctggattttgctcagaacttcatcacaaacaatacttcctctgttattattgaggaaactaagaagtatgggagaacaataataggatattttgaacattatctgcagtggatcgagttctctatcagtgagaaagtggcatcgtgcaaacctgtggccaccgctctagatactgctgttgatgtctttctgtgtagctacattatcgaccccttgaatttgttttggtttggcataggaaaagctactgtatttttacttccggctctaatttttgcggtaaaactggctaagtactatcgtcgaatggattcggaggacgtgtacgatgatgttgaaactatacccatgaaaaatatggaaaatggtaataatggttatcataaagatcatgtatatggtattcacaatcctgttatgacaagcccatcacaacattgatagctgatgttgaaactgcttgagcatcaggatactcaaagtggaaaggatcacagatttttggtagtttctgggtctacaaggactttccaaatccaggagcaacgccagtggcaacgtagtgactcaggcgggcaccaaggcaacggcaccattggtctctgggtagtgctttaagaatgaacacaatcacgttatagtccatggtccatcactattcaaggatgactccctcccttcctgtctatttttgttttttacttttttacactgagtttctatttagacactacaacatatggggtgtttgttcccattggatgcatttctatcaaaactctatcaaatgtgatggctagattctaacatattgccatgtgtggagtgtgctgaacacacaccagtttacaggaaagatgcattttgtgtacagtaaacggtgtatataccttttgttaccacagagttttttaaacaaatgagtattataggactttcttctaaatgagctaaataagtcaccattgacttcttggtgctgttgaaaataatccattttcactaaaagtgtgtgaaacctacagcatattcttcacgcagagattttcatctattatactttatcaaagattggccatgttccacttggaaatggcatgcaaaagccatcatagagaaacctgcgtaactccatctgacaaattcaaaagagagagagagatcttgagagagaaatgctgttcgttcaaaagtggagttgttttaacagatgccaattacggtgtacagtttaacagagttttctgttgcattaggataaacattaattggagtgcagctaacatgagtatcatcagactagtatcaagtgttctaaaatgaaatatgagaagatcctgtcacaattcttagatctggtgtccagcatggatgaaacctttgagtttggtccctaaatttgcatgaaagcacaaggtaaatattcatttgcttcaggagtttcatgttggatctgtcattatcaaaagtgatcagcaatgaaaaactggtcggacaaaatttaacgttgatgtaatggaattccagatgtaggcattccccccaggtcttttcatgtgcagattgcagttctggttcatttgaataaaaaggaacttgg

SEQ ID NO: 14184 - protein, 856 aa, Homo sapiens
MALVLGSLLLLGLCGNSFSGGQPSSTDAPKAWNYELPATNYETQDSHKAGPIGILFELVHIFLYVVQPRDFPEDTLRKFLQKAYESKIDYDKIVYYEAGIILCCVLGLLFIILMPLVGYFFCMCRCCNKCGGEMHQRQKENGPFLRKCFAISLLVICIIISIGIFYGFVANHQVRTRIKRSRKLADSNFKDLRTLLNETPEQIKYILAQYNTTKDKAFTDLNSINSVLGGGILDRLRPNIIPVLDEIKSMATAIKETKEALENMNSTLKSLHQQSTQLSSSLTSVKTSLRSSLNDPLCLVHPSSETCNSIRLSLSQLNSNPELRQLPPVDAELDNVNNVLRTDLDGLVQQGYQSLNDIPDRVQRQTTTVVAGIKRVLNSIGSDIDNVTQRLPIQDILSAFSVYVNNTESYIHRNLPTLEEYDSYWWLGGLVICSLLTLIVIFYYLGLLCGVCGYDRHATPTTRGCVSNTGGVFLMVGVGLSFLFCWILMIIVVLTFVFGANVEKLICEPYTSKELFRVLDTPYLLNEDWEYYLSGKLFNKSKMKLTFEQVYSDCKKNRGTYGTLHLQNSFNISEHLNINEHTGSISSELESLKVNLNIFLLGAAGRKNLQDFAACGIDRMNYDSYLAQTGKSPAGVNLLSFAYDLEAKANSLPPGNLRNSLKRDAQTIKTIHQQRVLPIEQSLSTLYQSVKILQRTGNGLLERVTRILASLDFAQNFITNNTSSVIIEETKKYGRTIIGYFEHYLQWIEFSISEKVASCKPVATALDTAVDVFLCSYIIDPLNLFWFGIGKATVFLLPALIFAVKLAKYYRRMDSEDVYDDVETIPMKNMENGNNGYHKDHVYGIHNPVMTSPSQH

SEQ ID NO: 14185 - DNA, 3206 bp, Homo sapiens; identical to SEQ ID NO: 14154
  CDS (29)..(2329)

SEQ ID NO: 14186 - protein, 767 aa, Homo sapiens [sequence omitted]

SEQ ID NO: 14187 - DNA, 2418 bp, Homo sapiens
tttaaaaagccccacacaacaaaatggaaacatacatgtacaactcctgtgagggctggagtcttggggttcaggaggaggttagaagttacaggcatctcttcaggcttgcttggtacttggcacacacaggatggtgttttaaagagtgggctgcaccccccacacgccatttacatcagcttcataaacacttttcttcctccctgtaacttaaccttttttcccttttatgaagttgagaggctttatgaaataagtttgcattgcacatccgtgcagaaatctttctgactttgaaattttcaggacgtcagctgtcagatacgaaaggtagatatcaggtaagaatctggacttaggaaatagtcacaaaactgtcataggttgtaattttatcaacattcgcttctagtaaaattaaagtcaattaagaaatagaacttgggtcaaaattctgttacaaagcttcataatttgtcccgaagcatatggtggagcattctgagaaatttgctttttgtgtgtttgacattcctaatttgggagtccttcagctgaattactattcttttagaagttgagacagcaggtaagcaaaggacctagttcatgtaaacatggacatcatgatggctatttaaaaaatatttgttctacaccttctcccctgaggcttggggagtgtgttcagccgctgcagtttctctgctcatggaggtcttgtttggatctgtgctggcggctgagcatttagtgtgagccagtgacccatgaacttgccgctctgtgagggccagagtcagggccagtcatagtaatgggcctgaaggcacttccagaaccttttatgtctctcgtgagccatctgttaagaacgttcttcttggtgtggtttgtaggcctacctgtcgctattctgggaaaccttcttgagtgctatgcaaatgtgttcacaggcaatgggggtggtcctgagccttggggtgggcacctggtcagtgagtgtcttgcccttccccagctgggcatacagtaccttgctctttctggtggcatcatctggctgtgatgaatgaggtctaggaaataatttgcatgtgtcttgggggacacaacagtaacgagtggaaatacattattacagcaacttgcgacgtactaatacctgtcagtgttggcccccgtaaggtatgtaaggcacctgtgagtgccagtgagtgctggtgaaaggccaacatgtactagttatgtaagtattggtgtctgctttaaaaaaggagacccagacttcacctgtcctttttaaacatttgagaacagtgttactctgagcagttgggccaccttcaccttatccgacagctgactgttggatgtgtccattgtcgccagtttggctgttgcccggacaggacaggacctccattgggcgcagcagcaggtggcaggggtgtggcttgaggtgggtggcagcgtctggtcctcctctctggtgctttctgagagggtctctaaagcagagtgtggttggcctgggggaaggcagagcacgtatttctcccctctagtacctctgcatttgtgagtgttccctctggctttctgaagggcagcagactcttgagtatactgcagaggacatgctttatcagtaggtcctgagggctccaggggctcaactgaccaagtaacacagaagttggggtatgtggcctatttgggtcggaaactgcatgtttcagaaagtttgtctctttttcctactcattatttgaagaagagagagcctgtggggatagccttatcttggtccacaggactgaagtgaagtcacttgggaaggggagacagaggatgagcggcgtctgtgtagggaccccaccccgggcctgcagaagggtggtgtgctcccaggactggcatgacaggtgtctcctcctcaccacaggctgtgcccatgagtccctgtgcagaccagtgggcaaggcagctgggccagatctcaggccagccgtttgtgctcctagcagggttgctgtgctggccacacggagaggccctagagagcctcatggattgtaactaaagaagaaacggttcctttttgtttttttaaaaatgatttttaaataccgttttttacaccgttctctcggtactttttttaagctaagtcagcattgtcttccagtgttaaaggcatccctcacctctgcattgaacttacgtatccatgccaaggaatggaatttccatcctgagccagttcagttaggtgtcaattgatactattttaattttttatgcaatctgatgagatgagctcagatttaaaaatctcaaaagcacgtttattgtaacaagaattgttatgtattaatactgcagttttcaataaagattgacttgtgttgc

SEQ ID NO: 14188 - DNA, 3876 bp, Homo sapiens
  CDS (66)..(2417)
gtaacagggcggagcgcgcacctgggcacctgggcagccgccgcggcgctggctagacgtgcgcgatggagggcgacggcgggaccccatgggccctggcgctgctgcgcaccttcgacgcgggcgagttcacgggctgggagaaggtgggctcgggcggcttcgggcaggtgtacaaggtgcgccatgtccactggaagacctggctggccatcaagtgctcgcccagcctgcacgtcgacgacagggagcgcatggagcttttggaagaagccaagaagatggagatggccaagtttcgctacatcctgcctgtgtatggcatctgccgcgaacctgtcggcctggtcatggagtacatggagacgggctccctggaaaagctgctggcttcggagccattgccatgggatctccggttccgaatcatccacgagacggcggtgggcatgaacttcctgcactgcatggccccgccactcctgcacctggacctcaagcccgcgaacatcctgctggatgcccactaccacgtcaagatttctgattttggtctggccaagtgcaacgggctgtcccactcgcatgacctcagcatggatggcctgtttggcacaatcgcctacctccctccagagcgcatcagggagaagagccggctctccgacaccaagcacgatgtatacagctttgcgatcgtcatctggggcgtgctcacacagaagaagccgtttgcagatgagaagaacatcctgcacatcatggtgaaggtggtgaagggccaccgccccgagctgccgcccgtgtgcagagcccggccgcgcgcctgcagccacctgatacgcctcatgcagcggtgctggcagggggatccgcgagttaggcccaccttccaagaaattacttctgaaaccgaggacctgtgtgaaaagcctgatgacgaagtgaaagaaactgctcatgatctggacgtgaaaagccccccggagcccaggagcgaggtggtgcctgcgaggctcaagcgggcctctgcccccaccttcgataacgactacagcctctccgagcttctctcacagctggactctggagtttcccaggctgtcgagggccccgaggagctcagccgcagctcctctgagtccaagctgccatcgtccggcagtgggaagaggctctcgggggtgtcctcggtggactccgccttctcttccagaggatcactgtcgctgtcctttgagcgggaaccttcaaccagcgatctgggtaccacagacgtccagaagaagaagcttgtggatgccatcgtgtccggggacaccagcaaactgatgaagatcctgcagccgcaggacgtggacctggcactggacagcggtgccagcctgctgcacctggcggtggaggccgggcaagaggagtgcgccaagtggctgctgctcaacaatgccaaccccaacctgagcaaccgtaggggctccaccccgttgcacatggccgtggagaggagggtgcggggtgtcgtggagcgcctgctggcacggaagatcagtgtcaacgccaaggatgaggaccagtggacagccctccactttgcagcccagaacggggatgagtctagcacacggctgctgttggagaagaacgcctcggtcaacgaggtggactttgagggcctgacgcccatgcacgtggcctgccagcacgggcaggagaatatcgtgcgcatcctgctgcgccgaggcgtggacgtgagcctgcagggcaaggatgcctggctgccactgcactacgctgcctggcagggccacctgcccatcgtcaagctgctggccaagcagccgggggtgagtgtgaacgcccagacgctggatgggaggacgccattgcacctggccgcacagcgcgggcactaccgcgtggcccgcatcctcatcgacctgtgctccgacgtcaacgtctgcagcctgctggcacagacacccctgcacgtggccgcggagacggggcacacgagcactgccaggctgctcctgcatcggggcgctggcaaggaggccgtgacctcagacggctacaccgctctgcacctggctgcccgcaacggacacctggccactgtcaagctgcttgtcgaggagaaggccgatgtgctggcccggggacccctgaaccagacggcgctgcacctggctgccgcccacgggcactcggaggtggtggaggagttggtcagcgccgatgtcattgacctgttcgacgagcaggggctcagcgcgctgcacctggccgcccagggccggcacgcacagacggtggagactctgctcaggcatggggcccacatcaacctgcagagcctcaagttccagggcggccatggccccgccgccacactcctgcggcgaagcaagacctagctggctgcctgcggagaccgggggtccacgtggggctcttgtcctgtcctgtgttcctcgtggggatggaacgatcctgcgtggggccccgttgtggcttacctaaatgttaaccaagcagaggtgacatggtgccatcaggaggcggctgctgctgaccggagtgtcccctccaggtgaagctggctcaggtgcacatgcccgctccatcatcgatctaggcacctgctgtctgaagggaccgtgggtcagaatcatttcgttgtgctcctaatgggtcgctgaggctggtctctcagtgatgaagccccaggcgtggaagcatccactctctcctgaggcgagccaccttgggttgctggagctcaccagtcttgagggaggtgcaggggaaactgtgttttttatcttcatacatgacggtgggcagagaggcctgtcttaaagtttccatggaattgttttataaaatatcttaagagatgaataccttatcagctgttgcttgaaacctgttaaaaatgttcataacattggatagtctagtctctaaatgatggctaagtagtggggttggctttgaaaacaatgttttatgcaacaaggaacgaatggtagcagccagctttgcggggcgtatgtgtggccagctcttaaccattccagtctattacttgggtgagtccttgtggacaaccacacacacgtgcccacatggtactagctgccgttcgtttctcgttgcctaagatgttttggcaactctagagccacaggcctaagagtcattaaaaaattctccctttgtaacctcagtgctggggactgaggcgagccccctcaggtcgctggagtgcaccagtcttggggaagaggtgcaggagaagctgtgttttttatctccacacgcagtatgaagataaaattacatagtattacctagacatagacagtattacctaggtagatgcactgctcacctgcacccttcccagctctcatttttgttaggtgatttgggatagggatagtgttttggggtatggggggagtgtttctgacctgctttgcagacgtgcctccgcacctcagcagtttggggtgtggccccagggcggttcttggatgtaaaagatgtggccatctagcctcgtaacttcactgtcacctgtgtcccatagggtgccttctgaatactgttattagaataagtttgttgcagaacgtgaccctgcgtgcaaacatgtaccgtggcctggtatatgatagagattgatattaatgtaccatgtatgttaatgtgaatctgtgggcaggatacttttccatggcaggaaatatccaagctgttgaaactggctatgttttaatatgcctcattgtgcctttactgttgtgtggactgcgtgagggacaagaagttccatttgatgtcaataaagcaaagtacttgccc

SEQ ID NO: 14189 - protein, 784 aa, Homo sapiens [sequence omitted]

SEQ ID NO: 14190 - DNA, 2487 bp, Homo sapiens
  CDS (63)..(1301)
ttgaccaggaatataaaatcaattctcgactacttcagaacattctagatgcaggtttccaaatgcctacgccaatccaaatgcaagccatcccagttatgctgcatggtcgggaacttctggcttctgctccaactggatctggaaaaacattagcttttagcattcctattttaatgcagctgaaacaacccgcaaataaaggcttcagagccctgattatatcaccaacacgagaacttgccagccagattcacagagagttaataaaaatttctgagggaacaggattcagaatacacatgatccacaaagcagcagtggcagccaagaaatttggacctaaatcatctaaaaagtttgatattcttgtgactactccaaatcgactaatctatttattaaagcaagatccccccggaatcgacctagcaagcgttgagtggcttgtagtagacgaatcagataaactgtttgaagatggcaaaactgggttcagagaccagctggcttccattttcctggcctgcacatcccacaaggtccgaagagctatgttcagtgcaacttttgcatatgatgttgaacagtggtgcaaactcaacctggacaatgtcatcagtgtgtccattggagcaaggaattctgcagtagaaactgtagaacaagagcttctctttgttggatctgagaccggaaaacttctggccgtgagagaacttgttaaaaagggtttcaatccacctgttcttgtttttgttcagtccattgaaagggctaaagaactttttcatgagctcatatatgaaggtattaatgtggatgttattcatgcagagagaacacaacaacagagagataacacagtccacagtttcagagcaggaaaaatctgggttctgatttgtacagccttgctagcaagagggattgattttaaaggtgtgaacttggtgatcaactatgactttccaactagctcagtggaatatatccacaggataggtcgaactggaagagcagggaataagggaaaagcaattacatttttcactgaggatgataagccattattaagaagcgttgctaatgttatacagcaggctgggtgtcctgtaccagaatacataaaaggttttcagaaactactaagcaaacaaaagaaaaagatgattaagaaaccattggaaagggagagcattagtacaactccaaaatgtttcttagaaaaagctaaggataaacagaaaaaggtcactggtcagaacagcaagaagaaagtagctcttgaagacaaaagttaaaaacagactttaaaaatactgtcccagaaatgtaattttatgatcccagcatgaatgttattttcatggaatacttgaagtcttacagtcacctgtaccaaacatttgaaatcaactacaagtacatgggactggtgataaatgatcctaaactatcaagtcagtttcaatttgtaggtgccttttttttttcctgtagagatgagggtcttgccatgttgtccaggctggtcttgaactcctgacctcacacaatcctcctgccttagcctcctgagtaactgagattacaggcacaagctgctgcacccagctctgtaggtgacttttaaatgattatacaatggaaataacattcattgacatttctgtggtttgaatccagagagatacttcttatagaaaaacaaatgtttatgctaaaaataacaccaaaatgtggtgaactcttaaggacttttcccttcaagtgtgaaggaaggtgtgatgaatgctgtggagaggcatctggaacagaaattcaaaataaagccttgacattaaataccccttccactgctcactttgtggatggtagcatgagctgtctaccaagaagaaacctgctgctctcttaattttaatatttcctaatttgttgatggccttttgtgttgtgaaccacaacaaagagaggcctcttttgtggctggttattccagttccctgggattttaaattctttggtctattaagtatccttgtattggatacgtaataccttagtgctgtcataatgttgtacaagatcatgatcagcttctccctttcttcattttctgtgatttaaccatgttctttcctgtctctttccatttaagatattttatttgaatactgataaacattttatcctgataaggaagaatgttcttgttacttgatatacctctgtcttcattctcttacagcttatctttccttaggttgatggtgcctcatttaataagtagatctctacttaagctaaaggattatgatcatatggtgttggagactattagctattagatttttctcaaaatatgagttttgtacaatggaatgaaaaagtgacttcatatacgtaagactggtgcctaagaatgacttgaatgttatcagtactaccacagaactataatatacattgccttttctcagc

SEQ ID NO: 14191 - protein, 413 aa, Homo sapiens; identical to SEQ ID NO: 11232

SEQ ID NO: 14192 - DNA, 3715 bp, Homo sapiens
  CDS (137)..(877)
tcttctgtcctctgaagcagtgcttcctgacctgaccgatgaacttgcccctgtttttctccttcgatggttctactctgcttctgactacatctcagactgctgggatagcatttttcacaacaactggagggaaatgatgcccctgctgtccctgatcttctctgccctcttcatcctcttcggcactgtcatcgttcaggctttcagcgactctaatgatgagcgagagtcaagccctccagaaaaagaggaagcccaagagaagactgggaaaactgagccaagcttcaccaaagaaaacagcagcaagattcctaaaaaaggctttgtggaggtaactgaactcacagatgtaacatacaccagtaacttggtacgtctgaggccaggccacatgaatgtggtcctcatcctgtcgaattctaccaagaccagcctactacagaaatttgctttggaggtctacacatttactgggagcagctgcctacacttctccttcctgagtctagataaacacagagaatggctagaatacttactagaatttgctcaagatgcagctccaatcccaaaccaatatgataagcatttcatggagcgtgactacactggttatgtactggctctgaatggccacaagaaatacttctgcctcttcaagccccaaaagacagtcgaagaggaggaagccatagggtcgtgcagtgatgttgactcttccctctacctgggtgaatctcgagggaaaccttcctgtggccttggatccaggcccatcaaaggaaagttgagcaagctctctttatggatggaacgcctgctggagggctccttacagaggttttatatcccatcatggcctgaactagactgagaggattttccaaagagatttgaactcttcagactttttaacatgcccctgtgaacaggtattttcaggactcaaactaccacaatgaacagagtatagattttagattgctcttctagaaccatggctagaagaatctttcctttgtcctgttctaacctaggaatgaaaaacaccaccagtttgaatcgcctagatgaaaatcttttcctctgggtgttatttttccccactgaatgccacaccattgaaaatagactgctcatcccctcttcctttcttgtccctgtcccatgctcaccccaccctcctgtcctgtgtcttggagaagcacagggctccaccctgcaagcggcatctggcggaccctcatgagcctgtcgtgcaggccaggtcattggccccttccccaatcccggccctgctgtgctgctgccatggcgcatgctcctaactctgaacaacccacggcagcttctagccccgcatctggaaaaaggcccctttccaagcaatctcacgtttactggttgttctgggagtaagtggctaaatgtatattttgggggtatcccccaacaacagtttgttggccacaggttgaaaaggaaaggaataaacgggagttctgcatgtgagttctcaagaaaaggaaagggaggctgagcagtggctgaagcgatgcagccttgagacacgctgtgagcatcccatccgccgccccagcgctgctggtagccaggggaggggtctgcacagcgagaagtactgtgatgactttgagccgttgacatgtatgtcttcagatgcctttctgcctctgtcgattttagggtatggatattaggagccataacttgtaatcttgttctctgaacgtagagataagctgctataaagccagtagatgttaaactgaagagaaattattcccacctgctatgagtcaggcttaaggaatctcttcaatagtgtctctttagtaaaataccaaacatgtctttgtatcaaggaacttaaaatttctcaacaattgtattttgaacactgttaccctaaaagtgctgtctcttcaagtcatcttttgcaggaagtgagccaagatttgttctagactcccattttgcaaaaggcttactttccacttctgggctgtattttgatgtctcatcttcattgttttcactcttaacttagagctgcttcaccagtattggggtcagactggccatcagcacctgagcgtgctgagctccaggtatagtggaccccagggtgcctcataccagccagttagagagcataccttttatttttcagggcagaatgaccagtggttctgagtttgagtttggacagcttcaaagagtggtccgttcaaatgtcaaagcaaggtgcctttggtggctttgtgaagggtgaaaatcagtgatgggacatttactaagtatttctttttttttttttttttttagttgttgagacagagtttcactcttgttgcccaggctggagtgaaatggtgcgatctcggttcaccgcaacctccacatcccaggttcaagtgattctcctgcctcagcctcctgagtagctaggattacaggcatgtgccaccatgtaattagcccggctaattttgtatttttagtagagacgggatttctccatgttgatcaggctggtcatgaactcctgacctcaggtgatctgcctgcctcagcctcccaaagtgctgctgggattacaggcgtgagccaccactcccggctaagttagtatttctttaatcttaatgctttaaactaagccacttggatcctgaataatttaaatcttgagctacattggtaagtaataaattatttaaggccaggaattcctgtagttttcatggagtctgtagctttattaaaaaataaatcactgccaggcttcattcttccatatgatcctctaaaaatggacacttcctctgaatgctgtatctcatggcacctggtccaaccagaaatggtcaaggaattcatttggctccttgatacatcagtcctcaatattactttctaggtattttatggccagattgcttatatgagtggtcttttggtttggtagtaggtttttatttttaatttctgtactaatgaaattcctgactttaatttctgaaaaccaaaaactctccaagtgtatttatttatatttttttaatagagacgaggtcttgctatgttgcccaggctggtcccaaactcctggcctcaagcagtccttccaccttggcctcccaaagtgctgggattatcaatatgagccaccatgccagatttgttcatttttaaatatttttatctcttcaagtcatcttttgatcttttaaaaagcaccttcaaacagctgcaccttccatttgcactaggaaatgaaggtagtgatgggattggcaatgttcctggcatatgtttcagcccaaaagctcttctacagaccggtttagagctggtgccctatgagaatattagggagcttttattttaaattgaactttacccttgtccatgcaaggcattcctcctgaatgcatccatgaatttgtttacttttgcgtcaaacatatgagccattgtcatgctcagcctgtgccaccattgctctgtctgatgtatgtaatcatacaagacctgattttggttctaacacagtggtctttgactatcaacattgatgtttttagagatgggttcttctggttgatacagactatgcattgcgtttagcagatggggtaaaactggcctaaaacaagtctttgcagaatacatgccaatttcc

SEQ ID NO: 14193 - protein, 247 aa, Homo sapiens
MMPLLSLIFSALFILFGTVIVQAFSDSNDERESSPPEKEEAQEKTGKTEPSFTKENSSKIPKKGFVEVTELTDVTYTSNLVRLRPGHMNVVLILSNSTKTSLLQKFALEVYTFTGSSCLHFSFLSLDKHREWLEYLLEFAQDAAPIPNQYDKHFMERDYTGYVLALNGHKKYFCLFKPQKTVEEEEAIGSCSDVDSSLYLGESRGKPSCGLGSRPIKGKLSKLSLWMERLLEGSLQRFYIPSWPELD

SEQ ID NO: 14194 - DNA, 1830 bp, Homo sapiens
  CDS (124)..(1077)
tgggcgatccgctcgtattgaagggggaagagacctgggaaattaagtttcttgcggagtacggtggggattgcagctgctgagcagggattctggaaagcattgcgtacctgagcccccagcatggcgggcctaaagcggcgggcaagccaggtgtggccagaagagcatggtgagcaggaacatgggctgtacagcctgcaccgcatgtttgacatcgtgggcactcatctgacacacagagatgtgcgcgtgctttctttcctctttgttgatgtcattgatgaccacgagcgtggactcatccgaaatggacgtgacttcttattggcactggagcgccagggccgctgtgatgaaagtaactttcgccaggtgctgcagctgctgcgcatcatcactcgccacgacctgctgccctacgtcaccctcaagaggagacgggctgtgtgccctgatcttgtagacaagtatctggaggagacatcaattcgctatgtgacccccagagccctcagtgatccagaaccaaggcctccccagccctctaaaacagtgcctccccactatcctgtggtgtgttgccccacttcgggtcctcagatgtgtagcaagcggccagcccgagggagagccacacttgggagccagcgaaaacgccggaagccagtgacaccagatcccaaggagaagcagacatgtgacatcagactgcgggttcgggctgaatactgccagcatgagactgctctgcagggcaatgtcttctctaacaagcaggacccacttgagcgccagtttgagcgctttaaccaggccaacaccatcctcaagtcccgggacctgggctccatcatctgtgacatcaagttctctgagctcacctacctcgatgcattctggcgtgactacatcaatggctctttattagaggcacttaaaggtgtcttcatcacagactccctcaagcaagctgtgggccatgaagccatcaagctgctggtaaatgtagacgaggaggactatgagctgggccgacagaaactcctgaggaacttgatgctgcaagcattgccctgacctattccctcttctcactttggggactgttcccatcacccacctctggagcttacactgttctggggtttgttctctacccttccaaccaatcacacccctccctgcacccatgtgcctgggcttcccctttatttcccttttccatttaccccgtaatgtgtctctacagctaccttaccactgagccgtaagacaaatgtataggaagaagcaaagtctacagcacatagtctttgtaagggattgatgtgaacactttttttggatgcactgaggagttatcaatacttctggctttatgagagctcttaaattttgtctaaaaaaccaaagggctgtgagtaagggagctatgtggaaagtgggactctgaagtgtattttgaaaattaatcgccaccctcttccaaattatagaattttttaaaaacaagctgtggccctttccactctctcctggcctctggtgctgctcctctctgccgcctttcctccattccatggcttgaaacctctgcctgatgtggctccttcctttttcccatttgtcaaaccctcttcaaaggaggaacagataagactgggtctgcctagtcatgcctcccaactgtggtggtatatgtgtacacacatacacagggtggatggagaagaggttgctgattaaaatacactccccctataaaggggaagggggagtgtgacactttctttccatgttcaagtgaaaataaataatgtaccctgc

SEQ ID NO: 14195 - protein, 318 aa, Homo sapiens [sequence omitted]

SEQ ID NO: 14196 - DNA, 1856 bp, Homo sapiens
  CDS (10)..(1341)
aggccagctatggcccccgacccggtggccgccgggaccgcggctcagggacctaccccgcgctacttcacctgggacgaggtggcccagcgctcagggtgcgaggagcggtggctagtgatcgaccgtaaggtgtacaacatcagcgagttcacccgccggcatccagggggctcccgggtcatcagccactacgccgggcaggatgccacggatccctttgtggccttccacatcaacaagggccttgtgaagaagtatatgaactctctcctgattggagaactgtctccagagcagcccagctttgagcccaccaagaataaagagctgacagatgagttccgggagctgcgggccacagtggagcggatggggctcatgaaggccaaccatgtcttcttcctgctgtacctgctgcacatcttgctgctggatggtgcagcctggctcaccctttgggtctttgggacgtcctttttgcccttcctcctctgtgcggtgctgctcagtgcagttcaggcccaggctggctggctgcagcatgactttgggcacctgtcggtcttcagcacctcaaagtggaaccatctgctacatcattttgtgattggccacctgaagggggcccccgccagttggtggaaccacatgcacttccagcaccatgccaagcccaactgcttccgcaaagacccagacatcaacatgcatcccttcttctttgccttggggaagatcctctctgtggagcttgggaaacagaagaaaaaatatatgccgtacaaccaccagcacaaatacttcttcctaattgggcccccagccttgctgcctctctacttccagtggtatattttctattttgttatccagcgaaagaagtgggtggacttggcctggatgattaccttctacgtccgcttcttcctcacttatgtgccactattggggctgaaagccctcctgggccttttcttcatagtcaggttcctggaaagcaactggtttgtgtgggtgacacagatgaaccatattcccatgcacattgatcatgaccggaacatggactgggtttccacccagctccaggccacatgcaatgtccacaagtctgccttcaatgactggttcagtggacacctcaacttccagattgagcaccatctttttcccacgatgcctcgacacaattaccacaaagtggctcccctggtgcagtccttgtgtgccaagcatggcatagagtaccagtccaagcccctgctgtcagccttcgccgacatcatccactcactaaaggagtcagggcagctctggctagatgcctatcttcaccaataacaacagccaccctgcccagtctggaagaagaggaggaagactctggagccaaggcagaggggagcttgagggacaatgccactatagtttaatactcagagggggttgggtttggggacataaagcctctgactcaaactcctcccttttatcttctagccacagttctaagacccaaagtggggggtggacacagaagtccctaggagggaaggagctgttggggcaggggtgtaaattatttcctttttctagtttggcacatgcaggtagttggtgaacagagagaaccaggagggtaacagaagaggagggacctactgaacccagagtcaggaagagatttaacactaaaattccactcatgccgggcgtggtggcacgcgcctgtaatcccagctacccaggaggctgaggcaggagaatcgcttgaaccggggaggtggaggttgcagtgagctgagatcacgccattgtactccagcctgggcgacagagcaagactccatttc

SEQ ID NO: 14197 - protein, 444 aa, Homo sapiens [sequence omitted]

SEQ ID NO: 14198 - DNA, 3937 bp, Homo sapiens
  CDS (89)..(3013)
aagttctgccttgtctccgccgcgggtcaggggtgagagctggaatctctgcacgggccttggaaaacgactgtcttcttctgccaaaatgtcaggaattggaaataaaagagcagctggagaacctggcacctccatgcctcctgagaagaaggcagctgttgaagattcagggaccacagtggaaacaattaagctaggaggtgtctcttcaacggaggaactagacattagaacactgcaaaccaaaaaccgcaagctggcagaaatgttggatcagcggcaggccattgaagatgaacttcgtgagcacattgaaaaactggaacgacgacaggccactgatgatgcctcactattgattgtcaaccgatactggagtcagtttgatgaaaacatccgtatcatccttaaacgttatgatctggagcagggcttgggagacctactcacagaacgaaaagcccttgttgtgcctgaaccagaaccagactctgatagcaatcaggagcgtaaagatgaccgagagagaggggaagggcaagagccagctttctctttccttgctactttggccagcagttccagtgaagagatggagtctcagctgcaggaacgtgtggagtcttcccgccgagccgtgtcccagattgtgactgtttatgataaattgcaagaaaaagtggagctcttatcccggaagctaaacagtggagataatctgatagtggaggaagcagtgcaggagctgaactctttcctcgcacaggagaatatgaggctacaggaattgacagatcttcttcaggaaaagcatcgcaccatgtctcaggagttctccaagttgcagagtaaagtggagacagccgaatcacgagtgtctgtcctggagtccatgattgatgacctgcagtgggatattgacaaaattcgaaagagggaacagcgactcaaccgacacttagcagaagtcctagaacgggtgaattccaaaggttataaggtgtatggagcggggagcagtctgtatggcggcacaatcactatcaatgttcggaagtttgaggaaatgaatgcagagcttgaggagaacaaagagttggctcagaaccgtctctgtgagctggagaaacttcggcaagactttgaggaggtcactacacaaaatgaaaagctgaaggtggaattgcggagtgcagtggagcaagtcgttaaggaaactccagaatatcgctgcatgcagtcacagttctccgtcttgtataatgagagcctacagttgaaagcacacttggatgaggctcggaccctgcttcatggcaccagaggaacccaccagcaccaggttgagcttattgagcgagatgaggttagtcttcataagaagctgaggactgaagtaattcagctagaagatacattggcccaggtccgcaaggagtatgaaatgctgaggatagaatttgagcagacccttgctgccaatgaacaagcaggccctataaacagggagatgcgccacctcatcagtagcctccagaatcacaatcaccagctgaaaggggaggtcctgagatataagcggaaattgagagaagcccagtctgacctgaacaagacacgcctgcgtagtggtagtgccctcctgcagtcccagtctagtactgaggacccgaaggatgagcctgcggagctaaaaccagattctgaggacttatcctcccagtcctcagcttcaaaggcatctcaggaggatgccaatgaaatcaagtctaaacgggatgaagaagaacgagaacgagaaaggagggagaaggagagggaacgagaaagagaacgggagaaggagaaggagagagaacgagagaagcagaagctaaaagagtcagaaaaagagagagattctgctaaggataaagagaaaggcaaacatgatgatggacggaaaaaggaagcagaaattatcaaacaattgaagattgaactcaagaaggcacaggagagccaaaaggagatgaaactattgctggatatgtaccgttctgccccaaaggaacagagagacaaagttcagctgatggcagctgaggagaagtctaaggcagagttggaagatctaaggcaaagactcaaggatctggaagataaagagaagaaagagaacaagaaaatggctgatgaggaagccttgaggaagatccgggcagtggaggagcagatagaatacctacagaagaagctagccatggccaagcaggaagaagaagcactcctctctgaaatggatgtcacaggccaggcctttgaagacatgcaggagcaaaatatccgtttgatgcagcaattgcgggagaaggatgatgcaaatttcaagctcatgtcagagcgtatcaagtccaatcagatccataagttgcttaaagaagagaaggaggagctggcagaccaggtgttgactctgaagactcaggtcgatgcccagctacaggtagtaaggaaactggaagagaaggagcatctgttacagagcaacattggcacaggggagaaagagctgggtcttaggacccaagccttagagatgaataaacgcaaggcaatggaggcagcccagcttgcagatgacctcaaagcacaactggagttggctcagaagaagctacatgattttcaggatgagatcgtggagaacagtgttaccaaagaaaaggacatgttcaatttcaaacgagcccaggaggacatctctagacttcgcaggaagctggagaccacaaagaaaccagacaatgtacccaagtgtgatgagattctgatggaagagattaaggattacaaggcacgcttgacctgtccatgctgtaacatgcgtaaaaaggatgctgttcttactaagtgttttcatgtcttctgctttgagtgtgtgaagacacgctatgacacccgccagcgcaaatgtcccaagtgtaatgctgcttttggtgccaatgattttcatcgcatctacattggttgatctaagtcaagagaagaagaggagctggctagtcaggaacttattcattaaccaccaaacctctacctcttctctccttgactgtcacctgtaggacagtttatcagtcaactacctttcctccagactttacttccaggctctcctcttcagtagctggatgactttagcagaaaggactggtaaatacaagccttgggtttcagaatgaattagaaacaaataactcttactgtcttccctcccagctttgtttattttgtgcttttagacttttcagtgttttctttttccagcccactgtataaacttggattgtccattcctcctgaagaaatcaagttggtatttttgatgtggaaaagggaacaaaagtggaaacatggctacttttggggagtgatattttaaaaaataagttgtctatgggcacaaagttttcttcatttgtgtagcaaacttcttgtgaatgtggattacaaaatggtataattgtgctactctcccctgggtggtttgcagccctaatgaaattatgtctaggatgattcagtctatttcccatttactagcagagtaacttgttaagatcagctggctttcttgttaaagttatttaagttttgaatgctctactacttcaagtctttaaatttcttgagactagaataattttaaataatatgaccctttgtcttctaatgaaataaagattgaagaggttgagtcaggactgagctggtgaagaaatcttgtgggtattctggaaatttgatacggagagaacttggtgagctatgaattactctcagtctcctttttacagggttgttgtgatccctcttttccagaaaattctgtggaatgtttctgtaggactttgttctccacaagcttgaattaaagcaggattcagtttgc

SEQ ID NO: 14199 - protein, 975 aa, Homo sapiens [sequence omitted]

SEQ ID NO: 14200 - DNA, 3836 bp, Homo sapiens
  CDS (31)..(3267)
gagactggcgtccggtgtgcaggtggccacatggatcctggcagccggtggcggaacctgcccagcgggcctagcctaaagcacttgactgacccctcttatggaatcccgcgggaacagcaaaaggcagcgttgcaggagctgacgcgggcgcacgtggagtccttcaactacgctgtgcacgagggtctcggcctcgcggtgcaggctgatatcaactgggcagtgaatggaatctcaaaaggaatcattaagcagtttcttggctacgttcccatcatggtgaaatccaagctttgcaacttacgtaaccttcccccacaagccctcattgagcaccatgaggaggcagaggaaatggggggctattttataatcaatggcattgaaaaagtcatccgaatgttgattatgcctcggagaaattttcccattgcaatgataagaccaaaatggaaaaccagagggcctggttatactcagtatggagtttcaatgcactgtgtgagggaagaacattccgctgtcaatatgaacctccactacttggaaaatggcacagttatgttgaactttatttaccgaaaagaactgttctttcgtcctttgggatttgcacttaaggcacttgtcagcttttctgattatcagatctttcaggagctcatcaaaggaaaagaggatgattctttccttaggaactctgtttctcagatgttaaggattgtaatggaagagggttgtttgacacaaaaacaggtccttaactacctaggtgaatgcttcagagtaaaactcaatgttcctgactggtacccaaatgagcaagctgcggagttcctgtttaaccagtgcatctgtatccacttgaaatccaatactgaaaagttttatatgctttgtctcatgacgcgaaagctctttgctttagccaaaggagagtgcatggaggacaatcctgatagtttggtgaaccaggaagtcctcacaccgggtcagctcttccttatgttcctgaaggaaaaactggaaggttggttagtgtctattaaaatagcttttgataagaaggctcagaagaccagtgtttccatgaacactgacaatttgatgaggatttttacaatgggcatagaccttacaaaaccatttgaatacctttttgctactgggaatctgcgttctaaaacaggtcttggcctcctacaagattctggactttgtgttgtggctgacaagctgaacttcatacgctacctctcccatttccgctgcgtgcacagaggggctgattttgccaagatgaggaccaccacagtacgcaggctgctgccagagtcctggggcttcctttgtcccgtgcataccccagacggggagccctgtggcctgatgaaccacctaactgccgtatgtgaggttgtcacacagtttgtgtatacggcatctattccagctttactgtgcaacttgggggtcactcccattgatggagctccccaccgatcatacagtgagtgctaccctgtcctgctggacggtgtcatggttggctgggtggataaggatcttgctccaggcatcgcagattctcttcgtcattttaaggtgttgagagagaaaagaattcctccctggatggaagtggtccttatacccatgacaggaaaaccaagtctgtacccaggattgttcctttttaccactccttgtagactggtacggcctgtgcagaacttagcattgggcaaagaagagctaattggaactatggaacagatcttcatgaatgtcgctatctttgaggatgaagtttttgctggagttaccacacaccaggaactctttccacacagcctgctgagtgtgattgccaacttcatccctttctctgatcacaaccagagtccacggaacatgtaccaatgccagatgggtaagcaaactatgggctttccacttctcacttatcaagaccgatcggataacaaactgtatcgtcttcagactcctcagagtcccttggtgagaccctccatgtatgattattatgacatggataactatccaattgggaccaatgccatcgttgctgtgatttcttacactggctatgatatggaagatgccatgattgtgaataaggcctcttgggaacgaggctttgcccatggaagtgtctacaagtctgagttcatagacctctctgaaaaaattaaacaaggagatagtagcctggtgtttggcatcaaacctggtgacccacgcgttctgcagaagttagatgacgatggattgccgtttataggagcaaaactgcagtacggagatccgtattacagctacctcaacctcaacaccggggaaagttttgtgatgtactataagagtaaagaaaattgtgttgtggataacatcaaagtgtgcagtaatgacactgggagtggaaaattcaagtgtgttcgcatcactatgagagtgcctcggaacccaactatcggagataaatttgccagtcgccatgggcggaagggcattttaagcagattgtggccggctgaggacatgccttttactgagagtgggatggtcccagacattctgttcaatccccatggttttccatcccgcatgaccattgggatgttaattgagagtatggccgggaagtctgcagctttgcatggtctctgccatgatgctacacccttcatcttctcagaggagaactcggccttagaatactttggtgagatgttaaaggctgctggctacaatttctatggcaccgagaggttatatagtggcatcagtgggctagaactggaagcagacatcttcataggagtggtttattatcagcgcttacgccatatggtctcagacaaatttcaagtaaggacaactggagcccgagacagagtcaccaaccagcctattgggggaagaaatgtccagggtggaatccgttttggggagatggaacgggatgcgcttttagctcatggtacatcttttctccttcatgaccgcctcttcaactgctcagatcggtcggtagcccatgtgtgtgtgaagtgtggcagtttactctctccactgttggagaagccacccccttcttggtctgccatgcgcaacagaaaatacaactgtactctgtgtagtcgcagtgacactatcgatactgtttctgtgccttatgtttttcggtattttgtagctgaactggcagctatgaacatcaaagtgaaactggatgttgtttaacttgatgttgaccttttggattaagaggactatcagattaaagcaaaatgtaattttaattcaatgaagatatcattaccaggttactcttgagatttttcaacggtgttagaactctcaaccaagacctgaaaaccaagtatgcaaggtttctgaatctctctggtagattaactattgacaatgattttctgttatctttgttcaaaaagttcatgtcttctcaaaatatgaaatattgataaatggaagagcatacggtgacaagtctcctttccaaccccaggttccctacaccctgctctcagcaggcagtgagtgtcacacacctgttaatccatcttgagcaggacagtactatacaaatagaatgcaagctgtaatgtaattttatattttcttatagccacgttgaagtaaaaacaaccaggtacagtgttttttaccagctttatagaagtacagttgttacatatttaatgaatacaatttgatgggtctgactatatgcacacacctttgataccatcaccacaatcagggtaataaacatacctgtcatctcc

SEQ ID NO: 14201 - protein, 1079 aa, Homo sapiens
MDPGSRWRNLPSGPSLKHLTDPSYGIPREQQKAALQELTRAHVESFNYAVHEGLGLAVQADINWAVNGISKGIIKQFLGYVPIMVKSKLCNLRNLPPQALIEHHEEAEEMGGYFIINGIEKVIRMLIMPRRNFPIAMIRPKWKTRGPGYTQYGVSMHCVREEHSAVNMNLHYLENGTVMLNFIYRKELFFRPLGFALKALVSFSDYQIFQELIKGKEDDSFLRNSVSQMLRIVMEEGCLTQKQVLNYLGECFRVKLNVPDWYPNEQAAEFLFNQCICIHLKSNTEKFYMLCLMTRKLFALAKGECMEDNPDSLVNQEVLTPGQLFLMFLKEKLEGWLVSIKIAFDKKAQKTSVSMNTDNLMRIFTMGIDLTKPFEYLFATGNLRSKTGLGLLQDSGLCVVADKLNFIRYLSHFRCVHRGADFAKMRTTTVRRLLPESWGFLCPVHTPDGEPCGLMNHLTAVCEVVTQFVYTASIPALLCNLGVTPIDGAPHRSYSECYPVLLDGVMVGWVDKDLAPGIADSLRHFKVLREKRIPPWMEVVLIPMTGKPSLYPGLFLFTTPCRLVRPVQNLALGKEELIGTMEQIFMNVAIFEDEVFAGVTTHQELFPHSLLSVIANFIPFSDHNQSPRNMYQCQMGKQTMGFPLLTYQDRSDNKLYRLQTPQSPLVRPSMYDYYDMDNYPIGTNAIVAVISYTGYDMEDAMIVNKASWERGFAHGSVYKSEFIDLSEKIKQGDSSLVFGIKPGDPRVLQKLDDDGLPFIGAKLQYGDPYYSYLNLNTGESFVMYYKSKENCVVDNIKVCSNDTGSGKFKCVRITMRVPRNPTIGDKFASRHGRKGILSRLWPAEDMPFTESGMVPDILFNPHGFPSRMTIGMLIESMAGKSAALHGLCHDATPFIFSEENSALEYFGEMLKAAGYNFYGTERLYSGISGLELEADIFIGVVYYQRLRHMVSDKFQVRTTGARDRVTNQPIGGRNVQGGIRFGEMERDALLAHGTSFLLHDRLFNCSDRSVAHVCVKCGSLLSPLLEKPPPSWSAMRNRKYNCTLCSRSDTIDTVSVPYVFRYFVAELAAMNIKVKLDVV

SEQ ID NO: 14202 - DNA, 1542 bp, Homo sapiens
  CDS (56)..(1306)
gagacttgttggccgcggagactgcgaccctcttctctcagtctgccttactaccatgccgctctacgagggcctggggagcggcggggagaagacggcggtcgtgatcgacctgggagaggcctttaccaagtgtggatttgctggagaaactggtccaagatgtataattcctagtgtgataaaaagagctgggatgcctaagcctgtcagagttgttcagtataatatcaatacagaagaattatattcctacctaaaggaattcatccacatactatatttcaggcatctattggtgaatcccagagaccgccgagttgtgattatcgaatcggtattatgtccttctcacttcagagagacactcactcgtgttcttttcaaatattttgaggttccatctgtcttgcttgctccaagtcatctaatggctcttctgacgcttggaattaattctgccatggtcctagattgtggatatagggaaagcctggtgttacccatatatgaaggaatcccagttctaaattgttggggagcactacccctaggaggaaaagctcttcacaaagagttggaaactcaactattggaacaatgtactgttgacacaagtgttgctaaagaacagagccttccctcagtgatgggttcagttccggaaggtgtcttagaggacattaaagcgcgtacttgctttgtaagtggtctgaagcgaggactaaaaatccaagcagcaaaatttaatattgatgggaataatgagcgtccctccccacccccaaatgttgactatccattagatggagagaagattttacatatccttggatcaatcagagattcagttgtggaaattctttttgaacaagataatgaagagcaatcagttgccactttaatattggattcccttatacagtgtccgatagacaccaggaagcaactagcagagaatttggtagtcataggtggcacttctatgttgccaggatttctccacagattgcttgcagaaataaggtatttggtagaaaaaccaaaatataaaaaagcacttggcactaagacatttcgaatccatactccacctgcaaaagctaattgtgtggcctggttgggaggggctatttttggagcattacaggatatacttgggagccgttctgtttcaaaggaatattataatcagacgggccgtatacctgattggtgttctctcaataacccacctttggaaatgatgtttgatgtcgggaaaactcaaccacctctgatgaagagagcattttccactgagaaatagaagtttgattaaaaatcaaccttgcttcatatcaaatatttaaccaattataagcaaattgtacaaagtatgtaggatgttttgttatagaggactatagtggaagtgaaagcattctgtgtttactctttgcattaatatataattcttttgactttgtttctcttgtgtagtggtaaaatggtagctggtgcttattgagatttgctgtatttatatcaataaagtatagt

SEQ ID NO: 14203 - protein, 417 aa, Homo sapiens [sequence omitted]

SEQ ID NO: 14204 - DNA, 1529 bp, Homo sapiens
  CDS (470)..(1360)
aaagtcatggaggccatggggttggattgaaaccagctttggggggttcgtttccttccttttttgccaaattatactacaggcacatatatgccaaagtcagtgggggaccttcctggagcagaggtttgaatcctattacgactactgcaatctcttcaactacattcttaatgccgatggtcctgctccccttgaactacccaaccagtggctctgggatattatcgatgagttcatctaccagtttcagtcattcagtcagtaccgctgtaagactgccaagaagtcagaggaggagattgactttcttcgttccaatcccaaaatctggaatgttcatagtgtcctcaatgtccttcattccctggtagacaaatccaacatcaaccgacagttggaggtatacacaagcggaggtgaccctgagagtgtggctggggagtatgggcggcactccctctacaaaatgcttggttacttcagcctggtcgggcttctccgcctgcactccctgttaggagattactaccaggccatcaaggtgctggagaacatcgaactgaacaagaagagtatgtattcccgtgtgccagagtgccaggtcaccacatactattatgttgggtttgcatatttgatgatgcgtcgttaccaggatgccatccgggtcttcgccaacatcctcctctacatccagaggaccaagagcatgttccagaggaccacgtacaagtatgagatgattaacaagcagaatgagcagatgcatgcgctgctggccattgccctcacgatgtaccccatgcgtatcgatgagagcattcacctccagctgcgggagaaatatggggacaagatgttgcgcatgcagaaaggtgacccacaagtctatgaagaacttttcagttactcctgccccaagttcctgtcgcctgtagtgcccaactatgataatgtgcaccccaactaccacaaagagcccttcctgcagcagctgaaggtgttttctgatgaagtacagcagcaggcccagctttcaaccatccgcagcttcctgaagctctacaccaccatgcctgtggccaagctggctggcttcctggacctcacagagcaggagttccggatccagcttcttgtcttcaaacacaagatgaagaacctcgtgtggaccagcggtatctcagccctggatggtgaatttcagtcagcctcagaggttgacttctacattgataaggacatgatccacatcgcggacaccaaggtcgccaggcgttatggggatttcttcatccgtcagatccacaaatttgaggagcttaatcgaaccctgaagaagatgggacagagaccttgatgatattcacacacattcaggaacctgttttgatgtattataggcaggaagtgtttttgctaccgtgaaacctttacctagatcagccatcagcctgtcaactcagttaacaagttaaggaccgaagtgtttcaagtggatctcagtaaaggatctttggagccag

SEQ ID NO: 14205 - protein, 297 aa, Homo sapiens
MLGYFSLVGLLRLHSLLGDYYQAIKVLENIELNKKSMYSRVPECQVTTYYYVGFAYLMMRRYQDAIRVFANILLYIQRTKSMFQRTTYKYEMINKQNEQMHALLAIALTMYPMRIDESIHLQLREKYGDKMLRMQKGDPQVYEELFSYSCPKFLSPVVPNYDNVHPNYHKEPFLQQLKVFSDEVQQQAQLSTIRSFLKLYTTMPVAKLAGFLDLTEQEFRIQLLVFKHKMKNLVWTSGISALDGEFQSASEVDFYIDKDMIHIADTKVARRYGDFFIRQIHKFEELNRTLKKMGQRP

SEQ ID NO: 14206 - DNA, 1415 bp, Homo sapiens
  CDS (188)..(1117)
agtctagttagtatcggcctgttatctccttttgcgcgacacggtctcagctgttccgcctgaggcgagtgacgctggccgccaacgaggtatacgtactgggaccctcgccctcagtctcgtctccggcgcggctacctgccccgttttccctgtgagttgacctgctccgggccgcgggccgccaatggcaggggccgctccgaccacggccttcgggcaggcggtgatcggcccgccgggctcagggaagactacgtactgcctgggcatgagtgagttcctgcgcgcgctgggccggcgcgtggcggtggtgaacctggacccggccaacgaggggctgccgtacgagtgtgccgtggacgtgggcgagctggtggggctgggcgacgtgatggacgcgctgcgcctggggcccaacggcggcctgctctactgcatggagtacctggaagccaacctggactggctgcgtgccaagctcgaccccctccgcggccactacttcctcttcgactgcccaggccaggtggagctctgcacgcatcacggcgccttgcgcagcatcttctcccaaatggcgcagtgggacctcaggctgactgccgtccacctcgtggattctcactactgcacagaccctgccaagttcatttcagtactgtgtacctccctggccaccatgctgcacgtggaactgccccacatcaacctcctttccaagatggacctcattgagcattatgggaagctggccttcaacctggactactacacagaggttctggacctctcctacctgcttgaccacctggcttctgaccctttcttccgccactaccgccagcttaatgagaagctagtgcagctcatcgaagactatagccttgtctcctttatccctctcaacatccaggacaaggagagcatccagcgagtcctgcaggctgtggataaagccaatggatactgtttcggagcccaagagcagcgaagcttggaagccatgatgtctgccgcaatgggagccgacttccatttctcttccacactgggcatccaggagaagtacctggcaccctcgaaccagtcagtggagcaggaagccatgcagctgtagcaacaaggtggaccctggagagcaggatgcataatccagcactggggaaagtggaggctcctgatgcaggctgcagacccaagagcaagtcctcccagccagagctggcgggctggcaaggggatattcagctctgcaaaggacttctggccaaaaagccagacatggtgccaagcagaacaccccccatactgtcagtggtgtccgtgagctctgggccctgccaccagaaagtcgagcactggtcctagtcaggctgtgatgaaatgtgctacaatacaagagtttattttct

SEQ ID NO: 14207 - protein, 310 aa, Homo sapiens
MAGAAPTTAFGQAVIGPPGSGKTTYCLGMSEFLRALGRRVAVVNLDPANEGLPYECAVDVGELVGLGDVMDALRLGPNGGLLYCMEYLEANLDWLRAKLDPLRGHYFLFDCPGQVELCTHHGALRSIFSQMAQWDLRLTAVHLVDSHYCTDPAKFISVLCTSLATMLHVELPHINLLSKMDLIEHYGKLAFNLDYYTEVLDLSYLLDHLASDPFFRHYRQLNEKLVQLIEDYSLVSFIPLNIQDKESIQRVLQAVDKANGYCFGAQEQRSLEAMMSAAMGADFHFSSTLGIQEKYLAPSNQSVEQEAMQL

SEQ ID NO: 14208 - DNA, 1515 bp, Homo sapiens
  CDS (26)..(565)
tcctgagatagaaccgtttggttcaatgagggactgtgttgctaagagcgttgggggcaaagccaggctggttccttggcctcggggtttcctgggtcggggacacggtgaagaggctccagcgggacctgcccatcagtcctgggccaggaggggctccaagcagcacccagcggtccgggggagtctcagacccggcatgcgtggctggcagacctgggagagccagggcagggttttgcgttcagagaaggattgccccagagacccgtggtggacttcatgggtgctgagtggcccgtgtgacagtgatgacacgaaggcttcggcgtttgagtgggtgcaggtgcacgccagggcttggtgcttccctgcctggccctggagggagctgggtggcctggcttcaggggaagacaggagccaggacacacgtcagcccagcaggtgtggggggtgctgcagccctcggcagtggggtcaggccctgggggatgtttccaatggtgggcagcctggccaggccggagaagacatgttcacgggcatctatcagatgcccccttgaggaggctgggttatttgagggctgctgcaaagtacgctaggctcaaattctcttttcccagccagagccctggccacacggactcagaggggccaccggggtggggaaaggacccctccccgaccccccgcagccactggcctccagctctcggccacagaatggcctctaaggctgactcagccgctcccttgggctgtggcagcaggaggcgggggctctggctcaggccccggagcctgtgcagcttgcccatggccctaggcagcgaggggacagcctgggggacttcctgcctaggcaaggtcattggccgggcctggcctgtggatagtggggccaggggccggcccaggccaaatgagtgccctccttgttatgacaccaagtgactacaagggaggcaagacccctccaggcctctcagccgacactgggtcccaccacacacagtgactgtgccgtgcagtgcaggttctggccttttccttgaaggcatctggtaaacccgaagccacgctctcgggccgcacatgcacgccgcagcaccagctgccctgagctgcttgtacaaccaaacacctttcccctcttctccagctgtaacctggagagtcagccatgccttgtcttttgttctcataaatagtcactggggccgggcgcagtgactcacgcctgtaatcccagcactttgggaggcctaggtgggcggatcacttgaggtcaggagttcgagaccagcctggccaacatggtgaaaccctgtctctactaaaaaaatacagaaaattagctgggcgtggtggcgggcgcctgtagccccagctacttgggaggctgaggcgggagaatggcaatggcgtgaacccgggaggcagagcttgcagtgagctgagatggcgccactgcactccagcctgggcgacagagccagactcaatctc

SEQ ID NO: 14209 - protein, 180 aa, Homo sapiens
MRDCVAKSVGGKARLVPWPRGFLGRGHGEEAPAGPAHQSWARRGSKQHPAVRGSLRPGMRGWQTWESQGRVLRSEKDCPRDPWWTSWVLSGPCDSDDTKASAFEWVQVHARAWCFPAWPWRELGGLASGEDRSQDTRQPSRCGGCCSPRQWGQALGDVSNGGQPGQAGEDMFTGIYQMPP

SEQ ID NO: 14210 - DNA, 1274 bp, Homo sapiens
  CDS (17)..(1063)
aaaaggagccaagaccatggcgaaagccggggataagagcggcagcagcgggaagaaaagtctaaaacggaaagccgctgccgaagaacttcaggaggctgcaggcgctggggatggggcgacggaaaacggggtccaacccccgaaagcggctgcctttccgccaggctttagcatttcggagattaaaaacaaacagcggcgacacttaatgttcacgcggtggaaacagcagcagcggaaggaaaagttggcagctaagaaaaaacttaaaaaagaaagagaggctcttggcgataaggctccaccaaagcctgtacccaagaccattgacaaccagcgagtgtatgatgaaaccacagtagaccctaatgatgaagaggtcgcttatgatgaagctacagatgaatttgcttcttacttcaacaaacagacttctcccaagattctcatcacaacatcagatagacctcatgggagaacagtacgactctgtgaacagctctccacagttataccaaactcacatgtttattacagaagaggactggctctgaaaaaaattattccacagtgcatcgcaagagatttcacagacctgattgttattaatgaagatcgtaaaaccccaaatggacttattttgagtcacttgccaaatggcccaactgctcattttaaaatgagcagtgttcgtcttcgtaaagaaattaagagaagaggcaaggaccccacagaacacatacctgaaataattctgaataattttacaacacggctgggtcattcaattggacgtatgtttgcatctctctttcctcataatcctcaatttatcggaaggcaggttgccacattccacaatcaacgggattacatattcttcagatttcacagatacatattcaggagtgaaaagaaagtgggaattcaggaacttggaccacgttttaccttaaaattaaggtctcttcagaaaggaacctttgattctaaatatggagagtatgaatgggtccataagccccgggaaatggatacaagtagaagaaaattccatttataaagtactgagagaatgatattggattttgctgaacaggcctatcttgaactttggtaaattatttttgacagaatactcttttcaaaatggcatttgctgatttcataaacctttcacgtctggacgaattaccaaatgccatgaattgccactgtgtgtttatgtagaaaatacaaataaaagttattttgatggcttaggtttcctt

SEQ ID NO: 14211 - protein, 349 aa, Homo sapiens
MAKAGDKSGSSGKKSLKRKAAAEELQEAAGAGDGATENGVQPPKAAAFPPGFSISEIKNKQRRHLMFTRWKQQQRKEKLAAKKKLKKEREALGDKAPPKPVPKTIDNQRVYDETTVDPNDEEVAYDEATDEFASYFNKQTSPKILITTSDRPHGRTVRLCEQLSTVIPNSHVYYRRGLALKKIIPQCIARDFTDLIVINEDRKTPNGLILSHLPNGPTAHFKMSSVRLRKEIKRRGKDPTEHIPEIILNNFTTRLGHSIGRMFASLFPHNPQFIGRQVATFHNQRDYIFFRFHRYIFRSEKKVGIQELGPRFTLKLRSLQKGTFDSKYGEYEWVHKPREMDTSRRKFHL

SEQ ID NO: 14212 - DNA, 3623 bp, Homo sapiens
  CDS (564)..(2426)
aaaaaaaaaccgcgcctccgcggaggtagccgttccctgacctagccatggcacagaacactgaaaaccacgaccctgtcggatccatcttaatccagatccatgaagacctttatcagttaaaggagaaattaacaaaattctcacctgaggaaaaaggagagactctagacattcagagtcttgaaacagcaatcaaaaggactgaagtggggttaagaggattttaagtatgatagaacgagggctgattccaccaacagcaaggattacctttcagaatccacccattacacccagagcagctcctctgcatagttttgatgaagcacgtaagattccaactgtagccactttcactatacctcgggaaccacctccatctccagcagaagtgaagttctttcccaagaaacaaagatcaaaggggaaaagcagaaggtcaagaggacatcatgataggaagatttgtgatcctaatccacctgggacagccccagatatgttcctaagaagaaaccagacttaagaataaaagaacacgtgtcaagagaaacctaagaatgacaaaggccatgaaagtcaaaacacctttgagagccctgaaatcactgtgggattatgactttttaatttatgatggtgtcatagacaatacagccccagacttcttagcattcaaggaacattttagcttagcttggggaggtattttttctctcttggaacacgtcgagaagtttctcaggaactatgctataccagaagtcaaaataaaagggaataatttggtggccctccttccagagtttgagctgacgaataaacttaccagatatgaccttctctcagtgttagaggacccagctcatgtccaaatgctgataaatcttccagggcaaaggtacaagggccaagatggaaattcggaggccgccatgaagatccaagccacatggaaatgctacaaagcaagaaaattcttcctcttttatcgccagcagaagtgggcatcaggtgtgattgccattgcttggctgttatattgccataagactcgactaaagaagatactaaaggaatcacgtcagagacacctggagaattttcgcattcgagccaagcatctggcagccaactggaatcgcatcaggacctccaggaggactattatccatatcccatcattagggtattcccagcctgtgagagaacatattgccgatttcaacacacagcagaacatgcagctggggaggctgtgtgacatcttagatgccaatgtgaatgtcatctacatctgctcccatcatatgaatgacgagttagtgctgtattacaaaaaaatcctaagtctacatgcagccgtcaaatctgggaaccttgaggacagaagtgacctgcaggacaggttcaaaattatcacacctgaagctgtaaacatcttccctatgatagagcagctgagtcagctgataactgatcacctgcaaatacagcgctggctctttaaaatggactctgagttccgaggaaatgggactgcattttgtgatattccttcctacctaaagtgctacaaatgggtgctaaaggagagtagcagatatggccttgaagactggagaaagaaatgggcacaagagccagctttggtgaagatctctgaggagctggcgggcattttagcacagcacgcacagccagtcaatgagaaacggttcccgacgtggaggaaattcctccaaacatttctcagtcaagggggtgtgatcgaagcattcccacctgcagacaatgtcaccaacctcacagtggacatgctgatagagcccaacgggaaaatcagcgtgctgtcgacaggggaccagcttcatgctgaaagccccttcatctcctctggtaccaccgtgcctcagacctcagtggatccccaagttctcacttatttgtgcctccaaattggaaaagcctgcagaatgagagatgtggttggttacttttcgatagatctggtgacttttatagatccaagcaccttggaacaacaggtgtgggcaaccggccttaacctcgcatatagtgaccagctggccctgactcaactcaccttatacctgacaaacggccatctggattgcagtttgagcaccctggaagtgccccgctttgttccaaaggaaaggaagaaaaccaaatgcatgagtgcgctgtcaatgccgatgctggcaaccagtcgctatgcagtgatgaccacccagctaagacacagcaatctctcactggttttccactatgtttttctccagatctgtagggcccatggcattggctatgatcttgagaacaatcggcgaggatctccagggggtcctcatgacctttgctcgccatctcttcatcatccatcaagaaatatcagcacctaatatgcaaggcgagaccaattttaagaccaccattgctgatattgaaactattctaagagtaacaaaggaaaacaaaatgagatttgaagaggagcaacagtccaaagatgataaaaacctctctaaacccaagaaatgatcctggaatacagtacataacaatttggatcccagtctggaataaaaagggcaatttttttttctgttagaaataaaagccaggggaaattggtttgctttgtgtgctaggaggtgaatcagaacagattataatgaaatgctctttttaaaacattgtttattaagtgatcttattttatttattaaaccaaaacttatttgtgttttcatttgagagtgttgaacaatcccttcttcttctcaaactcagaaaaaagtaatctgataaaagaagaaagttaaaagtcttactgatatcacctccgcatttacttcctcataggcctcaggattatgtagcttttattttttatgttttataaagttttctcctatttctaatagtccatcgatcttctgcatttataggtttgaataaaggcttaagaattgctatttgtcaaaacacaaatgcctttttttcaaagcttcaaattatattgaaattatatttatatgaatttttaagtgactatcattcatcgtgtttttgttataccaagccactattgtctgctattgttgccatttttcaaaaagtaggataagccagcatctagttaaccaaagcatcagaatgtatctaggtggcagtatctgctcttagtttaagatggagtgtagctcgagctctgtagcttgaataaacatttgtattctctagttctccatttaatacagcagtaggattttttcaagtttagttcaacattatactacctttaaaaaggcagactgttaagattgtagtagtgctgactctaactttcagcattcacttcataattgtccaaaaatatttccacatcagtgagctttactgaagggtgaaataaaagcaaattacaacaccaaaaccattattgttttaaagaatgacctttatgtctataaaaatattttagtgtattggggaaaggaataggatttttacctgtggaatttcaataatttgttaactgtgattcagccacaggctaagagtttctgtaataaaattaacatttgtgtgtg

SEQ ID NO: 14213 - protein, 621 aa, Homo sapiens
MTKAMKVKTPLRALKSLWDYDFLIYDGVIDNTAPDFLAFKEHFSLAWGGIFSLLEHVEKFLRNYAIPEVKIKGNNLVALLPEFELTNKLTRYDLLSVLEDPAHVQMLINLPGQRYKGQDGNSEAAMKIQATWKCYKARKFFLFYRQQKWASGVIAIAWLLYCHKTRLKKILKESRQRHLENFRIRAKHLAANWNRIRTSRRTIIHIPSLGYSQPVREHIADFNTQQNMQLGRLCDILDANVNVIYICSHHMNDELVLYYKKILSLHAAVKSGNLEDRSDLQDRFKIITPEAVNIFPMIEQLSQLITDHLQIQRWLFKMDSEFRGNGTAFCDIPSYLKCYKWVLKESSRYGLEDWRKKWAQEPALVKISEELAGILAQHAQPVNEKRFPTWRKFLQTFLSQGGVIEAFPPADNVTNLTVDMLIEPNGKISVLSTGDQLHAESPFISSGTTVPQTSVDPQVLTYLCLQIGKACRMRDVVGYFSIDLVTFIDPSTLEQQVWATGLNLAYSDQLALTQLTLYLTNGHLDCSLSTLEVPRFVPKERKKTKCMSALSMPMLATSRYAVMTTQLRHSNLSLVFHYVFLQICRAHGIGYDLENNRRGSPGGPHDLCSPSLHHPSRNIST

SEQ ID NO: 14214 - DNA, 2230 bp, Homo sapiens
  CDS (366)..(2036)
ataataccaaaaagtctgataaaactctgcaagcaattcagcgtgtaggacaagctgtcaacttggcagttggaagatttgttaaagtaggagaagctatagccaatgaaaactgggatttgaaagaagaaataaatattgcttgtattgaagctaaacaagcaggagaaacaattgcagcacttacagacataaccaacttgaaccatctggaatctgatgggcagatcacaatttttacagacaaaacaggagtgataaaggctgcaagattacttctttcttcagtgacaaaagtgttgttgctggcagaccgagtagtcattaaacagataacaacatcaagaaataaggttctcgcaactatggaaagactagagaaagtgaatagctttcaagagtttgtccaaatattcagtcaatttggaaatgaaatggtggagtttgcacatctgagtggagatagacaaaatgatttgaaagatgaaaagaaaaaggcaaaaatggcagcagctagggcagttcttgaaaagtgtacaatgatgcttctcacagcttcaaagacatgtctgaggcatcctaactgcgaatcagcccataaaaacaaagaaggagtatttgaccgtatgaaagtggcattggataaggtcattgaaattgtgactgactgtaaaccgaatggagagactgacatttcatctatcagtatttttactggaattaaggaattcaagatgaatattgaagctcttcgggagaatctttattttcagtccaaagagaacctttctgtgacattggaagtcatcttggagcgtatggaggactttactgattctgcctacaccagccatgagcacagagaacgcatcttggaactgtcaactcaggcgagaatggaactgcagcagttaatttctgtgtggattcaagctcaaagcaagaaaacaaaaagcatcgctgaagaactggaactcagtattttgaaaatcagtcacagtcttaatgaacttaagaaagaacttcatagtacagcgacacagctggcagcagatctattaaaataccatgctgatcatgtggttctaaaagcattaaaacttactggagtagaaggaaatttagaagctttggctgaatatgcctgtaaactctctgaacagaaagagcagcttgttgagacctgtcgattgttacgacacatatctgggacagaacctctggaaataacctgtatacatgcagaggagacatttcaggtgactggccaacagataatttctgccgctgaaacattgacattgcatccatctagtaaaattgctaaagaaaacctagatgtattttgtgaagcttgggaatcccaaattagtgacatgtcaacactgctgagagaaatcaatgacgtgtttgaaggaagacgaggagagaagtatggctacctttcacttccaaagccaatgaagaataatgcaaacctgaaatcattaaagccagacaagcctgactctgaggagcaagccaagatagcaaagcttggacttaagctgggtttgctcacctctgacgctgactgcgaaattgagaagtgggaagatcaggagaatgagattgttcaatatggacggaacatgtccagtatggcctattctctgtatttatttactagaggagaggggccactgaaaacttcccaggatttaattcatcaactagaggtttttgctgcagagggtttaaagcttacttccagtgttcaagctttttcaaaacagctgaaagacgatgacaagcttatgcttctcctggaaataaacaagctaattcctctatgccaccagctccagacagtaactaagacttctttgcagaataaagtatttctaaaggttgacaagtgtattacgaagacaagatccataatggctctcttagtccaacttctttcactttgttataaactgctgaagaagcttcagatggaaaataacggatgggtctcagttacaaataaggacactatggatagtaaaacttgagaagcttttggggtcagatctctggaacatcatgtgatgaagctgacatttttaaaaatcaaatgatcctttatcttttcagaaattcatcaattttataaagaaaacaatattgaaattttgctctattttctgatcatgaaactgattgtaaagctttttgacaactaataaatgtcttggtaattgct

SEQ ID NO: 14215 - protein, 557 aa, Homo sapiens
MERLEKVNSFQEFVQIFSQFGNEMVEFAHLSGDRQNDLKDEKKKAKMAAARAVLEKCTMMLLTASKTCLRHPNCESAHKNKEGVFDRMKVALDKVIEIVTDCKPNGETDISSISIFTGIKEFKMNIEALRENLYFQSKENLSVTLEVILERMEDFTDSAYTSHEHRERILELSTQARMELQQLISVWIQAQSKKTKSIAEELELSILKISHSLNELKKELHSTATQLAADLLKYHADHVVLKALKLTGVEGNLEALAEYACKLSEQKEQLVETCRLLRHISGTEPLEITCIHAEETFQVTGQQIISAAETLTLHPSSKIAKENLDVFCEAWESQISDMSTLLREINDVFEGRRGEKYGYLSLPKPMKNNANLKSLKPDKPDSEEQAKIAKLGLKLGLLTSDADCEIEKWEDQENEIVQYGRNMSSMAYSLYLFTRGEGPLKTSQDLIHQLEVFAAEGLKLTSSVQAFSKQLKDDDKLMLLLEINKLIPLCHQLQTVTKTSLQNKVFLKVDKCITKTRSIMALLVQLLSLCYKLLKKLQMENNGWVSVTNKDTMDSKT

SEQ ID NO: 14216 - DNA, 2932 bp, Homo sapiens
cagcaatgagtcggcaattgacttctacaggaagtttggctttgagattattgagacaaagaagaactactataagaggatagagcccgcagatgctcatgtgctgcagaaaaacctcaaagttccttctggtcagaatgcagatgtgcaaaagacagacaactgaacaaattacaaatgaactttcttacacttgcttgtcgccaaataaaagagaggcccattgattcctcccccaccccaacacttttcttttaaagcttttctccctccttgttcttgtttttctttcttcctttccttttttctgagagttttaatactttcaaggactttaaaaaaataatcatgtttgaattgttttctcttatttttgtgaggtggtttgaaggaaggacaaggtagatctgtttagttttgcagttgaagttagatggtcctaaacatttaattgtcaaataatttcaaatttaatgtcctgctttcacattgaagggcagagcctacaaaacattgtatatttcaaaagacaaaaagaagcagcagcagtatcttgttctctaattcatagacaagttgagtgtgtttctggtactttgggtttttaaacactttggaatactaatccctagacattgccttcactccacctttagtccttctgagcactctctcgggagttggaacattgttatccttgtaagaaatactaagcttatgttgatttttaagtaattatatcttctcttcttgctggtgggtggggcagtttggtttagtgttatactttggtctaagtatttgagttaaactgcttttttgctaatgagtgggctggttgttagcaggtttgtttttcctgctgttgattgttactagtggcattaacttttagaatttgggctggtgagattaattttttttaatatcccagctagagatatggcctttaactgacctaaagaggtgtgttgtgatttaattttttcccgttcctttttcttcagtaaacccaacaatagtctaaccttaaaaattgagttgatgtccttataggtcactacccctaaataaacccgaagcaggtgttttctcttggacatactaaaaaatacctaaaaggaagcttagatgggctgtgacacaaaaaattcaattactgtcatctaatgccagctgttaaaagtgtggccactgagcatttgattttataggaaaaaatagtatttttgagaataacatagctgtgctattgcacatctgttggaggacatcccagatttgcttatactcagtgcctgtgatattgagtttaaggatttgaggcaggggtaattattaaacatattgcttctattcttggaaaaatagaagtgtaaaatgttaataatacaaatgtcactgtgacctcctccactgagaggactggtttatgccagatcattttccggcacacacggagtggctttgacagattgataactttgtaagatgggagacatctgaaatattcatgttttccttttgtagtcccatctccactatttagaaatgttctcagactttaaaataatgcacagggcttgagctttctgtcatttgactttaaaaggaagtttcattcatatttatcctcttatgtaaaattgcggtataaagtctcatttccaaatatgttaaatgacaaaattattttataaaatgtttatgcacactttataaccttaagtttttatttgagaatgtgaaagtacaaagtgcagtagacttcaacaatcttgagtgccaagaataatacagaaaaagaagacagttgatgaatgagtttatagggttctaatcttaagatggtaaaaatgtagaaagaccttgctggttttttgggggtattcgtttcttaaacaatccaaatctaagcttagaagaaaagtttagcgttaagcacctttatcttcatgaataagcttcagcttgctcttggcaagagaagagtgcttgagttacagaaggcataagtagtttgaggaatgcagcagcctttttgtaaacttcccagatatcaaaatagactttgatatataaatggttttctgagatgacactgcctctatttctataaccatttcacctggactatctaatcagtcctatgaatgtatccctaaatgtggttattgaaaacctaatagctgcctcatgacaagtacatgttatttaaggaggaaaaaatattaaattttgaattgagtgtgtaggctccctatcattatatatagagtttctttttccacggtagtcagtgacttaacctgaattgtaaatgtttgtaaagggttaattgtcctacatcaaacttagttaaataattccatccacttatggaggaggaggagaatgtggaagaggtaaaaagctgggcacaagttcatatgcctatgagtcagtaaagactgaagtaatgtcctatgttgagctggttattttgatatatgataataattatctttgaagtagaacaattctgttaactggaaaatcacaggatatatccatcatatttttcaggacagatagtttttactgtggggcaaataggttaaaattacactatgttagttgcatttaggttttaaagcaaagaatctgtagagaaatctatgcaatatatagtttgtccagattagctttcatttggggaatgaagttctgaaatatctaaagcagtttactcatcaattgaaaagtcctccaaaaagagaactattgggaaaccatggtgtggtggtggaaaagaaaagctccctcagttttttggagggaataacttaaaaaaatacttaaatggctaagtttacttggtgcagttaagaattaaacttgtcaattttaacattgctgttacatctgaaataaacttatgtgatgttctggt

SEQ ID NO: 14217 - DNA, 3509 bp, Homo sapiens
  CDS (11)..(1267)
ttatgctaacatgaagaaaagagaagggactcagctttcttcccaacagtctgtgatgtctaaacttgcatcatttttgggcttttcaaagcaatctccccaaaaaaagaatcatttggttttggaaaagaaaacagaatcagcaacttttcgggtgtgtggtgaaaatgtcacgtgtgtggaatatgctatctcctggctacaagacctgattgaaaaagaacagtgtccttacaccagtgaagatgagtgcatcaaagactttgatgaaaaggagtatcaggagttgaatgagctgcagaagaagttaaatattaacatttccctggaccataagagacctttgattaaggttttgggaattagcagagatgtgatgcaggctagagatgaaattgaggcgatgatcaagagagttcgattggccaaagaacaggaatcccgggcagattgtatcagtgagtttatagaatggcagtataatgacaataacacttctcattgttttaacaaaatgaccaatctgaaattagaggatgcaaggagagaaaagaaaaaaacagttgatgtcaaaattaatcatcggcactacacagtgaacttgaacacatacactgccacagacacaaagggccacagtttatctgttcagcgcctcacgaaatccaaagttgacatccctgcacactggagtgatatgaagcagcagaatttctgtgtggtggagctgctgcctagtgatcctgagtacaacacggtggcaagcaagtttaatcagacctgctcacacttcagaatagagaagattgagaggatccagaatccagatctctggaatagctaccaggcaaagaaaaaaactatggatgccaagaatggccagacaatgaatgagaagcaactcttccatgggacagatgccggctccgtgccacacgtcaatcgaaatggctttaaccgcagctatgccggaaagaatgccgtggcatatggaaagggaacctattttgctgtcaatgccaattattctgccaatgatacgtactccagaccagatgcaaatgggagaaagcatgtgtattatgtgcgagtacttactggaatctatacacatggaaatcattcattaattgtgcctccttcaaagaaccctcaaaatcctactgacctgtatgacactgtcacagataatgtgcaccatccaagtttatttgtggcattttatgactaccaagcatacccagagtaccttattacgtttagaaaataacactttggtatccttcccacaaaattattctccatttgtacatatctagttgtaaaacaagttttagcttttttttttaattcctcttaacagatttttctaatatccaaggatcattctttgtcgctgaagtcagtctttcttcagcttctctttcataatggaaatgaacttattatcttgagagcaaataacttggaaaatttaaatgagataatgcagttgcaactgtgtgtccacaagtatggacatcaaatctgtgggaaaagaacaggtttgtattttcaggaaggagagaataacagtcttatagacagagggcacagctaagcacagctgccactgcaggagacaggccccatgtcaggatgccatagtgctgtggggagcacagtattacccagtgggtagggcttctgtcttccctgggagcagggatggtatcttagtcaatttttttcccttgagatgaggtctgtgcctgatgtacaacggatactccataaatgtttgacaaaccaacgaagaatgaaaaaaagcctagtcagactcccatccaaagtaggaactatctctttaacattcttgactcactatcactttacctcaaattgaacagattccatgacggaacttcattcttcacaaactagccagtgacatgtgggacagctctggccagggctctgggactgcagtgtacttgcgctctgcacggtccaggagctgtgatgtggctgtggtctaggggaatcctgcctgccccatggagttgcgcagcacaaccctggctccaattgccagaaggctctttttaatgctgaaccaaaatgcgccttttttttttttctgagatggagtttcactcttgttgcccaggctggagtgcaatggcgcgatctcagctcactgcagccactgcctcccaggttcaagtgattctcctgcctcagcctcccgagtagctgggattacaggcatgcgctaacacacccagctaattttgtatttttagtagagacgaggtttctccatgttcgacaggctggtctcgaactcccacctcagcctcccaaactgctgggattacaggtgtgagccactgtgaccagccaatgtgccttcttatagtgtctactcattggtctttgttctgcccagtgataacaatgggataacgcctgctacacatcttcattgtgaaacccttcccctgtgctgagattaaatgaactctgagattattaaatagtatattttccttgacagcctagcgtttgatgattttaaagccttatgtataaataaaccaaaggaagtaagcagtcatattgctaatttgctaactcctatctattgaatggtgaagttttaaaaatttccccaggtaagtttaagattcaaacaccatctattgagcacctacattgtgtgccaggtagtaaaataggtgctttcatacacattgtctcaattcctgtgaggtcagaattatctctgcatttgaaacttgaggaaacatgctcagagtgcaagaagcttccttgcctgagatcacctagaaaggaaccctcagagccggcaactgaatcttggtccctgtgatgtcaagcccattgctctcccactgcagaacatggcctctagattaatgccaccgattcaggaacacctccgacagtcttgaaatacccccatgttgccttgtttgttttttccttctggcttcttctattacagtctcttcattggaagctctgtaggccaaggccagagctgatactgacacggagccaatgcagatagcacatcagatgctaggggtcgctgggaggattaagggacttaatctgctaggaacacctgtacttgaagtggaggaggctagggggccacagttgctgcttcattaacatagaggttttggatttttttctcttgtggtttgttttttaagtggattggcagactccttgttgcttaagagtggctttctaggcaggccactggcatctgaattcatcattgacaataaatgtaagaaattggaataaaaaagagaggcctgctgttattcgcttttgttctccagtgatttgattaactcagggcaaggctgaatatcagagtgtatcgcactgaagaataataatccattcagtaatgttatagttatcctcaatctaaatatgtcaactgtcattttgctacttttcaaataaaatacttgaaaactgtc

SEQ ID NO: 14218 - protein, 419 aa, Homo sapiens
MKKREGTQLSSQQSVMSKLASFLGFSKQSPQKKNHLVLEKKTESATFRVCGENVTCVEYAISWLQDLIEKEQCPYTSEDECIKDFDEKEYQELNELQKKLNINISLDHKRPLIKVLGISRDVMQARDEIEAMIKRVRLAKEQESRADCISEFIEWQYNDNNTSHCFNKMTNLKLEDARREKKKTVDVKINHRHYTVNLNTYTATDTKGHSLSVQRLTKSKVDIPAHWSDMKQQNFCVVELLPSDPEYNTVASKFNQTCSHFRIEKIERIQNPDLWNSYQAKKKTMDAKNGQTMNEKQLFHGTDAGSVPHVNRNGFNRSYAGKNAVAYGKGTYFAVNANYSANDTYSRPDANGRKHVYYVRVLTGIYTHGNHSLIVPPSKNPQNPTDLYDTVTDNVHHPSLFVAFYDYQAYPEYLITFRK

SEQ ID NO: 14219 - DNA, 2945 bp, Homo sapiens
  CDS (79)..(2496)
aaaaaaaaaaacatcaactctgacctgccaatcatcatatcgattgagaaccactgttcattgcctcagcaacgaaaaatggcagaaattttcaagaccgtgtttggagaaaagctggtgactaaattcttatttgagactgatttctcagatgatccaatgcttccttcacctgaccaactcagaaagaaagttcttcttaaaaacaagaagctaaaagcccatcagacgccagtggatatcttaaagcaaaaggctcatcagttagcatctatgcaagtgcaggcttataatggtggggatgccaacccccgacctgccaataatgaggaagaggaagatgaggaggacgaatatgattatgactatgaatccctttctgatgacaacattctggaagacagacctgaaaataaatcatgtaatgacaagcttcagtttgaatataatgaagaaatcccaaagaggataaagaaagcagataactctgcttgcaacaaaggaaaggtttatgatatggaactgggagaagaattttatcttgatcagaataaaaaggaaagcagacagattgcaccagagctttctgaccttgtaatctattgtcaagcagtaaaatttccaggactgtcaactctaaatgcatctggctctagcagaggaaaagaaaggaaaagcaggaagtccatttttggcaacaatctgggcagaatgagcccaggggagacagcatcatttaacaaaacatctggaaaaagttcctgtgaaggcattcgacagacctgggaggaatcttcttcccctctcaacccaaccacgtccctcagtgctatcattagaactcccaaatgttatcatatctcgtcgctgaatgaaaatgccgccaaacgtctgtgtcgcaggtattctcagaaactgacccagcacaccgcctgtcagctgctgagaacttaccctgctgccacccgcatcgactcttccaacccgaaccccctcatgttctggctccatgggatacagcttgtggcactcaactaccagactgatgatctccctttacatttaaatgctgcaatgtttgaggcaaatggtggttgtggttatgtattgaaacctccagttctgtgggacaagaactgccccatgtatcagaagttttctccactagaaagagatctggacagcatggatcctgcagtctattctttaactattgtctctggtcagaatgtgtgccccagtaatagcatgggaagcccgtgcattgaagtcgacgtcctgggcatgcctctggacagctgccatttccgcacaaagcccatccatcgaaacaccctgaaccccatgtggaacgagcagtttctgttccacgttcacttcgaagatcttgtatttcttcgttttgcagttgtggaaaacaatagttcagcggtaactgctcagagaatcattccactgaaagctttaaaacgaggatatcgacatcttcagctgcgaaaccttcacaatgaagtcttggagatttctagtttattcattaacagcagaaggatggaagaaaattcctctggcaataccatgtcagcctcttcgatgtttaatacagaagaaagaaaatgtttgcagactcacagagtcacggtgcatggggtcccagggccagagccctttaccgttttcactattaatggaggcaccaaggcaaagcagcttctgcagcaaattctgacaaatgaacaagacatcaaacctgttaccacagactattttttgatggaagaaaaatattttatatctaaagaaaagaatgaatgtaggaaacaaccattccagagagccattggtccagaagaggagatcatgcaaattttaagcagctggtttccagaagagggatacatgggcaggattgtcttaaaaacccagcaggaaaacctagaagagaaaaacattgttcaagatggcaaagaggtgatcttgagctcagaggaggagagtttctttgtccaagtgcatgatgtttctccagagcaacctcgaacagtcatcaaagcaccccgcgtcagcactgcacaggatgtcattcagcagaccttatgcaaggccaaatattcctacagcatcctgagcaaccccaatccaagcgactatgtgcttttggaagaggtggtgaaagacactaccaacaagaagactaccacaccaaagtcctctcagcgggtccttctggatcaggagtgtgtgtttcaagcccaaagcaagtggaaaggtgcaggaaaattcatccttaagctaaaggagcaggtgcaggcatctcgagaagataaaaagaaaggcatttctttcgcaagtgaactcaagaagctcaccaagtcaactaaacagccccgaggacttacatcaccttctcagctcttgacctcagaaagtatccaaaccaaggaggagaaacctgtgggtggcttgtcctccagtgacacaatggattaccgacagtgactaagggcagcatgtttaacccaggtgaagatctttaagcaagaagttaaagagtgaacatggtggaaaaaatataattattttcatcagacttaaactggaaattgatgatttctgaactgaagccttcacacatgtgagatccatgctgaggagaagcaaaatggcacagggctagttgccaccaaccaatttactgatgaatgaagcccaggggactgccattttataaatgtcagcagttggaaaaatcgtcacgaattgacttagagcaagggtcagcaagcttgtctgtaaagggccaaacagtaaatattttagggctgggggccataaaatatgttgcaaccacccaattctgccattgtagtgcaaaagcagccatagacaacacatacatgaacgaacgtggctgtattccaataaaactttatttatggacactg

SEQ ID NO: 14220 - protein, 806 aa, Homo sapiens [sequence omitted]

SEQ ID NO: 14221 - DNA, 3004 bp, Homo sapiens
  CDS (150)..(2066)
ggagcgtcgtggaaagcattggacacatttccaccatgctaatggcattttaaatatatttggcaattttcccaattttttactgaagaaaactgtaagtttatacttgaggactgaagtgtgactctgccgattatcaggctttcaagatgaatctggaaaaactcagcaagcctgaactcctgacactatttagtattcttgaaggagagcttgaagcaagggaccttgttatagaagccttaaaggcccaacacagagttactttcattgaagaacgctatggaaaatataacatcagtgatcctttaatggctctacagagagattttgaaacactgaaggagaaaaatgatggcgaaaagcagccagtctgcacaaatccactctctattcttaaggttgtgatgaagcagtgcaagaacatgcaggagcgcatgctgtcccagctggctgctgctgagagcaggcaccgaaaggtgatcctagaccttgaggaagaaaggcagcggcatgcacaggatacggctgaaggagatgatgtcacctacatgctagagaaggaaagagagaggctgactcaacagttggaatttgaaaaatcccaagtgaaaaagtttgaaaaagaacagaagaagctctctagtcagctggaagaggagcgctcccgccacaagcagctctcatccatgctagtgcttgagtgcaagaaagccaccaacaaggcagccgaggaaggacagaaggcaggagagctgagcctgaaattggagaaggagaagagccgggtgagtaaactggaagaagagttggcagctgagagaaagagaggcttgcagactgaggcccaggtagagaagcagttatcagagtttgacatcgaaagggaacaactgagagcaaaactgaaccgagaagagaaccggaccaaaaccctgaaagaagaaatggaaagtttaaagaagatagtgaaggacctagaggcttcccaccagcacagtagccctaatgagcaattgaagaaaccagtaaccgtgtccaaaggcacagcaactgagcctctcatgctaatgtctgtgttttgccaaacagagagttttccagcagaaagaacccatgggagcaacatagccaagatgacaaacactgggctgcctggtcctgccactcctgcttactcatatgcaaaaaccaatggccattgtgacccagagatacaaactaccagggagctgactgcaggcaacaatgtagaaaaccaagtgcctccacgggaaaaatctgtggcattggcccaagagaaaccagtggagaatggtgggtgtcctgtggggattgagactccagtcccaatgcccagtcccctctcttccagtgggagctcactgtctcccagcagcactgcctcctcctctctaacatcctctccttgctcttcgccggtactcactaagcgtttattggggtcatcagctagcagccctggctaccagtcatcgtaccaagtagggatcaaccaacggttccatgcagctcgccacaaatttcagtcccaagcagatcaggaccaacaagccagtggcctacagagccctccatccagggatttatcccccaccctcatagacaactctgccgccaagcagctggcccgaaacacagtcactcaggtgctctccagattcactagccaacaagggccaatcaagccagtctctcccaacagctctccctttggcacagactatcgaaatctagccaacactgccaatccaagaggtgacacaagccattcacctactccagggaaagtgtccagtcccctgagccccctgtctccaggaatcaagtccccaaccatccccagagctgagagaggaaaccctccacccatcccacccaagaaacctggcctcaccccttctccatctgctaccactccattgaccaaaactcattcccaggcagcctctttgaccactgcagaagaccttgccagcagctgctcttccaatactgttgtagcaaatggtaaggatgttgagttacttttgcctaccagcagctagtccctaggagggagtctccacgtttgacattccatcagatttcgtccaaaagctcagtcagacttctgagtcagattatgttatttattttgatagtagctgaaaccatctgtataatacatttagtatatttcaccattttgtatttttttaagtagaaactgagtagtttggatttttatggctcacatctttttactgaagccagaaaggcacctcaaagatgtctcaagctcagcagtcaccgtcatgttgtgatgaagaaagcgaatcaccaggtggtgatttgctatctatttgagaactagaatcactcaacactcattttgaattatgcagaagtggttcatgcagatttttattccagatgaacatgttttaaaagtgcctgaaatatgactgccatatgaatgtgatcctgcagcaaaaaacacaaaatagatcatttaattacagaaaatgagatcctctgtgaatcctgaatgttaaaaaccaacactgcttttaatcctcttttaatgttttaatacgagctttgtgttctgaaacaaggctgcataagtagaatgggaatccttctaaaggtgggtgtgaactcaccacaagctgagctttatagagcccttgagaaaccctcctgagcactaagcagttggggtgctgattttcttgtacttttgaaaaattaagtcactcccagtttcctgcataagttcttgaacagaatgaaatcacatctccattcaaaaaatgtctcaagcatctactgttgtgtaaggaacttctgattctgattgctgttacttgaataggaaatggttactcattctgtataaaagttttgcaagagaatgaattttttattctgtaatcaaaaagcaataacttgaaattcactctgtaatattataggtcagaattatacaagttttacc

SEQ ID NO: 14222 - protein, 639 aa, Homo sapiens [sequence omitted]

SEQ ID NO: 14223 - DNA, 2650 bp, Homo sapiens
  CDS (34)..(660)
ttgcccagcaagtgtgtggctatcgactgtgagatggtgggcacgggaccccgagggcgggtaagcgagctggcccgctgttccattgtgagctaccatggcgatgtcctctatgacaagtacatcaggcctgagatgcccatcgctgactaccgtacccgctggagtggcatcactcggcagcacatgcgcaaggctgtccccttccaggtggcccagaaagagatccttaagctcctgaagggcaaggtggtggtggggcacgcgctgcacaacgacttccaggcgctcaagtatgtccaccctcggagccagacccgggataccacctatgtcccaaacttcctcagcgagcccggcctccacacccgggcccgggtctctctaaaggacctggccctgcagctgctgcacaagaagatccaggtgggccagcacgggcactcatcagtagaagatgccacgacagccatggagctctaccggctggtggaggtgcagtgggaacagcaggaggcccgcagcctctggacctgccccgaggacagagaacctgacagcagcacagacatggaacagtacatggaggaccagtactggcccgatgacctggcccacggcagcagaggaggagccagggaggcacaggacagaaggaattgagaagggggcggggctccctggctgggcttccggtgtggccggtaggaagtgggggccaggagagcagcgggcactccttcctgggcagggtggggcaggatgcagtgagccagccccagggccagaggagttggggtcatctgttaccttgacaccctctgcacacagcatagccctctctctctccagggctgttggttctttctcctgactcctgtggttttgctaatggcactttacagactccatggagatgtcaggtggaccatcttctagggcccagcaggagtagggaatgtgccaacagactgcccaggttgccgtggccttccccaccccccagatctcctgagtcatcatgctgtgctaatgaaagggatcatatcatcctctctggggatggtgggtgggggtgtcaatatcctggagctcccttaccccaactcaatgacttgggggtaaagttctcttccttttgttgcctacctcttcctccactcatttgggttcagaataaacatgccctgaagttaaagaggagttaagtcctaaaggaggcatttcttccccacctccctgacctggaactctggctacagccattgtaggaactccgtgcctggcctgtcagctccctgctaggctacagtggaatagcagagcccacaggcttctcgtggggagttggctccttaacatttcttggcaacagaaagccccaggcacagctcagggaggagggaaggcaggtaagctttggacgagaactggcatatttattttgacccaaatcagggatttccccagtccacccagtactgggctcttaagcaaaagtctgagaaacaagacagtggtttgaattctggggcctttgtgtaggattgtgcctgacctttatttatttattaacagcagggccactcgtctagggcagtggagtctgcgtgtctcctggggctggggcagggcattggcagttacgcagtggccctgaacctggtctggtgcccccgaacctggtctgatgccccctcagctctttgacaatcactgtggctgttgggttttctcctatttctaaaaatgttctcttctttcctaagtgacagttttgaagtattggataaccaagagctcaggtcacacagaccttggagccccatctttgcttgcagcttagctttgagatactaagcaagcgagggacttcactcttgagcctgttttttcctcatctgtaaagtggggatagtggtacggcctacctcatagggttgtaatgagcactaaatgtgaagtgcttggcacagtgcctggcacatggtgagccacagctactgtgagtttctgtttatcccccttttttttttttaagcccattgtttattctttgagaatttgttgtaacttcttcaggataacacctgagtccacaggctgagcagctgtggcccagacagaactgctccggcttggctgttccagcaggtggggcgctggcctcggtgagggcacagcagcaaggttcacggatatccgtgtgtcttgtctgtggccaccaggcacaggtttggcttccggtcagtgtcccgacactgtgcgggaggtgacaacagagcaaagcagcgcaggggtcagggaggtggagacactgctgaaatcacactaccccaccctcagctgaagccccacgttccacaaacttggggtcatagattgtccagtcactggctccctccctgtcagcacagcacagaggaaggggctaactgaatcttttaccacttctggcctggctccagaactttgttctagattccttaaaagtcggtagctgatgtcaaactcaattgagcagtagctttgatcccttggtctgggggtcgaaggaagatggcgctgttatcagcggggaaatgtactatttaagatcagctttgttgtaaaaccatttgttctagaataaaactcaattggaaacgtg

SEQ ID NO: 14224 - protein, 209 aa, Homo sapiens
MVGTGPRGRVSELARCSIVSYHGDVLYDKYIRPEMPIADYRTRWSGITRQHMRKAVPFQVAQKEILKLLKGKVVVGHALHNDFQALKYVHPRSQTRDTTYVPNFLSEPGLHTRARVSLKDLALQLLHKKIQVGQHGHSSVEDATTAMELYRLVEVQWEQQEARSLWTCPEDREPDSSTDMEQYMEDQYWPDDLAHGSRGGAREAQDRRN

SEQ ID NO: 14225 - DNA, 3733 bp, Homo sapiens
  CDS (20)..(1000)
agcggcgggcaggccgggcatggcgtccatggcggcggcgatcgcggcttcgcgctcggcggtcatgagcgggaaccggcctctggacgaccgggagcgaaagcgcttcacttacttctcgtcgctgagccccatggccaggaagatcatgcaggacaaggagaagatccgcgagaagtacgggcccgagtgggcgcggctgccgcccgcgcagcaggacgagatcatcgaccggtgcctggtggggccgcgcgccccggcgccccgagaccccggggactcggaggagctcacgcgcttccccggcttgcgcgggcccacgggccagaaggtggtgcgcttcggggacgaggatctaacttggcaagatgagcactctgcccctttctcctgggaaacaaagagtcagatggagttcagtatctccgccctatccatccaggagccgagcaacggcaccgccgccagcgagcccagaccactgtccaaagcttcccagggctcccaggccctcaagtcctcccaaggcagcaggtcctccagcctggacgccctgggccccaccaggaaggaggaggaagcgtcattctggaagatcaatgctgagcggtcccgaggggaggggcctgaggccgagttccagtcgctgacccctagccagatcaagtccatggagaagggggaaaaggtcttgcctccctgctaccggcaggaacctgccccgaaggacagggaggccaaggtggaaaggcccagcaccctccgtcaggagcagcgtcctcttcccaacgtgagcaccgaacgtgagagaccccagcctgtccaggccttcagcagtgcactgcacgaggctgccccctcccagctcgaggggaagctgccatctcctgatgtcaggcaggacgatggggaagacaccctgttctcggaacccaagtttgcacaggtcagctcaagtaatgtcgtcttgaagacgggatttgattttctggacaattggtaaaatgtattagaaaaatacaatgaagaaccctaaaatgttttccaaagtggtgtggtggaggaggataaaaagggccaccttttcctatgtattttactggtttcttgacactcttttcttaatcatctggaaactggtcaatattgccagatttttttcttttttggtagaaccagatatatatgctattttcagtgatttgataacagaagttttccatttggaatttttaaggtctgttaataattcaggagatcttgtaaataaaacttctgttcccagctccacccaactttccccctcctcaaaggatgtgtttcaaccatgtcacaaaaatcatataagtgatttccatctccttctccattattccccctcccccctccgctttttaccgtatgggttccttttggtgggtgattgagggtgatgttatcagccatgacatcagcatgctggctgtgaccccggaaagactggcccccagcgacgttctcagccagcgctcgcagctgtccggggcttctctggcagaagccatgtctctcacatcatgtgccagcctccaccctcacgccatttccagggaacagactgcgggtatgtagcagtgtagtctttaacctgctctgatacatattcagagtatggattgttgtttaaaaagagttgcatgtttaaagagttttgtactagcttttcattattttgtatctagattatcaacaatggggctaccactttccttggttttatatccatttcctcttggaagttcttgttgcttatgtgacctgttggttgttccccggactgggcacctacaggagtcagggcagacggcagatgtggctggaggtcagggctcttctgcttagttgtgttagagtcttccagcatgggactgatgggagcagtgggcattctttatcccaagggctagccaggttgcgtcatgacggaccttccccagccctgaccaccaccagaagtggaagagtggagtttgcggtcaactcagcagtgcccatggagacctgcgtggtgtcagagcagcagtatctcttggagctggtgcagacaccaaggctgcccagtggtacaacgtggtccacctcccctagggaagctgctgcactcagaggctgtcctgcccagtggcccctgagccgtgtgagcctgcaggaggcgtctgagcagagcctcaagcccggtatggcgccatctccatgttgccatcactgcgttctcacctgaagccttaatctttgcgacacctgccagtgagcgctcggtttcaataccaaagtgtgtcttcttcttttttttttttttaaatgcctgtttcataggaccttctgaaatgatttccagaatattttatctggctccaaaataaagcacatagcaactcacctcaacccctcatcatctccaggaaagtttctgccaaagctgtggcatagccaacttttgatttggttcttgccaattgttttatgtccctaaacctcatttggatccttggggtatagttttatctttctgcttcagtgatttactgtaacttttcaaatattggttctttctgtaccatttaagtatagttgatatatgtgaggcaaaaaaaggtttcagcatggtggtgagggaaaaaggagcttagaaatcccagttggcacagcctgggcaagcgccagctcccctcagggctaacggcactgttcacacagggatcctcagaatcagcggccacctgcctccaccttctgcctggagggcatggggctgttgtagaacctatggtagcaaatgtatatgtatgagtttgtattctgtagtgttggtgtagcacagaagaaagacctgtgtcctagagagtaggccaaggtgatctgcctcttctattgggagaaattctaatttctttcccactttctcaacaagcccaatattccctccaagttcttcttggtgctgagggctgtaggaattattgaaagcttctgcctcacttagtatcgtctggggcccagcacccagcaataactctaataatgtttcttaatggtatagcctcctgagattaaatgtaaaatcaaaaattaggaaatcttggagggagtcctcaagttgtattgctttgctgtgcttttggaagaagggacgacctggaggacacaggctcctgtgtgggtcttcatcctgcctgaccggcagatcttcctctacaccttgggcaaagtctatgcgaagatggtttcttagctctccatttgccatgattttcctcccattcatcatgagggagtttctcaaaccaggagtttatatttattttttagaaaatacacacttttcaggagaaacctgagcatgattttggattctccacctccccccagtctctgcacctgggattcagctcaaggattcagtgtcttcatttttacaaaagttcccccaagaaatcagcaaccagcctctgtttcatctgggagcccctcccttggccccctgggtttgggggtgctgccctactgggaacagcgggggtctgtcacccgtctgagccgcacccccctgtgtggatttcaggaagagcctccctttctttgcgtctccctttctttaattaacattttcaaaagtaataaattcttactgacgacttgtaacttagtcatattttatacttgtagcctttaataaagccatttaaaaaatgct

SEQ ID NO: 14226 - protein, 327 aa, Homo sapiens
MASMAAAIAASRSAVMSGNRPLDDRERKRFTYFSSLSPMARKIMQDKEKIREKYGPEWARLPPAQQDEIIDRCLVGPRAPAPRDPGDSEELTRFPGLRGPTGQKVVRFGDEDLTWQDEHSAPFSWETKSQMEFSISALSIQEPSNGTAASEPRPLSKASQGSQALKSSQGSRSSSLDALGPTRKEEEASFWKINAERSRGEGPEAEFQSLTPSQIKSMEKGEKVLPPCYRQEPAPKDREAKVERPSTLRQEQRPLPNVSTERERPQPVQAFSSALHEAAPSQLEGKLPSPDVRQDDGEDTLFSEPKFAQVSSSNVVLKTGFDFLDNW

SEQ ID NO: 14227 - DNA, 1757 bp, Homo sapiens
  CDS (12)..(674)
tggtagacccaatgaaatcgaacctccacccccagagatgccaccgtggcagaagaggcaagatggcccccagcagcaaacaggaggccgaggaggagggagaggtggctatgaacattcctcatacggaggacgaggaggtcatgaacaaggaggcgggagaggtggacgtggtggctatgaccatggtggccgagggggaggaagaggaaataagcatcaaggaggctggacagatggagggagtggtggaggaggtggctaccaagatggtggttatcgagattcaggtttccagccaggtggctatcatggtggccacagcagtggtggctatcaaggcggaggttatggtggcttccaaacatcttcttcatatacaggaagtggataccagggtggtggctaccagcaggacaatagataccaagatggcgggcaccatggtgatcgtggtggtggtcgtggtgggcgaggtggtcgtggaggccgaggtggtcgtgcaggccagggaggaggctggggaggaagagggagccagaattatcaccaagggggtcaatttgaacagcatttccagcatggaggttatcagtataatcattctggatttggacagggaagacattacactagttgaggctaccgaaccttacattttgctagagctcaagtaatagaaacttagtttcagaatcctgaattcagcacttattttgaattaatgtgagaccacaggtggcaggcagattcctgcttggcataagcatttgtaggtcttcattcaattctgttagatttttttattggacttacataatgccgtttatttgagaaacacataacatctctcctttctatgaaaaattttttaaaaggtggttaaaattgcctttaattgcccagtagactaattccacagtcagaacatgcaaacttttttgaagaaattacttgaataagtagttttcatgttttcaatatgcagttttgaaaatgaggattcacctagacttttttagatttactactaggaaaccttcctcatatgaataaccatttatatgtgttttgcttaaagtattccaatgcctattttccaagcacagttctgccccccggttgacttttatgccacgtgtgcttcatgatggaacttttaggtcagttcctattaaatgagctcttctgcagatagcacattcagtagccttattttgttgatggaatactgtatcatatgctcaactctgaaaaccttgaacacggccaaaatccataaagattataaaagcaaactaagttgtgaagctatagtacatgtaggcatttagttaagtatagcaattcaaactgacctgcatccatccaaaacaaattcctccttcaaccttatttttacttgaaatttgctagaagaaatagcaaaccgaaatttgttttatgcatgagttaataccactggctcagcaaatacaagttagtttgctttaagaacaggtaactttttttgtaatggaagaaatgcactacaaagttaagacagatttttgctaagtgcaggaggccctttattattgctgcagaaaacaaaagcctggctgagttgatgttttacattctcccttactgaaatctacatgacatgatgcttcttgctgggtttttgtacatgtaaacattgtcaagctgtgaaagaaaatggctggaggtgtgctttgtgtgaaaggtgagcaataaagtatctgttaagttct

SEQ ID NO: 14228 - protein, 221 aa, Homo sapiens
MKSNLHPQRCHRGRRGKMAPSSKQEAEEEGEVAMNIPHTEDEEVMNKEAGEVDVVAMTMVAEGEEEEISIKEAGQMEGVVEEVATKMVVIEIQVSSQVAIMVATAVVAIKAEVMVASKHLLHIQEVDTRVVATSRTIDTKMAGTMVIVVVVVVGEVVVEAEVVVQAREEAGEEEGARIITKGVNLNSISSMEVISIIILDLDREDITLVEATEPYILLELK

SEQ ID NO: 14229 - DNA, 2305 bp, Homo sapiens
  CDS (224)..(1780)
cacattctggatctcagctgctcttgaaggacagtgacttgttaccaccgcaacagcagagcctgccatccccaacagatcaccagttgtccctgacatcgtgccctaccttgtctccctttgtggtctcctaaatgcccatctcgttggccttggttcggctagtggtatggaggggtgctgcctagcactgacctgagagtgtgtgtgacccactgacccaatggacatcaaaggccagttctggaatgatgacgactcggagggagataatgaatcagaggaatttctctatggcgttcaggggaactgtgcagccgacctgtatcgacacccacagcttgatgcagacattgaagccgtgaaggagatctacagtgagaactctgtatccatcagagaatatggaactatcgatgacgtggacattgacctccacatcaacatcagcttcctcgatgaggaagtctctacagcctggaaggtcctccggacagaacctattgtgttgaggctgcgattttctctctcccagtacctagatggaccagaaccatccattgaggttttccagccatcaaataaggaaggatttgggctgggtcttcagttgaaaaagatcctgggtatgtttacatcccaacaatggaaacatctgagcaatgatttcttgaagacccagcaggagaagaggcacagttggttcaaggcaagtggtaccatcaagaagttccgagctggcctcagcatcttttcacccatccccaagtctcccagtttccctatcatacaggactccatgctgaaaggcaaactaggtgtaccagagcttcgggttgggcgcctcatgaaccgttccatctcctgtaccatgaagaaccccaaagtggaagtgtttggctaccctcccagcccccaggcaggtctcctgtgccctcagcacgtgggcctccctcccccagcacggacctctcctttggtcagtggtcactgcaagaacattcccactctggagtatggattcctcgttcagatcatgaagtatgcagaacagaggattccaacattgaatgagtactgtgtggtgtgtgatgagcagcatgtcttccaaaatggatctatgctgaagccagctgtctgtactcgtgaactatgcgttttctccttctacacactgggcgtcatgtctggagctgcagaggaggtggccactggagcagaggtggtggatctgctggtggccatgtgtagggcagctttagagtcccctagaaagagcatcatctttgagccttatccctctgtggtggaccccactgatcccaagactctggcctttaaccctaagaagaagaattatgagcggcttcagaaagctctggatagtgtgatgtctattcgggagatgacccagggctcatatttggaaatcaagaaacagatggacaagttggatcccctggcccatcctctcctgcagtggatcatctctagcaacaggtcacacattgtcaaactacctctcagcaggcagctgaagttcatgcacacctcacaccagttcctcctgctgagcagccctcctgccaaggaggctcggttccggaccgccaagaagctctatggcagcacctttgccttccatgggtcccacattgagaactggcattcgatcctgcgcaatgggctggtcaatgcatcctacaccaaactgcaggaatgggaaaaggacagcacaggatgccctccaaggatgagctggtccagagatacaacaggatgaataccatcccccagacccgatccattcagtcacggttcctgcagagtcggaatctaaactgtatagcactttgtgaagtgattacatctaaggacctccagaagcatgggaacatctgggtgtgccctgtgtccgaccatgtctgcacaagattcttctttgtatatgaggatggtcaggtgggcgatgccaacattaatactcaggaccccaagatacagaaggaaatcatgcgtgtgatcggaactcaggtttacacaaactgagggggccccagccctcgtaccacccctgttaccccaggatccatctgccctcataaaagtgttcaggtacagcagctgaggctgccctgaggaatcaaggggccattaccaaggggcaggaaaaggatatgtaagaggtggccttcatggtagagcttgacccaagaactactccacattcggatggcccagactgactccatcccctgactttccctttgacttcaccctgtttgtaaataaaacaataaaatgg

SEQ ID NO: 14230 - protein, 519 aa, Homo sapiens
MDIKGQFWNDDDSEGDNESEEFLYGVQGNCAADLYRHPQLDADIEAVKEIYSENSVSIREYGTIDDVDIDLHINISFLDEEVSTAWKVLRTEPIVLRLRFSLSQYLDGPEPSIEVFQPSNKEGFGLGLQLKKILGMFTSQQWKHLSNDFLKTQQEKRHSWFKASGTIKKFRAGLSIFSPIPKSPSFPIIQDSMLKGKLGVPELRVGRLMNRSISCTMKNPKVEVFGYPPSPQAGLLCPQHVGLPPPARTSPLVSGHCKNIPTLEYGFLVQIMKYAEQRIPTLNEYCVVCDEQHVFQNGSMLKPAVCTRELCVFSFYTLGVMSGAAEEVATGAEVVDLLVAMCRAALESPRKSIIFEPYPSVVDPTDPKTLAFNPKKKNYERLQKALDSVMSIREMTQGSYLEIKKQMDKLDPLAHPLLQWIISSNRSHIVKLPLSRQLKFMHTSHQFLLLSSPPAKEARFRTAKKLYGSTFAFHGSHIENWHSILRNGLVNASYTKLQEWEKDSTGCPPRMSWSRDTTG

SEQ ID NO: 14231 - DNA, 3504 bp, Homo sapiens
  CDS (97)..(3015)
agtgttcggagccaggggcctgggggcaagattgttacctgtgcacaccgatatgaggcaaggcagcgagtggaccagatcctggagacgcgggatatgattggtcgctgctttgtgctcagccaggacctggccatccgggatgagttggatggtggggaatggaagttctgtgagggacgcccccaaggccatgaacaatttgggttctgccagcagggcacagctgccgccttctcccctgatagccactacctcctctttggggccccaggaacctataattggaaggggttgctttttgtgaccaacattgatagctcagaccccgaccagctggtgtataaaactttggaccctgctgaccggctcccaggaccagccggagacttggccctcaatagctacttaggcttctctattgactcggggaaaggtctggtgcgtgcagaagagctgagctttgtggctggagccccccgcgccaaccacaagggtgctgtggtcatcctgcgcaaggacagcgccagtcgcctggtgcccgaggttatgctgtctggggagcgcctgacctccggctttggctactcactggctgtggctgacctcaacagtgatggctggccagacctgatagtgggtgccccctacttctttgagcgccaagaagagctggggggtgctgtgtatgtgtacttgaaccaggggggtcactgggctgggatctcccctctccggctctgcggctcccctgactccatgttcgggatcagcctggctgtcctgggggacctcaaccaagatggctttccagatattgcagtgggtgccccctttgatggtgatgggaaagtcttcacctaccatgggagcagcctgggggttgtcgccaaaccttcacaggtgctggagggcgaggctgtgggcatcaagagcttcggctactccctgtcaggcagcttggatatggatgggaaccaataccctgacctgctggtgggctccctggctgacaccgcagtgctcttcagggccagacccatcctccatgtctcccatgaggtctctattgctccacgaagcatcgacctggagcagcccaactgtgctggcggccactcggtctgtgtggacctaagggtctgtttcagctacattgcagtccccagcagctatagccctactgtggatgcggacacagaccggaggctccggggccaggttccccgtgtgacgttcctgagccgtaacctggaagaacccaagcaccaggcctcgggcaccgtgtggctgaagcaccagcatgaccgagtctgtggagacgccatgttccagctccaggaaaatgtcaaagacaagcttcgggccattgtagtgaccttgtcctacagtctccagacccctcggctccggcgacaggctcctggccaggggctgcctccagtggcccccatcctcaatgcccaccagcccagcacccagcgggcagagatccacttcctgaagcaaggctgtggtgaagacaagatctgccagagcaatctgcagctggtccgcgcccgcttctgtacccgggtcagcgacacggaattccaacctctgcccatggatgtggatggaacaacagccctgtttgcactgagtgggcagccagtcattggcctggagctgatggtcaccaacctgccatcggacccagcccagccccaggctgatggggatgatgcccatgaagcccagctcctggtcatgcttcctgactcactgcactactcaggggtccgggccctggaccctgcggagaagccactctgcctgtccaatgagaatgcctcccatgttgagtgtgagctggggaaccccatgaagagaggtgcccaggtcaccttctacctcatccttagcacctccgggatcagcattgagaccacggaactggaggtagagctgctgttggccacgatcagtgagcaggagctgcatccagtctctgcacgagcccgtgtcttcattgagctgccactgtccattgcaggaatggccattccccagcaactcttcttctctggtgtggtgaggggcgagagagccatgcagtctgagcgggatgtgggcagcaaggtcaagtatgaggtcacggtttccaaccaaggccagtcgctcagaaccctgggctctgccttcctcaacatcatgtggcctcatgagattgccaatgggaagtggttgctgtacccaatgcaggttgagctggagggcgggcaggggcctgggcagaaagggctttgctctcccaggcccaacatcctccacctggatgtggacagtagggataggaggcggcgggagctggagccacctgagcagcaggagcctggtgagcggcaggagcccagcatgtcctggtggccagtgtcctctgctgagaagaagaaaaacatcaccctggactgcgcccggggcacggccaactgtgtggtgttcagctgcccactctacagctttgaccgcgcggctgtgctgcatgtctggggccgtctctggaacagcacctttctggaggagtactcagctgtgaagtccctggaagtgattgtccgggccaacatcacagtgaagtcctccataaagaacttgatgctccgagatgcctccacagtgatcccagtgatggtatacttggaccccatggctgtggtggcagaaggagtgccctggtgggtcatcctcctggctgtactggctgggctgctggtgctagcactgctggtgctgctcctgtggaagatgggattcttcaaacgggcgaagcaccccgaggccaccgtgccccagtaccatgcggtgaagattcctcgggaagaccgacagcagttcaaggaggagaagacgggcaccatcctgaggaacaactggggcagcccccggcaggagggcccggatgcacaccccatcctggctgctgacgggcatcccgagctgggccccgatgggcatccagggccaggcaccgcctaggttcccatgtcccagcctggcctgtggctgccctccatcccttccccagagatggctccttgggatgaagagggtagagtgggctgctggtgtcgcatcaagatttggcaggatcggcttcctcaggggcacagacctctcccacccacaagaactcctcccacccaacttccccttagagtgctgtgagatgagagtgggtaaatcagggacagggccatggggtagggtgagaagggcaggggtgtcctgatgcaaaggtggggagaagggatcctaatcccttcctctcccattcaccctgtgtaacaggaccccaaggacctgcctccccggaagtgccttaacctagagggtcggggaggaggttgtgtcactgactcaggctgctccttctctagtttcccctctcatctgaccttagtttgctgccatcagtctagtggtttcgtggtttcgtctatttattaaaaaatatttgagaac

SEQ ID NO: 14232 - protein, 973 aa, Homo sapiens [sequence omitted]

SEQ ID NO: 14233 - DNA, 2956 bp, Homo sapiens
  CDS (234)..(1580)
ttgcagagataaatggttcagccctatgtagctacaacctaaagccttctgaatacactacatctccaaaatcttctgttctctgccccaaactaccagtcccagcgagtgcacctattccattcttccatcgctgtgctcctgtgaacatttcctgctatgccaagtttgcagaggccctgatcacctttgtcagtgacaatagtgtcttacacaggctgattagtggagtaatgaccagcaaagaaattatattgggactttgcttgttatcactagttctatccatgattttgatggtgataatcaggtatatatcaagagtacttgtgtggatcttaacgattctggtcatactcggttcacttggaggcacaggtgtactatggtggctgtatgcaaagcaaagaaggtctcccaaagaaactgttactcctgagcagcttcagatagctgaagacaatcttcgggccctcctcatttatgccatttcagctacagtgttcacagtgatcttattcctgataatgttggttatgcgcaaacgtgttgctcttaccatcgccttgttccacgtagctggcaaggtcttcattcacttgccactgctagtcttccaacccttctggactttctttgctcttgtcttgttttgggtgtactggatcatgacacttctttttcttggcactaccggcagtcctgttcagaatgagcaaggctttgtggagttcaaaatttctgggcctctgcagtacatgtggtggtaccatgtggtgggcctgatttggatcagtgaatttattctagcatgtcagcagatgacagtggcaggagctgtggtaacatactattttactagggataaaaggaatttgccatttacacctattttggcatcagtaaatcgccttattcgttaccacctaggtacggtggcaaaaggatctttcattatcacattagtcaaaattccgcgaatgatccttatgtatattcacagtcagctcaaaggaaaggaaaatgcttgtgcacgatgtgtgctgaaatcttgcatttgttgcctttggtgtcttgaaaagtgcctaaattatttaaatcagaatgcatacacagccacagctatcaacagcaccaacttctgcacctcagcaaaggatgcctttgtcattctggtggagaatgctttgcgagtggctaccatcaacacagtaggagattttatgttattccttggcaaggtgctgatagtctgcagcacaggtttagctgggattatgctgctcaactaccagcaggactacacagtatgggtgctgcctctgatcatcgtctgcctctttgctttcctagtcgctcattgcttcctgtctatttatgaaatggtagtggatgtattattcttgtgttttgccattgatacaaaatacaatgatgggagccctggcagagaattctatatggataaagtgctgatggagtttgtggaaaacagtaggaaagcaatgaaagaagctggtaagggaggcgtcgctgattccagagagctaaagccgatggcttcgggagcaagttctgcttgaacctagccgacggttatggaaacccattgacattccaaaacaatatatacacataactatgtatttgtgtgtgtgggtgtgtgtatatatgtatatgtatgtgtgtatatatgtatatgtatatacacacacacacataaatcagccaaaatcagagaaaaggaacagggatttaataccttttttatgcttatttttgtcaaacatgtactcctttcatacgggtggcttttacaaggcaacttccgtcatttaatgttttcaactgtaattgtcttaatggaaatgttaaaattcatatctgattaacatttttaataacttagaggagattttaactttatttaaaaataggtaaaattattgtacctaattatgtctaaagtttattcaggggtaatttccctgatgtctgtataaaatcaagatcttattttactgatgcataagtcctagtgggtcaagactaggcatatgctttcagataaataaggaattactccaatcagttttccccaatcaaagaagccatgtcattttacttttagaaacatacaattgggcccaatatgggaattttcataatagttcatacatttgtcagccaacattaaaaggtaaccaactcctcaggtatttgtagtttaccctaacgcttctttaaaagaaagtaggtaaaaaaagaaaagggtagataatctttcgtatgcaaacttttcccttatattttgtctttctttcctttttgactttagtagcatcctccacacatttgtgtgcctgatttgaaaggaagctggggcacccagcgagtttagcctttaagtttctgtgtattgatttgcagattaagtaatgctgagaggaataaagaagggacagaaacatggaacataaagcattgaaaattccggtgcttgggcttcggcttcagagtaacgtcagtggcttagggttaaacggccattttattcaaatgcttgctatacaatctgaaaacacactggcaggtgctcctctccttggcaattcattgagtatccagagttctacgatgtttaactgaagaattggctaatgttttgatcctccagtgtgactgttgtttttgtttgggggtgggtttggggtttttgcttttttattcctgaagcttaccagatatgaatggctaatactccattgttctgcttgttgtaatggtgaatgctttaagaaaaaaaagtgtaatttgctaagaataattcatgatctgtttatgcgataactcctttttgttacaatttttttaaaaaaagctatttttgttaatgtaaagtaaatatttcagagcaaattttttaaacttattgcactaaatacaggctctgtac

SEQ ID NO: 14234 - protein, 449 aa, Homo sapiens
MTSKEIILGLCLLSLVLSMILMVIIRYISRVLVWILTILVILGSLGGTGVLWWLYAKQRRSPKETVTPEQLQIAEDNLRALLIYAISATVFTVILFLIMLVMRKRVALTIALFHVAGKVFIHLPLLVFQPFWTFFALVLFWVYWIMTLLFLGTTGSPVQNEQGFVEFKISGPLQYMWWYHVVGLIWISEFILACQQMTVAGAVVTYYFTRDKRNLPFTPILASVNRLIRYHLGTVAKGSFIITLVKIPRMILMYIHSQLKGKENACARCVLKSCICCLWCLEKCLNYLNQNAYTATAINSTNFCTSAKDAFVILVENALRVATINTVGDFMLFLGKVLIVCSTGLAGIMLLNYQQDYTVWVLPLIIVCLFAFLVAHCFLSIYEMVVDVLFLCFAIDTKYNDGSPGREFYMDKVLMEFVENSRKAMKEAGKGGVADSRELKPMASGASSA

SEQ ID NO: 14235 - DNA, 2672 bp, Homo sapiens
  CDS (145)..(753)
gtgaccgcctcctcggacaaggcttttgaagactggctgaatgatgacctcggctcctatcaaggggcccaggggaatcgctacgtggggtttgggaacacgccaccgcctcagaagaaagaagatgacttcctcaacaacgccatgtcctccctgtactcgggctggagcagcttcaccactggagccagccggtttgcctcggcagccaaggagggcgctacaaagtttggatcccaagcgagtcagaaggcgtccgagctgggccacagcctgaacgagaacgtcctcaagcctgcgcaggagaaggtgaaggagggaaagatttttgatgatgtctccagtggggtctctcagttggcgtccaaggtccagggagtcggtagtaagggatggcgggacgtcaccacctttttttcggggaaagcagagggccccttggacagcccctcggagggccacagttatcagaacagcggtctggaccacttccaaaacagcaacatagaccagagcttctgggagacctttggaagtgctgagcccaccaagacccgcaagtccccgagcagcgacagctggacgtgcgcggacacctccaccgagaggaggagctcggacagctgggaggtgtggggctcggcctccaccaacaggaacagcaacagcgacggcggggagggcggggagggcaccaagaaggcagtgccgccggccgtgcccactgatgatggctgggacaaccagaactggtagggcccactgcgcccccgtccccagcgcccccgggcgacttcgtgtttgcactctgccctcgtcgttcctcctccttccatttgacccaagaatcagcaactgcagtgtgaggacagcgtctcgggaggcaggaccctagggagacccgggtgtgcgccgcctgcgcgtggggagtcttcggtgcgtgggggcggcttgctgtccagcctgtgtgggggccgtcccgtcccacactcccctgggcattcttggactcaaggccggggctctgcgtggcttgctgggaggtgggctgcagcacagaggcctgtgactgcgttccagcggccagttcactacgcagtatctctggggcctgggaccagccacgtgccgagctgtcagcgacgtgaggtgtcccttctcgttgagatatttaactttggttttgctctagttctttcttttcgaagagagtgactggagtggtaaagatggaaatgctggaaatgatactggcgctcacgctgccatccgaccaccctcggctcccgagtccacgcctgcctgggcctgtgctgtcagacccgcgtcggtcgtaaccctctgtggctcccctgcatcagcaccgtcccaccaccaagttcaccaggttcaccagacacggcctccacaatagccacacccacacctgagctgttctcagtgctggaacttgaccatcctggaacaccctggaagaaaaaggagcgcagggtgggccctcggccctgatgcaggagggtgcgatagcggacgtggccaggcaggaggggccgggttcaggagctgagcaggggatgcctgtgcgtggtgcctgggtctagggaagctccagccccaggatggggctgccctgcacaccggtgcccgccacatgccaaccctcacctccccgaggactggatgatgtgctgccacgtgtgactcgtctcccttgtctgccctgtgtgaccctcagtcttggccagccatgcatgcgcccgaagctcgtgcagtttgtacgtgaggtgctctcctccctgccaccatgctcatcactctggccttggccatgctccctggtcaccccacttcccggtcgccgtctgcagcactcctggagcagcctgggcccttcagcccctgtgctcgtcccaccctagggactcagccacttgcagaacaggatgggaccgagatttcagcgagccctcctggcgcccggtcctccctgtgggcaccagccctcttggtagctggtgtggagggccggtgtccttggctgccacggagggatttgatcaccgaagcagccacctgctgtagttggacctgaggtcagaggcggggcatcagaggctcaaggtgctgagaagccaccgggaaagcagccagcacaaagggcccaggaagccagcccccgagagctgagcgtgggggtctttgagtgtctttctccaagctgagacgtgggcggccgcgtggtatctcccgagggctgcttggaccctggtgggctgagtgctccgaggaggggtggactccaccttggacagtgggatgtggtgttccacatgtgcctgtttccacgccagcaccttgacttggcagcatggagccaaggtctgtccccgcccaggagggtgccttcctcgggggtagggggacggcccactctgccccagggagtcccttttgatgggaagtgcagtcagcagcgtggaggtgtctgggccaccttcagaaggtggatgtggtggccgagaccccgtccacggagggtgatggcctttcccttctgcaggtgcgggcaggtgggcctgggaccggtgctggggcctctccttgctgtgtgtgagggcccaggtggaaggcgcggacctgacagcattccaataaagcatacgggaacatgc

SEQ ID NO: 14236 - protein, 203 aa, Homo sapiens
MSSLYSGWSSFTTGASRFASAAKEGATKFGSQASQKASELGHSLNENVLKPAQEKVKEGKIFDDVSSGVSQLASKVQGVGSKGWRDVTTFFSGKAEGPLDSPSEGHSYQNSGLDHFQNSNIDQSFWETFGSAEPTKTRKSPSSDSWTCADTSTERRSSDSWEVWGSASTNRNSNSDGGEGGEGTKKAVPPAVPTDDGWDNQNW

SEQ ID NO: 14237 - DNA, 1449 bp, Homo sapiens
  CDS (173)..(691)
tcatactggagagaagccctacgtttgtgaagaatgtggcaaagcctttaagtactcccgtatccttactacacataagagaattcatactgaagagaaaccatacaagtgtaataaatgtggcaaagcctttattgcatcctcaacccttagtagacatgagttcattcatatgggaaagaaacattacaaatgtgaagaatgtggcaaagccttcatttggtcctcagtcctaactagacataagagagttcatactggagagaagccctacaaatgtgaagaatgtggcaaagcctttaagtactcctctacccttagttcacataagagaagtcatactggagagaaaccctacaaatgtgaagaatgtggcaaagcctttgttgcatcctcaacccttagtaaacatgagatcattcatactggaaagaaaccctacaagtgtgaagaatgtggcaaagcttttaaccagtcctcatcccttactaaacataagaaaattcatactggagagaaaccctacaaatgtgaagaatgtggcaaagcttttaaccagtcctcttcccttactaaacataagaaaatccattctggagagaaaccatacgagtgtgataaatgtggcaaagcctttatttcaccctcaagccttagtagacatgagataattcatactggggagaaaccctagaagtgtgaagaatgtggcaaagccttcaagtggtcctcacaccttactatacactgagagttctgaacttactctgtaaccatcccaaactcctcccaggcacagtctggcagaggtcctgccatttcggagacctggaggaagtggcccatttacagccatgtaggcaggcctgcagaccttggcctttactacggtacctgaagtggttcaatgactcagtttcagttacctgagccacagcttaaggtcagttctgcctatatagaaacccacacagttaacctgaggaaatgctctctggtactcactgaaagccacactcatccacatcctgatacaaggcccaccatatgcagacctgactgccaaaacatgccctagtgtctgccgtacagagtgaagtcctgaaggatatttagtctgtccaaaactaaaatgaagatttcaactccccaaccccctctaacaagccagctaaaggtggactatagtgcagacccagcaaccttgtgaccaagctaaaacccctcatcactacaaattcagagggcatctcatcaccctaagggcccaacgaaagatctttaccttctaacatcagtttatgaaaacttgaaaaggtgtttgctccatcaaattcagacaccagtacaaaactatattatgcccattgtctggttctattttaatgtagcactggaagtgtgtggcagaagaattagtcaaagaaataaaaatagccattgaaattg

SEQ ID NO: 14238 - protein, 173 aa, Homo sapiens
MGKKHYKCEECGKAFIWSSVLTRHKRVHTGEKPYKCEECGKAFKYSSTLSSHKRSHTGEKPYKCEECGKAFVASSTLSKHEIIHTGKKPYKCEECGKAFNQSSSLTKHKKIHTGEKPYKCEECGKAFNQSSSLTKHKKIHSGEKPYECDKCGKAFISPSSLSRHEIIHTGEKP

SEQ ID NO: 14239 - DNA, 2510 bp, Homo sapiens
  CDS (230)..(1345)
tttccgacacaatccgtacacggccttccctcccgcagtgcccgggctgcctccgggcctcccgccggccgtctcctttggctccctgcagggggccttccagcccaagagcacgaaccctgagctgccaccacgactggggccggtgccgagcgggctctcccagaaggggacacagatccccgaccatttccggccacctttgaggaaaccagggaagtggtgtgccatgcacgtgcgtgtggcttacatgatcctgagacaccaggagaaaatgaagggtgactcccacaagcttgactttcggaatgacctcctgccctgccttccggggccctatggggccctgccccctgggcaggagctctcccacccggcctccctcttcactgcgactggtgccgtccacgctgcagccaaccctttcacggcagctcccggggcccacggacccttcctgagccccagcacccacattgatccctttgggcgtcccacaagcttcgcctctttggctgccctctccaacggggcctttggaggcctgggcagccccacattcaactccggcgccgtctttgcccagaaagaaagcccaggggccccaccagccttcgcctccccaccggacccatggggccgcctgcaccgcagtcctctgacctttcctgcctgggtccggccccctgaggccgcccggactccaggctcagacaaggagcggcctgtggagcggagggagccctccatcaccaaggaggagaaggacagggacctccccttctcacggccccagctccgagtttctcctgctactcccaaggcccgggctggtgaggaggggcctcggccaaccaaggaatctgtgcgggtaaaggaagagcggaaggaggaggctgccgccgccgctgccgctgctgctgccgccgccgctgccgccgccgcagcagccactgggccccagggccttcacctgctgtttgagaggccccggccgcccccgtttctgggccctagcccaccagatcgctgtgctggcttcctggagccaacctggttggcagcacccccacgcctggcaaggccaccccgcttctatgaggcgggtgaggagctaactggacccggggccgtggccgctgcccgcctctacggtctggaacctgctcaccccttgctctacagccgcttggctcctccaccaccacctgctgcggccccgggaacccctcaccttctcagcaagaccccaccgggagcccttttgggggcaccacctccgcttgtgcccgccccccggcccagttccccacctaggggccctggcccagctcgggctgacaggtgaggggaacgggggggggtcggggcaaagctccatctccccttcctttaaccaggtcctagggctgaggttttaagccagggctggagggcaaaggtcataacctcaccagccacctctgaggtcatggaacctgggaacagaagcctcaacccccacaagaccaagcatcacatggagtgtagggtcactgggagagcagaggtcacagcctctagagaagggagaggggcgtgtgcatgggagtgtggctcatctcgggggccatggggcctcctgaggtacacctttgcccctgtaagggcctctaggccctgggcctgcctccccaagggctcactaagccagaggccaaagtgccccctcccgttcacctaccacccaagtcctcatgccctccgagggctgggggaggaggggctcaaggaaggggggttccatgtacatatttatcacccctttcacatagccccaagaccttttgtacatttttacaggggtgcccctcccaacagttcccttcctggttaattaaaccctcagactggtgctgtgttcctagcctctggcctctctgtggggaaaggggactgcagggggaagagccgggaagggacagtcaggcttctccctgggaaggtggggccagcaggagatgaccaacagggggcaggacctggggacctgggctggagggaagggcagaagcttcctacttggctgacagccccggttcccccaacatgttcccgttcactctgcccccacccccaaaggctcagcctctaaatctcagactccaccacctcttaatggctcagtccccttcaccccatttccaagtgcccccaggactcctgggccctgcttccctgaaccctgttctccaaaaccctgccccaggctaagggtggccagagaaggtcaccatgtaccacacaccaaagaagggggtcggcccaggggtgggcgacacaggcagcttcttcggcagcctcacggcagcaaccccagccttcccaaagcagcaggcgcctccaggctggggcccaacctagaaggcaggggtcaatctaacaaaaccctaacgttgacttttttccctggtggggcttcttctgtaacatgacttgcgaatatttatataaaaacgagtgttacaatg

SEQ ID NO: 14240 - protein, 372 aa, Homo sapiens
MHVRVAYMILRHQEKMKGDSHKLDFRNDLLPCLPGPYGALPPGQELSHPASLFTATGAVHAAANPFTAAPGAHGPFLSPSTHIDPFGRPTSFASLAALSNGAFGGLGSPTFNSGAVFAQKESPGAPPAFASPPDPWGRLHRSPLTFPAWVRPPEAARTPGSDKERPVERREPSITKEEKDRDLPFSRPQLRVSPATPKARAGEEGPRPTKESVRVKEERKEEAAAAAAAAAAAAAAAAAAATGPQGLHLLFERPRPPPFLGPSPPDRCAGFLEPTWLAAPPRLARPPRFYEAGEELTGPGAVAAARLYGLEPAHPLLYSRLAPPPPPAAAPGTPHLLSKTPPGALLGAPPPLVPAPRPSSPPRGPGPARADR

SEQ ID NO: 14241 - DNA, 3114 bp, Homo sapiens
  CDS (1)..(3114)
atgccagtccatatggtccccacagagcttgttgagaaagaattttggagactagtaagcactattgaggaggatgtcacagtggaatatggagctgacattgcctcaaaggaatttggcagtggctttcctgtccgagatgggaaaatcaaactctcacctgaggaagaggagtatcttgatagtggctggaatttgaacaacatgccagtgatggagcagtctgtccttgcacatattactgctgatatatgtggcatgaaacttccttggttgtatgtgggaatgtgcttttcttcattctgttggcacattgaagaccactggagctattcaattaactacttgcactggggtgagccaaaaacctggtatggagtcccagggtatgctgctgagcagctagaaaatgtaatgaagaaactagctccagaactctttgtgtcccagccggatctcctccatcagcttgtgaccatcatgaaccccaataccctgatgactcatgaagtgcctgtttaccgaactaatcagtgtgctggggagtttgtgattacatttccaagagcctaccacagtggttttaaccagggttttaattttgctgaggctgttaacttctgcactgttgattggctgccattaggccgacagtgtgtggagcattatcgcttacttcatcgatattgtgtgttttcccatgatgagatgatctgcaagatggcttccaaggctgatgtattagatgttgtagtggcttcaactgttcagaaagacatggccattatgattgaggatgagaaagctttaagagaaactgtccgtaaattgggagtgattgattcggaaagaatggattttgagctgttgccagatgatgaacgtcagtgtgtaaaatgcaaaactacatgcttcatgtctgccatctcctgttcttgtaaacctggccttcttgtttgcctgcatcatgtaaaagaattgtgttcctgtcctccttataaatataaattgcggtataggtacacgctggatgatctctaccctatgatgaatgcattgaagcttcgagcagaatcttacaacgaatgggccttgaatgtgaatgaagctttggaggcaaagatcaacaagaagaaaagccttgtcagcttcaaggctttaattgaagaatctgaaatgaagaaattcccagacaatgatcttttgcgacaccttcgcctagtcacacaggatgcagagaagtgtgcctctgttgcgcagcagttgcttaatggcaaaaggcaaactagatatcgatctggtggagggaaatcccaaaatcagttgacagtgaatgagctccggcagtttgtaacacagctgtatgctcttccatgtgtcctcagtcagacaccattactaaaggatctcttgaatcgtgtagaagattttcaacagcatagtcagaaactactctctgaggaaacgcctagtgctgcggagctgcaggacttgctagatgtcagctttgaatttgatgttgaacttccacagcttgctgagatgcgtatccgtttggaacaagcccgttggctagaagaggtgcagcaagcttgcctagaccccagctcccttactttagatgatatgagacgtctcatagacctaggggtagggctggccccgtattcagcagtggagaaagctatggcccggctgcaggaactgctcacagtgtcagagcactgggacgacaaagccaagagtctcctcaaggccaggccacgacattcattgaatagccttgctacggcagtaaaggaaatcgaagagatccctgcatatctgcccaatggtgcggctctgaaagactcagtgcagagagccagagactggcttcaggatgtagagggcctgcaggctggaggacgtgtgccagtgttagacacactcatagaacttgttacacgaggccgatctatcccggtacatctgaattctttgccaagactggaaaccctagtagctgaggttcaggcttggaaagaatgtgctgttaatacattcttgactgagaattctccatattctctcttagaggtgctgtgtcctcgatgtgatattggccttttgggattgaaaaggaagcagagaaagttaaaggagcccttgccaaatggaaagaaaaaaagcaccaaattagagagtctgagtgacctggagagagctttaactgaaagcaaggagactgcttcagctatggcaactcttggggaagctcgcctaagggaaatggaagccttgcagtctctcagactcgccaatgaagggaaattgctgtcgcctctccaagatgtggatataaaaatctgcctatgtcagaaggccccagctgcccctatgattcaatgtgaactctgcagggatgctttccacaccagttgtgtggcggtacccagtatttcacagggcctgcgaatctggctttgtccccattgtcggaggtcagagaaacctccattagagaaaattctgcccctgctcgcctcccttcagcgtatccgagttcgccttcctgagggagatgcacttcgatatatgattgaaagaaccgtgaactggcagcacagagcccagcaactgctttcgtcagggaatcttaaatttgtgcaagatcgagtgggctcaggactgttatatagcagatggcaagcctcagcaggacaggtgtcagacacaaacaaggtatctcaacctcctggcacaacatcattttctttgcctgatgactgggacaacagaacctcatatttgcactcccccttctcaactggacgaagttgtatccccctccatggtgttagtccagaagtgaatgaactattgatggaagcccagctgctccaggtatcccttcctgaaattcaggaactttaccagactttacttgcaaagccaagccctgctcagcagactgaccgaagctcaccagtgagacccagcagtgagaagaatgactgttgccgagggaagcgagatggaattaacagtcttgagagaaaactgaagagacgcctggaaagagagggcctctccagtgagcggtgggaacgagttaagaaaatgcggaccccc

SEQ ID NO: 14242 - protein, 1038 aa, Homo sapiens
MPVHMVPTELVEKEFWRLVSTIEEDVTVEYGADIASKEFGSGFPVRDGKIKLSPEEEEYLDSGWNLNNMPVMEQSVLAHITADICGMKLPWLYVGMCFSSFCWHIEDHWSYSINYLHWGEPKTWYGVPGYAAEQLENVMKKLAPELFVSQPDLLHQLVTIMNPNTLMTHEVPVYRTNQCAGEFVITFPRAYHSGFNQGFNFAEAVNFCTVDWLPLGRQCVEHYRLLHRYCVFSHDEMICKMASKADVLDVVVASTVQKDMAIMIEDEKALRETVRKLGVIDSERMDFELLPDDERQCVKCKTTCFMSAISCSCKPGLLVCLHHVKELCSCPPYKYKLRYRYTLDDLYPMMNALKLRAESYNEWALNVNEALEAKINKKKSLVSFKALIEESEMKKFPDNDLLRHLRLVTQDAEKCASVAQQLLNGKRQTRYRSGGGKSQNQLTVNELRQFVTQLYALPCVLSQTPLLKDLLNRVEDFQQHSQKLLSEETPSAAELQDLLDVSFEFDVELPQLAEMRIRLEQARWLEEVQQACLDPSSLTLDDMRRLIDLGVGLAPYSAVEKAMARLQELLTVSEHWDDKAKSLLKARPRHSLNSLATAVKEIEEIPAYLPNGAALKDSVQRARDWLQDVEGLQAGGRVPVLDTLIELVTRGRSIPVHLNSLPRLETLVAEVQAWKECAVNTFLTENSPYSLLEVLCPRCDIGLLGLKRKQRKLKEPLPNGKKKSTKLESLSDLERALTESKETASAMATLGEARLREMEALQSLRLANEGKLLSPLQDVDIKICLCQKAPAAPMIQCELCRDAFHTSCVAVPSISQGLRIWLCPHCRRSEKPPLEKILPLLASLQRIRVRLPEGDALRYMIERTVNWQHRAQQLLSSGNLKFVQDRVGSGLLYSRWQASAGQVSDTNKVSQPPGTTSFSLPDDWDNRTSYLHSPFSTGRSCIPLHGVSPEVNELLMEAQLLQVSLPEIQELYQTLLAKPSPAQQTDRSSPVRPSSEKNDCCRGKRDGINSLERKLKRRLEREGLSSERWERVKKMRTP

SEQ ID NO: 14243 - DNA, 2601 bp, Homo sapiens
  CDS (69)..(578)
tctatacgtccaacatccccatcatcctgcagtctgccctggtgtccaacctttatgtcatctcccaaatgctctcagctcgcttcagtggcaacttgctggtcagcctgctgggcacctggtcggacacgtcttctgggggcccagcacgtgcttatccagttggtggcctttgctattacctgtcccctccagaatcttttggctccgtgttagaagacccggtccatgcagttgtatacatagtgttcatgctgggctcctgtgcattcttctccaaaacgtggattgaggtctcaggttcctctgccaaagatgttgcaaagcagctgaaggagcagcagatggtgatgagaggccaccgagagacctccatggtccatgaactcaaccggtacatccccacagccgcggcctttggtgggctgtgcatcggggccctctcggtcctggctgacttcctaggcgccattgggtctggaaccgggatcctgctcgcagtcacaatcatctaccagtactttgagatcttcgttaaggagcaaagcgaggttggcagcatgggggccctgctcttctgagcccgtctcccggacaggttgaggaagctgctccagaagcgcctcggaaggggagctctcatcatggcgcgtgctgctgcggcatatggacttttaataatgtttttgaatttcgtattctttcattccactgtgtaaagtgctagacattttccaatttaaaattttgctttttatcctggcactggcaaaaagaactgtgaaagtgaaattttattcagccgactgccagagaagtgggaatggtataggattgtccccaagtgtccatgtaacttttgttttaacctttgcaccttctcagtgctgtatgcggctgcagccgtctcacctgtttccccacaaagggaatttctcactctggttggaagcacaaacactgaaatgtctacgtttcattttggcagtagggtgtgaagctgggagcagatcatgtatttcccggagacgtgggaccttgctggcatgtctccttcacaatcaggcgtgggaatatctggcttaggactgtttctctctaagacaccattgttttcccttattttaaaagtgatttttttaaggacagaacttcttccaaaagagagggatggctttcccagaagacactcctggccatctgtggatttgtctgtgcacctattggctcttctagctgactcttctggttgggcttagagtctgcctgtttctgctagctccgtgtttagtccacttgggtcatcagctctgccaagctgagcctggccaagctaggtggacagacccttgcagtgatgtccgtttgtccagattctgccagtcatcactggacacgtctcctcgcagctgccctagcaaggggagacattgtggtagctatcagacatggacagaaactgacttagtgctcacaagcccctacaccttctgggctgaagatcacccagctgtgttcagaattttcttactgtgcttaggactgcacgcaagtgagcagacaccaccgacttcctttctgcgtcaccagtgtcgtcagcagagagaggacagcacaggctcaaggttggtagtgaagtcaggttcggggtgcatgggctgtggtggtgttgatcagttgctccagtgtttgaaataagaagactcatgtttatgtctggaataagttctgtttgtgctgacaggtggcctaggtcctggagatgagcaccctctctctggcctttagggagtcccctcttaggacaggcactgcccagcagcaagggcagcagagttgggtgctaagatcctgaggagctcgaggtttcgagctggctttagacattggtgggaccaaggatgttttgcaggatgccctgatcctaagaagggggcctgggggtgcgtgcagcctgtcggggagaccccactctgacagtgggcacacggcagcctgcaaagcacagggccaccgccacagcccggcagaggggcacactctggagaccttgctggcagtgctagccaggaaacagagtgaccaagggacaagaagggacttgcctaaagccacccagcaactcagcagcagaaccaagatgggccccaggctcctccatatggcccagggcttaccaccctatcacacgtggccttgtctagacccagtcctgagcaggggagaggctcttgagacctgatgccctcctacccacatggttctcccactgccctgtctgctctgctgctacagaggggcagggcctcccccagcccacgcttaggaatgcttggcctctggcaggcaggcagctgtacccaagctggtgggcagggggctggaaggcaccaggcctcaggaggagccccatagtcccgcctgcagcctgtaaccatcggctgggccctgcaaggcccacactcacgccctgtgggtgatggtcacggtgggtgggtgggggctgaccccagcttccaggggactgtcactgtggacgccaaaatggcataactgagataaggtgaataagtgacaaataaagccagttttttacaaggt

SEQ ID NO: 14244 - protein, 170 aa, Homo sapiens; identical to SEQ ID NO: 12206

SEQ ID NO: 14245 - DNA, 2457 bp, Homo sapiens
  CDS (173)..(1846)
cggcccctacccctgagtccccggggtcccggccgccaggccggagcgcgaatgtcgtgctcaccctgcctccttcccgccgccccctgggctttttgatgacaagcttcaaaactgcaaagaagatgaacagagaaagaaaattgaaactctcaaagagacaacaaatagcatggtagaatcaattaaacactgcattgtgttgctgcagattgccaaaagtactattaatcccgtagatgcaatatatcaacctagtcctttggaacctgtgatcagcacaatgccttcccagactgtgttacctccagaacctgttcagttgtgtaagtcagagcagcgtccatcttccctaccagttggacctgtgttggctaccttgggacatcatcagactcctacaccaaatagtacaggcagtggccattcaccaccgagtagcagtctcacttctccaagccacgtgaacttgtctccaaatacagtcccagagttctcttactccagcagtgaagatgaattttatgatgctgatgaattccatcaaagtggctcatccccaaagcgcttaatagattcttctggatctgcctcagtcctgacacacagcagctcgggaaatagtctaaaacgcccagataccacagaatcacttaattcttccttgtccaatggaacaagtgatgctgacctgtttgattcacatgatgacagagatgatgatgcggaggcagggtctgtggaggagcacaagagcgttatcatgcatctcttgtcgcaggttagacttggaatggatcttactaaggtagttcttccaacgtttattcttgaaagaagatctcttttagaaatgtatgcagacttttttgcacatccggacctgtttgtgagcattagtgaccagaaggatcccaaggatcgaatggttcaggttgtgaaatggtacctctcagcctttcatgcgggaaggaaaggatcagttgccaaaaagccatacaatcccattttgggcgagatttttcagtgtcattggacattaccaaatgatactgaagagaacacagaactagtttcagaaggaccagttccctgggtttccaaaaacagtgtaacatttgtggctgagcaggtttcccatcatccacccatttcagccttttatgctgagtgttttaacaagaagatacaattcaatgctcatatctggaccaaatcaaaattccttgggatgtcaattggggtgcacaacatagggcagggctgtgtctcatgtctagactatgatgaacattacattctcacattccccaatggctatggaaggtctatcctcacagtgccctgggtggaattaggaggagaatgcaatattaattgttccaaaacaggctacagtgcaaatatcatcttccacactaaacccttctatgggggcaagaagcacagaattactgccgagattttttctccaaatgacaagaagtctttttgctcaattgaaggggaatggaatggtgtgatgtatgcaaaatatgcaacaggggaaaatacagtctttgtagataccaagaagttgcctataatcaagaagaaagtgaggaagttggaagatcagaacgagtatgaatcccgcagcctttggaaggatgtcactttcaacttaaaaatcagagacattgatgcagcaactgaagcaaagcacaggcttgaagaaagacaaagagcagaagcccgagaaaggaaggagaaggaaattcagtgggagacaaggttatttcatgaagatggagaatgctgggtttatgatgaaccattactgaaacgtcttggtgctgccaagcattaggttggaagatgcaaagtttatacctgatgatcagggcagtaggcataattcagcaacaaacaatcttcctttgggagaaacctgttcattccaatcttctaattacagtggttcctatctcagggatactggactttctgacgcagatgaacaattaaggggaaaagcttcccttttccctctgtggcagttacgattttgacttcagtcctgagaaaaacttcaggttttgaaaatcagatgatgtcttctccttttccaaacaccacacgttgaaagcatttataaatccaagtctgaaactctgcgctctagtactgctgttaagatacacaacttgtttcttagttcatataatctcgggatacacacacacacacacatatatatacacacacatacgtatacacacacatacatatatataaatatacctgatgccagatttttttcataaatattctgcctactgtaaatatgggttcctctgagttgttttagaaaattagcgcaatgtattaaaatcaagtgttaggaaatttcatggtcttacctacaataacttttattttggaattgaactattattaaattgtatctaatcctgg

SEQ ID NO: 14246 - protein, 558 aa, Homo sapiens
MVESIKHCIVLLQIAKSTINPVDAIYQPSPLEPVISTMPSQTVLPPEPVQLCKSEQRPSSLPVGPVLATLGHHQTPTPNSTGSGHSPPSSSLTSPSHVNLSPNTVPEFSYSSSEDEFYDADEFHQSGSSPKRLIDSSGSASVLTHSSSGNSLKRPDTTESLNSSLSNGTSDADLFDSHDDRDDDAEAGSVEEHKSVIMHLLSQVRLGMDLTKVVLPTFILERRSLLEMYADFFAHPDLFVSISDQKDPKDRMVQVVKWYLSAFHAGRKGSVAKKPYNPILGEIFQCHWTLPNDTEENTELVSEGPVPWVSKNSVTFVAEQVSHHPPISAFYAECFNKKIQFNAHIWTKSKFLGMSIGVHNIGQGCVSCLDYDEHYILTFPNGYGRSILTVPWVELGGECNINCSKTGYSANIIFHTKPFYGGKKHRITAEIFSPNDKKSFCSIEGEWNGVMYAKYATGENTVFVDTKKLPIIKKKVRKLEDQNEYESRSLWKDVTFNLKIRDIDAATEAKHRLEERQRAEARERKEKEIQWETRLFHEDGECWVYDEPLLKRLGAAKH

SEQ ID NO: 14247 - DNA, 2421 bp, Homo sapiens
  CDS (72)..(398)
acctgtcccctccagaatcttttggctccgtgttagaagacccggtccatgcagttgtatacatagtgttcatgctgggctcctgtgcattcttctccaaaacgtggattgaggtctcaggttcctctgccaaagatgttgcaaagcagctgaaggagcagcagatggtgatgagaggccaccgagagacctccatggtccatgaactcaaccggtacatccccacagccgcggcctttggtgggctgtgcatcggggccctctcggtcctggctgacttcctaggcgccattgggtctggaaccgggatcctgctcgcagtcacaatcatctaccagtactttgagatcttcgttaaggagcaaagcgaggttggcagcatgggggccctgctcttctgagcccgtctcccggacaggttgaggaagctgctccagaagcgcctcggaaggggagctctcatcatggcgcgtgctgctgcggcatatggacttttaataatgtttttgaatttcgtattctttcattccactgtgtaaagtgctagacattctccaatttaaaattttgctttttatcctggcactggcaaaaagaactgtgaaagtgaaattttattcagccgactgccagagaagtgggaatggtataggattgtccccaagtgtccatgtaacttttgttttaacctttgcaccttctcagtgctgtatgcggctgcagccgtctcacctgtttccccacaaagggaatttctcactctggttggaagcacaaacactgaaatgtctacgtttcattttggcagtagggtgtgaagctgggagcagatcatgtatttcccggagacgtgggaccttgctggcatgtctccttcacaatcaggcgtgagaatatctggcttaggactgtttctctctaagacaccattgttttcccttattttaaaagtgatttttttaaggacagaacttcttccaaaagagagggatggctttcccagaagacactcctggccatctgtggatttgtctgtgcacctattggctcttctagctgactcttctggttgggcttagagtctgcctgtttctgctagctccgtgtttagtccacttgggtcatcagctctgccaagctgagcctggccaagctaggtggacagacccttgcagtgatgtccgtttgtccagattctgccagtcatcactggacacgtctcctcgcagctgccctagcaaggggagacattgtggtagctatcagacatggacagaaactgacttagtgctcacaagcccctacaccttctgggctgaagatcacccagctgtgttcagaattttcttactgtgcttaggactgcacgcaagtgagcagacaccaccgacttcctttctgcgtcaccagtgtcgtcagcagagagaggacagcacaggctcaaggttggtagtgaagtcaggttcggggtgcatgggctgtggtggtgttgatcagttgctccagtgtttgaaataagaagactcatgtttatgtctggaataagttctgtttgtgctgacaggtggcctaggtcctggagatgagcaccctctctctggcctttagggagtcccctcttaggacaggcactgcccagcagcaagggcagcagagttgggtgctaagatcctgaggagctcgaggtttcgagctggctttagacattggtgggaccaaggatgttttgcaggatgccctgatcctaagaagggggcctgggggtgcgtgcagcctgtcggggagaccccactctgacagtgggcacacggcagcctgcaaagcacagggccaccgccacagcccggcagaggggcacactctggagaccttgctggcagtgctagccaggaaacagagtgaccaagggacaagaagggacttgcctaaagccacccagcaactcagcagcagaaccaagatgggccccaggctcctccatatggcccagggcttaccaccctatcacacgtggccttgtctagacccagtcctgagcaggggagaggctcttgagacctgatgccctcctacccacatggttctcccactgccctgtctgctctgctgctacagaggggcagggcctcccccagcccacgcttaggaatgcttggcctctggcaggcaggcagctgtacccaagctggtgggcagggggctggaaggcaccaggcctcaggaggagccccatagtcccgcctgcagcctgtaaccatcggctgggccctgcaaggcccacactcacgccctgtgggtgatggtcacggtgggtgggtgggggctgaccccagcttccaggggactgtcactgtggacgccaaaatggcataactgagataaggtgaataagtgacaaataaagccagttttttacaaggt

SEQ ID NO: 14248 - protein, 109 aa, Homo sapiens
MLGSCAFFSKTWIEVSGSSAKDVAKQLKEQQMVMRGHRETSMVHELNRYIPTAAAFGGLCIGALSVLADFLGAIGSGTGILLAVTIIYQYFEIFVKEQSEVGSMGALLF

SEQ ID NO: 14249 - DNA, 3297 bp, Homo sapiens
  CDS (18)..(2036)
aaatatcatattacaacatgggaagaataagattacagtggtctcgaatttgggaagttattggagatcattttaataaggttgggtgtaatcctaatgaagatgtagctatttttgcagtagactccttgaggcagttgtcaatgaagttcttagagaaaggggagcttgctaacttcagattccagaaggatttcttaagaccttttgaacatataatgaaacggaacaggtctccaacaattcgagatatggttgtacggtgtatagcacagatggttaattctcaagctgctaacattcgatctggatggaagaacattttctctgtatttcatctagctgcatctgatcaagatgaaagcatagtggaacttgcattccaaacaaccgggcacattgtcacccttgtatttgaaaaacactttccagcgaccattgattctttccaggatgcagtgaagtgtttgtctgaatttgcgtgcaatgcagctttcccagacacaagtatggaagcaattcgacttattcgccattgtgcaaaatatgtgtctgatagacctcaggctttcaaggaatacacaagcgatgatatgaacgtagcacctgaagacagggtgtgggtgagaggatggttcccaattctctttgagttatcctgtatcatcaatagatgcaaattagatgtaagaaccaggggtttaacagtaatgtttgaaataatgaaaacatatggccacacttatgagaaacactggtggcaggatttatttagaattgttttcagaatctttgacaatatgaaattgccagaacaacagacagagaaagctgaatggatgacaacaacttgcaatcatgcactttatgcaatctgtgatgtattcactcagtatttagaagtactcagtgatgtacttttggatgacatttttgctcagctctactggtgtgtgcagcaagacaatgagcagttagcgcgatctggtacaaactgtttagagaatgttgttattctgaatggtgaaaaatttaccctagaaatctgggataaaacttgcaactgcacactggatatcttcaaaaccacaatcccacatgcgctgttgacctggcgacccaattctggagaaactgcccccccacctccatctcctgtaagtgaaaagccattggatacaatatcacagaagtctgtagatattcatgattctattcaaccaaggtctgtggataacagaccacaagcaccactggtttctgcgtctgctgttaatgaagaagtcagcaaaattaaatctacagcaaaatttccagaacaaaaattgtttgctgccctgttgattaaatgtgttgtgcagctggaactcatccagactatcgacaacattgtcttcttcccagccacaagtaagaaagaagatgcagaaaacttagctgcagcacagagagatgcggtggactttgatgttcgcgttgatactcaagaccaaggaatgtaccgctttttaacatcacaacaactttttaagctactggactgcttattagagtcacatagatttgcaaaagcgtttaattccaacaacgaacagaggactgccctgtggaaagcaggattcaaaggcaaatccaagcccaaccttctgaagcaggagaccagcagcctggcctgtgggctgcgcattctcttccggatgtacatggatgagagccgcgttagtgcctgggaggaggtccagcagaggcttttgaatgtctgcagtgaagcactaagttacttcctcactctaacatcagaaagtcatcgagaagcctggactaacttactgcttttgtttctaactaaagttctaaagataagtgataataggtttaaagctcatgcatcattctactaccctctcttatgtgaaattatgcaatttgacttgattcctgaacttcgtgctgttcttagaagattttttctgcgaatcggagtagtttttcagatatcacaaccacctgaacaggaacttggaataaacaagcaatgatgggaacttaatatttttgttggcatttacatccctctgctctttaaaaggacgctggagctgaggtttcctacctgaaaaatgatttctctggattgcagtgtctgagttactggtaaagatgcttagaagtcttactcaaacttgcaacactccagtcccttttagtgctggtggattttgtgtgttatattggcctcatgttgagcagaaagcctgtttaaacagtgtcagctcatgctcacgggtccttccctgtcttccacggcaggaaaagccccacgtttttggcaggtgtggaagtgaaacttacccaaagaactatagatgtaaagattgaacttctacaagaagtacaactcaggagagctgtattttgaaggataaaatgtttataattggggagtggggagagaagaagaaattattgttcatggtaaaagatatttagcaactatggtattcttattctgaagatttttgcacactcaggctatctgagatactggtaatcatcctgtgaaaaatgtacagagatgcaggtctgtaatataaaaatcttaaaacattatatagttcttcctgcactgttttctttattttcttattcatttgctaaatacccataatattttgtcaaatgcactaaacatttgggtggaactttcttttttattttatagggatttttagttttgccctttttggtaggtggtgattttgaggctgtaacatgcccagaagctgttgtgaccgacacttcaacaatagggaaaaaaaggtagaaaatatccctactgacagtaactacctgtcacatatttctcttaggacttttaaagatgagccattaaaatagaatgatcctttatggaccaaaacttgaatcactgcaaaatgaatccagattgctgtcattttcttttcttttgggtggtggggcttgatgtagattttactctatgtacagaatttaacgttgaatatattaaaataacaaatctggcatggtttgcggaggttagatttactggaaatgtattcatactgtgaattgtgctctgatggttaaaagacaagattgtcaagcattccgtattaacagtggatgtagaaaattttttcagatggacaaaatgtatatggtacagatgtaaagttttctatgtaaaaaattctgtacaactttctgtacaatattgattcccatctggcatattctaatcaggttataggtcaataaagtttttgaattatt

SEQ ID NO: 14250 - protein, 673 aa, Homo sapiens
MGRIRLQWSRIWEVIGDHFNKVGCNPNEDVAIFAVDSLRQLSMKFLEKGELANFRFQKDFLRPFEHIMKRNRSPTIRDMVVRCIAQMVNSQAANIRSGWKNIFSVFHLAASDQDESIVELAFQTTGHIVTLVFEKHFPATIDSFQDAVKCLSEFACNAAFPDTSMEAIRLIRHCAKYVSDRPQAFKEYTSDDMNVAPEDRVWVRGWFPILFELSCIINRCKLDVRTRGLTVMFEIMKTYGHTYEKHWWQDLFRIVFRIFDNMKLPEQQTEKAEWMTTTCNHALYAICDVFTQYLEVLSDVLLDDIFAQLYWCVQQDNEQLARSGTNCLENVVILNGEKFTLEIWDKTCNCTLDIFKTTIPHALLTWRPNSGETAPPPPSPVSEKPLDTISQKSVDIHDSIQPRSVDNRPQAPLVSASAVNEEVSKIKSTAKFPEQKLFAALLIKCVVQLELIQTIDNIVFFPATSKKEDAENLAAAQRDAVDFDVRVDTQDQGMYRFLTSQQLFKLLDCLLESHRFAKAFNSNNEQRTALWKAGFKGKSKPNLLKQETSSLACGLRILFRMYMDESRVSAWEEVQQRLLNVCSEALSYFLTLTSESHREAWTNLLLLFLTKVLKISDNRFKAHASFYYPLLCEIMQFDLIPELRAVLRRFFLRIGVVFQISQPPEQELGINKQ

SEQ ID NO: 14251 - DNA, 2404 bp, Homo sapiens
  CDS (185)..(1966)
ttttggcctcactctttgtggaccactaaggactttgctgctatttgagcacagtgatattgttgtcatttcactactcagtgttttgttcaccagttctggaggaggaccagcaaagacaaggggagctgcttttttcattattgctgtgatctgtttattgctttttgacaatgatgatctcatggctaaaatggctgaacaccctgaaggacatcatgacagtgctctaactcatatgctttacacagccattgccttcttaggtgtggcagatcacaagggtggagtattattgctagtactggctttgtgttgtaaagttggttttcatacagcttccagaaagctctctgtcgacgttggtggagctaaacgtcttcaagctttatctcatcttgtttctgtgcttctcttgtgcccatgggtcattgttctttctgtgacaactgagagtaaagtggagtcttggttttctctcattatgccttttgcaacggttatcttttttgtcatgatcctggatttctacgtggattccatttgttcagtcaaaatggaagtttccaaatgtgctcgttatggatcctttcccatttttattagtgctctcctttttggaaatttttggacacatccaataacagaccagcttcgggctatgaacaaagcagcacaccaggagagcactgaacacgtcctgtctggaggagtggtagtgagtgctatattcttcattttgtctgccaatatcttatcatctccctctaagagaggacaaaaaggtacccttattggatattctcctgaaggaacacctctttataacttcatgggtgatgcttttcagcatagctctcaatcgatccctaggtttattaaggaatcactaaaacaaattcttgaggagagtgactctaggcagatcttttacttcttgtgcttgaatctgctttttacctttgtggaattattctatggcgtgctgaccaatagtctgggcctgatctcggatggattccacatgctttttgactgctctgctttagtcatgggactttttgctgccctgatgagtaggtggaaagccactcggattttctcctatgggtacggccgaatagaaattctgtctggatttattaatggactttttctaatagtaatagcgttttttgtgtttatggagtcagtggctagattgattgatcctccagaattagacactcacatgttaacaccagtctcagttggagggctgatagtaaaccttattggtatctgtgcctttagccatgcccatagccatgcccatggagcttctcaaggaagctgtcactcatctgatcacagccattcacatcatatgcatggacacagtgaccatgggcatggtcacagccacggatctgcgggtggaggcatgaatgctaacatgaggggtgtatttctacatgttttggcagatactcttggcagcattggtgtgatcgtatccacagttcttatagagcagtttggatggttcatcgctgacccactctgttctctttttattgctatattaatatttctcagtgttgttccactgattaaagatgcctgccaggttctactcctgagattgccaccagaatatgaaaaagaactacatattgctttagaaaagatacagaaaattgaaggattaatatcataccgagaccctcatttttggcgtcattctgctagtattgtggcaggaacaattcatatacaggtgacatctgatgtgctagaacaaagaatagtacagcaggttacaggaatacttaaagatgctggagtaaacaatttaacaattcaagtggaaaaggaggcatactttcaacatatgtctggcctaagtactggatttcatgatgttctggctatgacaaaacaaatggaatccatgaaatactgcaaagatggtacttacatcatgtgagataactcaagaattacccctggagaataaacaatgaagattaaatgactcagtatttgtaatattgccagaaggataaaaattacacattaactgtacagaaacagagttccctactactggatcaaggaatctttcttgaaggaaatttaaatacagaatgaaacattaatggtaaaagtggagtaattatttaaattatgtgtataaaaggaatcaaattttgagtaaacatgatgtattacatcatcttcgaaaatagatatgatggattctagtgaagaccaaaattacttctgtttactttctatcaggaagcatctccattgtaaatatgtatttacatgtttattacaaagacccaaatgaaaaatttttagtccattttttgcatagcctaaagataaaataggaataaaagttctatatttatgg

SEQ ID NO: 14252 - protein, 594 aa, Homo sapiens
MAKMAEHPEGHHDSALTHMLYTAIAFLGVADHKGGVLLLVLALCCKVGFHTASRKLSVDVGGAKRLQALSHLVSVLLLCPWVIVLSVTTESKVESWFSLIMPFATVIFFVMILDFYVDSICSVKMEVSKCARYGSFPIFISALLFGNFWTHPITDQLRAMNKAAHQESTEHVLSGGVVVSAIFFILSANILSSPSKRGQKGTLIGYSPEGTPLYNFMGDAFQHSSQSIPRFIKESLKQILEESDSRQIFYFLCLNLLFTFVELFYGVLTNSLGLISDGFHMLFDCSALVMGLFAALMSRWKATRIFSYGYGRIEILSGFINGLFLIVIAFFVFMESVARLIDPPELDTHMLTPVSVGGLIVNLIGICAFSHAHSHAHGASQGSCHSSDHSHSHHMHGHSDHGHGHSHGSAGGGMNANMRGVFLHVLADTLGSIGVIVSTVLIEQFGWFIADPLCSLFIAILIFLSVVPLIKDACQVLLLRLPPEYEKELHIALEKIQKIEGLISYRDPHFWRHSASIVAGTIHIQVTSDVLEQRIVQQVTGILKDAGVNNLTIQVEKEAYFQHMSGLSTGFHDVLAMTKQMESMKYCKDGTYIM

SEQ ID NO: 14253 - DNA, 2471 bp, Homo sapiens
  CDS (772)..(1989)
ttaaaacattacaggccggcctgagcagcaatcatgtgtcccatggggaagttctgcggaaagtggagaggggttcacggattgtcactgttgtgccccaggacacaaagcttgtattacagatgccaaggggaaacttagaagttgttcatcatcgagccctggttttagctcagattcggaagtggttggacaaacttatgtttaaagaggcatttgaatgcatgagaaagctgagaatcaatctcaatctgatttatgatcataaccctaaggtgtttcttggaaatgtggaaaccttcattaaacagatagattctgtgaatcatattaacttgttttttacagagttgaaagaagaagatgtcacgaagaccatgtaccctgcaccagttaccagcagtgtctacctgtccagggatcctgacgggaataaaatagaccttgtctgcgatgctatgagagcagtcatggagaacataaatcctcataaatactgcctatccatacttacatctcatgtaaagaagacaaccccagaactggaaattgtactgcaaaaagtacacgagcttcaaggaaatgctccctctgatcctgatgctgtgagtgctgaagaggccttgaaatatttgctgcatctggtagatgttaatgaattatatgatcattctcttggcacctatgactttgatttggtcctcatggtagctgagaagtcacagaaggatcccaaaagaatatcttccatttcttaatacacttaagaaaatggaaactaattatcagcggtttactatagacaaatacttgaaacgatatgaaaaagccattggccacctcagcaaatgtggacctgagtacttcccagaatgcttaaacttgataaaagataaaaacttgtataacgaagctctgaagttatattcaccaagctcacaacagtaccaggatatcagcattgcttatggggagcacctgatgcaggagcacatgtatgagccagcggggctcatgtttgcccgttgcggtgcccacgagaaagctctctcagcctttctgacatgtggcaactggaagcaagccctctgtgtggcagcccagcttaactttaccaaagaccagctggtgggcctcggcagaactctggcaggaaagctggttgagcagaggaagcacattgatgcggccatggttttggaagagtgtgcccaggattatgaagaagctgtgctcttgctgttagaaggagctgcctgggaagaagctttgaggctggtatacaaatataacagactggatattatagaaaccaacgtaaagccttccattttagaagcccagaaaaattatatggcatttctggactctcagacagccacattcagtcgccacaagaaacgtttattggtagttcgagagctcaaggagcaagcccagcaggcaggtctggatgatgaggtaccccacgggcaagagtcagacctcttctctgaaactagcagtgtcgtgagtggcagtgagatgagtggcaaatactcccatagtaactccaggatatcagcgagatcatccaagaatcgccgaaaagcggagcggaagaagcacagcctcaaagaaggcagtccgctggaggacctggccctcctggaggcactgagtgaagtggtgcagaacactgaaaacctgaaagatgaagtataccatattttaaaggtactctttctctttgagtttgatgaacaaggaagggaattacagaaggcctttgaagatacgctgcagttgatggaaaggtcacttccagaaatttggactcttacttaccagcagaattcagctaccccggttctaggtcccaattctactgcaaatagtatcatggcatcttatcagcaacagaagacttcggttcctgttcttgatgctgagctttttataccaccaaagatcaacagaagaacccagtggaagctgagcctgctagactgagtgactgcagttaggagggatccgacagagaagaccatttccactcattcctgttgtcctaccaccccttgctctttgagggctggctattgagaactggaaagagtaaaatgataacttaccttagcattgccaagaacttcagcagacaacaagcaattctatttattttatgttgtgtatacatcttgatcattagcaagacattaagctttaaccattatggcaccattttgtgagaatgattgttctttcacttgggctgtttgagagcataattatggtaatcatgagattaatgtttcatgatttctacctccaaagtgtgaagacaagtaaaacaatgtttctaaattgtcttattttgttggcggagaagattacaatggctattagtgctacatttggtcaaatgtaatcacttaaatagcttcttgtcaccttaaactaaagcagaataaaaagtatcctttgaaatt

SEQ ID NO: 14254 - protein, 406 aa, Homo sapiens
METNYQRFTIDKYLKRYEKAIGHLSKCGPEYFPECLNLIKDKNLYNEALKLYSPSSQQYQDISIAYGEHLMQEHMYEPAGLMFARCGAHEKALSAFLTCGNWKQALCVAAQLNFTKDQLVGLGRTLAGKLVEQRKHIDAAMVLEECAQDYEEAVLLLLEGAAWEEALRLVYKYNRLDIIETNVKPSILEAQKNYMAFLDSQTATFSRHKKRLLVVRELKEQAQQAGLDDEVPHGQESDLFSETSSVVSGSEMSGKYSHSNSRISARSSKNRRKAERKKHSLKEGSPLEDLALLEALSEVVQNTENLKDEVYHILKVLFLFEFDEQGRELQKAFEDTLQLMERSLPEIWTLTYQQNSATPVLGPNSTANSIMASYQQQKTSVPVLDAELFIPPKINRRTQWKLSLLD

SEQ ID NO: 14255 - DNA, 3290 bp, Homo sapiens
  CDS (196)..(2130)
tagcccggggatttcatgcggcctagctcggttccgcctcctcctcgcgcggccccagcggctgcccgcaccccagccccactccgggcctccgtgtctctcctgtgatcgcactgacacggccggggggttagaatggaacaaactgaaggcccgatgagagaaagggaaagttaaggatgctggagcagaacaatggatttctctttctctttcatgcaagggatcatgggaaacacaattcagcaaccacctcaactcattgactccgccaacatccgtcaggaggatgcctttgataacaacagtgacattgctgaagatggtggccagacaccatatgaagctactttgcagcaaggctttcagtacccagctacaacagaagatcttcctccactcacaaatgggtatccatcatcaatcagtgtgtatgaaactcaaaccaaataccagtcatataatcagtatcctaatgggtcagccaatggctttggtgcagttagaaactttagccccactgactattatcattcagaaattccaaacacaagaccacatgaaattctggaaaaaccttcccctccacagccaccacctcctccttcggtaccacaaactgtgattccaaagaagactggctcacctgaaattaaactaaaaataaccaaaactatccagaatggcagggaattgtttgagtcttccctttgtggagaccttttaaatgaagtacaggcaagtgagcacacgaaatcaaagcatgaaagcagaaaagaaaagaggaaaaaaagcaacaagcatgactcatcaagatctgaagagcgcaagtcacacaaaatccccaaattagaaccagaggaacaaaatagaccaaatgagagggttgacactgtatcagaaaaaccaagggaagaaccagtactaaaagaggaagccccagttcagccaatactatcttctgttccaacaacggaagtgtccactggtgttaagtttcaggttggcgatcttgtgtggtccaaggtgggaacctatccttggtggccttgtatggtttcaagtgatccccagcttgaggttcatactaaaattaacacaagaggtgcccgagaatatcatgtccagttttttagcaaccagccagagagggcgtgggttcatgaaaaacgggtacgagagtataaaggtcataaacagtatgaagaattactggctgaggcaaccaaacaagccagcaatcactctgagaaacaaaagattcggaaaccccgacctcagagagaacgtgctcagtgggatattggcattgcccatgcagagaaagcattgaaaatgactcgagaagaaagaatagaacagtatacttttatttacattgataaacagcctgaagaggctttatcccaagcaaaaaagagtgttgcctccaaaaccgaagttaaaaaaacccgacgaccaagatctgtgctgaatactcagccagaacagaccaatgcaggggaggtggcctcctcactctcaagtactgaaattcggagacatagccagaggcggcacacaagtgcggaagaggaagagccaccgcctgttaaaatagcctggaaaactgcggcagcaaggaaatccttaccagcttccattacgatgcacaaagggagcctggatttgcagaagtgtaacatgtctccagttgtgaaaattgaacaagtgtttgctcttcagaatgctacaggggatgggaaatttatcgatcaatttgtttattcaacaaagggaattggtaacaaaacagaaataagtgtcagggggcaagacaggcttataatttctacaccaaaccagagaaatgaaaagccaacgcagagtgtatcatctcctgaagcaacatctggttctacaggctcagtagaaaagaagcaacagagaagatcaattagaactcgttctgaatcagagaaatccactgaggttgtgccaaagaagaagatcaaaaaggagcaggttgaaacagttcctcaggctacagtgaagactggattacagaaagggtcggcggaccggggagtgcagggctctgtcagattcagtgacagctccgtctccgcagcgattgaggaaactgtggactgagattcctgtacaatttcatcccagaaactccagacttgtagtctccatgcaagatttctttgtcggcggcttgataaacagtttctttgttttcgattttgatttcgccaatcatcattattggcattttcctgcctggtttcttcttcaagactctgaacaattgctttaacagtcaaatgatttttttttttcggtttgagctggatgggtacagcttaaatcatgggtccagcctaaaaaccaccatttaacttacactgatcaatttcaacatggactgtttttggttttttgtttttaaataaagcatcattaatgcacatctgcaggggtttgccaaacagcccaaactgtatacattacaatcattaaaagttcttattttttttaatattagtgccgttatcatggagaacagcatgacagctgtctttggcagtctgtcatttttctagcattttcagaaactcatcggaaatggcggtacctgtgtttcccttcgaaagcctctcagtacagcactcctgttcctctgttaaaactccttgttaatccagtgatcttttaggccaaggaaatattttgtgatggtgttctgggtccatacaccagcaatgaaggagatagatttgtgtacttgtgttttttaatcagcattaacatgggcaggcaccctcatttatagatgtcaggaaacattcagtgaaaaacttgtagaatgggatgtgataacgaggttccagtaatctgagcagtctaacgaggcccacctcctccaccacagaacgtggctatgttccaagtgctactctcactcagcctgttgcggatcttcatggcctcaggagacttgtttctccatgggctcttctggactgcacacttccaccatagcttgctgggttgatctagatgtctgtttgttgtatggaaattttgggggaaaaaatccaaaacacaaactgtgggttgaaatattaaccgtctccttggttccttggtattcaccgtgcctgatctgcacatttcatcgtggctgtttctgtatagcctatactgcattagcccaagagattgttgctttgtaactttttgcactattgttttggctggatttgtattacacacagttttaaaaaaaacaattccacact

SEQ ID NO: 14256 - protein, 645 aa, Homo sapiens
MDFSFSFMQGIMGNTIQQPPQLIDSANIRQEDAFDNNSDIAEDGGQTPYEATLQQGFQYPATTEDLPPLTNGYPSSISVYETQTKYQSYNQYPNGSANGFGAVRNFSPTDYYHSEIPNTRPHEILEKPSPPQPPPPPSVPQTVIPKKTGSPEIKLKITKTIQNGRELFESSLCGDLLNEVQASEHTKSKHESRKEKRKKSNKHDSSRSEERKSHKIPKLEPEEQNRPNERVDTVSEKPREEPVLKEEAPVQPILSSVPTTEVSTGVKFQVGDLVWSKVGTYPWWPCMVSSDPQLEVHTKINTRGAREYHVQFFSNQPERAWVHEKRVREYKGHKQYEELLAEATKQASNHSEKQKIRKPRPQRERAQWDIGIAHAEKALKMTREERIEQYTFIYIDKQPEEALSQAKKSVASKTEVKKTRRPRSVLNTQPEQTNAGEVASSLSSTEIRRHSQRRHTSAEEEEPPPVKIAWKTAAARKSLPASITMHKGSLDLQKCNMSPVVKIEQVFALQNATGDGKFIDQFVYSTKGIGNKTEISVRGQDRLIISTPNQRNEKPTQSVSSPEATSGSTGSVEKKQQRRSIRTRSESEKSTEVVPKKKIKKEQVETVPQATVKTGLQKGSADRGVQGSVRFSDSSVSAAIEETVD

SEQ ID NO: 14257 - DNA, 2604 bp, Homo sapiens
  CDS (426)..(764)
caagtactagagatgaattgcttagtgcccgagatgaaattttgctccttcatcaagcagcagcaaaggttgcctctgagcgggacactgacattgcttctttacaagaagagcttaagaaggtgagagctgagcttgagcggtggcggaaagcagcgtctgaatatgagaaagaaatcacaagtctgcaaaacagttttcagcttagatgtcaacagtgtgaggaccagcagagagaagaagcaacaaggttgcaaggtgaactagagaagttgagaaaggaatggaatgcattggaaaccgaatgccattctctaaaaagggaaaatgttttgctatcatcagaactgcaacggcaagaaaaagaattgcacaattctcagaagcagagtttagagcttaccagtgatctcagcatccttcaaatgtctaggaaagaacttgagaatcaagtgggatccttgaaagaacagcatcttcgggattcagctgatttaaaaactcttctcagtaaggcagaaaaccaagcaaaggatgtgcagaaagagtatgaaaagacacagactgtactctcagaactgaagttgaagtttgaaatgactgagcaggaaaagcagtcaatcacagatgagctcaaacagtgtaaaaacaacctgaagctgctccgagagaaaggaaataatccttccatattacaacccgtcccagccgtattcatcggcctattcctggctttcctgttttggtgtttcggtccattgtggtagagaaagaaaccctggccctggatgcccatgttggctgccctggttgcagtaacagccatcgtgctgtacgtgccaggtctggccagagcttctccatgagagcgttccttgagtccgtacaccgtcctccctctagaagctggcatcacactcatgctggggacaaacagaaccattttcttcctctttacctcttaaaacagcagaagtacaagaatacagctgtagggtcattgctttaaattatataaaatgtatctgtctataaagaagatataaaattgtgactttattctactgtaagcaataatttgcttgcaatttttcatgtaatttttaaattagtatgttaagattctgaatattatggtggcctaaagtaggcttcttggtacaccagattatttataacattaaatttatgagtattttactctgaattctgatcaccagataattcatttttctgatttgataactacccaaaccaaacaaccaatacatacatgggaagagaggccctgtgtgctcagtgcctatcagtttgaaatatatacacatatatatattttttacatatttacgccatttttacttgttatgaaaccactgagctattgggaacaagacttagagacaactatttgcgtggatttttttttttttaaggaaaaatacgtttggaaaataaactgttatggtgataatttggggaatatgtgcacgcttgttcagccttaatgtgacttgaagatgtggaggacatcaactttgaaaaactttccatgagagtgtattttcttgagcaaactgaagtatttctgggagcaaaaacatagtaattacacaatttcagtgcagtcaaccaaaatgttgagtcaattggaatgtaatttattaaaccatgtatttaaagagatatttttctttaaaagccaagttactttctcatatacagcattttaggaagcatgattttttttttctatcatctattcctccaagcatgtttaattgaagaaagtattaatatctctttagataagcttgtattgacctaatttggtttatgatgtgtcagagctaattcatgttcagggtgagcgttgtacctaccaacaaatttcctggttgggtatgcaaatggttattttctttttattgttgttaattgggactttctgttaatgaaaagcactattcccaagattaatagtgttctatgcacaatgaagcacctaaaaacactgcttgatattataaatttaaaacacaagtgaaagtttagccatggttttgtgcggcatcatagttatgtcaataaagtttatttaggtcatagaatatcctaaagtatcacatagttaaatttttcagtcagtgaagaccgggagggaatgtcagtgaattggcttgaatgttctgtggcaatccacaggtctagccaaatattgaaataggagtttagggtataatttgccttgtgatgtttggcagtcactgtttatactttaaaggttatattttaagctatttgagattgcttttgggaagatcactagatttatggaggaattagtcacaaatgacttgtagaaaatactgtcatatagttcatttcatcattttctgttgcaggaagccactccaccacagaatgctaatatgccagtggtacccagtacctcttgtatataggttattgcaaatattgttctgaaatgcttaacttcagaattacattttttaaagtaaataattgttttaaatctattttgtaaagatataaagtacaatagaatttctggagtacagattaaactatttgcactaacac

SEQ ID NO: 14258 - protein, 113 aa, Homo sapiens
MSRKELENQVGSLKEQHLRDSADLKTLLSKAENQAKDVQKEYEKTQTVLSELKLKFEMTEQEKQSITDELKQCKNNLKLLREKGNNPSILQPVPAVFIGLFLAFLFWCFGPLW

SEQ ID NO: 14259 - DNA, 2658 bp, Homo sapiens
  CDS (72)..(2489)
aaaaaaaagaaacagatattaacaaactaaaaccccagcaagaaccgggacgaacaatagaagatctaaaaatgtatgaacaccttttccctgagcttgttgatgattttcaggactatgatttaatctccaaagaaccaaagccttttgtatttgagggaaaagtacgtggtcctattgttgttcctacggcaggcgaggaaacatctgggaattctggcaatttaagaaaagttgtaatgaaggagaacatatcttctaaaggagatgaaggtgaaaagaagtctacctttatggatctagcaaaagaagatattaaagataatgatagaacattacaacagcagccaggtgatcaaaatagaactatttcatcagtccatggtttaaacaatgatattgtaaaggccttggaccgaattacattgcagaatattccttctcaaacagccccaggttttactgcagaaatgaagaaggactgcagtcttcctcttactgtccttacctgtgctaaagcatgtccacacgtggctacttgtggaaatgttctgtttgagggaagaacagttcagctagggaagctttgctgcactggagttgaaactgaagatgatgaagatactgagtcaaattcatcggtagaacaagcatcggttgaagtacctgatggaccaacactccatgacccagacctctatattgagattgtgaaaaatacgaagtctgtcccagaatattcagaggtggcttatcccgattattttggtcacattccgcctccattcaaagagcctattttagaaaggccttatggtgtacaaaggacaaaaattgctcaagatattgaaaggctaatacatcagagtgatatcatagatcgcgtggtatatgacttggataacccaaattacaccattccagaagagggagatattttgaaatttaactccaaatttgagtctgggaatctgcgcaaagtaattcaaattagaaaaaatgaatatgatcttattctgaactcagacataaacagcaatcattatcatcagtggttttactttgaagtcagtggaacgcgaccaggtgttgcttacaggtttaacatcattaactgtgaaaagtccaacagtcagtttaattatggtatgcaaccactcatgtattcggttcaggaagcattaaatgccagaccatggtggattcgtatggggactgacatttgttactataaaaatcatttctcaagaagttcagttgctgcaggtgggcaaaagggaaaatcctactatacaattacatttactgtcaattttccacataaagatgatgtttgctactttgcttatcactatccatatacgtattcaactttacagatgcatcttcaaaaattggaatcagcacacaatcctcagcaaatctattttcggaaagatgtgttatgtgaaaccctgtctggaaacagctgccccttggtgactataacagcaatgccagagtctaattattatgaacatatctgccatttcagaaatcgcccttacgttttcttgtctgctcgggtacatcctggagaaactaatgcaagttgggttatgaaaggaacgttggaatatctcatgagcaataaccccactgctcagagcttacgagaatcttatatttttaaaattgtccctatgttaaatccagatggtgtcatcaatggaaatcatcgctgttctttaagtggagaggatttgaataggcagtggcaaagtccaagtccggatttacatcctacaatttaccatgctaaggggctgttgcaatacttggctgcagtgaagcgtttacccttggtttattgtgattatcatggccattcccgaaagaagaatgtatttatgtatggttgcagcatcaaagagacagtgtggcataccaatgataatgcaacttcatgtgatgttgtggaggatacgggatacaggacgttgcctaagatactgagccatatcgccccagcattttgcatgagcagctgtagcttcgtagtggaaaaatctaaagaatccacagcacgtgttgtagtttggagggaaataggagtacaaagaagttataccatggagagtactttatgtggctgtgatcagggaaaatacaagggtttacagattggtacccgagaactggaagagatgggagcaaaattttgtgttggtcttttacgtttgaaaagactgacctctccattggagtataatctgccttccagcctgcttgactttgaaaatgatttaattgaatcaagctgcaaagtaactagccctaccacttatgtcttggatgaagatgaacctcgattccttgaagaagttgattacagtgcagaaagtaatgatgagttagatattgagttggctgaaaatgtaggagattatgaaccttctgctcaagaagaagtactttctgactctgaattatcaagaacatacctaccttgagcccgctgccatctcttgttaactgcaaagaataaatgaaatatcttggtttttatttcccaggaagcttgagagaaatgagtttatacagagctgactcaaaaagacaaaaggtaacttgggccagtttggtttcaagataataaatgtgttattaattaatgat

SEQ ID NO: 14260 - protein, 806 aa, Homo sapiens [sequence omitted]

SEQ ID NO: 14261 - DNA, 2820 bp, Homo sapiens
  CDS (40)..(1110)
tgtactaagcaaaatgttactgaatttcctatcataaagatgtacaagaaaggcgagaacccagtatcttatgctggaatgttaggaaccgaagatctcctaaaatttatccagctcaacaggatttcatatccagtgaatataacatcgatccaagaagcagaagaatatttaagtggggaattatataaagacctcatcttgtattctagtgtgtcagtattgggactatttagtccaaccatgaaaacagcaaaagaagattttagtgaagcaggaaactacctaaaaggatatgttatcactggaatttattctgaagaagatgttttgctactgtcaaccaaatatgctgcaagtcttccagccctgctgcttgccagacacacagaaggcaaaatagagagcatcccactagctagcacacatgcacaagacatagttcaaataataacagatgcactactggaaatgtttccggaaatcactgtggaaaatcttcccagttatttcagacttcagaaaccattattgattttgttcagtgatggcactgtaaatcctcagtataaaaaagcaatattgacactggtaaagcagaaatacttggattcatttactccatgctggttaaatctaaagaatactccagtggggagaggaatcttgagggcatattttgatcctctgcctccccttcctcttcttgttttggtgaatctgcattcaggtggccaagtatttgcatttccttcagaccaggctataattgaagaaaaccttgtattgtggctgaagaaattagaagcaggactagaaaatcatatcacaattttacctgctcaagaatggaaacctcctcttccagcttatgattttctaagtatgatagatgccgcaacatctcaacgtggcactaggaaagttcccaagtgtatgaaagaaacagatgtgcaggagaatgataaggaacaacatgaagataaatcggcagtcagaaaagaaccgattgaaactctgagaataaagcattggaatagaagtaattggtttaaagaagcagaaaaatcatttagacgtgataaagagttaggatgctcaaaagtgaactaattttatagggctgtggtttccaaaatttttttggcatgatagacttaatttatttccttaaagaataatattaaatcatttcaagtttgcagactagtgccatccaatagaattataatataagtcacatattttatttaaaattttctagtaactacattaaacaaagtaaaagtgagcagggcaaaataattttgatattacttttcacccagtagtatacccaaaatagcgaaatatagaaattattaatgagatattttacatccttttttgtaccaagtcttctaaatgcagtacatattttatacttactgcatttcttacttccgagtagccatatttcaagtgttccttgccacatgtggcctgtgactactgtattggacagttcagtactagacaaaaactagcataattaacttagttctagccatgatttctatttggattaaaattaaactctaatcacagttaactccacagtgcattcatgcagctgacagttatatttgttttattggagtcatgatattaaaatcagcgtttgtcaacctcaggggatatttagcaattgtcgggagacatttttgatgtcatgactagggcagttattgacatttagtgagtagaggccagggatcctgctaaataacctgcattggacagcgccccacaacaaagaattatcctgcccgaaatggtagtcgtgccaaggctgagtaaccttgtgttaaaagtaacctgtggcagactaggtttccagaatttcctggttctgctcacgtatcatgtttgaaaaaattttggctattaaagatatgtattagatggtcttatcctgattattacctggatacaacttgatcttttctaatattttcagaaagtgatgggataaccctagaagaggactcagaatgatatttatattttaagtgagtcttaaaacctcctcttatttctacaagttatatggctaaatttcagattgaacagggattcagcattctgccatctcctcatggaaagagaggctccctcatctgaagcgtctctgaaatctacccttgcaagcttcagacaaatcagttgatctccctgagccacacggcctcattctgtgagggagggaaagattagccaaagagttaattttcattccaaatcacttagctgttagactgatctgtttgtagcagttgtttgtctcatttttgctctgtgcattttttgagacatttgttgagaatattctatttggtgctctactgtatttttctttttaatatctacttgatatcttgttctttaaattttcttcacatatggtttgcctgatacaactgatttttataactgaaatttaaggaatctaacagctaaaactcagtaagtgcatatatttccttataacatagacccgttgctactctcagcaccctctcctcaattttttttcctgtagcatgtgatgcctgattaaactcattttcatttgcttttatttctaatatgggaacaatgagagtgaactctaaatataggttgtagtaataaaacatcattagcctaattattagaaaatgctaattaagtaccagcacatagaaacatgaaattgcttagtcattgtacctttgtcagcaattttgacagtcattaatgtttgtcataattttaaataaagtgtctgggtttcagaat

SEQ ID NO: 14262 - protein, 357 aa, Homo sapiens
MYKKGENPVSYAGMLGTEDLLKFIQLNRISYPVNITSIQEAEEYLSGELYKDLILYSSVSVLGLFSPTMKTAKEDFSEAGNYLKGYVITGIYSEEDVLLLSTKYAASLPALLLARHTEGKIESIPLASTHAQDIVQIITDALLEMFPEITVENLPSYFRLQKPLLILFSDGTVNPQYKKAILTLVKQKYLDSFTPCWLNLKNTPVGRGILRAYFDPLPPLPLLVLVNLHSGGQVFAFPSDQAIIEENLVLWLKKLEAGLENHITILPAQEWKPPLPAYDFLSMIDAATSQRGTRKVPKCMKETDVQENDKEQHEDKSAVRKEPIETLRIKHWNRSNWFKEAEKSFRRDKELGCSKVN

SEQ ID NO: 14263 - DNA, 2538 bp, Homo sapiens
  CDS (169)..(2016)
attctccactgaggcccagctgttcctctccttgaaaagtcaaggcttggttcaagccagatagcacctgaggacagaacatatcaggagccaagttacaccctgtttaaccctgccttcaaagggacgactctgtaagattctctgctacttattcaagttgacacgatgcccttcacactccacctgaggtcccgccttccctctgccataaggagtttgattctacaaaagaaaccaaacatcagaaatacatccagcatggctggagagctccgaccagccagcctggtggtcctgcccaggtcccttgctccagcttttgaaagattctgccaggtcaacactggtcctctacccctgctgggccagagtgagccagaaaagtggatgctgccccctcaaggtgctatctcagagaccaggatgggccatccccagttctggaaatacgagttcggtgcctgcaccggtagcctggcttcgctggagcagtactcggagcagctgaaggacatggtggccttcttcctgggctgcagcttctccctggaggaggccttggagaaagcggggctccccagaagagacccagcaggtcacagccagacaacagtgccttgtgttacccatgctggcttctgctgccctctggtggtcacgatgaggcccattcccaaggacaagctggaagggctggtgcgggcctgctgctccctcggaggtgagcaggggcaacctgttcacatgggcgacccagaactgttgggaatcaaagagctttccaaacctgcctacggggatgccatggtgtgtcccccaggggaggttccagtgttctggccttctccgctgaccagtctcggagctgtcagcagctgtgagaccccactggcttttgccagcatcccaggctgcacagttatgactgacctgaaggatgcaaaggctccacctggttgtctcaccccagagagaattccagaggtccatcacatttcccaagatcctctgcactacagcatcgcgtcagtctctgcttctcagaagatcagagaactagagtctatgatcggcatagacccagggaaccgggggattgggcacctgctctgtaaagatgagctgctgaaggcctctctctcgctgtcccatgcccgctcagtgctcatcaccactgggttccccacacatttcaatcatgagcctccagaagagacagatggcccaccaggagctgttgctctggttgccttcctgcaggccttggagaaggaggtcgccataatcgttgaccagagagcctggaacttgcaccagaagattgttgaagatgctgttgagcaaggtgttctgaagacgcagatcccgatattaacttaccaaggtggatcagtggaagctgctcaggcattcctgtgcaaaaatggggacccgcagacacctagatttgaccacctggtggccatagagcgtgccggaagagctgctgatggcaattactacaatgcaaggaagatgaacatcaagcacttggttgaccccattgacgatctttttcttgctgcgaagaagattcctggaatctcatcaactggagtcggtgatggaggcaacgagcttgggatgggtaaagtcaaggaggctgtgaggaggcacatacggcacggggatgtcatcgcctgcgacgtggaggctgactttgccgtcattgctggtgtttctaactggggaggctatgccctggcctgcgcactctacatcctgtactcatgtgctgtccacagtcagtacctgaggaaagcagtcggaccctccagggcacctggagatcaggcctggactcaggccctcccgtcggtcattaaggaagaaaaaatgctgggcatcttggtgcagcacaaagtccggagtggcgtctcgggcatcgtgggcatggaggtggatgggctgcccttccacaacacccacgccgagatgatccagaagctggtggacgtcaccacggcacaggtgtaaccgtccatgttccgtgtgagcagagtccctaccaacgggcaggtctgcatccggggagaatgcagctgcttctggcgacaatcctgctagtaaacactggtcttcggtgagcaacgaacactcgcctggcctgggaaactgcatgcccactttctgggaggggttagtgcaggtgccgtggacaaaggacaacatttctctggggctttttaacttttattcctaagactctaaaggcgttgatttcaaccctccttcactctggcttcttcaggcaacccacgtggtctcctgtgagaatcttctcgacagttacttatggggacacttgtgaacaattaactgccaggcagagcatgagaacaaacattcccaggccatgtaggataggatactccagactccagtcatcctcccccatccatggtttctgttactcatggtttcagttactcatagccaactgcagaccgaaaatactaaatgaaaaatttcagaaataaacaactcttaagtttt

SEQ ID NO: 14264 - protein, 616 aa, Homo sapiens
MPFTLHLRSRLPSAIRSLILQKKPNIRNTSSMAGELRPASLVVLPRSLAPAFERFCQVNTGPLPLLGQSEPEKWMLPPQGAISETRMGHPQFWKYEFGACTGSLASLEQYSEQLKDMVAFFLGCSFSLEEALEKAGLPRRDPAGHSQTTVPCVTHAGFCCPLVVTMRPIPKDKLEGLVRACCSLGGEQGQPVHMGDPELLGIKELSKPAYGDAMVCPPGEVPVFWPSPLTSLGAVSSCETPLAFASIPGCTVMTDLKDAKAPPGCLTPERIPEVHHISQDPLHYSIASVSASQKIRELESMIGIDPGNRGIGHLLCKDELLKASLSLSHARSVLITTGFPTHFNHEPPEETDGPPGAVALVAFLQALEKEVAIIVDQRAWNLHQKIVEDAVEQGVLKTQIPILTYQGGSVEAAQAFLCKNGDPQTPRFDHLVAIERAGRAADGNYYNARKMNIKHLVDPIDDLFLAAKKIPGISSTGVGDGGNELGMGKVKEAVRRHIRHGDVIACDVEADFAVIAGVSNWGGYALACALYILYSCAVHSQYLRKAVGPSRAPGDQAWTQALPSVIKEEKMLGILVQHKVRSGVSGIVGMEVDGLPFHNTHAEMIQKLVDVTTAQV

SEQ ID NO: 14265 - DNA, 2164 bp, Homo sapiens
caaggtatagacttttttggttatgatacagttaagccaaaaacagctaatctttgcatctaaagcaaactaatgtatatttcacattttattgagccgacttatttccacaaatagataaacaggacaaaatagttgtacaggttatatgtggcatagcataaccacagtaagaacagaacagatattcagcagaaaactttttatactctaattctttttttttttttttttgagacagagttttagtcttgtttcccaggctggagtgcaatggcacaatcttggctcactgcaacctccgcctcctgggttcaggcaattttcctgcctcagcctcccaagtagctgggattacaggcacccaccaccatgcccagctaatttttgtatttttaatagagagctaataattgtatatttaataaagacgggtttcaccatgttggccaggctggtcttgaactcctgacctcaggtgatcctcctgcattggcctcccaaagtgctggaattccaggcatgagccactgcgcccagtctacacactaattcttgttagcccaacagctgttctgttctatctacccctcatttcacgctcaaggagtcatacctagaatagttacacacaagagggaaactggaagccaaacactgtacagtattgtgtagaaagtcacctccctactccttttattttacatgagtgctgatgtgttttggcagatgagctttcagctgaggcctgatggaaattgagataacctgcaaagacataacagtatttatgagttatatcttagttcttgaaattgtggaatgcatgattgacaatatatttttaatttttattttttcaagtaataccagtactgtttaactatagccagaactggctaaaatttttatattttcagagttgaagttggtgaagacattcatgatttaaacaccagatcctgaaaggggttaaatctactttgaaatgaatctgcaatcagtatttcaaagcttttctggtaattttagtgatcttatttgattagactttttcagaagtactaaataaggaattttaacaggtttttattaatgcacagataaatagaagtacagtgaggtctatagccattttattaaaatagcttaaaagtttgtaaaaaaatgaatctttgtaattacttaatatgttagttaagaacccgtcaagcttatatttgctagacttacaaattattttaaatgcatttatcttttttgacactattcagtggaatgtgtaagctagctaattcttgttttctgatttaaagcacttttaaatcttatcctgccccctaaaaacaaaaggttttgatcacaaggggaaatttaagattgttaaccctgtttttcagaagggctactgttaattgcacataaacatgaaatgtgttttcccctgtgtactaacacattctaggcaaaattcaaacttatagtggtaaagaaacaggttgttcacttgctgaggtgcaaaaattcttaagacttctgtttgaaattgctcaatgactaggaaaagatgtagtagtttactaaaattgtttttctaccatatcaaattaaacaattcatgcctttatagggtcaggcctacaatgaataggtatggtggtttcacagaattttaaaatagagttaaagggaagtgatgtacatttcgggggcattagggtagggagatgaatcaaaaaatacccctagtaatgctttatattttaatactgcaaaagctttacaaatggaaaccatgcaattacctgccttagttcttttgtcataaaaacaatcacttggttggttgtattgtagctattacttatacagcaacatttcttcaattagcagtctagacattttataaacagaaatcttggaccaattgataatatttctgactgtattaatattttagtgctataaaatactatgtgaatctcttaaaaatctgacattttacagtctgtattagacatactgtttttataatgttttacttctgccttaagatttaggttttttaaatgtatttttgccctgaattaagtgttaatttgatggaaactctgcttttaaaatcatcatttactgggttctaataaattaaaaattaaacttg

SEQ ID NO: 14266 - DNA, 2661 bp, Homo sapiens
  CDS (6)..(2045)
tttgtatgagaggagacatgtgtccttttgatcatggaagtgatccagtagttgtagaagatgtgaatcttcctggtatgctgcctttcccagcacagcctcctgttgttgaaggaccacctcctcctggactccccccacctccaccaattcttacacccccacctgtgaatctcaggcccccagtaccaccgccaggtccattgccacccagtctcccacctgttacaggaccaccacctccacttcctcctttgcagccatctggcatggatgctcctccaaactctgcaaccagttctgttcctactgtagtaacaactggcattcatcaccagcctcctcctgctccaccctctctttttactgcagatacatatgacacagatggctacaatcctgaagccccaagcataacaaacacttccagacctatgtatagacacagagtgcatgcacaaaggcccaacttgataggactaacatcaggggatatggatttgccacccagagaaaagcctcccaataaaagcagtatgaggatagtagtggactcagaatcaaggaaaagaaccattggttctggagagcctggagttcctacaaagaagacttggtttgataaaccaaattttaatagaacaaacagcccaggctttcagaagaaggttcaatttggaaatgaaaataccaagcttgaacttagaaaagttcctccagaattaaataatatcagcaaacttaatgaacattttagtcgatttggaaccttggttaacttacaggttgcttataatggtgatcctgaaggtgccctaatccaatttgcaacatacgaagaagcaaagaaagcaatatcaagtacggaagcagtattaaacaatcgctttattaaggtttattggcacagagaaggaagcacccaacagttacaaactacttctccaaaggtaatgcagcctttagtccagcagcccattttgcctgttgtgaagcagtcagtcaaagagcggctgggtccagtaccttcaagtactattgaacctgcagaagcccagagtgcctcttcagaccttcctcaggtgttgtctacatctactggcctaacaaaaacagtgtataatccagctgctttgaaggctgcacagaaaaccttacttgtttccacctctgcagttgataataatgaagcacagaaaaaaaaacaggaggcattgaaacttcagcaggatgtaaggaaaaggaaacaagaaattttagaaaagcacattgaaacacagaagatgttaatttcaaaactggagaaaaacaaaacaatgaagtctgaagataaagcagaaataatgaaaactttagaggttttgacaaaaaatattaccaagttgaaagatgaggtcaaagctgcttctcctggacgctgtcttccaaaaagtataaaaaccaagactcagatgcagaaggaattacttgacacagaactggatttatataagaagatgcaggctggagaagaagtcactgaacttaggagaaagtatacagaattacagctggaagctgccaaacgagggattctttcatctggtcggggcagaggaattcattcaagaggtcgaggtgcagttcatggccgaggcagggggcgagggcgagggcgaggtgtgcctggtcatgctgtggtggatcaccgtcccagggcattggagatttctgcatttacggagagcgatagagaagatcttcttcctcattttgcgcaatatggtgaaattgaagattgtcagattgatgattcctcacttcatgcagtaattacattcaagacaagagcagaagctgaagcagctgcagttcatggagctcgtttcaaagggcaagatctaaaactggcatggaataaaccagtaactaatatttcagctgttgaaacagaagaagttgggcctgatgaagaagaatttcaggaagagtctttggtggatgactcattacttcaagatgatgatgaagaagaagaggacaatgaatctcgttcttggagaagatgatttgactgatcattgatctgcatatgctagaactctacctgtgtttcattagtattatctaatgtacttttacatatttgtaaaaacaatttttggtaaaatgtgatgaagatggatttcacaaatagacaaaaaagaagaaaactaccttctgatcttgtattttgaaagattgatgtttgcattttacttcagtaaacaattgctaaagacatcacactagaaacatatgcaatgtttttattacatacttctactggacatcacagaattctttgggttctttgtaatttaatgaataggtctgaaaacttatgaccaatacttgttataacttagaggactttgttttattccaaataaggaatgaatttgcatttaaaatcttaatgaatgttttcaaaactgaatagataacatagtactctaactaaagtctccaagttatgtattataatattacatagtagtatgcttaggctttactatgtattagccttttgttggactgtgtatgtattttaccataagggttttaatgataatggtgtatgactgctttacatgagtccttatgcatccagatgttataataaagtggaatggtctcttt

SEQ ID NO: 14267 - protein, 680 aa, Homo sapiens [sequence omitted]

SEQ ID NO: 14268 - DNA, 2655 bp, Homo sapiens
  CDS (1581)..(2081)
cgttctctgctttctggcagacctccttccctttctctcccctcgtctctcttgaaccccttccgctcagactcctgcacccaccatggcacagagcagctctcactgaggtcaccagccacctcctccactctgttggtccagaggccatgctgggccctcatcctgtggacctgccagcagcatcttctttcgtaaaatgcccctgcttggggcagcaccctctggtcctccctctgcactggctgggcctctgtgtctgtgggttctgctcatctccccgagctctcaccatcggggcttctctgggctcggtgcttcggcagccccccttttttaactccaggtgttccttggggcatctcatgtcatctccagcattaaaccacgtctctgatgattcctgaggctgtttcctggagttctctcctaaactccaggctcaacagcccagccatctacacagtccctccacgtggtggcctcagagctactgcaagcttccatgatcacagctgaattgctggtggcctgccctgccccaaacctgtagctctgtcctcttctccatgggaatggaagctctttgctctcattgctcaagcccaaaagcccgggggtcatcctcagctgctccttctctgtcatacactgcgtcctattcgtcagcaaaatccatctagaatctgcccgcttctcgctgttgccaccgccacctcctgagctagggcaccttcatcttttggtctctcacctaaatcattgccatagtctcccagctggtctccctgctttcacccctgctctgacagtctcttccagcacaacagctagggcggtcctgtccaggcataagtcacagcacgcctctaccctgctcagagcctccatggcacccatcttacccgagtcaaagccccgtccttcagtggcccttgggccttgtgcagtcactgtgtcacccccaacatccccacctctgccctcgccctgcccagctgcccgttggtctgctcctgcctcctgccgtggcagtgccatctctcctatgcagagccctaggcacccactgccctgtgggtcatctcttcaggccttcaggtttctgtcactcagttcccctggccctccctgacggccccaccgaggacaagagccacctccacccccagcaagatcgccctccttgcctgctttgcttttccccccagcacgaaccactgctggccacgctttgtgtttgcttgtttctgtttccttctattggaatctcagttccttgagaacagggcctggtttttcactgctgtacctcccgtgctttgaatggtttctggcacatagtgggtgcttagtaaatatgcgatgagtggagggactgccccacaggctgagtgaagtcagtgctgggccagagggcagcataggcaccatggggacccccgggtgggtgctgagccccaggcagtgagcccgtgtgctgcccctgcccagccttgcccaccctgcacaggttcaaccgggcagcgctcatcaacgtgggcttcctggagagcagcaacagcacggactacattgccatgcacgacgttgacctgctccctctcaacgaggagctggactatggctttcctgaggctgggcccttccacgtggcctccccggagctccaccctctctaccactacaagacctatgtcggcggcatcctgctgctctccaagcagcactaccggctgtgcaatgggatgtccaaccgcttctggggctggggccgcgaggacgacgagttctaccggcgcattaagggagctgggctccagcttttccgcccctcgggaatcacaactgggtacaagacatttcgccacctgcacgacccagcctggcggaagagggaccagaagcgcatcgcagctcaaaaacaggagcagttcaaggtggacagggagggaggcctgaacactgtgaagtaccatgtggcttcccgcactgccctgtctgtgggcggggccccctgcactgtcctcaacatcatgttggactgtgacaagaccgccacaccctggtgcacattcagctgagctggatggacagtgaggaagcctgtacctacaggccatattgctcaggctcaggacaaggcctcaggtcgtgggcccagctctgacaggatgtggagtggccaggaccaagacagcaagctacgcaattgcagccacccggccgccaaggcaggcttgggctgggccaggacacgtggggtgcctgggacgctgcttgccatgcacagtgatcagagagaggctggggtgtgtcctgtccgggaccccccctgccttcctgctcaccctactctgacctccttcacgtgcccaggcctgtgggtagtggggagggctgaacaggacaacctctcatcacccccacttttgttccttcctgctgggctgcctcgtgcagagacacagtgtaggggccatgcagctggcgtaggtggcagttgggcctggtgagggttaggacttcagaaaccagagcacaagccccacagagggggaacagccagcaccgctctagctggttgttgccatgccggaatgtgggcctagtgttgccagatcttctgatttttcgaaagaaactagaatgctg

SEQ ID NO: 14269 - protein, 167 aa, Homo sapiens
MHDVDLLPLNEELDYGFPEAGPFHVASPELHPLYHYKTYVGGILLLSKQHYRLCNGMSNRFWGWGREDDEFYRRIKGAGLQLFRPSGITTGYKTFRHLHDPAWRKRDQKRIAAQKQEQFKVDREGGLNTVKYHVASRTALSVGGAPCTVLNIMLDCDKTATPWCTFS

SEQ ID NO: 14270 - DNA, 2400 bp, Homo sapiens
  CDS (498)..(1991)
gctaagaaggggagactgaggctgaggctggggaacatcgggcagcatgagcggctgcgggctcttcctgcgcaccacggctgcggctcgtgcctgccggggtctggtggtctctaccgcgaaccggcggctactgcgcaccagcccgcctgtacgagctttcgccaaagagcttttcctaggcaaaatcaagaaggtaacgcgagccctgggcgaacccttgctgtctggctcccgcttttcaccctcagctgcaagactggtgttgaactttgtgagattccccaaacctgccagagagatacaccctgcggccgaggcgtgttaacactccggattcctgagttccaggaaaaccttcccagagaaaggtggactcccgaaaaattgaccaggaagggaaaatcccagatgaaactttggagaaattgaagagcctagggctttttgggctgcaagtcccagaagaatatggtggcctgggcttctccaacaccatgtactcacgactaggggagatcatcagcatggatgggtccatcactgtgaccctggcagcgcaccaggctattggcctcaaggggatcatcttggctggcactgaggagcagaaagccaaatacttgcctaaactggcgtccggggagcacattgcagccttctgcctcacggagccagccagtgggagcgatgcagcctcaatccggagcagagccacactaagtgaagacaagaagcactacatcctcaatggctccaaggtctggattactaatggaggactggccaatatttttactgtgtttgcaaagactgaggtcgttgattctgatggatcagtgaaagacaaaatcacagcattcatagtagaaagagactttggtggagtcactaatgggaaacccgaagataaattaggcattcggggctccaacacttgtgaagtccattttgaaaacaccaagatacctgtggaaaacatccttggagaggtcggagatgggtttaaggtggccatgaacatcctcaacagcggccggttcagcatgggcagcgtcgtggctgggctgctcaagagattgattgaaatgactgctgagtacgcctgcacaaggaaacagtttaacaagaggctcagtgaatttggattgattcaggagaaatttgcactgatggctcagaaggcttacgtcatggagagtatgacctacctcacagcagggatgctggaccaacctggctttcccgactgctccatcgaggcagccatggtgaaggtgttcagctccgaggccgcctggcagtgtgtgagtgaggcgctgcagatcctcgggggcttgggctacacaagggactatccgtacgagcgcatactgcgtgacacccgcatcctcctcatcttcgagggaaccaatgagattctccggatgtacatcgccctgacgggtctgcagcatgccggccgcatcctgactaccaggatccatgagcttaaacaggccaaagtgagcacagtcatggataccgttggccggaggcttcgggactccctgggccgaactgtggacctggggctgacaggcaaccatggagttgtgcaccctagtcttgcggacagtgccaacaagtttgaggagaacacctactgcttcggccggaccgtggagacactgctgctccgctttggcaagaccatcatggaggagcagctggtactgaagcgggtggccaacatcctcatcaacctgtatggcatgacggccgtgctgtcgcgggccagccgctccatccgcattgggctccgcaaccacgaccacgaggttctcttggccaacaccttctgcgtggaagcttacttgcagaatctcttcagcctctctcagctggacaagtatgctccagaaaacttagatgagcagattaagaaagtgtcccagcagatccttgagaagcgagcctatatctgtgcccaccctctggacaggacatgctgaggcaggggacagtgtcccctgctaccgcccgcccctacccatggcccgttgctggatgactgttactcttttttcagaaggtgttgggattatcacaggttaagccttttgttccccgtctgcacctgaagggttgtcgcctggcctgggagagcctcttccaggttttgacctgcaggcagtgctctctaacaggaccatcacagcttctgaactgagccggagagagagaatggaattgctgacccctggaactggcgggtattctgtcattgaggagacaccatagtggaaactggggcttatgctgctgcctccagggtgtgaggtgggtggggacctgtgtcaggtgtggatagccatttctgctcaaccacacattctctaagaaacagcttgaaagctc

SEQ ID NO: 14271 - protein, 498 aa, Homo sapiens
MYSRLGEIISMDGSITVTLAAHQAIGLKGIILAGTEEQKAKYLPKLASGEHIAAFCLTEPASGSDAASIRSRATLSEDKKHYILNGSKVWITNGGLANIFTVFAKTEVVDSDGSVKDKITAFIVERDFGGVTNGKPEDKLGIRGSNTCEVHFENTKIPVENILGEVGDGFKVAMNILNSGRFSMGSVVAGLLKRLIEMTAEYACTRKQFNKRLSEFGLIQEKFALMAQKAYVMESMTYLTAGMLDQPGFPDCSIEAAMVKVFSSEAAWQCVSEALQILGGLGYTRDYPYERILRDTRILLIFEGTNEILRMYIALTGLQHAGRILTTRIHELKQAKVSTVMDTVGRRLRDSLGRTVDLGLTGNHGVVHPSLADSANKFEENTYCFGRTVETLLLRFGKTIMEEQLVLKRVANILINLYGMTAVLSRASRSIRIGLRNHDHEVLLANTFCVEAYLQNLFSLSQLDKYAPENLDEQIKKVSQQILEKRAYICAHPLDRTC

SEQ ID NO: 14272 - DNA, 2057 bp, Homo sapiens
  CDS (387)..(2057)
taattaagaggagagatgttggtccttatggcattcgatctgaatattgtatcaggaaaatcatttgtcccattggagttccagaaacaccaaaagaaacgcctacacctcagaggaaaggccttcgatcaagtgcactgcggccaaagagaccagaaacgcccaagcaaactggccctgttattattgaaacctgggtagcagaagaagaactggaattgtgggagatcagggcatttgctgagagagtggagaaagaaaaggcacaagcagttgagcaacaggctaagaaacgactggagcagcagaagccgacagtgattgcaacttccactacttccccaacaagcagtacaaccagcaccatctctccagcacagaaggttatggtggcccccataagtggctcagttacaactggaaccaaaatggtactaactactaaagttggatctccagctacagtaacattccaacaaaacaagagctttcatcaaacctttgctacatgggttaagcaaggccagtcaaattcaggcgttgttcaagtacagcagaaagtcctgggtatcattccatcaagtacaggtaccagtcagcaaacctttacttcattccagcccaggacagcaacagtcacaattaggcccaatacctcaggctctggaggaaccacaagcaattcacaagtaatcacagggcctcagattcgccctggtatgaccgtgattagaacaccactccaacagtcaacactaggaaaggcaattattcgaacacctgtgatggtacagccaggtgctcctcagcaagtgatgactcaaatcatcagggggcagcctgtctccactgcagtctccgcccctaacacggtttcctcaacacctgggcagaaaagcttaacttcagcaacgtccgcttcaaatatacagtcttcagcctcacaaccccctcgcccccaacaaggacaagtgaagctcaccatggctcaacttactcagttaacacagggccacggtggcaatcaaggtttgacagtagtaattcaaggacaaggtcaaactactggacagttgcagttgatacctcaaggggtgactgtactcccaggcccaggccagcagctaatgcaagctgcaatgccaaatggtactgttcagcgattcctctttaccccattggcaacaacagccaccacagccagcaccaccaccaccactgtttccacgacagcagcaggtacaggtgaacaaaggcagagtaaactgtcaccccagatgcaggtacatcaagacaaaaccctgccaccagctcagtcatcaagtgtgggtccagcagaagcccagccacagactgctcagccttcagctcagccccagccccaaacccagccccagtccccagctcagcctgaagttcagactcagcctgaagttcagacccaaacaactgtttcatcccatgtcccttctgaagcacaacccacccacgcacagtcatccaagccccaagttgcagcacagtctcagcctcaaagtaatgtccaaggacagtctcctgttcgtgtccaaagtccatcacagactcgaatacgtccatcaactccatcccaactgtctcctggacaacaatcccaggttcagactacaacctcacaaccgattccaattcaaccacatacatctcttcagataccttcccaaggccagccacagtcacaaccccaggtggtgatgaagcataatgctgtaatagaacatttaaaacagaaaaagagcatgactccagctgaaagagaagagaatcaaagaatgattgtctgtaaccaggtgatgaagtatattttggataagatagataaagaagaaaaacaggcagcaaaaaaacggaagcgtgaagagagtgtggagcagaaacgtagcaagcagaatgccactaagctgtcagctctgctcttcaagcacaaagagcagctcagagccgagatcctgaagaagagagcactcctggacaaggatctgcaaattgaagtgcaggaagagctgaagagagacctg

SEQ ID NO: 14273 - protein, 557 aa, Homo sapiens
MVAPISGSVTTGTKMVLTTKVGSPATVTFQQNKSFHQTFATWVKQGQSNSGVVQVQQKVLGIIPSSTGTSQQTFTSFQPRTATVTIRPNTSGSGGTTSNSQVITGPQIRPGMTVIRTPLQQSTLGKAIIRTPVMVQPGAPQQVMTQIIRGQPVSTAVSAPNTVSSTPGQKSLTSATSASNIQSSASQPPRPQQGQVKLTMAQLTQLTQGHGGNQGLTVVIQGQGQTTGQLQLIPQGVTVLPGPGQQLMQAAMPNGTVQRFLFTPLATTATTASTTTTTVSTTAAGTGEQRQSKLSPQMQVHQDKTLPPAQSSSVGPAEAQPQTAQPSAQPQPQTQPQSPAQPEVQTQPEVQTQTTVSSHVPSEAQPTHAQSSKPQVAAQSQPQSNVQGQSPVRVQSPSQTRIRPSTPSQLSPGQQSQVQTTTSQPIPIQPHTSLQIPSQGQPQSQPQVVMKHNAVIEHLKQKKSMTPAEREENQRMIVCNQVMKYILDKIDKEEKQAAKKRKREESVEQKRSKQNATKLSALLFKHKEQLRAEILKKRALLDKDLQIEVQEELKRDL

SEQ ID NO: 14274 - DNA, 2415 bp, Homo sapiens
  CDS (43)..(1806)
tctgaactagacagggcagttacccaaatcagtgtagacctgatggatgactacccagcatctgacccacggtgggctgagtctgtccctgaggaagcacctgggttcagcaatacgtcactgattatccttcaccagctagaagacaagatgaaagctcactcttttcttatggactttattcatcaagttggcttatttggacgtctaggcagttttccagttagagggacaccgatggccactcgactgttgctctgtgagcatgccgaaaagctgtcagccgccattgttctcaagaaccaccactcccggctttctgaccttgtcaacacagccatattgattgctttgaacaagagggagtatgaaatcccatccaacctgactcctgcagatgtctttttcagggaggtatcccaagtagataccatctgtgagtgcttactggagcatgaggagcaagtcttgagggatgcacctatggattccattgaatgggctgaagtggtgatcaatgtgaacaatattctcaaggatatgctgcaggctgctagtcattatcgccaaaatagaaactctttgtatagaagagaagaatcactagaaaaagaacctgaatatgttccatggacggcaacaagtggtcctggtggcatccgaacggtaataatacgccagcatgagattgtcctgaaggtggcttatccacaggcagacagcaacctccgaaacatcgtgaccgagcagctggtagccctgatcgattgcttcctggatggttatgtttctcagcttaagtctgtggataaatccagtaatcgggaaagatatgacaatctggagatggaatacctacagaaaagatcagatctcttatctcctcttctttcactaggccagtacctgtgggctgcttctctagcagagaaatactgtgactttgatatattggtacaaatgtgtgagcagactgacaaccagagccgactccagcgctacatgacccagtttgctgatcagaatttttcagactttctcttccgttggtatctggagaaaggaaagcgaggcaaattattatctcagcccatttctcagcatggacagttggcaaattttttgcaagctcatgaacatctcagctggttacatgaaattaatagccaagaattagaaaaggctcatgcaacacttctgggtttggcaaatatggaaactcgttactttgcaaagaagaaaacccttcttggcttgagtaaattggctgcattagcttcagacttttcagaggatatgctacaagaaaaaattgaagaaatggctgagcaggagcgctttctactgcatcaggagaccctacctgaacagctgctggcggagaaacagctaaatctcagtgcgatgccagtattgactgcaccacaactcattggtctatatatctgtgaagaaaatagaagagctaatgaatatgatttcaagaaagctttggacttgttggaatatattgatgaggaagaagatataaatataaatgatctaaaactggaaatcctttgcaaagctcttcagagagataactggtccagttctgatggcaaagatgatccaattgaagtatctaaagacagtatatttgtgaagatcttacagaaacttttaaaagatggcattcagctcagtgagtacttaccggaggtgaaagacctgctacaagcggatcagcttggaagcttaaagtccaatccttacttcgagtttgttttgaaagcaaattatgaatattatgttcagggacaaatataactttttctaaaaatggccattgtttatgaaatctgtataagtgtgtccttatacaaattttaggccataaacaagtgtaagtttgtacaatttcataacatgtatagctgagtttttatactttatatgtaggaagctaatataaaatagttatgtaactgtgattttggttttcagttatgtgacttgttttttccacctgaaatgtgtcagttgttgttcctgtactcggtgccctttctttttactctcacgtggtcccaggttctggagttcttgtcctggttctagctgctcacatgtacaaatcacttctaggcctcagtttctgcgactatgaaaattactagattgcactagcttgtctctaaaattgctgtgactccagatactttgcactgaagagaatctagggtgtttgatatctgtttcagttagggctaatgggaaatgtctagtaagataaatgtcaacttttgctgacttattatgagatgaaaaaccaaaggagagtgggcctaactcatgtgagcttgataactgatgaactcattgggagcattttaaacttttctacataaataataaatgagcactaatgaaagt

SEQ ID NO: 14275 - protein, 588 aa, Homo sapiens
MDDYPASDPRWAESVPEEAPGFSNTSLIILHQLEDKMKAHSFLMDFIHQVGLFGRLGSFPVRGTPMATRLLLCEHAEKLSAAIVLKNHHSRLSDLVNTAILIALNKREYEIPSNLTPADVFFREVSQVDTICECLLEHEEQVLRDAPMDSIEWAEVVINVNNILKDMLQAASHYRQNRNSLYRREESLEKEPEYVPWTATSGPGGIRTVIIRQHEIVLKVAYPQADSNLRNIVTEQLVALIDCFLDGYVSQLKSVDKSSNRERYDNLEMEYLQKRSDLLSPLLSLGQYLWAASLAEKYCDFDILVQMCEQTDNQSRLQRYMTQFADQNFSDFLFRWYLEKGKRGKLLSQPISQHGQLANFLQAHEHLSWLHEINSQELEKAHATLLGLANMETRYFAKKKTLLGLSKLAALASDFSEDMLQEKIEEMAEQERFLLHQETLPEQLLAEKQLNLSAMPVLTAPQLIGLYICEENRRANEYDFKKALDLLEYIDEEEDININDLKLEILCKALQRDNWSSSDGKDDPIEVSKDSIFVKILQKLLKDGIQLSEYLPEVKDLLQADQLGSLKSNPYFEFVLKANYEYYVQGQI

SEQ ID NO: 14276 - DNA, 2651 bp, Homo sapiens
  CDS (7)..(2217)
actgaaatgtttggtcagtacccacttcaggtcaatgggttcaaagatctgcatgagtgcctagaagctgcaatgattgaaggagaaattgagtctttacattcagagaattcaggaaaatcaggccaagagcattggtttactgaattaccacctgtgttaacatttgaattgtcaagatttgaatttaatcaggcattgggaagaccagaaaaaattcacaacaaattagaatttccccaagttttatatttggacagatacatgcacagaaacagagaaataacaagaattaagagggaagagatcaagagactgaaagattacctcacggtattacaacaaaggctagaaagatatttaagctatggttccggtcccaaacgattccccttggtagatgttcttcagtatgcattggaatttgcctcaagtaaacctgtttgcacttctcctgttgacgatattgacgctagttccccacctagtggttccataccatcacagacattaccaagcacaacagaacaacagggagccctatcttcagaactgccaagcacatcaccttcatcagttgctgccatttcatcgagatcagtaatacacaaaccatttactcagtcccggatacctccagatttgcccatgcatccggcaccaaggcacataacggaggaagaactttctgtgctggaaagttgtttacatcgctggaggacagaaatagaaaatgacaccagagatttgcaggaaagcatatccagaatccatcgaacaattgaattaatgtactctgacaaatctatgatacaagttccttatcgattacatgccgttttagttcacgaaggccaagctaatgctgggcactactgggcatatatttttgatcatcgtgaaagcagatggatgaagtacaatgatattgctgtgacaaaatcatcatgggaagagctagtgagggactcttttggtggttatagaaatgccagtgcatactgtttaatgtacataaatgataaggcacagttcctaatacaagaggagtttaataaagaaactgggcagccccttgttggtatagaaacattaccaccggatttgagagattttgttgaggaagacaaccaacgatttgaaaaagaactagaagaatgggatgcacaacttgcccagaaagctttgcaggaaaagcttttagcgtctcagaaattgagagagtcagagacttctgtgacaacagcacaagcagcaggagacccagaatatctagagcagccatcaagaagtgatttctcaaagcacttgaaagaagaaactattcaaataattaccaaggcatcacatgagcatgaagataaaagtcctgaaacagttttgcagtcggcaattaagttggaatatgcaaggttggttaagttggcccaagaagacaccccaccagaaaccgattatcgtttacatcatgtagtggtctactttatccagaaccaggcaccaaagaaaattattgagaaaacattactagaacaatttggagatagaaatttgagttttgatgaaaggtgtcacaacataatgaaagttgctcaagccaaactggaaatgataaaacctgaagaagtaaacttggaggaatatgaggagtggcatcaggattataggaaattcagggaaacaactatgtatctcataattgggctagaaaattttcaaagagaaagttatatagattccttgctgttcctcatctgtgcttatcagaataacaaagaactcttgtctaaaggcttatacagaggacatgatgaagaattgatatcacattatagaagagaatgtttgctaaaattaaatgagcaagccgcagaactcttcgaatctggagaggatcgagaagtaaacaatggtttgattatcatgaatgagtttattgtcccatttttgccattattactggtggatgaaatggaagaaaaggatatactagctgtagaagatatgagaaatcgatggtgttcctaccttggtcaagaaatggaaccacacctccaagaaaagctgacagattttttgccaaaactgcttgattgttctatggagattaaaagtttccatgagccaccgaagttaccttcatattccacgcatgaactctgtgagcgatttgcccgaatcatgttgtccctcagtcgaactcctgctgatggaagataaactgcacactttccctgaacacactgtataaactctttttagttcttaacccttgccttcctgtcacagggtttgcttgttgctgctatagtttttaacttttttttattttaataactgcaaaagacaaaatgactatacagactttagtcagactgcagacaataaagctgaaaatcgcatggcgctcagacattttaaccggaactgatgtataatcacaaatctaattgattttattatggcaaaactatgcttttgccaccttcctgttgcagtattactttgcttttatcttttctttctcaacagctttccattcagtctggatccttccatgactacagccatttaagtgttcagcactgtgtacgatacataatatttggtagcttgtaaatgaaataaagaataaagttttatttatggct

SEQ ID NO: 14277 - protein, 737 aa, Homo sapiens
MFGQYPLQVNGFKDLHECLEAAMIEGEIESLHSENSGKSGQEHWFTELPPVLTFELSRFEFNQALGRPEKIHNKLEFPQVLYLDRYMHRNREITRIKREEIKRLKDYLTVLQQRLERYLSYGSGPKRFPLVDVLQYALEFASSKPVCTSPVDDIDASSPPSGSIPSQTLPSTTEQQGALSSELPSTSPSSVAAISSRSVIHKPFTQSRIPPDLPMHPAPRHITEEELSVLESCLHRWRTEIENDTRDLQESISRIHRTIELMYSDKSMIQVPYRLHAVLVHEGQANAGHYWAYIFDHRESRWMKYNDIAVTKSSWEELVRDSFGGYRNASAYCLMYINDKAQFLIQEEFNKETGQPLVGIETLPPDLRDFVEEDNQRFEKELEEWDAQLAQKALQEKLLASQKLRESETSVTTAQAAGDPEYLEQPSRSDFSKHLKEETIQIITKASHEHEDKSPETVLQSAIKLEYARLVKLAQEDTPPETDYRLHHVVVYFIQNQAPKKIIEKTLLEQFGDRNLSFDERCHNIMKVAQAKLEMIKPEEVNLEEYEEWHQDYRKFRETTMYLIIGLENFQRESYIDSLLFLICAYQNNKELLSKGLYRGHDEELISHYRRECLLKLNEQAAELFESGEDREVNNGLIIMNEFIVPFLPLLLVDEMEEKDILAVEDMRNRWCSYLGQEMEPHLQEKLTDFLPKLLDCSMEIKSFHEPPKLPSYSTHELCERFARIMLSLSRTPADGR

SEQ ID NO: 14278 - DNA, 2211 bp, Homo sapiens
  CDS (617)..(1984)
agttagggcggcggatggaggtcagcggtggtgctcgctgcggtttggaatcacttgctaggagtcttgtctctctgccacccaggacatcatggcagctcacctggtaaagcgatgcacgtgcctcctgagagaagctgctcgtcaggcccctgccatggctccagttggccgactgagacttgcctgggtagcccataagactctgacttcctcagccacctcacccatttcccacctcccaggttccttgatggagccggtggagaaggaacgagcatctactccctacatagagaagcaggtggaccacctcatcaagaaggccacaaggccagaggagctcctggagctacttggtggcagtcacgacttggacagcaatcaagcagcaatggtacttatccggctctctcacttgctgtctgagaagccagaagataaaggcttgctcatacaggatgcccactttcatcaacttctctgtctgctcaacagtcagattgcctcggtctggcatggtaccctctcgaagctgctgggaagcctgtatgctctgggcatccccaaggcctccaaggagctgcagtcggtggagcaggaggtccgctagcgcatgcggaagctcaagtacaagcacctggctttcctggcagagtcctgtgccaccctctcacaggagcagcactcgcaggagctgctggctgagctgctcacacacctggaaaggcgttggacagaaattgaagattcccacacattagtgaccgtcatgatgaaggtgggacacctctcggagccactaatgaaccgcctggaagacaagtgcctggagttggtggagcactttggccccaatgagctgcggaaggtgctggtgatgctggcagctcagagccggcggtccgtgcccttgctgcgggccatctcctaccacctggtgcagaagcccttctctctgacgaaagatgtgctcttggacgtggcctatgcctatggcaaactcagctttcaccagacccaggtgtcccagcgcctggccaccgacctgctatccctcatgcccagcctgacttctggtgaggtggcccactgtgccaagtccttcgccttactcaagtggctcagcctgcccctgtttggggcctttgcccagcacgtcctgaacagagcgcaggacatcaccctgccccacctgtgcagcgtacttctggcttttgcgcgtctgaacttccatccagaccaagaggatcagttcttcagcctggtacatgagaagctggggtcagagctgccaggcctggagccagccctgcaggtggacctggtgtgggccctgtgtgtgctgcagcaggcacgggaagcagagctgcaagccgtcctccaccctgaatttcacatccaatttctagggggcaagtctcagaaggatcagaacaccttccagaagctgctccacatcaacgccactgccctgctggagtaccccgagtactcgggtccccttctgcctgcctcggctgtggcccctgggccctcagcccttgacaggaaggtgacccccctgcaaaaggagctgcaggagacgctgaaggggctgctggggagcgccgacaagggcagcctcgaggtggccacgcagtatggctgggtgctggatgctgaggtgctgctggacagtgacggcgagtttctgcccgtaagggactttgtggcacctcaccttgcccagccaactgggagccagtcaccacctccagggtctaagaggctagcgttcttgcggtgggagttccccaacttcaacagccgaagcaaggacttgctgggtcgctttgttctggcccggcgacacatagtggctgcaggcttcctgatagtggacgtcccattctatgagtggctggaactcaagtctgaatggcagaaaggcgcctacctcaaggacaagatgcgcaaagcggtggctgaggagctggccaagtgacttgtgccagcagcatggactgcgtgcctctccgccggaggtctagctgtgggcggccaagaagggtcacccttgaggacaaacctctgtgcaggaccttggccagagtggggagggtggccagccactctgagggacagaacgtcctcttgtgtataataaacctttaattttggtgttggacccctggggccttcccaggcttggtcaccctctgcactgtc

SEQ ID NO: 14279 - protein, 456 aa, Homo sapiens [sequence omitted]

SEQ ID NO: 14280 - DNA, 2943 bp, Homo sapiens
  CDS (53)..(391)
ttggaactttatcaagagcctggatgactcgcagtgtggcatcacctacaagatggagaaggtttactccaccttgaaagataaggatttggagctctacctgaaactgcaagagcagaacatcaagcctcagttctttgccttccgctggctgacactgctgctgtcccaggagttcttgctgcctgacgtcatccgcatctgggactccctcttcgccgatgacaaccgctttgacttcctcctcctcgtctgctgcgccatgctcatgctgatccgggagcagttgctggaaggggacttcactgtgaatatgcggctgctgcaggactaccccatcacagatgtctgccagatcctgcagaaagccaaggagctccaagactcaaagtagcccggcggcaagaggcccacgttcgggggagaagcctcccgaccctgtgccctggctcccgggacacatagaaacctgtaggaacccagcctgaggggaagccacaggatcggcccgagacccaggccatgcccactggggacacactgtgccgtgctccttctgccgccacgcccagctccccacctgccctgcactctgccctctttgcccaggatactgaggagggctggagctcgggaagttgtccttcctgggccagggccgtttctggcactgggaggctggcaggggcccctccctgcctcggctctgccgccccagcctcagttcctgcttctggtcttctcctgggctccactcaggggaggtgcttggccaatgggccagaaaccgcttctgagcggggcacttcggctgctccacagggaaggcgacactgaaagctgagtcctgccgtctgtctcacccacagatgtctgtagtcggtcggtgtgaatgtgggcccaagtccccaggcatctcctccgtgtgtgtgtgtgtgtgtgtgtgtgtgtgtgtgtgtgtgtgtgtgtgtgtgttagggagtgagggtctctcaggcctccaggtctcccagcccctccttctctgtctctacctctctgcctgtctccttccacctccttcccagagtgggactgtgtcttgcttcatgattcttctctccattactctccctgcccttctctgttggggtgccttatcctgagccacctcctctccccgcttgcctctgctcccctgaacctgggagacagatgaggagactggctcagcaaggcccctggaggtcaggcttggcctttgcctcctgttcccatcccccagccctggctcctaggtcctcccaactgggagggagtcctccgtgcctcacttagagggttctgaacccgttccctacacagaaatcttggaaaccaaatgctgctgagtaaggatgaagctttgagcctcctgcccctgctttctgcccagggagggagaaggaagagggggagctggtttttctggaggttcccccagaggccctcctgtccgaaaagaaaaggaccttgattctgagcccagggtcggaacccattgcttcagaagagttgtcattccctcggcttccaggtcccaacccagggttgggttgagtgagtcccacaaagggcaagtggggcccgaggaagcctctctggggccaggggtagccgagcttaaaggccctgggtcctgccagttccaggagggccatgtctgtgcctctgtgtacccctccacccgctgcgggctgagggaggtgcagggccttctctgacccctgcctgagctgttcccagggctggagcaggtgtaccctgagcaggggcagctggccactcccagttctcaccaagtcacctccctccttgtacaaggtttgcgtccggaagccgggtgccatagtgaggaccctcgtcctccagactggctggcaggagtcaggccccagcagccctcctgcccccaaagctttccgagtctggtgggcaggacttctcgctgcccttccaagcccggctttgggccagaaaaggcttccccaggtggctcttctaccaggcttttcctttgatgccgcctggatttccgcacctgcctgtctcctctcccagagcacagtatttgggagactttgactatttattcagactcctggctatgtattgcacattggcaagtgctctggggatgaggcatgggtataggaagggagaaaggagttggagacaagatcctcttcattttccaagatcaaagtcagcctcttctccccatgcttctaggaactgcctggttttcaagcaggtcctggctgagcgggctctgagttctgtactggaattgagtgtaaagatgggaagagaactgggctgactccaggacctccaggatgaggcagaggcatgatgcttcctgctcacctgggccaccctctctccaggacttgtcagctggtggttcagccccttctccaaccccttcataagcttgggccactgcctgggacccagcagacactgcccaggactctttagtgcactcactcttgtctgccccctaccttccctcctggaaccacactacttgaatcaccattactttgcctcgctggcagagttgggtcaagtgccctctccttgaccttgagatgaaggtcaagagcacagggaccaggccttggttaggctgagctcccagcaggacaccgcctgcagaaaggacctgccctgataatgtcccttccccagattctcaagcagatgcccaagggaggtccccacagagccagagtgcctgaggcttcctgcttgagaacctgccccctggatcttggacacttacagattgagctgtatgaattcagcgggtctcactccagagggtcagaacgtttgctttagttttttcatctgttttgttccttgagtcagtgctgttgatgacgagttgtcttgaataaatcatgtgttctttgc

SEQ ID NO: 14281 - protein, 113 aa, Homo sapiens [sequence omitted]

SEQ ID NO: 14282 - DNA, 2379 bp, Homo sapiens
  CDS (31)..(357)
ccggtccatgcagttgtatacatagtgttcatgctgggctcctgtgcattcttctccaaaacgtggattgaggtctcaggttcctctgccaaagatgttgcaaagcagctgaaggagcagcagatggtgatgagaggccaccgagagacctccatggtccatgaactcaaccggtacatccccacagccgcggcctttggtgggctgtgcatcggggccctctcggtcctggctgacttcctaggcgccattgggtctggaaccgggatcctgctcgcagtcacaatcatctaccagtactttgagatcttcgttaaggagcaaagcgaggttggcagcatgggggccctgctcttctgagcccgtctcccggacaggttgaggaagctgctccagaagcgcctcggaaggggagctctcatcatggcgcgtgctgctgcggcatatggacttttaataatgtttttgaatttcgtattccttcattccactgtgtaaagtgctagacattttccaatttaaaattttgctttttatcctggcactggcaaaaagaactgtgaaagtgaaattttattcagccgactgccagagaagtgggaatggtataggattgtccccaagtgtccatgtaacttttgttttaacctttgcaccttctcagtgctgtatgcggctgcagccgtctcacctgtttccccacaaagggaatttctcactctggttggaagcacaaacactgaaatgtctacgtttcattttggcagtagggtgtgaagctgggagcagatcatgtatttcccggagacgtgggaccttgctggcatgtctccttcacaatcaggcgtgggaatatctggcttaggactgtttctctctaagacaccattgttttcccttattttaaaagtgatttttttaaggacagaacttcttccaaaagagagggatggctttcccagaagacactcctggccatctgtggatttgtctgtgcacctattggctcctctagctgactcttctggttgggcttagagtctgcctgtttctgctagctccgtgtttagtccacttgggtcatcagctctgccaagctgagcctggccaagctaggtggacagacccttgcagtgatgtccgtttgtccagattctgccagtcatcactggacacgtctcctcgcagctgccctagcaaggggagacattgtggtagctatcagacatggacagaaactgacttagtgctcacaagcccctacaccttctgggctgaagatcacccagctgtgttcagaattttcttactgtgcttaggactgcacgcaagtgagcagacaccaccgacttcctttctgcgtcaccagtgtcgtcagcagagagaggacagcacaggctcaaggttggtagtgaagtcaggttcggggtgcatgggctgtggtggtgttgatcagttgctccagtgtttgaaataagaagactcatgtttatgtctggaataagttctgtttgtgctgacaggtggcctaggtcctggagatgagcaccctctctctggcctttagggagtcccctcttaggacaggcactgcccagcagcaagggcagcagagttgggtgctaagatcctgaggagctcgaggtttcgagctggctttagacattggtgggaccaaggatgttttgcaggatgccctgatcctaagaagggggcctgggggtgcgtgcagcctgtcggggagaccccactctgacagtgggcacacggcagcctgcaaagcacagggccaccgccacagcccggcagaggggcacactctggagaccttgctggcagtgctagccaggaaacagagtgaccaagggacaagaagggacttgcctaaagccacccagcaactcagcagcagaaccaagatgggtcccaggctcctccatatggcccagggcttaccaccctatcacacgtggccttgtctagacccagtcctgagcaggggagaggctcttgagacctgatgccctcctacccacatggttctcccgctgccctgtctgctctgctgctacagaggggcagggcctcccccagcccacgcttaggaatgcttggcctctggcaggcaggcagctgtacccaagctggtgggcagggggctggaaggcaccaggcccaggaggagccccatagtcccgcctgcagcctgtaaccatcggctgggccctgcaaggcccacattcacgccctgtgggtgatggtcacggtgggtgggtgggggctgaccccagcttccaggggactgtcactgtggacgccaaaatggcataactgagataaggtgaataagtgacaaataaagccagttttttacaaggt

SEQ ID NO: 14283 - protein, 109 aa, Homo sapiens; identical to SEQ ID NO: 14248

SEQ ID NO: 14284 - DNA, 2454 bp, Homo sapiens
  CDS (122)..(2350)
aaaaaaaaaaaaaaaaaaaaatttacagagttgtcctcggaggtccaggacagcggccagcccggcggcgggagtcagggccacgccacctgcagggaagaacccgagtcgaagcgggaagatggctgcagacaggcctgcagatcagggagcagagaaacatgaaggcacaggtcagtcctctgggatcactgatcaagagaaggagttatccaccaatgctttccaagctttcacatctggaaattatgatgcctgtctacaacaccttgcctgtctacaagatataaacaaagatgattataaaataattttgaatacagcagtagctgagttttttaaaagtaaccaaacaacaacagataatttgagacaaacacttaaccagctgaagaatcaggtccactcagctgttgaagaaatggatggattagatgatgttgaaaacagcatgttgtactataatcaagcagtcattctttatcatctgcggcagtatacagaagccatatcagttggtgaaaaactttatcagttcatagagccttttgaaaaatttgcccaagcagtgtgttttttgcttgtagacctgtatatattaacctaccaagctgagaaagctttgcatcttcttgctgtcctagaaaaaatgatttcacagggtaacaataacaaaaatggaaagaatgagactggtaataacaacaacaaagatggatctaatcataaagctgaaagtggagctctaatagaagctgcaaaatcaaagatacatcagtacaaagtacgagcttatatccaaatgaagtctctgaaagcatgtaaaagggaaatcaagtcagtcatgaatacagctggaaattccgcaccctctctctttcttaaaagcaattttgagtacttaagaggtaattatcgaaaagccgtgaagctattaaatagttcaaacattgctgagcatccaggattcatgaaaacaggtgaatgcttgagatgcatgttctggaataaccttggttgcatccattttgccatgagcaagcacaatttgggaatattctactttaaaaaggctctgcaagagaatgacaatgtctgtgcacagctcagtgcaggtagcactgatccaggtaaaaaattttcaggaagacccatgtgtacgttactaaccaataagagatatgagttgctgtataactgtggaattcagcttcttcacattggaaggcctcttgctgccttcgaatgtctgattgaagctgttcaggtttatcatgcaaatcctcgcctctggctacggctggctgaatgctgcattgctgccaataaggggacttctgaacaagaaactaaaggccttcccagcaaaaaaggaattgtacagtctattgttggtcaaggctatcatcgtaaaatagttttggcatcacagtctatacagaatactgtttataatgatgggcagtcttcggccattcctgtagccagtatggagtttgcagccatatgtctcagaaatgccttgttgctgctacctgaagaacagcaaggtccaaagcaggaaaatggggctaaaaatagtaatcaattaggtgggaacacagagagcagcgaaagcagtgaaacttgcagcagtaaaagctatgatggagataaattcattccagctccaccttcttctccattgagaaaacaggaattagaaaacttaaagtgctccatacttgcttgcagtgcctacgtggctctggctttgggtgataacctcatggctttgaatcatgcagataaacttcttcagcagcccaagctgtcaggatctcttaagtttttgggacatttatatgctgcagaagccctcatctctctcgacagaatatctgatgccattactcacttgaacccggagaatgtcactgatgtctccttagggatctcttcaaatgagcaggaccaaggatcagacaaaggtgaaaatgaagcaatggaatcctctggtaagcgggcccctcagtgctaccccagttccgtcaactctgccaggactgtgatgctgttcaaccttggcagcgcttactgcctgaggagcgaatatgacaaagcccgaaaatgtctccaccaggcggcttcaatgatccatcctaaagaggtgccccctgaggccatcttgctggcagtctaccttgaactgcagaatggtaatactcagctggccttacagatcatcaaaaggaatcagctgctccctgcagtgaaaacacactctgaagtgagaaagaagccagtgtttcagcctgtccacccgatccagcccatccaaatgccggctttcaccactgtgcagagaaagtgatacttcacttttggaaaactgttacctgagacccaggggagaatttactggccattttagttgtatcacagcagaatgaataaaagatggtgaaggctgtt

SEQ ID NO: 14285 - protein, 743 aa, Homo sapiens [sequence omitted]

SEQ ID NO: 14286 - DNA, 1749 bp, Homo sapiens
gatatttcagaccaaagtaaatgtccaactctctgcacacagaaaaaatcttggaaatgtaatgaatgtggaaaaacctttactcagagctcatcccttacccaacatcagagaactcatactggagagagaccctacacatgtgaggaatgtgggaaagcctttagtcgtagttcattccttgttcaacatcaaagaattcacactggagtgaaaccatatggatgtgagcagtgtgggaaaacatttcgatgtcgatcatttcttactcagcatcaaagaattcacactggagagaaaccttataaatgcaatgaatgtgggaattccttccgcaatcactcacatctcactgaacaccagagaattcacactggagagaaaccttataaatgcaataggtgtgggaaggcattcaatcagaatacacaccttattcatcatcagagaattcacactggtgagaagccttacatatgcagtgaatgtggctcttcttttcgaaaacactcaaatcttacgcaacatcagagaattcacactggggaaaaaccccataaatgtgacgaatgtgggaaaactttccaaacaaaggcaaacctctctcagcatcagagaattcatagtggagagaaaccctataaatgtaaagaatgtggcaaagccttttgtcagagcccatctcttattaaacaccagcgaattcatactggagaaaaaccatataagtgtaaagaatgtggcaaagcgtttactcagagcaccccactcactaaacatcagagaatacatacaggggagagaccctacaaatgcagtgaatgtggtaaagccttcattcagagcatttgccttattcggcaccagagaagtcacactggagaaaaaccctataaatgcaatgaatgtggaaagggctttaatcagaacacctgcctcactcagcatatgagaattcatactggagagaagccctataaatgtaaagaatgtgggaaagcctttgctcatagctcatctcttactgaacatcatagaactcacactggtgagaagctctataaatgtagtgagtgtgagaaaaccttccgcaagtatgcacaccttagtgaacattacagaattcacactggtgagaagccttatgagtgtattgagtgtggaaagttcttcagacatagttcagtccttttcagacatcagaaacttcacagtggtgactaatgctgccatttaggttatgacagtttctctagcgaggatgactacgaatctgactgggagtagaggggcaggtagagttcctggagggaaggatgaaggagccttggctactgtactctgagaggaatgtttccagaaatggaggtgggagcttagggaatgcagagcctacttgaggtgggcatctgggaatacagggtagaaagaaattcctgcttttcagataaagcctacacattgccactgtctccccatgtgactcttacagcttgaggaggcatttgttagcacttctgttcactttactacatcctgccccacattctgacttgtcacccattttcgttggctggcaggttgagatgtttttcttaaacactgcctgtcagtgtgaagtggcacagctctgatgtagtgctaagtctagcctccagatttgaggcagccctgaccatgctaccatgggggaggctcccaacctgtggaagtggtcctgtgaaaaggagacagaaacaagtaagagcc

SEQ ID NO: 14287 - DNA, 1822 bp, Homo sapiens
  CDS (370)..(1629)
agtagcgggcggcagagctggagtgaagggagctagtggtaaagggagctggtggaggggtggcggcaggggtaaggggcaggggacaccctctagacggagagcgggctccgaggtcctggctggccctcggtgcgcccgcccctgtgttggtcccacaatccctggcaatgagaggccagggtttattggacagagtcagttgtggggttcagagggtcagcaatcaatcaatcctccgaatccagagatttagacccagtcgtccgtattaggactggaggggggtcaataggttcagtgtttgagatgccaagggaacctgtcttttgatttggggttcaacatacagaggtagcagtcaccattatgctcaaagcggtgatcctgattggaggccctcaaaagggaactcgcttcagacctttgtcttttgaggtgcccaaaccattgtttcctgtggcaggggtccctatgatccaacaccatattgaagcctgtgcccaggtccctggaatgcaggagattctgctcattggcttctaccaacctgatgagcccctcacccagttcctagaagccgcccagcaggagtttaaccttccagtcaggtacctgcaggaatttgcccccctaggcacagggggtggtctttaccattttcgagaccagatcctggctgggagccccgaggcattcttcgtgctcaatgctgatgtctgctccgacttccccttgagtgctatgttggaagcccaccgacgccagcgtcaccctttcttactccttggcactacggctaacaggacgcaatccctcaactacggctgcatcgttgagaatccacagacacacgaggtattgcactatgtggagaaacccagcacatttatcagtgacatcatcaactgcggcatctacctcttttctcctgaagccttgaagcctcttcgggatgtcttccagcgtaatcagcaggatgggcaattggaggactcaccaggcttgtggccaggggcaggtaccatccgcctagagcaggatgtgttttcagccctggcagggcagggccagatatacgtgcatctcactgatggtatctggagtcagatcaagtccgcaggttcagccctctacgcctcccgcctctacctgagccgataccaggacactcacccagaacggctggccaagcacaccccagggggcccatggatccgagggaatgtgtacatccacccgaccgccaaggtggccccctcggctgtgctgggccctaacgtctccatcgggaagggggtgaccgtgggtgagggtgtgcggctccgggagagcatcgtcctccatggagccactttgcaggagcacacgtgtgttctgcatagcatcgtgggctgggggagcaccgtgggacgctgggcccgcgtggagggtacccccagtgaccctaaccccaacgatccccgagcccgcatggacagtgagagcctcttcaaggacgggaagctgctgcctgctatcaccatcctgggctgccgagtccggatccctgccgaggtgctcatcctgaactcgattgttctgccacacaaggagctgagccgaagcttcaccaaccagatcatcctctgagtagggctgccagaaggcccccagctcctacccactccccttgaggctgctgcctgcttggccagcctctgtccagaaaggaccagagaaagccaggctggatcgtcacatgccggggagcaatgtggatggcctggggactcctgggttttctccctcccgactccctaataaaccccgtgaaccttgg

SEQ ID NO: 14288 - protein, 420 aa, Homo sapiens
MLKAVILIGGPQKGTRFRPLSFEVPKPLFPVAGVPMIQHHIEACAQVPGMQEILLIGFYQPDEPLTQFLEAAQQEFNLPVRYLQEFAPLGTGGGLYHFRDQILAGSPEAFFVLNADVCSDFPLSAMLEAHRRQRHPFLLLGTTANRTQSLNYGCIVENPQTHEVLHYVEKPSTFISDIINCGIYLFSPEALKPLRDVFQRNQQDGQLEDSPGLWPGAGTIRLEQDVFSALAGQGQIYVHLTDGIWSQIKSAGSALYASRLYLSRYQDTHPERLAKHTPGGPWIRGNVYIHPTAKVAPSAVLGPNVSIGKGVTVGEGVRLRESIVLHGATLQEHTCVLHSIVGWGSTVGRWARVEGTPSDPNPNDPRARMDSESLFKDGKLLPAITILGCRVRIPAEVLILNSIVLPHKELSRSFTNQIIL

SEQ ID NO: 14289 - DNA, 2550 bp, Homo sapiens
  CDS (1)..(1389)
atgcgtgcaggcccggagccccaggcgctggtggggcagaaacgcggcgccctgcgtcttctggttccgaggctggtcctcaccgtttccgctccggcggaagtgaggaggagggtccttcgacccgtgctgagctggatggaccgcgagacgcgcgccctcgccgacagccacttccgaggcctgggggtcgatgtccccggcgtcggccaggctccgggccgggtagccttcgtctcggagccgggcgccttctcctacgccgactttgtgcggggcttcttgctgcccaacctgccctgcgtgttttccagcgccttcacgcagggctggggcagccggcggcgctgggtgacgcccgcggggaggcccgacttcgaccacctgctacggacctacggagacgtggttgtaccagttgcaaactgtggggtccaggaatacaactcgaaccccaaagagcacatgactctcagagactacatcacctactggaaagagtacatacaggcgggctactcctctcccaggggctgtctctacctcaaagactggcacttgtgcagggactttccggtggaggacgttttcaccctgcctgtgtacttctcgtccgactggctgaatgagttctgggatgcactggatgtggatgactaccgctttgtctacgcggggcctgcgggcagctggtccccgttccatgctgacatcttccgctccttcagctggtctgtcaatgtctgtgggaggaagaagtggctcctcttccccccagggcaggaagaggccctgcgggaccgccacggcaacctgccctacgacgtgacctccccagcactctgcgacacacacctgcacccacggaaccagcttgctggcccacccttggagatcacgcaggaagcgggcgagatggtgtttgtgcccagtggctggcaccaccaggtgcacaacctggatgacaccatctccatcaaccacaactgggtcaatggcttcaacctggccaacatgtggcgcttcttgcagcaggagctatgcgccgtgcaggaggaggtcagcgagtggagggactccatgcccgactggcaccaccactgccaggtcatcatgaggtcctgctcgggcatcaactttgaagagttttaccacttcctcaaggtcatcgctgagaagaggctcctggtcctgagggaggcagccgctgaggacggtgctgggttgggtttcgaacaggcagcctttgatgttgggcgcatcacagaggtgctggcctccttggttgcgcaccccgacttccagagagtggacaccagcgcgttctcaccacagcccaaagagctgctgcagcagctgagagaggctgttgatgctgctgcggccccatagcacctgtcgtgaggatagaaggacgggtggaagagaggcagcctcctgctccggggcccttccagaaataaagaccgccctccctgtgacctggggcccacccctgtcgaggcttgtggcctggctgttcatggccactgcctgggtgcctgttttcaggtgaggcccaatgaggtcagggacccaagatgggatgtggcccttctgacctgcagcaggcctgctgggagctcggagatggtgccaggacctggctcttttgggggccctgcctccttaggccaggacgcctgagctgacaggagtctgtgtctggtgtgccttctctggtggctcctcttaataggccagccctgtcccctcgtctcaggccattggaccacccctggctctgccctgtgggttcagggaggggttggagcagtgctgggcaagctcaccagggcctccaggcagggctggggttggcctccatcacctccaggtgatgggctgtggaaccagcggcctgcgccttcctctgggtacccagagtggagggctgggttgggctggcctttgccacctccctgcctttgcagggcctgtggacggctggagaggccacagatggggtggaatcccatctgctgctgaatcctcacctgggcctgagggactgtgcctgctgtgcactcacagctgggtcttcccaaggatgctgttctcaggagtggtgggtccccagcccctcttcacactgggtatgatggaggtgtgggcgggctcgtccaggccgatcaaggcacagcagtgagcagcggaggcctgtggtgggggatggactctcgtgggatcctcttgcagaggatgccccaggcctgaaccctctagtggatccacagtttgtggagactggcactctcccagccctgtccttgaccgagagtccagcattttttcagttggcccctggttggctgcctcaccccagcaggggaggaggcatccgaatccacagggacggcacgtgccatggctatgtacattgcctgcccgtggcatcaactggggccgctggcacttgtctaggatggaagcccccaagaagggccggggtttctgtctgctctgttcagtgaatcatgtgaagtgcttgcaaaggcagctttacacagt

SEQ ID NO: 14290 - protein, 463 aa, Homo sapiens
MRAGPEPQALVGQKRGALRLLVPRLVLTVSAPAEVRRRVLRPVLSWMDRETRALADSHFRGLGVDVPGVGQAPGRVAFVSEPGAFSYADFVRGFLLPNLPCVFSSAFTQGWGSRRRWVTPAGRPDFDHLLRTYGDVVVPVANCGVQEYNSNPKEHMTLRDYITYWKEYIQAGYSSPRGCLYLKDWHLCRDFPVEDVFTLPVYFSSDWLNEFWDALDVDDYRFVYAGPAGSWSPFHADIFRSFSWSVNVCGRKKWLLFPPGQEEALRDRHGNLPYDVTSPALCDTHLHPRNQLAGPPLEITQEAGEMVFVPSGWHHQVHNLDDTISINHNWVNGFNLANMWRFLQQELCAVQEEVSEWRDSMPDWHHHCQVIMRSCSGINFEEFYHFLKVIAEKRLLVLREAAAEDGAGLGFEQAAFDVGRITEVLASLVAHPDFQRVDTSAFSPQPKELLQQLREAVDAAAAP

SEQ ID NO: 14291 - DNA, 2146 bp, Homo sapiens
  CDS (6)..(485)
tcatcatgaccatgatcgtccataagaactgggtggacctggcccgggccgtcagctactacatccggttcttcatcacctacatccctttctacggcatcctgggagccctccttttcctcaacttcatcaggttcctggagagccactggtttgtgtgggtcacacagatgaatcacatcgtcatggagattgaccaggaggcctaccgtgactggttcagtagccagctgacagccacctgcaacgtggagcagtccttcttcaacgactggttcagtggacaccttaacttccagattgagcaccacctcttccccaccatgccccggcacaacttacacaagatcgccccgctggtgaagtctctatgtgccaagcatggcattgaataccaggagaagccgctactgagggccctgctggacatcatcaggtccctgaagaagtctgggaagctgtggctggacgcctaccttcacaaatgaagccacagcccccgggacactgtggggaaggggtgcaggtggggtgatggccagaggaatgatgggcttttgttctgaggggtgtccgagaggctggtgtatgcactgctcacggaccccatgttggatctttctccctttctcctctcctttttctcttcacatctcccccatagcaccctgccctcatgggacctgccctccctcagccgtcagccatcagccatggccctcccagtgcctcctagccccttcttccaaggagcagagaggtggccaccgggggtggctctgtcctacctccactctctgcccctaaagatgggaggagaccagcggtccatgggtctggcctgtgagtctccccttgcagcctggtcactaggcatcacccccgctttggttcttcagatgctcttggggttcataggggcaggtcctagtcgggcagggcccctgaccctcccggcctggcttcactctccctgacggctgccattggtccaccctttcatagagaggcctgctttgttacaaagctcgggtctccctcctgcagctcggttaagtacccgaggcctctcttaagatgtccagggccccaggcccgcgggcacagccagcccaaaccttgggccctggaagagtcctccaccccatcactagagtgctctgaccctgggctttcacgggccccattccaccgcctccccaacttgagcctgtgaccttgggaccaaagggggagtccctcgtctcttgtgactcagcagaggcagtggccacgttcagggaggggccggctggcctggaggctcagcccaccctccagcttttcctcagggtgtcctgaggtccaagattctggagcgatctgacccttctccaaaggctctgttatcagctgggcagtgccagccaatccctggccatttggccccaggggacgtgggccctgcaggctgcaggagggcactggagctgggaggtctcgtcccagccctccccatctcggggctgctgtgtggacggcgctgcctcaggcactctcctgtctgaacctgcccttactgtgtttaacctgttgctccaggatgcattctgataggagggggcggcagggctgggccttgtgacaatctgcctttcaccacatggccttgcctcggtggccctgactgtcagggagggccagggaggcagagcgggagggagtctcaggaggaggctgccctgaggggctggggagggggtacctcatgaggaccagggtggagctgagaagaggaggaggtgggggctggaggtgctggtagctgaggggacgggcaagtgagaggggagggagggaagtcctgggaggatcctgagctgctgttgcagtctaacccactaatcagttcttagattcaggggaagggcaggcaccaacaactcagaatgggggctttcggggagggcgcctagtccccccagctctaagcagccaggagggacctgcatctaagcatctgggttgccatggcaatggcatgccccccagctactgtatgcccccgacccccgcagaggcagaatgaacccatagggagctgatcgtaatgtttatcatgttacttccccacccctacattttttgaaataaaataaggaatttt

SEQ ID NO: 14292 - protein, 160 aa, Homo sapiens [sequence omitted]

SEQ ID NO: 14293 - DNA, 2354 bp, Homo sapiens
  CDS (8)..(2353)
aaaaaagatggtggaggaggagaacatccgcgtggttcgttgtggcggcagcgagttgaactttaggagagctgtgttctctgcagattctaagtatatcttctgtgtctctggagactttgttaaagtttacagcacagttacagaagagtgtgtacacatactgcatggacacagaaatctggtgactggaatccagcttaaccccaacaaccatctacagctgtattcttgttcccttgatggcacaattaaactgtgggactatatagatggcatcttaataaagactttcatagttggatgtaaacttcatgccctctttactcttgcccaagctgaggattctgtctttgttatagtgaataaagaaaaaccaaatatatttcagctggtttcagtgaaactgccaaaatcctcaagccaggaagtagaagccaaggagctgtcctttgttttggattacataaaccagtcacccaagtgcattgcctttggaaacgagggagtatatgttgctgcagtacgggaattttacttgtctgtttattttttcaaaaagaaaacaacatcaaggtttactttatcatcatcaagaaataagaagcatgctaaaaacaattttacgtgtgtagcatgtcacccaacggaagactgcatcgcatctggtcacatggatggcaaaattcgtctttggaggaatttttatgatgataagaaatatacgtacacatgtttacattggcaccatgatacggttatggatttggctttttcagtgacaggcaccagtctgctgagtggcggtcgtgaatctgtacttgtagagtggcgcgatgcaacagagaagaataaggagtttctcccgcgtttaggagctactattgaacatatctcagtctcgcctgcaggagatttattctgcacttctcactctgataataagataataattattcaccgaaaccttgaagcatccgcagtaattcaaggcctagtgaaagataggagtatcttcactggtttgatgattgatccaagaactaaagctttggttttgaatggaaaacctggccacctgcagttttattctctccagagtgataaacagttatacaatttagatattatacagcaagaatatattaatgattatggtctgatccaaattgaactaacaaagactgcatttggctgctttggtaactggcttgcaacagtggaacagcggcaagaaaaggaaactgagcttgaattgcaaatgaaactgtggatgtataataagaaaacacaagggtttattcttaacactaaaattaacatgccacacgaagactgcattacagctctctgtttctgtaatgcagaaaaatctgaacagcccaccttggttacagctagcaaagatggttacttcaaagtatggatattaacagatgactctgacatatacaaaaaagctgttggctggacctgtgactttgttggtagttatcacaagtatcaagcaactaactgttgtttctccgaagatggttctttactagcagttagttttgaggaaatagtcacaatatgggattctgtaacatgggaacttaaatgtacattttgccaacgagctgggaaaataaggcacctttgctttgggagattgacgtgttcaaagtatctacttggtgctactgaaaatggcattctttgctgttggaatctgctgagctgtgcattggagtggaatgcaaaattaaatgttagagttatggaacccgatcctaattcagagaatattgctgcaatctctcagtcttcagtgggttcagacttgtttgtatttaaacctagtgagccaaggccattgtatattcaaaagggtatctccagagagaaagtccagtggggagtgtttgttccacgagatgtccctgaatccttcacctcagaagcttaccagtggctaaatagatcccagttttacttcctaacaaaatcacagagtttattgacattcagtacaaagtctccagaagaaaaactcacaccaacaagcaaacagctgctagcagaagaaagtcttcccacaaccccattttatttcatattgggaaaacacaggcaacagcaggatgaaaaactaaacgaaactttagagaatgagctggtacaactacccttaacagaaaacatacccgcaattagtgagcttcttcacactccagcccatgtcctgccatctgctgctttcctgtgctccatgtttgtaaattcattgctgctgtctaaagagactaagagtgctaaggaaattcctgaagatgtagatatggaagaagaaaaagaaagtgaagattcag

SEQ ID NO: 14294 - protein, 782 aa, Homo sapiens
MVEEENIRVVRCGGSELNFRRAVFSADSKYIFCVSGDFVKVYSTVTEECVHILHGHRNLVTGIQLNPNNHLQLYSCSLDGTIKLWDYIDGILIKTFIVGCKLHALFTLAQAEDSVFVIVNKEKPNIFQLVSVKLPKSSSQEVEAKELSFVLDYINQSPKCIAFGNEGVYVAAVREFYLSVYFFKKKTTSRFTLSSSRNKKHAKNNFTCVACHPTEDCIASGHMDGKIRLWRNFYDDKKYTYTCLHWHHDTVMDLAFSVTGTSLLSGGRESVLVEWRDATEKNKEFLPRLGATIEHISVSPAGDLFCTSHSDNKIIIIHRNLEASAVIQGLVKDRSIFTGLMIDPRTKALVLNGKPGHLQFYSLQSDKQLYNLDIIQQEYINDYGLIQIELTKTAFGCFGNWLATVEQRQEKETELELQMKLWMYNKKTQGFILNTKINMPHEDCITALCFCNAEKSEQPTLVTASKDGYFKVWILTDDSDIYKKAVGWTCDFVGSYHKYQATNCCFSEDGSLLAVSFEEIVTIWDSVTWELKCTFCQRAGKIRHLCFGRLTCSKYLLGATENGILCCWNLLSCALEWNAKLNVRVMEPDPNSENIAAISQSSVGSDLFVFKPSEPRPLYIQKGISREKVQWGVFVPRDVPESFTSEAYQWLNRSQFYFLTKSQSLLTFSTKSPEEKLTPTSKQLLAEESLPTTPFYFILGKHRQQQDEKLNETLENELVQLPLTENIPAISELLHTPAHVLPSAAFLCSMFVNSLLLSKETKSAKEIPEDVDMEEEKESEDS

SEQ ID NO: 14295 - DNA, 2195 bp, Homo sapiens
  CDS (6)..(2195)
atgaaatgggtcttggcaaaactattcaatcaattacattcctctatgaaatccttctgactggtataagaggacctttcctgattattgctccactttctactattgcaaactgggagagagaatttcgtacgtggactgatattaacgttgtggtttatcatgggagcctgattagcagacaaatgatacagcaatacgagatgtacttcagggattcacaggggcgtatcattcgaggagcttacagattccaagccatcatcaccacttttgaaatgattcttggaggctgtggagagcttaatgcaattgaatggcgatgtgtgattattgatgaagcacataggttaaaaaataaaaattgtaaactcttagagggcctgaaactcatgaatctggaacacaaggtgcttttgactggcacccctctccaaaatacagttgaagaactatttagtcttcttcactttcttgaacccttaaggtttccttctgaatcaacatttatgcaagaatttggggatctgaaaacagaggaacaggtacagaaacttcaggttatcctgaaaccaatgatgttgagacgattaaaagaagatgtggaaaagaagttggcacctaaagaagaaaccatcattgaagtagaacttactaatattcaaaagaaatactaccgggctatcttggaaaagaacttttcttttttatccaaaggagcaggacaaactaatgtacctaacttggtcaataccatgatggagctcaggaaatgttgtaatcatccatatcttataaaaggtgctgaggagaaaatacttggagaatttagagatacttacaatccagctgcttctgattttcatcttcaagcaatgatccagtctgctggtaaattggtccttattgataaattgcttcccaaaatgaaagccggaggtcataaagtgctcatcttctctcaaatggttcgttgccttgacattctggaggactatctcatacataaaagatacttatatgagcgaattgatggcagagtcagaggaaatcttcggcaagctgctatagatagatttagtaaacctgattcagatagatttgtttttctcctgtgtacccgagctggtgggttgggcatcaacttaactgcagctgatacatgtataatttttgattctgattggaatcctcagaatgatcttcaggcccaagctcgttgccacagaattggtcagaacaaagcagttaaagtctacagactggtaactcgtaactcatatgagagagagatgtttgaccgagccagtttgaaactgggcctagataaagctgtgttacagagcatgagtggaagagaaagtaatgttggtggtattcagcagctttccaaaaaggaaatagaagatctgcttcgaagaggtgcttatggtgctattatggaggaagaagatgaaggctctaaattctgcgaagaggatatcgatcagattttactacgtcgtacaaaaactattacaattgaatcagaaggacgtgggtcaacatttgccaaggcgagttttgtggcatctggaaaccggacagatatttctttagatgatcccaacttctggcaaaaatgggctaaaaaggcagaaatagatatagaggccatcagtggcagaaacggcttggttattgacactccaagaattaggaagcaaacaagaccttttagtgccacaaaagatgaattggctgaattatctgaagctgaaagtgaaggagatgaaaagcccaaactccggagaccctgtgaccgttccaatggctatggaagaactgaatgctttagagttgagaaaaacctgctagtttatgggtggggccgatggagagagattctatctcatggccgtttcaaaaggcagctaaatgaacacgatgtagagataatttgccgagctctcttagcatattgccttgttcactaccgaggagatgagaagattaaaggtttcatatgggatctcattactccaactgaagatggacagacacgagagctacagaatcatctaggcctatcagctcctgtacccaggggtcgaaaagggaagaaagtaaaaactcaaacaagctcatttgatatacaaaaagcagaatggcttcgaaaatataatcccgagcagctccttcaagatgaaggctac

SEQ ID NO: 14296 - protein, 730 aa, Homo sapiens
MGLGKTIQSITFLYEILLTGIRGPFLIIAPLSTIANWEREFRTWTDINVVVYHGSLISRQMIQQYEMYFRDSQGRIIRGAYRFQAIITTFEMILGGCGELNAIEWRCVIIDEAHRLKNKNCKLLEGLKLMNLEHKVLLTGTPLQNTVEELFSLLHFLEPLRFPSESTFMQEFGDLKTEEQVQKLQVILKPMMLRRLKEDVEKKLAPKEETIIEVELTNIQKKYYRAILEKNFSFLSKGAGQTNVPNLVNTMMELRKCCNHPYLIKGAEEKILGEFRDTYNPAASDFHLQAMIQSAGKLVLIDKLLPKMKAGGHKVLIFSQMVRCLDILEDYLIHKRYLYERIDGRVRGNLRQAAIDRFSKPDSDRFVFLLCTRAGGLGINLTAADTCIIFDSDWNPQNDLQAQARCHRIGQNKAVKVYRLVTRNSYEREMFDRASLKLGLDKAVLQSMSGRESNVGGIQQLSKKEIEDLLRRGAYGAIMEEEDEGSKFCEEDIDQILLRRTKTITIESEGRGSTFAKASFVASGNRTDISLDDPNFWQKWAKKAEIDIEAISGRNGLVIDTPRIRKQTRPFSATKDELAELSEAESEGDEKPKLRRPCDRSNGYGRTECFRVEKNLLVYGWGRWREILSHGRFKRQLNEHDVEIICRALLAYCLVHYRGDEKIKGFIWDLITPTEDGQTRELQNHLGLSAPVPRGRKGKKVKTQTSSFDIQKAEWLRKYNPEQLLQDEGY

SEQ ID NO: 14297 - DNA, 2438 bp, Homo sapiens
  CDS (82)..(1026)
gcgcgcgtgagctgagccggtgggtgagcggcggccacggcatcctgtgctgtgggggctacgaggaaagatctaattatcatggacctgcaacagtttcttatgtgcctgtccctgtgcacagcctttgccttgagcaaacccacagaaaagaaggaccgtgtacatcatgagcctcagctcagtgacaaggttcacaatgatgctcagagttttgattatgaccatgatgccttcttgggtgctgaagaagcaaagacctttgatcagctgacaccagaagagagcaaggaaaggcttggaatgattgtagataaaatagacgcggataaagatgggtttgtgacggagggggagctgaaatcctggattaagcacgcccagaagaaatacatatatgacaatgttgaaaaccaatggcaggagtttgatatgaatcaagacggcttaatctcctgggatgagtacagaaacgtgacttatggcacttacctggatgatccagatcctgatgatggatttaactataaacagatgatggttagagatgagcggaggtttaaaatggcagacaaggatggagacctcattgccaccaaggaggagttcacagctttcctgcaccctgaggagtatgactacatgaaagatatagtagtacaggaaacaatggaagatatagataagaatgctgatggtttcattgatctagaagagtatattggtgacatgtacagccatgatgggaatactgatgagccagaatgggtaaagacagagcgagagcagtttgttgagtttcgggataagaaccgtgatgggaagatggacaaggaagagaccaaagactggatccttccctcagactatgatcatgcagaggcagaagccaggcacctggtctatgaatcagaccaaaacaaggatggcaagcttaccaaggaggagatcgttgacaagtatgacttatttgttggcagccaggccacagattttggggaggccttagtacggcatgatgagttctgagctacggaggaaccctcatttcctcaaaagtaatttatttttacagcttctggtttcacatgaaattgtttgcgctactgagactgttactacaaactttttaagacatgaaaaggcgtaatgaaaaccatcccgtccccattcctcctcctctctgagggactggagggaagccgtgcttctgaggaacaactctaattagtacacttgtgtttgtagatttacactttgtattatgtattaacatggcgtgtttatttttgtatttttctctggttgggagtatgatatgaaggatcaagatcctcaactcacacatgtagacaaacattagctctttactctttctcaaccccttttatgattttaataattctcacttaactaattttgtaagcctgagatcaataagaaatgttcaggagagaggaaagaaaaaaaatatatgctccacaatttatatttagagagagaacacttagtcttgcctgtcaaaaagtccaacatttcataggtagtaggggccacatattacattcagttgctataggtccagcaactgaacctgccattacctgggcaaggaaagatccctttgctctaggaaagcttggcccaaattgattttcttctttttccccctgtaggactgactgttggctaattttgtcaagcacagctgtggtgggaagagttagggccagtgtcttgaaaatcaatcaagtagtgaatgtgatctctttgcagagctatagatagaaacagctggaaaactaaaggaaaaatacaagtgttttcggggcatacattttttttctgggtgtgcatctgttgaaatgctcaagacttaattatttgccttttgaaatcactgtaaatgcccccatccggttcctcttcttcccaggtgtgccaaggaattaatcttggtttcactacaattaaaattcactcctttccaatcatgtcattgaaagtgcctttaacgaaagaaatggtcactgaatgggaattctcttaagaaaccctgagattaaaaaaagactatttggataacttataggaaagcctagaacctcccagtagagtggggatttttttcttcttccctttctcttttggacaatagttaaattagcagtattagttatgagtttggttgcagtgttcttatcttgtgggctgatttccaaaaaccacatgctgctgaatttaccagggatcctcatacctcacaatgcaaaccacttactaccaggcctttttctgtgtccactggagagcttgagctcacactcaaagatcagaggacctacagagagggctctttggtttgaggaccatggcttacctttcctgcctttgacccatcacaccccatttcctcctctttccctctccccgctgcc

SEQ ID NO: 14298 - protein, 315 aa, Homo sapiens [sequence omitted]

SEQ ID NO: 14299 - DNA, 2196 bp, Homo sapiens
ggagagatggggtttcaccatgttggctaagctggtctggaactcatggcctcaagttatctgcccacctcagcctcccaaagtgctgagtaagccaagttttctaatagccacattagacaagtaaaaggaaacaggttaaattcattttaacatgttttacttaacccaatgtatccaaaatagcatttcaacatgtcatcggttttttagttttttttttttttgagatagtgcttcgctttgttgcccaggctggagtgcagtggcacaatctcggctcactgcaacctccaccttccaggttcaagtgattctcctgcctcagcctcccgagtagctgggattacaggcacccgccaccatgcccactaatttttgtatttttggttagagatggggtttcgccatgttggccaggctagtctcaaactcctgacctcaggtgatccacccacctcggcctcccaaagtgctaggattacaggcgtgaggcaccgtgcctggcgtcatcggtattatttaaatgaattatgttacgttcttttgtgctgtcttcaaaatctgttatatattttacacttacaccaaatctcaattaccatggtacatttttatctgaaatgcttgacctttattttgatttcataaaattcatagttggagaagtagattcacatatccaagttgttccaattatataatagttttccaaaaactgagatgggtgtccattttttttttaagtaaagatgcaggtctggttatgttgaccaagttgctgggttgttttgttttgttttgagacagagtctcactttgtcacccaggctggagtgcagtggcatgacctcagctcactgcaacctctgcctcccaggttcaactgattctcttgcatcatcctcctgagtagctgggactacaggtgtatgccaccatgcctggctaattttggtatttttctcagagacggggtttcaccatgttgggcatgctggtcttgaactgctgacctcaggtgatccgcccacctcggcctcccaaagtgctggtattacaggcatgggccaccacacctggcctcagctgttcaattaaaagtaaatacaacttaaaattctatgtttcattggcagtagtgcaacattaatactgagtagccacatgtgattagtggctatggtattggacagggaaggtacagaatacttccatcaacatagaaaattctatcagtctagctctaggggcagatagtccttccactgacttgggcaagtcactctacaaatggcatctacctcacatggttatggtgagaattcagcgtatgtatgtacatgcaggcacacaatatgcacacagacacataacatagtacaccctttcctgaaaagcctgacacatggagctcaaacatgagtgccacccacccctgggcagcaccaagatggctctagtctgggtgcctttgtctcacccccatgcctttgctcggagtgtgctcctcatttttctgccactttgaccctgtctctgatttggtcctgtctgacatcactgctatatgctttgctcctctcaatttcctctgccctcatgccagcaggagtcatgccagagatcatatctgagaaagcaagacaattttgtgtgtgtgtctgtgcccatagaggagtgctggttgtgttgatatagttgtagattggttgtgtttacacagttgtatatattgacacccttgagtgttatgacttcttttgggggtggtcgccttttaaatcataacttttaatgggattccattttagtctttgtgaagacataaggttgttggcaggcatctgtccctgggagcatccaagcagaaaagactaagactcccttgtagacagatcactggccgccactgaagtgtgtctgcatggcaccacagggctggaagacccttgaaggcaggaattcaaggaaatgtatgatgaattttggcattgccatcaaaagcagaacaggcatggaaaacttgggtgagtgggcgaggcaacctcctcaccacagcagagttccatccatgcctggataatgagggagggatttgtgtccaatgcagtggggaaccatgaaggacacatcaagggtgtggttggcctgtggtgctctttggaggaatgaataaaaatgaatagaaatcct
